United States Patent Application Publication US 2008/0113342 A1 - sequence listing, part 3

SEQ ID NO: 7193 - DNA, 557 bp, Arabidopsis thaliana
gaggatcccctgctggtgactgccgtgctgttttgagcgttggaggattcgcggaggccttgacttctgaccaccgcccttccagagatgatgaacgaaacagaattgagagctcggtaagaattcttgcaaaagaagttactgttaggttttatcatgattacatggttctgattacgataatcctgcagggcggttatgtggatacattcaatagtgtttggagaattcaaggatcattagcggtatctagaggaataggagatgctcatctcaaacaatggataatatctgaaccagagataaatattctccgaatcaatccccaacacgagttcttgatcttagcatcagatggtctatgggacaaggttagtaatcaggaggcagtagacatagctcgaccattttgcaaagggaccgatcagaaacggagtgcattgctggcttgcaagaagctcgttgacctctctgtatcacgaggctccttggacgatattagtgtgatgttgattcagttgtgccactcttctgaccataggagaaatgtagagaca

SEQ ID NO: 7194 - DNA, 1003 bp, Arabidopsis thaliana
catgacccaccaatccctggaaccaagccggtactgttattactccgacacgacccgggctttttaaagatagcccaagaaggcccaatgattgaaatgtgcaatgtttgatacattgatgtttgtgatcttcgctcaaaccctacaataaaactttggttcctccgaatttcgagttcttgttcttcccaaggcccctacttcggccctagcatcaaccattgtcgttttaaagctccaggttttcatggccaagaaagaagtaactatcgttgagatcttctgaaattaatcagtcttgaagtctctggagattgtacgtttctcttcttcctttcctcgtcggttttaatggattccgtttgcctgatttgcagtttctgcttcaccgtgaaatcgaaactcgttttgctcttaaacaaatattatgcatgcgtttcaatttgggtctttttcttgacaatattggttctgtttggattaagaaattgaaaattagttttgtagctgagccttttctcttgtgtgtataggaactgagctatatcagtagtgtatctagcatatttgattaatgttccttcatgttgttcttattgaagctgcttccattggttttgtgattgagtgcaggtcttataacatggactccatggatattgatcaaagtaacataggtgaatcgcctcaccttctgctgagaccagtaagtccattggaatctggtgaaggtttaccttatgctcctgagaattggcctaatcctggagatacttggcattggataggttggaccgagaattagcggtaaaggcgtacttcgtggatagatacttatatcctcctaagtatcttcccggtttagatactgaaatattgcggaaaaataaggtgtttaggagcaggctctcgctccaacgatatattcgtgtacacttccctgaagcggatgtcaaaagttctttgcttctttcagctggagaatccctgcagagatggcaag

SEQ ID NO: 7195 - DNA, 562 bp, Arabidopsis thaliana columbia
  unsure (1)..(562): unsure at all n locations
nnnnnnnnnnnnnnnnnnnnnnnctaaagtaaagcatttgtccgaattcggacataatcaaaaaagcttaattaagatcaatttgatctacatctctttaaccaacaatatgtaagatctcaactatcgcatccgtggattaattcaattataacttctctctaacgctgtgtatcgtaacggtaacactgtagaggggagcacattgatgagcacgtcagacgatatccataacaccacagccactggcaaatgcccgttccatcagggcggtcacgaccagagtgcgggggcgggcacaaccactcgcgactggtggccaaatcaacttcgtgttgacctgttaaaccaacattctaatcgttctaacccactgggtgaggactttgactaccgcaaagaattcagcaaattagattactacggcctgaaaaaagatctgaaagccctgttgacagaatctcaaccgtggtggccagccgactggggcagttacgccggtctgtttattcgtatggcctggcacggcgcggggacttaccgttcaatcgatggacgcggt

SEQ ID NO: 7196 - DNA, 785 bp, Arabidopsis thaliana columbia
cttcatttggattagattgttcagtacaaaactctatttctggcatgtcaataaataacaaatgctaattttggctcttaatcttgttgatagaatactaaacttgcaatgctttttacactaatctttatctctttatatatttatttttaaaaactcttctttcctttttttctgatttaaagtacaaaaaaaaaacaatacatctttccattgaactagaagaaaacattttcactgtccttttgaatcagaagaagaaagagaaaaaaaagagatggagagaaacacgccggtgagaaaccctcacacttccaccgccgatctgctttcttggtcggaaactcctcctcctcctcaccactcaaccccttccgccgctcgttctcaccaggtccgtttcttcaacaaatgttctcactttctctttctatagagagaagctgaggttttttcttctttcttctttcattttcagccgtccgatggaatcagcaagattctaggcggtggtcagatcacagatgaagaagcccagtcgcttaataagctgtaaaagattcatttaatctctatctctcattgcattaccagatctaataagtatacctggatttgttttttgtattacaactgaaacttaaagtttaaagctttgatcttgtgattcccaaaatggtttctttgaatgatgaagtcacttctttttcttagtgataaatttttatgaaagggattggtcaaatgctttttggcttttctgagaagttttagtgttaatagta

SEQ ID NO: 7197 - DNA, 643 bp, Arabidopsis thaliana
acatttctaaaatatagaatgacattttagaggtatacagtcaaccaattttcgcggctgcggagcagatcgctaaccaagaaatatccggaaaataagtttatcgccagattctacggattcaaactgccattgttgcgaggagagacggtgagattgaacccaatgaggatgtgtttgagaacgatgtacgtgttgatcacaacgggagtggcagtgatgtttccctacttcaatgaagtattaggagtggtgggggcacttgcattttggcctctggcagtgtattttcctgtggagatgtgtatattgcagaagaaaatccgaagttggacgcgaccatggcttcttcttagaggtttcagctttgtgtgcttgctcgtctgtctcttgtctcttgttggatctatttatggacttgttggagctaaattcggatgattagccaatgccgatgtgatgtagcgatcctactctagttaattgataaataaatgtgagatccgttacaacttatgtaaatgtaattagtatttagtatgaaattttgatttttaatgaattaactctaaagacgaattcctaccatgttttatattttaaaactaccataacaatcaaggcccaaaattattggaaaaga

SEQ ID NO: 7198 - DNA, 874 bp, Arabidopsis thaliana
aaattcattgctgaagcactgtaaagagaataaaaaaatatcaaagaggagggagggacaaacccgcaatctattagaccccagttcaagaatctgcaagttgtgtaagtgttcaatctccataatcttgttaacttcatttttagacacatagagttccttcagtgtgctagaggccttggatattccttccaaagaagtgatttcattgaaagatatgtcgtaaaccaaaagcttcgtgaatatgctgacatctggtactttcgctagcttgttatctctgagaactaactcctgcataaattatagcaagaaacactcttctttatccactgcccacaaataactatgcctctcagactatcaatgccaattttcaattctagtgaaaatcaaaagtgaaatgcaaaaggcaattagccaaaatcataacgttccacggccaaaaacaaaatcagatgcctagatatttcaccatttacaaaatcactcaaaagataaatcagagagtcgagaatcacctcgagatcggacaaggcgtcccagtgagacaacggttcgacggcggaatcatcaattaggttttggcggagagaaagcttcttaagcgtggagagctgagcgatcctcgagtccaatcccgacaaacggttcgccgtaaggtccagctcaatcaggttcggcggtaactcgaccgtatcgagactgtggagctgatagctagtgagatcgagaacattattcgaatcgccgatctcttccaatggctcgtcttccttctcactgttcatggtttttttggttcaacgtcgcgcgatgacgacaacgagctttgtggggaactggtcacactggcggacgttactagaggatc

SEQ ID NO: 7199 - DNA, 477 bp, Arabidopsis thaliana
tttaaagcttagaaaaagtgcagtagtattatgttaaagtattttaactccttacctgtaacttccgaagtctccggtttataccttgccgttctatatttctgtagaaaagaagttcaacagaaagacggtgagaaatgagaaattagcttagcagagaagcagtatgagatacaataacaaaatagtatatggataagaacaaacctgcaaatggctttttacatgataaatggtcaagccagggttattcaagagcttcagaacagccttaggggtggctcctatgatggaaattatagaagaatcagtgtacggttaacatccttgagcaattattttcaggaacaatagaaggagaaagcttacgcacgttcactaccacccaacctgattaacagcttcaacgaatgcctcgtgaagttctggtgtccaacgcataacgttgtttagatgttgctacactagatgatgagt

SEQ ID NO: 7200 - DNA, 561 bp, Arabidopsis thaliana
gactatccccaaagattagcaataaagattctctctttaacacctagctcatctagttttgaacgtaattggagtgcttttgaaggggtaagtttcttgcttttcttttatcttaaatattctttttgattttttgaaggatagctactgaattataagactttatgttgcagattcatacatggaaaaggaatagattagatgttaatcgacttaataatctagtatatgtccaattcaatgccaagttgttcaacaagcaacaaatgatcaaagaaaaaataatgatgtgatttaagatgataaagatgaaagagatgcagaagaatagtttgtagagccaagcgaaagagatgaagagcctaatggtgagcctgtttaccaaactccaaatgagaaacctagagaagatcttgaatctcatgaagagcatgatatcactattgatattgaatttgaatcagataatgagcaggtggtgaatgtggatgtgatcagaggacaagaagtttaggatttaagattacttttggttttcaaagatttaagattactcttagt

SEQ ID NO: 7201 - DNA, 743 bp, Arabidopsis thaliana
gccagtgtgctctaaagcttgctgaacgcatcggtgttactgccgcagcccgtgaactcagcctgtatgaatcacaactctacaactggcgcagtaaacagcaaaatcagcagacgtcttctgaacgtgaactggagatgtctaccgagattgcacgtctcaaacgccagctggcagaacgggatgaagagctggctatcctccaaaaggccgcgacatacttcgcgaagccatgaaatgaagtatgtctttattgaaaaacatcaggctgagttcagcatcaaagcaatgtgccgcgtgctccgggtggcccgcagcggctggtatacgtggtgtcagcggcggacaaggataagcacgcgtcagcagttccgccaacactgcgacagcgttgtcctcgcggcttttacccggtcaaaacagcgttacggtgccccacgcctgacggatgaactgcgtgctcagggttacccctttaacgtaaaaaccgtggcggcaagcctgcgccgtcagggactgagggcaaaggcctcccggaagttcagcccggtcagtaccgcgcacacggcctgcctgtgtcagaaaatctgttggagcaggatttttacgccagtggcccgaaccagaagtgggcaggagacatcacgtacttacgtacagatgaaggctggctgtatctggcagtggtcattgacctgtggtcacgtgccgttattggctggtcaatgtcgccacgcctttag

SEQ ID NO: 7202 - DNA, 511 bp, Arabidopsis thaliana
tccaacatttgaactaaataattccagaaactttgggaaaatttgaaagtttgattcataccaggtaagagagttcgtcgtcgagccatttgacgaaaggaacaacgtcttcaatgtctgaaaacgcagcgtttccgacttctttgatcaagaaccttatgaaatctccttgcgtttctacgtcggtttttatctgcaatgttcggtttaaagttaaatcaaaccggtttatgattttaaattttgaaagttacttggaaaaggacgaggaaaaagtggaatgatcagtcaattctcactgacgcaagaaagtcagagaaactaaaccgaaatttactgagccggttaaagagaaacttttaccgcgaggagataaaccgatcggttttcgatttctccgatcatgtctctggcgttggagttagcaagtattgcttccgcggcggcgtttccaccgccggtggaatctcttctcgagtttgtggagtctcttcgcatcaacgagtgataa

SEQ ID NO: 7203 - DNA, 435 bp, Arabidopsis thaliana
ccaatcaggtaataactaaagaaggtcacaaggttatggattactttgagaatgcttcttgtgaggcttgaaggtcctctggaagaaaaatatgcaacagcaggggcaggtgtgaacttttcaactgttgcagtgggaagaattgttgcaacaggatctctgcaacccaaggcaaaagatcaagtaggtctttactgactacaatagtgaacagcatttttgagatagcttatgaagtacttggttgagttgaggtaggagaagatctcagctgcttcctttgagtcaattacggtagtaggaaagctaccataagcactagcaactgctctagttctgtcatctacaaagacgcaaccagtacctcctttgctcttcacctcgtccctagcggatgacgcataatatgatccaccaacgttctcgcataacaca

SEQ ID NO: 7204 - DNA, 335 bp, Arabidopsis thaliana columbia
catcaacgatattaaggaaacaagttgaaaaagaagaatatcctcatgtgagtacttggactgcggttatagctcatatgtatcttgcgggaacaggaagtaatctttctgctgagttggttcttgagattgggttatatgtatcgtcataacagagttgatccacggaagcagagcaacgcacctttgcttgcaatgaagcctaatactcgggtgttgaacgttgctttgacgggttgtttgttgtttgggacgcccgaaaagctgcacagcttcttgctctgagtccggtgatcggtgttgtagctgctgctgtcttgttagtcatgatggct

SEQ ID NO: 7205 - DNA, 540 bp, Arabidopsis thaliana
aaagttatagagtttagacacgtagattcatagtatgtacgtacactactatgactttacgttgttaattcccaaagaaaatgttgcttatcatctaaaaagaaataaattgttgtgaaaacgaacaagtgaatctatcccataccaaattcaagtaccaataggcatacaaaataagttggttttcagagcattataatattaggttatggacccaattccatgctcgttgaggtcgacagcgtaacccttacggtaattgtacatgttagcctcttcaatcaaaatcaggtcattccaaggattttgaagcatgtacaactctataaaattcatcgcgtacagactgcaatctccggtagttgggttctgtgaaagacgttgattccttatataagtaaaaggagttatgagatagggcttctcgagataatccttacatgtcgctctcacgaggtatggtagcatctccagaattggaaggatttgtgacctaccacagactccgcgtcagagaaccaaatgaccatggttcaatag

SEQ ID NO: 7206 - DNA, 574 bp, Arabidopsis thaliana
ggtcttctcggtttttgtccactgcgggcaagactactatgcttaagtctgtactagcctcgatgcctacctacaccatgttctgcttcaaactccatgtctctctatgcaaaagtatccagtcagccctcactcgcttccggtgggattcatctacagacaaaaagaagatgtgttggatagcttggtcaaaaatggcaaagacaaagaaagagggtggacttgggttcaacgacatcaccaactttaatgatgcctgattggcaaaggtgagttggcgtcttctacaatcaccatctttgtccgttggctagaattcttctgggaaagtactacagaacttcgtccttcttagagtgtgttgtctctgcttcctcttcccatggttagagaggcatatgtacaggcatagatctcatcaaatctcagctgggcaaagtcattggatcgggctcatataccctgatttggagtgatcttggttacactctcttcaccacagtccaatgggcctgcactgaacattcaaaccatgacagtagacagcttatgtataaacacaaaacttgggata

SEQ ID NO: 7207 - DNA, 961 bp, Arabidopsis thaliana
cagtcgctcacttttgcagttgattccctttacgattagcgtgctacaatcgtatcaagtcacattcacacactcttgtgtatcttgttcaaaaaatgaagaagaacaaaatagtaaaccgaaaataatgctatttgacatataaatgcgaccgtattgatgcgggccaaatacaaatccggttaaaccagttaaagcgaaattggaaagtaataggaagtgattcaggtaaattaattaagtagtattaattagcgtaacattagccgggggattagacgactttgccaccgttgttaacaccttccttgccttctttctttcgttaccatttgcgtgatccctatctactttatcttcgccctccggattcttcaatattactaaatctgccatcatctcctcgatttcgatgacgatagagccgacgcaatcgccgtcttcggagccggaggttcactctggagaggacttcgttcacatcgatgaccctaggcctaccggcgatatctctttaagcgacacatagttaatgtggagaaggatgaactgctcgacgaagcggcggaggaagaatttagaggctccgattctgtgtttagcggcggcgatggcggtggagcggatgatgatggcggcgagtgttcatcggaggctactaaagtggagctaccggaggaattggcgaaaagtgttgtgattctgacgtgcgagtcaacagcggatggtggatcttgcgatgtgtacttggttggtactgctcatgtatcaaaggtaatcctcgttcttcgatttcatttggttctaagtttgcaaaggagctgtcttggaattgaactaatattttggtaactagtgaacggttcagagagtctcgttcttggaatctttggagaaagctgaaaattgcatgtggaattcaagaaatctatcaaacctttttggggaaataacgtgtttt

SEQ ID NO: 7208 - DNA, 592 bp, Arabidopsis thaliana columbia
gtttaccaaggggatgcaaaggaatgcttttgacagatttggagccacatggattgtagtagtcagtaacatatatggctttatattcattataatcacacacggccttgaaaactccccaaccatgggacattccgaccagacaccctttacgcaactccattggtaataccttgtctcggacaataacttcatcttccttcaccgggtcaaaatagtggatattacttgttacatgaatatcatccatagaacttccatagtttatgacacgatacaacaagtaagggttggtggtagaggaggaaaacatccgaagagtgtggcatctctggtgaaaagtaagaaatagacatcagaagaagaagacgaaggaaacagagattatatacaaaaactagaagagatttaccagaggaagtttacggagagaggccttggaagagaggcttagaagcagagacgacatagcttttgctttgatatgtgaaaaaatcaaaaagaaacaaaagggttttcacataggtcatcacaggaaaagtaaagaaaaaataattggtgcaagtaaagaatcttgtgccaaatttgatac

SEQ ID NO: 7209 - DNA, 717 bp, Arabidopsis thaliana
tcgtcatgagaggactgatcaattgcatgggctaaagtacttcagaggacaacaggaaatgggcttgtatcgccactatcctcgctattgtagttgttattgtgattcttttcccaatcctctttaacactctacttcgaccttgatttcaaaatgtaacttattgttttctccaaactccttttgttagagccctttcgatttcttgtattgaatccagagctgaagcgagagtttaatttgaagctctctctaaccattcttgctactgtaattgctttatatctaaaattttgggtgacatggatcgttttgtataactttatatggaaacctatgaggctatgacctatgagtacaactaaaacacaatgaatttacattttgagcttggatcattacctgtcatgaacattgttttattctgaactcatcagataaaagtgtctgaagaagctcctttaatctctcagcaccagggcctggtttcaaagcagagtcatccccgcggacagagcacggatcagcgccattttccgagctaccaatgcaccaagctcctgaggaaaaccgatgagtgcggcctaagagctctctatcgatcttgtctaatacaggatcgttcttgtggaactttcgagcaaatggggctttgcttttgaccatcttgtcgaaatccttcatcgataaagagtttgggtgttgctttggaggata

SEQ ID NO: 7210 - DNA, 459 bp, Arabidopsis thaliana columbia
ccgacataaaaaaacaaaacttgcctgtgtatcagtgtactttattatgttatggaggacttttacctggttatcagaagctgcattagcatgtaactctgcagatttcccacccaaaattcctccgacaaagcggcccggaaagcccaataacgcctctaacaactcctttacctcctccttgttttgccgctccaatccgctctttatcttcctctgaaaatcctagcatccgaaccatgaggtccaaaacctaggcgaaacatgaaacaaccgaagtatatcagagacatttctcatatgtgtatgtcacaaactggatttcagaataatatcaatgtctattagctctttgttatgattcttctggaagtatgtaaccagcaatttaataacgattcgcctgcaaagacacatgttggttcatcattgcatcagaacacctaattcagacaggag

SEQ ID NO: 7211 - DNA, 577 bp, Arabidopsis thaliana columbia
ccttttgtctttcattttttggccttgatacaaaacccgaatatgacatgtagaactgaaagtaattagtacagttactgatttctgctttttttagacagcatattttgtgggtgttcaagtagaagcaagttgtagaaatactgaaattaaagagctgagaccagagacgagacaactgagtgttgtcggtgcggttagagttgcggttagaagctcattgatggtgacatgctaatatacgccagaaagaaaatgcgtcgacttagagaagagtctaaagtgaattggacatacatctttactatatgtataatcatttgacatactacattaatataagtctttattttaccgagtatgtgcactcaagagaacgtgaatcgagttagaaataggtcatttattgaatgcggataagtatcaagaggtaagaactagttagtttcatcaagttaatatgattagatgagtatattattaagtgttccgaatgtcgaaaatccaaatgatctcggtttcactttacagattccgtattttcaccttcaggagaatgcacatcgtttatagaatg

SEQ ID NO: 7212 - DNA, 432 bp, Arabidopsis thaliana columbia
gattattgctctttagtctgactatgaatctgatagtatatagtttagttcgatgtgaatggataggtaattgggtttgttagcactaatcagttagttaatgtgtaattaccatagtaatacttgtaaggttaagagttctaataaacaattttcacattattctctgttcttggcttctcctattcagagttaataatatagtacttggcttaggccgaactgcaaaagaactcctcagcgaggttgtttccttgaaatttattatcgtcgtttgctgttgtcactgaagtcacaagtacatagcaatttctctgatttgaatttcagatctcggtagtgttttgtggaaatggtatagttagagtcgatgcgatgcgcgtcacatgactcttttcggttagccgagaaagtataaccggactgatactg

SEQ ID NO: 7213 - DNA, 487 bp, Arabidopsis thaliana columbia
tctttaggtacttgtgtgaaagctcccttctttgtggagaaatggcaactgagaatcctattaggatatctggaagcaatgaaagatggtctaattctaggaaggtttctgttcctaatcgaagtggcagtgcgccaccgaacatggaggggtcttttctagctgtggataatctattgtcacgacagggcggctcagtttacaataacttgatgctaccgcgttacgggtttgaggagcccgtgaccactcatccttcttctaaacatagccttaaccgcataccttctccaccgatttattaccctactgagtatcagttcatagacaatcgtgtaggtagatttagaagtaaccagggattgaatagagttaattctcccattcatttgtcccaaggcaaactttctactcataaggaagtttctgaggatgaaagctcccaacagtatctgttaatagtgttcagataggacagatggattga

SEQ ID NO: 7214 - DNA, 859 bp, Arabidopsis thaliana
ataccttccatcgttacgtttatgaaaagctttgtaaagttgttaaaaacacttgtaactcatagtatatacttgatggcacacacgataatgctaatcgttattggtaacattttctatcattgtcataattgtaattttatctccaaagtatcgtcttaacacaaattgcatcattatacgtatcagtgcgttcatgaaattttatctacttggaaataataatcaggtcggcgttttggtttggccacaaagaaaaagtatcttaaaaagctagatccatttacaagacaagaagacacaaacccaaaagtaggagatattacctcttaccactaatttataacacccacaaaaacaaaacaaaacaaaacaaaaagcaaaaaaagttacctaaaaaaaaagattaattctaaaacaagaaaatctataaacttagaagaaaacccctaatttaacatcaagtggttaatagagaatatatattatagagttaaaaaaaaagttttaaaattctctagggtctacaaaaatggaaacgccaggtggcgatttagtccaatcaccaacaacaccatcactatagtcatctccaagccgctttatacaccaaagatcctcgtcacacgatagcactttccaatgtggtattcctcgccgcaacgggtcttctccggcaacttccgccgccacgacaccacaaccacctgccttagccaagttatgcgcgtgagcacacaaggatttcaccatcttcaccgcgcgtggaccttctcctccgattccatacataaaatgaagtccaaaaggttcgaaaacggacggtatcgaaggtagtttcagaaacggcaacgtttta

SEQ ID NO: 7215 - DNA, 627 bp, Arabidopsis thaliana
tggaatatcagtctgaacaacaaaacttccatacctaagctttcccagcacgatgccagcatcatttgatcgctcaagcccaatctcttcgggggacataatttcataggtacccttgtgcttcagcattccatcctaaatagagtgcatgaataaagaccaaacaatactcattaactaagttatgcagaagattgaaagagtaaatatgcaagtcaagagttgagaacctaatgatgattccttcattaaattcttttcaggctgagtaaatgctataagggtaagtttatcttgcaagaactaaaattccagactaggagagttacatttctcccgtttaataaaaaagtgaagcagactttagtcacagagacactaagaatagcataaattacgattgattaactgacctgatgaataccactttcatgcgcaaaggcgtttgctcctacaatagccttatggggctgcgtttgcataccagtgtactcctcaacctgagaaaatgagaatagaccttaaaaaaaaggaaaatcgccaaataagaaaaatatacttttgtttcccagagttaagaatgaagttcaaatgtgtacatcttgcttgtcatacaatgtgccgggt

SEQ ID NO: 7216 - DNA, 563 bp, Arabidopsis thaliana columbia
aacgagtttcaccaaggcaaagaagtacatgtgcctttcatgagaagctatgaaagtcaatatataatggcttgcgatggtttcaaggtccttggactaccataccaacaaggccttgatgataccaaacgaaaattctcaatctatttctatcttcccgactagaatgatggattggatagtcttgtcaatgattatgatagatagtcacattacgagatatgaagttgaagttgctgatttcagaattccaaagtttaacatctcttggaattttgagttttcggaacttgagtcatcgtcgttgtaccatcgtctggattatctaattaagtctgatagactaaaatgtaactgctacataataaacaatttcttaacaaaaaattctatctccggtgattttcttgtggaatttcatcgctagggcaaaagctctcagacacattttaattgtataacaagtaactaagatctaaggtttatccatttcaaagaaataaaaaagtattagcttaagaccttggctcatagagttagggcaccaacttccttaagtggag

SEQ ID NO: 7217 - DNA, 498 bp, Arabidopsis thaliana
caacataatcaaatcaaattctcttgcaatccctctacaaagtgatcaacgtaaccagtcaataatccaggactaactaaaatctccttcaatttggtgtggttactcctcactaacttcccaatgtcactgtctttatccatcacagatttgatagcattgctcaagctctcctttgaaaaccatcctgttttttccctcggcacttctacagagacctcgaattcctcggtcatcaatcttgtgaagagaacttgatcacttaaaaatggaatcaaaaccatttggcaatcactcaccaaagactcccatattgttccgggaccacaatggttcacaaagcaacctattgatggatgagccaatatcaaaggttgttgcaccatcctccccaaacaacaccacgatctttcacccgctcctcgaacccttctggtaaccttcttggaccgttgatgatcccttggtggctttaccgctaaagaaatggtaacctgt

SEQ ID NO: 7218 - DNA, 824 bp, Arabidopsis thaliana
aaaaatctataaagtttaaatctctcaacttttggaatacaccggtgtactcccccaataaaagccaaattggttcaattagtacctcaagtaaggcaaattatcaatgggtcaaaataaaacaattttgtccaaaacacaaactatacagtattttaaaacatgaggggtggtaatatccatatccataccttcttcgaaactatctctcttctctgggagagaaaaatggagatatcagttgcatgcgtaacagtttctgtagttgtagttgttgtgtcatggtgggtatggagaactttacagtgggtttggtttaaaccaaagatgcttgaaagttacttgagaagacaaggtcttgccggaactccttacacacctcttatcggtgatttgaagaggaacgtcaacatgttgacggaggcaacatccaaacccatcaaactaaccgaagatatcacacctcgtgtcctgcctcatcccttccaaatgctcaagactcacggtatgtgtcctggttggccttttgcttcctctctgttttaaactgttgatcaagagaaaaagagtttcaaattttgtatatctatgtggtttgaaacaggaaggactttctttacatggcttggacccaaaccaaccatcaccataatggatccagagctaatcaaagaagtgttcaacaaagtttatgattatccgaaggcgcaaacgtttcttttgggcagactaatagccactggaatcattaattacgatggtgataaatgggcgaacaccgaagaatcatcaccctgcttttcatatagagaagacaaggttta

SEQ ID NO: 7219 - DNA, 699 bp, Arabidopsis thaliana
tttctctttgatcgagtcaccacaggccttaagaactgcgacgtcattgccataaggacatgtgcagaaatcgaaggtaacttatgtgatttcatcgaaagacaatgtcagagaaaagttctcttaaccggtccaatgttccttgatccacaagggaagagtggtaagccgctagaagatcgatggaataattggttaaacggatttgaaccaagctcggtagtgtactgtgcgtttggcacccatttctttttcgagatagatcaatttcaagaactctgtttaggaatggagctcacgggtctaccttttttggtagcggttatgccaccgagagggtcttcaacgattcaagaagcattaccagaagggttcgaagaacggattaaagggcgtggaattgtttggggaggatgggtggaacaacctttgatattgtctcatccatcaataggttgctttgtgaaccattgcgggttcggttcaatgtgggagtctttggttagtgattgccagattgtgtttattccacaattggttgatcaagttctcacaacgagattgttgaccgaagaactcgaggtctccgtgaaagtaaagagagatgaaattactggttggttttcgaaggagagcttgagggatacggtcaaatctgtgatggataaaacatagtgagattgggaatctagtgaggag

SEQ ID NO: 7220 - DNA, 593 bp, Arabidopsis thaliana
tccaccaaaaccgcaaaatcatattttcccgacaacaacgtaaaatcatgtttttccgccaaaactgcaaaacatatttttatctcaaaaccgtaaaatcatattttctgtcaaaaccgtaaaaacatgtgtcccaccaaaaccgtaaaatcatgttttcccgccaaaactacaaactcatgttttcccgccaagaccgtaaaatcatgttttcccgccaaaacccgcaaaagcaaatttcacaccaaaaccgtaaaatcatgttttctcggcaaaaccgtaaaatatttttccccgccaaaaccataaaatcacattttcccgccaaaattgtaaaatcatattttcccgccaaaatcgtaaaatcaatgcaagctcttattgtccatctaaactccacgtcggcaaacttgttcttccaagctttgatgtcatgcagccaattgagaatatcaaatcgattcacttttccatgtaaggcatccaccaaaatcttgcaatctccttcaaatattattcttgtgtattcgtgaccccagaggtgttgcattgcagaaattagtgatttacattccgctccagtgaatttgaac

SEQ ID NO: 7221 - DNA, 529 bp, Arabidopsis thaliana
taaggaggccgaagatggtgaaatctctgaagaaggtattacaagtgatggaaaagaagcagcagaagaacaagcatgaaaaagagtctctaagattctgtagaaaagattgtagtccggacatgaactgtgatgtgtgttgtgtttgtcactggggtggagatttgcttctttgtgatggttgtccttcagcgtttcaccatgcttgcctcggtttgtctagtcttcccgaggaagacctctggttctgtccttgttgctgctgcgatatctgtggatcaatggaatcacccgcgaacagcaagttgatggcttgtgagcagtgccagagaaggttccatctcacgtgtttgaaagaagactcttgcattgtttcgagtagaggctggttctgtagtagtcaatgcaacagagtcttttccgcgcttgagaatctcctaggaagtaaaattgcagtaggcaacgacggtgatttggtctggacattgatgagagctccgaacgaaggtgaacactatgatgatgaaca

SEQ ID NO: 7222 - DNA, 568 bp, Arabidopsis thaliana
tctgactgaaactcagcgtttttgcatgaaaactgtgaatagtctgaacttcctcgaatttacgtaaatcccagatcttgattttacgctctttaccggatgtagccatgagatgaccatttggatgaaatgcgacagatgacactggcccagggtgacactgcatctggacaagaggtgcttggctagtgggtttccacattgtgacagttccaccggaatgtcccaagccaacaacactattgtaaggattcacttccattacatctgttcggcctttacctgttcggatactagcgaccatgcctccatgggttacatcttgataatgtagctgcccagacatgtttactgatgcaagcaggaaatggttctttaggaaccgaagtctggccactggaccacgttcctgggatagacaaagtttagagtcaataaccaagaacactaggcatatgtttcttttgttcaacgaaatgtataatctcacctcaaacaatgcagctcagttccatctctcccataaatataagcatacctgccaaaattcgacaagataagatattag

SEQ ID NO: 7223 - DNA, 950 bp, Arabidopsis thaliana
gttagttgcatgagttacaatagcattatagatggatttttcaaagagggtgaaatggattctgcggttgcagcatacgaagagatgtgtggcaatggtatttctccaaacgtcataacttataccagcttgatgaatgggttatgcaaaaataacagaatggatcaagcattggaaatgagagacgaaatgaagaacaaaggtgtcaaactcgatattccagcctatggtgctcttatcgatgggttctgcaaaaggagtaacatggaaagcgcatctgctctgttctctgaactccttgaagaaggattgaatccaagccaacctatatacaacagcttgatttctggatttcgtaatctgggaaacatggtagcagcccttgatttgtacaagaaaatgttgaaagacggtctacgatgtgatctgggtacatatacaacactgattgatggattgttgaaagatggaaatttgatcctggcctctgagttgtacacagaaatgcaggcggtgggtcttgtccctgatgaaatcatttacacagtaattgtaaacggtcttagcaagaaggggcagtttgtaaaagtggttaagatgtttgaggagatgaagaagaataatgtcactccgaatgtccttatctacaacgcggtgattgccggacattatagagaaggaaatctcgatgaggcttttagacttcacgatgagatgcttgacaagggtattttacccgatggtgctacatttgatattctagttagtgggcaagtcggaaacctccaacctgtacgtgcagcaagtttgtagtctgccaaaaccagaccacattattgactgatgacttagctttggcttttcgtgagaccccgataatatgactgcttaaggtgtgcacttttcattttgcacggttgtagtataaatgttgttattcatgaaagagg

SEQ ID NO: 7224 - DNA, 475 bp, Arabidopsis thaliana
ccacatatatcaatatcacaaatcagtgaatcacaaatatcctcgtctgatgatcaaatcttaatttaatcaggggattaaaacaagagaggaaaagaaaagataataattaagtcaagattcgtataccaaggccgtatctaaaattggcatcacgcacgaatgaatattacaccaaacgtgacgcaattgaattcctcgttacgtatagtaatcgtatatttccttaattatacgaatacgatgtcgtatcggggcagaactggtcctgcaagaaccaaaaactctcctcgtcagtccacatgttgtccccaccaacacagccccaatcgttgaactctccgaaacccgtttgacccgacggatcataacctgacccgttcaccaccccacctcgaacgtccgaaaacgtctcagccggagaattcgaagacgttgctgacaattcagtagccggtacgaattgctgatgatg

SEQ ID NO: 7225 - DNA, 593 bp, Arabidopsis thaliana
gtaagatcaggaagttgaaaaggagatttcatgttcattgggagaaaatcagtgaagggaatgatccgaaatttactaggtctagtgattctgaagcctttggattttcttcgatgatttggggacaaggtgaatttggtaatgatgatggtatggataaggagatggtgaaggagcacgatgtaaacggaaatggcgcactgataaatgggactgctcgaatagcacaggagaacgagagtggggaggagatgttaaaggagcatgaggaaacgttaaatgagaatggtgcagaggagataagagacaacgacgagactgctcggaaagcacagcagctcgagagcgagacgcgcgaggagatgttgaaggagcatgaggaaccctttaatgagaatggtgcagagactataagagacaataacgggactactcaaatagcacagcagagcgtgacacgtagtgaggagatgttgaaggagcatgaggaagtggctaatactgaacttgtaaatgagaatggggcagcgaaaacaacagagaacgggactactggtggaaaagagagatatgatgacgatgatgatgatgag

SEQ ID NO: 7226 - DNA, 912 bp, Arabidopsis thaliana
gacccccttcgaaaacatgtcattcaaaataaagtacttgtgaaaagataaaactaaataatataaataattacctttaaacagaacaaaatcttctaaaacaacatttatattgaaattaagagtaatacattttagcaacaacaaaaaaattcatgtacaagatccatgtacatttaatgcctactgatatgtactttccccaaacgacaaatatctcttcttctttttttaacatcttaatcttatttatgattcacagagaaagaaaaagagtcaaaatcaaaataacagcttttctccacataaatccacatgtgtgtatactggttactcgactctatatatagtcctaaagctacaatgtttctccatcaaaagtatcaaaagaaagagaaacaacaaaagcaaatcctataattataatcatgagctctgtcacacagctattcaagaacaaccccgtgaaccgtgaccggatcatcccactagatttcaccaacaccaaaaccctacccgactcccacgtctggtccaaacccgaacccgaaaccacgagcggacccattcccgtcatcagcttgtccaacccggaggaacatgggctactacgacaagcctgtgaggaatggggtgtgtttcatatcacagaccatggagtctcacactcgttactccataacgttgattgccaaatgaagaggcttttctctttacccatgcatcgtaagatcttagccgttcgatctcccgacgagtccactggttacggtgtggttcggatctccatgttctatgataagctcatgtggtctgaaggattctccgtcatgggttcctctcttcgacgtcacgctacactcttatggcccgatgatcatgccgagttctggtaatatccaaattaatatc

SEQ ID NO: 7227 - DNA, 346 bp, Arabidopsis thaliana
  unsure (1)..(346): unsure at all n locations
cgtcacgagcttggccgttggtgatgcggtttctgaaatcaccacggtctcagaggaagcatccatcgaatagagagagcgagaacacatatatactgatatacatctcttgctatagcaaagtagctgtaataataatgacttctctgtaatcatttgtattaatgtttcatcaactaaagttaccaaaaataataacaatgttacaaacactcaatcacatcgagaanagtaaagtaaaattgtgaaaatttgtatagtacttaaaaagttaggaggaggaaaaagtgtacatcttattttaaaaacagacactacgcaaacaaccatggatctgacgacgatg

SEQ ID NO: 7228 - DNA, 454 bp, Arabidopsis thaliana
ccctgagcaatatattgatcattagattagcaaacattaagtagggaagagtaagaaacaaaaaaagaagccatacctcaatctggataacaatcagatcaagaaatgtcaaaccatcacgaacttcgataacggacctgcacagacacaagtaagctataatttcttcactccctgaatcttagactgactactagtacatgcctgctatgccaaaaaattcacaatggatcatggttcactatcttcaatttgagcattacacccactagcgatgatagcaaattttaaactgtacacaataagattgaaaagaaaaaaagactaaaacagacaagcaagaaaatgcttacttcgggccagtgcatcccattgttgttccaagacctccattaagcttcaacacaacaagttttgtccaacagattcttggtctcggcaacatctacattat

SEQ ID NO: 7229 - DNA, 733 bp, Arabidopsis thaliana
tgtgacgataagactgctgtctaagacaaaacatgacaaagtcactgcagtcattggccttactgtcttcagccagttttggtattggtacccattgatttacttcataagcttggcgttttcacccaccgccttcatcggtttgaactacgatctcaaagtcccaaagtttgaattcatgtcacacgcaaaaccatcgttgtttgagtatccaaaaccaactacggttgctactgccaacaccgctgccaaattaccaactgctgtgctctcaacctcagccaaagccaaagctaaggctaagaaagaagcagagcagaaagctaaagctgaaaactctggcaatgaagctggaaaagccaatgcagcgtcagatgagaaggaagcagagtctatgcaggtaaaatgcaaatctaattcccaacatcttcgtatctgtttgagttgaaaaattgctcttaacattttttactttgggaaatgctgttcctatgattaatctcaaggtcatgatcaatttatcatcagtcttttgacttttgatcaagtatattttctctatgttactatgccaggttgatagcacagctacaacggtggagaagaaggttgagccagaagcaacgtttgagattctagtcaatcctgcgcgtgtagtccttcacaggagaaatacatcaaattgatggaggatagccgatatgtaccgatgaagctagctccatcagggttt

SEQ ID NO: 7230 - DNA, 631 bp, Arabidopsis thaliana columbia
ctccgacgtcacaatcgggtaaccggattcaggaaccggactatccgcttgatcaacacgacttgtagataagtcaacgatgagcaagtgcgagttgccgccaacacgtgcgatcactgaggcctttcttggtggtagttggtctcctttctcccattgtctgactagattcttgtctggctcttcaagaacgacggagttaagcaagtggggtacacgtgaggcgaagagcgcgtgggaggagaggattgatcggactttgttgatctccatgacggtaagtgggtcaagagggtggttcggtgtatcggaaacgtggtcatggtttttgggttttgttttgggaatgtttttagaaatgggccgagtgtttttgttaaagaggaagtttcttgacgcacaaaaaggtgaagacgaagattttgtgcagtcgaaaagcttcgccgtggatgatggcgcttgagagaagttagtggaagtgaataagaggatgaaacaagccgtggtgatgagaagaaacaaacgagaggagagttttggctccatgaaagtcgcacactcttactctctctagatctcagttggtttagctgagtaatgtgtgattgtgtgtgtggtagacttgtattgt

SEQ ID NO: 7231 - DNA, 581 bp, Arabidopsis thaliana
  unsure (1)..(581): unsure at all n locations
ccctattgcgtccatgatagtgcccggatactaatttactcgttcatggagaatggtagtctggattattggctgcacgaaaatcctgagggtccagctcagctggattggccaaaaagactcaacattatgagaggagcaagtagtggactagcatacatgcaccagatatgtgaaccacacatagtacaccgagacatcaagtccagcaacatccttttggatggaaatttcaaggcatatgtagcagatttcgggttgtcaagattgatccttccatatcgcacccatgtaacaactgagctagtgggcacattgggttacattcccccagagtatggacaagcttgggtagccactttgagaggtgacgtgtacagttttggtgtagtcatgctcgagcttctcacagggaaaagaccaatggaggttttcaggccaaagatgtcaagagaattggtcgcatgggtgcatactatgaaaagagatgggaaaccagaggaagtgtttgatacattgctgagagnaagtggaaatgaagaagcgatgcttcgtgtgcttgacatagcctgcatgtgtgt

SEQ ID NO: 7232 - DNA, 544 bp, Arabidopsis thaliana columbia
tcgttttagagcaaagattttggccctcaagtcttgcaaattgtggtcaggcctaaaaccatgcacacaagtggctcccatcagtacaataacgagtaagaaaaaggaaagtacaaaagagatctatttagattctcctacaacatcctataaatggtctctctctcataaaaaccattgtgctacgtgtattaaatgaacaagattccagagattgtgttatagcagttcatttcaccaacaagaaaagcaattggattgagtccacaaattagatgaacaaggagcaaagaaatttaaccaaactaaaccatattttgatgagaactggtagagtctgaaatacagaacacgaatagcttacctcagcttctccaatggggtgctaccgaggtcgatattgcatacgggacaagtctctatctcatcctccgtgatcttctcatagatgcatttcctacaaactgcgtacgaaagtaatctaaaaagttatccattccagtagatacaactaacaacatgacttataataaatgtgagcaaa

SEQ ID NO: 7233 - DNA, 753 bp, Arabidopsis thaliana
caaggaactagatttcaatcatatcaaacaaaattctcgacgtttggggattaaagatgaaaccttttagctcttttagggtcgacgacccaaagctcagcgagcttatcaggagccatagctttcttagcctcaattgactccaaagtcgaagagccatcaacggagaggctatgctgtgtcgaggtctcgaattcccagcctccgcacctccattctcagcggaaaacgggttatcagacctaggagcagaaggaccagccgaatcggatgcggatccggatccggatccaagtttctcaatgtccatgtatgagcaaaagagatcatcttcggatccaagctcatcgaatcctccgaatggttcagagagatccagatcttcagggagacggaattggacctccgaatgtgctctccggtggtacggaccacgaactggcgcaggtgtcggagctgtggctaaaggcgggcattgcgagagattgctctggtttggttgtgggttagaaggatcctccatatctggatcgtccttcttcttcttattttctctctgtttcgcgccctctgtctatctgtcggaatcggacagcgaaagagagagagagagagagggagagattcagatatcacgttgtgtccgaaggtgatgatgatggccacaaaaaaacacggaacaggctccaaaacagcgtcgtttgtgagatcttttatctttttaacccttgttttcgtctatccaaactttca

SEQ ID NO: 7234 - DNA, 613 bp, Arabidopsis thaliana columbia
cacataggacataagaactaggttaagctgtttttggcgatattgtacaagataaaaaatgcagtgatatactttatagtatctacctgggaaagaaattcttgatctggctgcttactagagtcaagtttcttgatggcagctgcaccaccgcttttaagaacaccataaaacactcttccataagaaccctcgccgatcaaggtctttgaaccatagttatcagttatatctctcagctcatccactggaatggctggtacagaaataggctgcatgggaataacaggctggttcatgggtggatcagctctttggtagtggcctccattgtaacctttataacaattaaaaatcccattaacttggatgccaaaggatggaaactaacagaaacactgacaagtaatacagttgaaataggaactgagctacctgctgggttatgcgctggccttgggcacgtgatcagtagcgttgcgaaaatcctcactcccacaccaaccaaaacagctcattacaccttctctcacacgagctaactaaacttctaaaagagaaagacaaaatgtctacaaacagtggtatgaacaaggtttgacagctctgaact

SEQ ID NO: 7235 - DNA, 619 bp, Arabidopsis thaliana columbia
taaaatataaaaggcatgagctagagaagtcaaacctcatcttgcaaagctgaagtagaacgttggctccctaactctcttaagttgcctgagcttcccaaatccatggaaaacctgctaatagacagaaatcactagactaattaaggtcacactgacaataaatgagtaggtgaatgtgaagaatgatggctagttaccttttatcttttcgaagattggttggcgtgttagattgaaatgcaggagtcactggtttgagtgatataggcacagaagatggcattaaaggagctgtccttattggacgaccattgaaagatgaacgagctgatggaggttggtccatagcactgagagactgggatgatttgttagagattgcagaacgagcagatggagattgctccacttggtttgttgtctgagatggatgcgtcaaagttgacatagctgaagattctgtggaacctcatataatgaagatcggctacctgaagttggaagtccggtctgaggttgtccttagtacgaattgactaatggaaaattaaaggaagttttagaagacgtaaaagcgacaaacactttgacgcgtgataaagttaatgctgatgta

SEQ ID NO: 7236 - DNA, 1138 bp, Arabidopsis thaliana
ttctcccctctagcttgcatgtggctttcttcaattcagtggcacacgatcatctgatttcaaaaccatacacaaccaaggtgttaaagataaccaacactactaatcaatctaagacacatatggaaaacacagtgatttgcggataaatagtacataaagcatcagctcgtggcatcccaataacccatcaacaaaaaaagacttccactcactagtacaattcaaacattgcaagaaaacagaccctaagaatctagttcacccactgtgtccaagggatatagagatagatactaacattactatatcaatatagaaatcagatcaatacaccttgagaaagagattgaataactcacgagataagttctcagtatcatcatctagcttctttgtgttcaaggaggtgccgcttgatgcagccttgttcgatccagcattgactaaacccagcaataacaaaaacaacaaatctcgttagatgattacttgcaacaactagaaatactcatatagaacaaaggagatttcacgaaaaagaaaaaatgataaaggcatattcaaatgtcaaaacagaaacatcaatctgatacgaacaagaatccataagtaaaatcggacgaactgttactgcagcaaacgaaattcgaatcacaacaggcgaaaacctaacacagatctcttctaagacaaccacaataatccagtgacggcgacgaaggcaaataaccctaatcatggaaactaaaacacagcgtaataaaactcatctagattcaatcgccaaatttaacctaaaccagagaaatattctcccacaacttaagctacaaaggtagatcagagagacggagatagagaaagaaagaaaacaaacattttcgaacggtctcaatatcggcgccgcttcgacgagcggcgttgacagtcttctcgtcgcgcttagctgcagcgttaggagctctcttgcggatcacaactggttcccaatcctgagtaatcggtccaattccggccatggcttctcttgtgattttctttcttcaactgttttctaggtttttcttcgttcgtggataatacaagaaatgagagagagacaagaagataaactaagccgtgttcgttttgcgat

SEQ ID NO: 7237 - DNA, 567 bp, Arabidopsis thaliana
tcctctagtaacgtactccttcattttgaggaactggttttgccggcgagacaattattttcctccatcgaactgttttttatattaagccattagcttcttcttttcttttttttctaacgtctgctttattgattaagaagaacaatgatcctcatggaggatgtttacaatgtattgaggtacatagaagaaagattcaaaagtagcatgatttggaaatggagcttttgcaattctatctgccgctttgttgttatgtcttcgcgtccaatggaattctgtacttaagaacttctgcttccatgcattgatctcacgaacccaattatggactttgaagttgcgcttttctccgttaactagttgtatagctgtgtgattgtccccttcgaagataatgtatctatgaccttttaaccatgcttgttgcatcgtcattactagcgcttgaagtccacttccagagttgtgaagcactctgtccaatactgtgtcccgctgatagaaacgtaccattggaatagcgcatgatccatgctgcttgagaggggttgcggtcgagtg

SEQ ID NO: 7238 - DNA, 518 bp, Arabidopsis thaliana
cgggtgaagatcttaaccagatcgggagcaaaatcgaccagcttaaacaatggttaaccggtgtttacaattaccaaactgattgtcttgacgatatcgaagaagatgatttaagaaagactattggagagggcattgcaagctccaagattctcactagcaacgctattgacatcttccacactgtcgttagcgccatggccaagcttaacttgaaggtcgaggacttcaagaacatgacaggcggaatcttcgctccttcagacaaaggagcagctcccgtcaacaaaggaacccctcctgttgctgatgattctcccgtggccgatccagatggtcctgctcgccgtcttcttgaagacattgacgagaccggaatcccaacatgggtttcaggtgctgacaggaagctcatgactaaggctggacgtggcagtaatgacggtggtgctaggatcagagcgacctttgtggtggcttaggaccgaagtgggcaatttaagactgttcaacaagcc

SEQ ID NO: 7239 - DNA, 615 bp, Arabidopsis thaliana columbia
ctgcgatggacaaactatctgcgtccggatttgaaacatggccagttctcggaggctgaagaacatatcattgtcaagtttcactctgttcttggtaaccggtatgatcactactcactagatctaattaactacggttttatgattttcttgaaaagatttaatctaggtgtataaattacagatggactcataaatatcgggtttctttactaagtttttgaaattttgatgctgacttactgatgaattgtttttatgagttttttgacaagtttcttgggacacaagaaactgaataagacataagttttgttctatataccataataccaaatctaagtatagggttttaaagttttgggaacttttaattttctataaatttgttttcgactcataaatagagtttgatgatgtattgctgatgaatagtctgggatttttcatgagaaacaacgagttaacatctttgttgggaaacgatttaataacgttttgacatatatggttcaggtggtcgttgattgcggcgcacattcctggtcggacagacaacgatgtgaaaaattattggacacgaagctgaagaagaagttgcaggaatgggaatag

SEQ ID NO: 7240 - DNA, 1110 bp, Arabidopsis thaliana
ttcttaggatcagctgtagatgataacaatgctgcagctcaggatagtggagctatggctctgttcaatttagccgtcaacaacaacaggttagtacctcttgttgatgttggtaatacaataatagattgtgactttctcattactttttgtgttctcaaggaacaaagagttgatgttaacttctggggtgattcggctgctggagaaaatgatttcttctgctgagtcccatggttcagcaaccgcgctttatctgaacctttcctgtctcgatgaagcaaagtccgtgataggttcaagccaagcagtacctttccttgtccaacttcttcagaaggaaatcgaaacccaatgcaagctcgatgctcttcacgccctctacaacctttccacatattcccccaatatccctgctctcctttcatctaacatcatcaagagcctccaaggccttctcgcatcaacaggtgaaaatttgtggatagagaagtcactagccgtattgctaaatctagcttcaagccaggagggcaaagatgaagcggtatcatcacagggcatgatcagcagtctagcaacagtgctagacatgggtgacacaacagagcaggagcaagctgtttcatgccttttgattctatgcaatggaagagagtcttgtatccaaatggtgctacaagaaggtgtgataccatcattagtgtcaatctctgtaaacggaacacctcgaggcagagagaagtctcagaagcttctaatgctgtttagggaagaaagacagcaacgggaccagccatcttcaaacagagatgagccaccccaaaaggaacctgcccgaaaatctctctcagcaccgctgtctgtccatggatcaactcctgcttcagcttcagttcaagactatgaaccaagagtcctgtcgaaatcaatgtcgagaagaaagtcgatggcaagaccattcagcttcttctggaagaaaagctactcggttcgcgagtgagaaagaagaaaatatcacatgtacatacaagtacaaccttttatatgtaaagctttgtttttctttcttacaagttacaaaagtcatttcatagagaagaagatatg

SEQ ID NO: 7241 - DNA, 604 bp, Arabidopsis thaliana
  unsure (1)..(604): unsure at all n locations
ataggctcatagctttacctccaaaagcccatttgtgtgaggtagcattcgagtgaagaaacctgggatgaactcgagcatgctcaagcatacctatcaaattccatctcattagataccataatcgtgatgcatgcgtgtgtatgaggaagagagagatgacctggagcaagtaggagtcacaacgttcggtatcacaaagtaatctcccgccttccaaaagctccggcattctaaggtctctcgaggagccattgtcgcagcaccagcgattgtacttgctgattctcttcctcctactactccgttgtcactgtcactatcactgtcgagatgaacaacatcagtgactgctgcatttttcgccataggaggcattaccgtcgacggtgaaagtgaatcgagaaaacgaattcgaattttgtgaaacaaacgtcttctccgattagtctagacagacttttcaactacagcgtgaagaaacgcaaacgtcttcttcgtcatcattattcattgccttgcgtgtctttttttgggtcaacagtctaattgggnccatatctcaaatacttataggccattnctcaaaaatgtttatatgagt

SEQ ID NO: 7242 - DNA, 638 bp, Arabidopsis thaliana
  unsure (1)..(638): unsure at all n locations
gcgttatcgaatggcgataatccaggaaaaacaattgtttccgaggtacttaatggctcaaacttctcttcttggaaaattgcgatgtttgttgccttagatgctaagaacaagtttgattttgttgacggaaccttaagaagaccttctaaatctgatcctagctttagagtttggtcacgatgcaatagtatggtcaagttttggttattgaattctgttactaaggagatttacaagagtattctgcgttttaatgatggtgctgaaacttggaaagatttgacctcaagatttcatatcacctatcttccaagttcttaccaattgacacaacaaatttggaacttacaacaaggatcaacagtctttctgagtattatattgccttgaagactttatgggatgatttggatgaagctatgatgcttgttttatttcgcctcaggcttttacctaaaagaccacacgactactgcaagtgcacagtatatcggagtagtatttgaggatctaatccacagggagtgtagctacaaggaagaattcaagttaggtaacctggatcaagacaaacgaaagagtggaggttgttgtatgcagtgagaatangtanagaatgcagagnaaagtagaaa

SEQ ID NO: 7243 - DNA, 1218 bp, Arabidopsis thaliana
aaaattcgatccatctccaacaatatcaacgtcaaatcacaccataaaacatacacaaagaacattccattagtcgcgtttcacggatatagttttgagttggaagaccatgaaactttacctatgtacgtataagctgaacaatcctccagcatgaatcatatcataagttcttggatacgttgagaatccttcacaccaatcttgatacgtccctatcaatccacgttcgtagatcacacctaacgtttgtttctctgcatcgaccgggacaacgttcatgacccatgagggatatttcagcatggaagcagcgaatccgccgagaaaagcgttcatgtccataatgttcctgaatcttccatgtgaaagctcagggactatcttcttgtaatgtgctattctctctttccaaacctcgttgtcttctctaaatttctccgcgttcatttctggtatagttcctctgatgattcttggaggtaccgcgaatgctcggtctggccaatcctcgagtgcaccgcctgctgaatcatctggattgtttgtttctggtaatggtgttatacaagtttccaagtctttgtacctaaaacagagaaaaccaagttttgacattgttctttcacaaagttaagactacattttcgagatgtaaattagtattaccaagcggaatccgcgttatctgagctgcatatcggaggtgacttattgttttgtttgagctttttacactcaatgtgattgagaggcttttgccaaattgataagtcacctttttcagttactttcttccagcaaagactctttgctacatcttctattgaatcttgctctttcttcaaatcctcctctgttctctcccaccctctccagtactgtttccagttaatcggtggtcccgagaggatccagtaaccgcccggtcttaaaacccggtcgacctccataaggtacaaaccatctacaaaagatttcagtgttatgtttcttcctcagctatgaacagaaacagagtcaaatcattaccatttttaaaccaagggatcaaacaacgagaacaatgagcaagatcaaaagctctagctggataaggaagtcttcttgatcccataatcccgattatcgcaggaactccgcgttctaaagcaaactgtacctgagcttcatgagtgtctcttggagcaaaagacacagccataatgtctctcttca

SEQ ID NO: 7244 - DNA, 1028 bp, Arabidopsis thaliana
tgtaagccagaatagttccaacacaaggaatatctaagagccaacaaatagatcacaccaccttttaagaaacaaagaaaggacacacatgtcatgtgaggaagagtattgaaaactaacccgcatgttaaagtagcttgcgcagtttctgaatgctgaaactctgatggttgtactggagctacaaaaaacagtggctggaaaggaattagcacgatatatgctagtaactactgcaatttccatgatacattggtataaagcagctagtgaaccttgttcaaacggaaggaagtcagaagttcatccgataatgggaggatcctctcatacaaagatcttcgcaagtgatcagctaaagaaaaattgtcaggactgtgcagagattgtccaacggtgatggtagaaatatacacaggctggaggacttggtaaagcaatgcccctgaagtaagaacacacaaagagagaaaatcccaataagcaaatcttaaatacacaacaaattatctgtcaaaattcagggtacagaaaccttgaactccaagaacattccatcgagctatcttatccgaacagctaacagagagtgttgtttcaccgcgaccaggctttctttgcaccatatctgctacttgtgagccattacctgaaatagagacatccaaagtaaattgataccaacatgagcctaatccgctttctcccagcttctaaataagaggaaggcaagctgagagaaaactcttgcagcattacctttgttgctattactacctatctctggaacatcagaatgccgagacgagcaaatatcagaagcttgaactaacaatgagtcatctacttgtgttgatggaatctttttcagggcatacaagggtgaactagtagaagcataaccacctacatatgacaaacacgtcaatgccaagtatattcttgaaacagataaagaaacgtaatgaggcaaattgaaggtaaattacatggcaattgagaaatgtacaaatgcaagaggcacccag

SEQ ID NO: 7245 - DNA, 528 bp, Arabidopsis thaliana
ttaaataaaaaagcaggagggcatgccataaattacggttaccaataaacgatcatacaaacgcgttacgtaaacgcagtacaataaatcgtgagtagactgagtagtaatttggcaaaatgcattgacatagtagcaccgaacagttgttcatgttacccttttttaagggggtgatgacataacgatgtcgtttagctgagtgtacaccgcatccacaaaacgatgcgtttcggtaagaggcttctccattgcttccttgagctcccgtagagtcgagcaatacgcttcctattatgtgaatcaatttacaagtataagtgctactgtttttttcttggcaaaataaacttagaatacttgaaagtcaaattaatttgcaaaggaaaaaatacaagaacgtgaaaagttgttttttgttgtgtaaatatgttttggcagggagaaaaaaaaataagaaccatgaattgatcaagttctgaagaggtagcttcggaggaagagtcagggtggagagagagtttggat

SEQ ID NO: 7246 - DNA, 602 bp, Arabidopsis thaliana columbia
cagagaagctcataaaccctcattgaaccactaatcaaatatagctattttcaacaatgacaacaaaatttctgcatacttattttcttgtgtatcatttcttttgcccttctcatgagttactttagcaacagtctctatttcagcctggaaacatcaaaaaagggagaatctgaatccagagctcaagaacatcaaaaactataacaagtaactaaaacctacttgttgatcagcaacactgctgttaaagctagctccatcagatcctaagcaaaagaaaacatgattatagaataaattgttaatgtttccgtttacttttttctcacattcaatcaaaagagatcgattaagaagaaggaaacctaaccttcaggcgaatcgttttcggaaaattctttctccagaactcgatcgaacattttagcgatacttccttcaccgtttcccggagccgtcgagttcacgacgttgccttgaaatcgctcgcgtgtttcttcatcagatctcgctgataaggacgtaccaagtaaaaggaggaacgttaatcgaatcactgcgaatctcgccatcgatcagagatatttcccaggaatttg

SEQ ID NO: 7247 - DNA, 691 bp, Arabidopsis thaliana columbia
ctaatcaactccataacgtacttgaaatagggatattttagttgaattattcaaaacaatcacacagtgacacagactctatgtagaccaagcatgtgttatgtaattagaaaaaataaactgtgattaaaatatcttttaacttgttaacttggctgcctaaagaaacttgatactgtatcatcgttcatcgtattttgtaattaataaaacataaaaaagcaaggaaaacccatttgagtaaatgatatattaatattacttcgtaaaaagctgcgtccccacatattctattgattttaaatactattcgtattaatataaacctgcatataagcgtacatatacatttctgattctatatataggtgtgagaccttcttctccattctacacttcactccaacgtgaaacctgcaaactgaacttatctcttcatattttctttagcttctcttaattttacacttagggttttcaaaccagtagagagagagagaagtgtgtaagagcgatgatgcagactccgtacactacttcaacgcaggggcaatattgtcattcttgtggaatgttccacaccatagccaaagctgctgctacaacaacaacaacaactccaacgccggttcttactcgatggtcttctccatgcaaaacggtggcgttttcgagcagaacggtgaggact

SEQ ID NO: 7248 - DNA, 834 bp, Arabidopsis thaliana
taatgtcagtcccagagatgacaatagatgatgcccgtccatgatatgcaatgggaagacgaaacctgaaaaatatggtaatgtcatgttaatacagagtcatcctttcgacttgaccatttcatgaagaaactctcagctcaaaagtaacataaacgcaccaatttgggtttatcgcattctcaggcccacggaacataagtccgcagttcttcgcgtgatgcatagatgcaaagaagtctgtatagtccccaatcaccataggaacaatcatttccactttactctgcaaatttgcatcaaacagcaataaacgtaagtaacagatatacaaacaatttccctagtttaagcaaaaaacaatttcacactactaaccatctgatggaatgattttctcctcaaaacatcattgtctcgcaagataggttcattagctgcatgaaaacataccaaaaccaaaaccttgaagccaaataacaaaactccataaaaatccaaataaatcaataggatcaaacagagcatacatgacaagattctttgcagcgtagaacgcgcttccttccacgcaggccgtcccatggccaagaacttattcaaattaggctgcaaacagagcacagaaactaaacaatattaacatcaaaagaaacacaccagaaaataaacacaacctcattttcctcatcactaagtgtaagcaatacactataccgtcagatcataaagcaataatcatagttgcaaaagttcaaaatcgtgaacagaaaactcaaactgtaacagataatgaatcgaagcaacgagcaattgagtagaacaatggatttt

SEQ ID NO: 7249 - DNA, 578 bp, Arabidopsis thaliana columbia
ctaactacaaaaactcatggcctagaagagatgattatcagaacaggaaggtcaatttctcaactgaagtaaaccaaatgatccattgttttttgttatgttttttttttttttgtgtttgaagtcttagcttgttatggtctgtgcaggcagtgtagttttagcttagccattgacttccatgttaactcaaaaggcatggttttgtgtctccacttcagaattagcatatgtagagtatataggagtaccctttttgatgataatgtctcatacatactaaagtattcaaggtttttgccttttgaggctggattgataatgattgcgttctttgtgaagatgttttattcacacttttcttaattgattccaacttcgaaaagaaaggcatctacacacatgaatacacttatgtcttggctcaatgcattccttaaaagcttcctcatctcatttttatattcaaaactgagttattctgctttaaagagtgtgacttggaatcacaaagttgggtatatgctcgacttcaaagcaatgggagcgtctgctttgcatgatggtgatggagaaag

SEQ ID NO: 7250 - DNA, 533 bp, Arabidopsis thaliana
cttctgaaatgcaccttcaccagtgagattcaagtagctgcctcgacatacttggctaccacacaagcaaacagacgcttcatattcttccttactctgtcgtatacacaagaatcattctttagacagtggagtggaaacataaagactgacccaacgaaataatactttcctacggtagaactgcataaaagaagggagagcaaagaacagacctcagttacagaattataatcgaaagttatctcctcgccatattcaatagcgcgtactgaatagatgccaatctggtagtgtccatccaccgcagtaaccctggacgcaccagataacaaaggggaaaatgagtgaattgtttacaatttaacggatatgaaaacagcaaaagaatcagagagttcttcactccacatttttgaaaatgtatgtatgcataagaaatgaatgagacttaccaagtatgaatgagcagagaagatacaattataagcaatagaaatatttctaaataatcatttaatatgtgtaattga

SEQ ID NO: 7251 - DNA, 500 bp, Arabidopsis thaliana
cctcttgactccatttccttgagcaacgcgcacgcctctttgaatttccccgccatacaaaacccgcggatcatcgaattgtatgtgaaaacattcgggagttgccccttttctgtcatttctttgaacatttcttcggctttctcgagctccccacctgatatatatcctgtgatcataacagtgtagcaaacaacatctggcgtgcatccaactttcaccgtttcgtccataaagtatttgcaagcttctaacttcccagctcggctcagcccgtctatcagagtagtgaaatggatgacaccgggctcaactcctacttccctcatatgattcagaaggttaagagcagcgagaggcttgtttcctgttgctagatgatggaggaggatgttgtatgtatacaaatcaggagaaaacccgtctttaaccatttcatctagcaatctataaagccgatctgtttccctaacctaaagtttgaaacattacaatgttgt

SEQ ID NO: 7252 - DNA, 550 bp, Arabidopsis thaliana
  unsure (1)..(550): unsure at all n locations
ccggcgggtgtggacgaggagcatcatacagaagaaggtgagggaggatacgaagaggagtgtgaggaggcccaagagccatccagtcttcttgaaggtgtacggaagtccgagcacgccggcgccgacgatggcgatgaagacatttgcaaaggtttttggctgcgacgacaatgttcgaggccccaaaagaggagtgtcttccgtcggcggcacganatgggaggatgatcccgaagcagcgaatgggaggacgatgtcgcttcctgatcgtacctcatgccgatcgaaattgagagtgaagaagagccgagagtcacagtctacgttaatggcgatcgatctctgattgggtgtgttgtatatgtttgtgtggtcaaatgatatctgttttatctttttcccttttttaagtcattaagaaaaagatacaaaactttcattggctcttgtttggggtttccaatttaagaaatagtagtatttgcttaagcaataaacaaaactctgacatttgactcgtgttacttatgtgcttaacaaactaaat

SEQ ID NO: 7253 - DNA, 486 bp, Arabidopsis thaliana
ctatggagaagaaagtgaagttaatggaagatgttgcattggagttctctattcgttgggattctaaagatttcgagaagaggattgtgagacagaatagtatttcagtaatggtatgacaatgactcatttgttttagggaacaactaaactgaaatatttggatagtgattgaattctgatttctttcttggacgtgaacaggagaccccaaaaagcaccaacgacaagtataagcctgtagacagaaacatggccttgccaaaaagagaagagtttgaaggttctgaaaatggggttagcttgaacagaaaaacggctgaggcatcagaaagaagagatcctttgtttcaatctgataaagaaagttatcagaatggtctcagaggaaatcagcgtgggctaacatataaagaaaggtcagagaatgttcttcacgcctctagatcggaaagcacagacaataaggccgaaaggaaagagttt

SEQ ID NO: 7254 - DNA, 751 bp, Arabidopsis thaliana
tagaaatttcgcctcagtgatatgatagagcaggaaaatgttgtactaagttttcctaaccttgcaaaatataccgtggagtcccttcggacaagccgtcccagttattgtaccatttttgccataaaaaccatcatccgctgctgctccccctctacgattacaattaaaaacaatagtaaatgtgataggctggaatacgatatccaataacaaaatagacattggaaatgcagttaatgacagaaaacacattaacgatcatgggaacagcacatgtatatagaggacataccgtgcatgaattattccttttacactagcaattggctggtatatgtccccagtaggaatgtttgaccaatgaaaatgaatcctcccacctccgccaccaccaccaccaccaggactgccagacccaccaccacttgagagaagagatgactctcctaaaataagataacgcaggaacaaaaggactgttcccccagaaccacccccaggagctacaatagaaccgttttcatctctactcaaacgtttgacactttctccatcaaccctaattgagccttcaagcgataaaccagatagaggctgctccattgaaccaatcactgaccagattgaaaggaaaacaaagaacaggttaaaaggtatcatctttaaagtagtaagctctcatgggaacagcatgtacgagtgtatggcctaatcatgacaagcttctcactgttaatgggatattaat

SEQ ID NO: 7255 - DNA, 566 bp, Arabidopsis thaliana
tgcctccaaagcctccactgtaaggaccacgccttgttacttcaagttcatctatcagctccatggcttttacctgtaacaaatgatttttgagtatggtgaatgtgtaatgtttgttgttttagtgagagagaacctttggggctccgctcacggttccaacgggaagtacagctctaagagcgtcccagcttgttagatgatcgagcaattcacctactacctgcgaagatggaaatgtgtagtgagacaaacagaaattggacagcatattgttaagctcatgtacataacatgtgaagtcacatattcatgggttctgtagtctagagagaactaggcttcaacaccacttctattcaaaaatttcattatccaactatgatctcttataaactgaaaacaaaggactttcgaattaaaagtttgtttgtttgtaaaattgcaataggagcataccgtggagctaatgtgcatgacatgtgaaaaccattctatatccttgagcttcttgacctccacagaaccaggctttgaaacctgagtttacaagaatatccaacaag

SEQ ID NO: 7256 - DNA, 959 bp, Arabidopsis thaliana
actatattcatttcacttacgtatcgcgtgagactttttctagtatataatatacttacaatcataaacatgagatatcgtcattcctctttttgtttttcaaatatttttaaaagtaacttttaacataggaaactttcaaataacaaagaaaactatttaaatttgataatatctatataacattgataaaaagtaaaatatatatgaaacagaaatctattaaatatttgatgtcaaaaatctaatgttaacacgataaattattattttgcgttctaatttatgcaaaaagattcagaagaaaaaacccattataaattatgtaagttacgaaaatttaatgtttacgattaattaataaaaagatgtacacaaataaaccgaacaaaattgatgatataaagaatatacaacaaatatttactggcgtgggtgggggcgacggtggcggcggtggaggccttggaggaagaccatgaccatgtttgcaacctccagcctggactccacatcggtagcaaaatttatgtccacatctatcaagaaaatacaatgataaatcagattaacacatgtaaccaactttcaaaaggaaaatgttaataatagagatgatgatacctgcactttacttgtacgcatcctttagaaagttcaatcatgtgttgacactttccgcattgacgccaccttttctgatttgccagagctttaatctttccatcattttctgtagggtatggattcaacttcttgtaatcgttgcacgacaagttactatgccatgaaactttacacttgatgcaaaagatttgaccgcatttgaagcaacatctcctaacttcatcttctttagttgatatagagagctcggtttctgacattaaagccgagcatcgcgagtttgggcagtaaattctccctgttacagggattaagtcttctttaatcctttg

SEQ ID NO: 7257 - DNA, 473 bp, Arabidopsis thaliana
aagataaccaattgtcgagcgtacaacaacccctgaacaacgaaacacgtacttgctaattgttcaatttccctctcttttattgacttaatcatcatctcgaaagtggaacagccccagggataagcaagaaatgcacccacatcgtcagccattttagcgtgcgcctaaacaattttaggataatgaaaggtaacgacaaggaaaccgtcgacgatagctaagcaagcacatcagatcctcataccggaatttgagacattctttctcttcaacatcataataacccaatccatggtaacatcttcttcaagcctaataaacttaatgtaaaatggaattgtcttctccgtagtgtctttcttcttcttcatcttcaagctcgaatacttcccacatggtaatccagtaacgatattaaaatctctcaaagaaaaacgaataggagtaccgcaaatacacccaaattttgt

SEQ ID NO: 7258 - DNA, 541 bp, Arabidopsis thaliana columbia
gggatggcccctctttgcaattgacaccacttgacaccttgttagtgtagaaagataaaatttcatccacacttgcctcgagattagaagttctttcacggcaatgagaccgagaattggggcggagagtattgaaagcaaattcatcattaccacaattgcaacccaaatcatcggaatttgaagcaccaacattactagccgggacaggctccttaggacgattaatcccacaatcaggatcctttgagtgttctccttcgataaaactgtttttggcaaaccaatcagtcagcgtggatatcattgttttcccctgagtttcaagtttggcatccaacatacgggaaatagcgtccacagaaacagctcctgaactcccgccttcctcatggatgggtctgtgatgtttggtcctaaccccaccaaggttcttagacggtttggctgctttcctatttcaactaacattagacttagcaccacggttttgttttttagatccaattgcatctgggatggaaacatcaccaccaaacat

SEQ ID NO: 7259 - DNA, 1009 bp, Arabidopsis thaliana
cagtgtgctctaaagatggtgcgtcaacgtctgctgaaccgctttaccagcgagcaggcggaagggaacgcaatttaccgtctgacgccgctcggcatcggcattactgactactacatccgtcagcgcgagttttctacgctgcgtctttctatgcagttgtcgattgtggcgggtgagctcaaacgcgcacagcatgccgccgaagagggcggtgatgaatttcactggcaccgtaatgtctatgcgccactgaaatattcggtagcagaaattttcgacagtatcgacctgacgcaacgtctgatggacgaacagcagcagcaggtgaaggacgatatcgcccagttgctgaacaaagactggcgggcggcgatttccagctgtgaattgttgctttcggaaacttccggaacgctgcgtgaattgcaggatacgctggaagcgcaggcgacaaattgcaggctaatctgttgcgcattcaggatgcgacgatgacccatgactgatcagcatctcgacgatcgtctggtgctcgatctgcagagcatactcgatcgtactgtcagtaggggccagcaatccatcgacttgtggattggctacgaccgccacgtacacaaatttattcgtaccgcgatcgatatggataaaaaccgcgtctttgctcagcggttacgtcagtcggtacaaacctattttgatgagccgtgggcgctaacttatgccaatgccgatcgtctgctggatatgcgtgacgaagagatggcactgcgcgatgaagacgtgactggggaacttcctgaggatctggaatacgaagagtttaacgagatccgcgaacagctggcggcgatcatcgaagaacaacttgccgtgtacaaaaccagacaagtgccgctggatcttggtctggtggtacgcgaatatctgtcacagtatccgcgtgcacgtcactttgacgttgcgcgtattgttattgatcaggcggtacgtcttggcgtacgca

SEQ ID NO: 7260 - DNA, 762 bp, Arabidopsis thaliana
aatcctcaaatgctttcccaacaatgcttagggacaccgagcttataccttcatatatcaatgttatttcgagtcgtccataacacccaaatgatccagggactaacagatctcaactgagtagaaagttctctattgtggcagttagtaatcacatgattcatattggtaaagatagaattcccaaaaccatgatcagatgactgcataagagatatagcccaaacctggcgagcaaggggacactgaaacagaatgtggtttaaagtttcatctttctcagagcacattgaacatccatcctcaattaaaataccccttgttcgtaacttgtcttctactgcaacaacaccttttagcatcttccacaagaatactttgatttttggtgccgtgtttagactccagatttttccaaaaagaggatttaatgatggttgttcttctgcttctttaaacatctgtttatgaacttgtctactacacaaatcatattctgatttaaccgtgtaaagaccatgattggtaccaaaccagcagaaagaatcctgtctagaagccataggtctttgttgacaaattatctgtatctctttccaaggaaataagtctctaagcatattcaaattccaattcctagaaaaaggatcaataagttgactcactttcaattgaatatcaaccataatctgcagactttctggtcttctaggtttatcatcgaaaatccagttatccatccagacataagtgttttctcca

SEQ ID NO: 7261 - DNA, 1208 bp, Arabidopsis thaliana columbia
tgataacgctgtaaagtaagaagtggaccaagtggtgcggatactgaagtgaagttggcgagccgttggagaattcggaagaatcgacggctaaaggcatgccgtcgctgccgagagcacatgaacgtggcacgccatcgtggttcagcatgacggctcggaggacagaagtgacagtggggaaataagcagtacggttcttagcgagaagccaagtgagacccatgaggacacagtctttgttgtgcatctttgctgttctgtttcggtcttcctttgatgggtttcttgtccctgaagttttcttcggatttagctgcaaaatgaagcagaagtgtttgttttgattagggtttgttgctgctgactaaagtaatgattgaggattgtagaaagtagaaaggtggcaactagttgctaagcttttggctatggtgggttggtgattaagatgcagaagaatgaaatcatatgatggaagacaaaacgtcgcgtggagatcacggattctgttagcgcgtatatgtgtgtcagactgtcagatagaaagagaacaaaaagctaaagaacaaaacttttcccaaattactaccattcgccatatgatggatagatcagaaagaatcctaaactacataattccaaatcttcactcactcatatagtaaaaccctaatccttaaacaccaaataaatatcattaaaaaagggcttctaaactttggactaaaccttacatagttaactactataactagtccatcaattcctcattactcatccaaaaaattgtcttaatcagtcaatcaaacaaaatccagaagctaaacaccaacaacgcttcagggtatctatagattatctaaaagttactagatttgcacacacattttaccaatttagccaacctaattccatttgaacttcacagtggcagcttctaaatatagcagcaaagttagtgactttaccttatagagactgttcaagcacttgttgcaaccaagaagaggtgagaatccatcagcattgttgtggcttccactcaaacaatcagtctctaatctatcaactctctcgtctccaacgagtctcccttcatcattcactctaaaagcctcggaacagctcaacggatgcaatctgattccacagtagcagtaaacgacgtcgcaagtctcgttcggtctagtgagctcgatatcctc

SEQ ID NO: 7262 - DNA, 558 bp, Arabidopsis thaliana
  unsure (1)..(558): unsure at all n locations
cagccttgaatatacagagtcaaagctaaattataaggtttgattgttatatatgagaggaatagtggaatagtgtgaaataattgactaatcaagtagggtaaagaactttgaagtaaaaagatgagacctggatcggtaaaaaaagcattgtcccaagcaaaacttggacgagcatcggttttcgaaggaagtgtgtgattatgatttacttcaacttcaatctcattctcgtcaatctttaagctcccaaacaattcttcaggatctaacactcctacaaaccaaagtggtaaaatcattggaatcatataatttaacattttgtttctacacaaaaccaatctataggaaataggaagaaaccagggttggtggaaaaagcagtgtcccaggccaagcttttgcgatggttccatttgctctctttgtgtgccatcggctgcacaaagtcaatctttactcttgctgctgcacaaagtataatcagtttctgaagactanagagattttagataggagaggaaacagaggaagatgattctacttgatgatgac

SEQ ID NO: 7263 - DNA, 367 bp, Arabidopsis thaliana
ccgaagataacagtatcaaatcaaaaccatcacagcaaaaaaaactcactccctagaaaagtttgaaaatggcgaagcagataagaaaccagcggagaagaaaccggcagagaaaactccggcagccgaaccagcagcagcggcagagaagaaaccaaaagccggaaagaaactcccgaaggaaccagccggcgccggagacaagaagaagaagagatcaaagaagaacgttgagacatacaagatctacatcttcaaggtgttgaagcaagttcatccagatatcggaatctccagcaaagccatgggaatcatgaacagtttcatcaatgatatctttgagaaacttgctggtgagtcttcgaag

SEQ ID NO: 7264 - DNA, 412 bp, Arabidopsis thaliana
ttcaagcattgttttcgaatatttatcctgaattgtttgctatgaaggttctcacatgagattcataaaagaacacaattaggagacaatataccttggtcatgtctcttgttttagtgatgatagttccaggagccttagggttataagaatttttaaccctaacaggaatctcaccctctcttgctggtctcattgactgtgggtgcaagacctgcagcaacaagtgaatttccttacttaaccactcgagcatttacaacatacaaattttcatgtaacaatactaataactacacttgagtattattgcatacaagtagagtgggacctgtgcaccaaaataagctagctcggctgcttcgtcaaatgtcagatatggtactggtgtagcacgcttatatatagtagg

SEQ ID NO: 7265 - DNA, 668 bp, Arabidopsis thaliana
tgaggtgtttaagatgatattggaaacagaagagatcaaggctacaactacgctagacacaatcactctctcagagctaaaacacacagagttagtggctttggttgagtgataagtaccaaaatggcttatcaagatatgtaacagaaagagatgagataatagaagaaataggttgagatgcagaagaatttcagagaaggagaaggaagatgaagaagataaacattcttaagattataatcaataagtgtttttcaatgactaaagaagagtttaaataaaagacattactaaagtaaacatgccaaacactaagccttataaaaacccataaggcccaactcctgaacctatcaatactccctcctttgagagtcaccttgtcctcaaggtggaagaaagtgaattccttggacgagtgtcctaacttcggttgagcctacagctgcaaccttctttttgacacttgattcccacttatcaaccatctcctcaacatgcatttgtgtacctctttaccgaattcaatcattagccttgaaaccacagttttaaaaggatgatacaatcccacaacttcaaacggttctgcagtcctttactcctttgatatgaccgctctttagtctgttatgtgtgcactttacacacacggagcgggtttg

SEQ ID NO: 7266 - DNA, 539 bp, Arabidopsis thaliana
atatcttcaggattcttttgattgcagctaaactcttcggaagtacattgtcttcaggtagcatgtcttgaattaaatccaacagctgatcaaagtagttcttcgacacaccacttttaaccttgaatctgtaaagtcccataattggctgaaacctttgtgtatttgatacaatcagagtacaatggagtttcaacttctcttaacttctgcctaaactcagtttcctctactgcttcatcgtcgtttccctgatcatcattcgtctgatttggttcaccttcacccatagagaatgctgtcttaaacaagtcaaatgcctctgtttcatattgaggaccaccgtcttctgtagatgctcttttttcaccatgagtactccaacaagaagtgttatacttcttatccataccccttatcactagatgctcaacaatttctttgatagactgatggcataaattgcgacaatctctacacgggcatagcatttcagacagattgccaatcttcttgctgatgaattggcgaagtttgtt

SEQ ID NO: 7267 - DNA, 484 bp, Arabidopsis thaliana
tataaaccaataatgttttgctgactttcggatacaaggtggttttggatcgaatcaaaacaaatcataggagattaactcacttggaaaaagctccatatctgagtctaaaatcaagaaagcgtaatacgagaaaataatgtctgtagtctgtacattagaagaaactggaaaagcataaataattgaggaatggtagatatccctcatctaccataaatacatgtcaaagctttctttactttgcctgacatagagatgttctcagggtaaaggctcttgcgaatctccaaggcgagacaagtgcaagtatgcatcagtccctgcacatttcaacaatacacattaatcaaaactgaatctgtcttatgaatgctgattgagatatttcaggttaagagacttttatgtctattgatctgaaaatatgaaacggaagaagaagtagttgactcaccatatccttccatggatatgatctgca

SEQ ID NO: 7268 - DNA, 1304 bp, Arabidopsis thaliana
tatcgagacattgttcccaaatttctgctaagaaacttcctactactacacaagatgatcgtgtgtggtactacgctaatctattcaactctcaatattaagctcaatcttcagttagtttcttgattcctgtaatgctaatcacctaaagaacaacacgtttccacacacataatcggcgaagttaaaactcattatgctcaaaagagtaagaacaatagccacagccacagttcactggacgattcttcaagcaagaaaatctgtactcgagagaacactattatgcagaaccaatttacttaattgtccatataagttctcgactcttcaataagcttttcataactgaaaatggacaatgaaaacccctaaatcccaatcaacattgtcttgattccatacaaaaaattggataatcagaacacaattttttttgaaaatggaaggaaggaagcaataacctgttggggaagaccaggcggcatgaacaacacaccgttcctgtacattcgagcagaatccaacagtgattttgttgagatcgccgcgcaaaacggcaccgttccaaacagacgagccgtcccagactgtgacctgaccagccagcacaacgttgggtgccacgtaagcatcaacggctactttcggaagccactgtcccaaaggaatgatctgtcgttggcctctgtagtcccatttcacacgatccgtcgacggcgacaccgtgaattgcggtttaggtaactctgtcttcctcgccaacgccgcttccgcagcgaagcaacgacggatcaggttagaagtgactcctctccgagacaatcgagctatcgaagtcgccattgctatggattttggatttcttcaaggatttgcaaagaggaaaagagagagagtggtcgtcgaaagattcacctgaaattaaacgagatacagcatattgggctttttaacggaccacaggcccaataatagtaaaacgtcgtcgtttcacttattaggtggatgtacattaggtgtcaagtagcatttgaaaaccaaattaaaccagatcccaaacaaactctacagattgataccagattcaaaaacaaaactggatgttgtatcatttggtgaaattttgattatattcacaaatccgaaaatgttacaaacaaaacaaatccagaccttacaatcaaattgaaataaaaccaagcagcaccggtttgtctggctaaacagttaaccggaatagatgtggacgtttatggcgatggtaaagatagtgatgagacagagaaatgatgcgtgacgag

SEQ ID NO: 7269 - DNA, 420 bp, Arabidopsis thaliana
ccaagatcatgcagcaggttaaacattttctagctagtcttttaagtctttccctggaaaatactaagtttggattgaatcttcttcagggatatgcgaatcttccggcaggaatatgtgtgtcgagcatgggcagaccggtttcgtatgagcaagcgacggtgtggaaagttgttgatgacaacgaatcaaaccactgcttggcttttaccctcgttagttggtcgtttgtttgatgaaggaaaaggttggttatgttagatattaaaagttaggggatgttgtttttggctaaggtttgttgaattagagagtccataactctatatgtaatatggaaaaattctgatgataatctctttaatcaattatgacattatgtatggcaagatatttatttttatttatgttttggacttg

SEQ ID NO: 7270 - DNA, 509 bp, Arabidopsis thaliana
accatcaaatcgtcgtgcggatctatgacgacggccgaatctgtcgaaaattgtaccgccgattttggttccggaaacgtgatcgtaagtgaaaccattgaaaggtctgactccaacctctaaaagactgtctctgagagctttctgccataacgttaactttggctgatgaacaatctctctctccacccatggatacgactccttcaccagcttcggatcccatcctgctcgcttcacgaacctgaatgttttgtcacaatttaaatcatttatttgttcttaccttattttactgaacaaaaaaaatagtttttatgacagtaaatcagttttttcgagaatttttttaatattatataagaaatcaatttttcgaaaagaaaaaaaaaatggttgcaatttttactgaagaaaagtatttgttaaaaatattgtgttgattagtgtgaaaaattaaagagaattaaaagtcttacggaccattgcccccaaaattattaagaaac

SEQ ID NO: 7271 - DNA, 605 bp, Arabidopsis thaliana
  unsure (1)..(605): unsure at all n locations
ctgtaaaagttaaataaagaccggtaacaatcttaaactcccttaacgaaaattggaccggagtactggcgaaaacaacccaaatctcatgggggttggcaacttccaattgcctactcagtaaaaagagcccaaaactcgccgaaaacgccggtttattcgggaaatctaaaagccccccaaagaactgttgagaatgaaagatcgctcttgttcatcaagcgcgtttataatccctgacagtgttttgattttgtggtacacattaacccttttgccaagcggctcttctccaaacgcaaccaaccggttcggtaattcaacgtcgtccatctggaaacaaaacaatggtgtaagcgcggtcgacagcagcgacaaaaaccctacccaagccgaattgaaatccaatcaataccttttaatgagaaatccacggctccaaagggacggtgcttacgggacggtgcttataaatcgatccagatgagtttctactctataagcgttattctcttcgactttcttcgggttacggtgtctcttcagttttttctagagagatgagnacagataacaaagaggacatgaagacgcgactgttagat

SEQ ID NO: 7272 - DNA, 1292 bp, Arabidopsis thaliana
gaggatgggttatcagaaccatgacgggactccacaacattggggttcacggattcttaaacatataagcaccccactggaggcggagaccatggcactactggcagcattacaaaaaacatggatacgaagatatagacgagtaattatggaaggagactgtaaaactttaataactctagttaatggcgaaaaccattcaataaacaaaatttcgattgggatatggtgggcccggcgtaaggcgataaggcaattcaaaaggcgattagttctagatctggttccgtcggcgttcgctggccccttgccggccgacgggtgctctccgtccgtcatgaagaagaagaaggccaagtcccggcctccgttgttccttggctcctccaagtttgcgcgtgttctggctgcttctgttctagttagcccttcggatgctgcctctagcctcccggctgttgttagctccctctcggtgagtccctccatttcctccgtcgcgcctttgtcccctcctccttcggctgcctctcctcctcttcctagtcttgtgttgtcgccggattctctcatccctgaagtggatttgccctcctccgtaatttctggttcgatggttggcttgtcgcctttcgttgtcccaaggtctgagatctccttccttgggattggtattcttcctcttgagaaccaagggtctgagagctcctcccctgtggttggttcttcggttttggctcctttagtgggtgtggttgagatctccaatactgagtctgactctctggttttgcgccccccccccccgtgttagggtctgagagctcctccccgattcatattgtttctccttctaaccacgggtctgagacctcctctccgtaggttgttattcctccacctatcgttcagggatccttggttgctggctccttctccatcggcggttcagtgggttcccctgaggtgcttggaccccatcaatccgggcggccagttagtcatagccttgtggaagtgacggatagcgagcctaaggttgatctcccttgggcttcaaagtttaaagcttctcttcgtaacctaaaacaaatgaactctcctacttttatggaagatggtactccggtggtcattgctcctccctgtgttcttctgaagtcggtggagatgtggaagggccatttggtggcccaattctatggtctttctccctctcctgccaagatcttcaatgatttaaatcctatttggggtcgttatggaggtatcacggttagagtgatttcgca

SEQ ID NO: 7273 - DNA, 387 bp, Arabidopsis thaliana
ggtacgcgcagccagccctgaacttcatgaccctgtttgcaaagtgctgtaagccataattgccctaaggcaccgcatcccaatacggtaattttcattgttcctcctcacccgcaaccactccgggtgttcaataaggctatcccttaattgtgcatgctgttgcgactatgcacaattaagggatacgtcctggtgcaggactgtcggttatttaactttgcgggtattatgcttcgcatcaaaaatgaagggagaggaaaagatgccatctttcgatattgtctctgaagttgatcttcaggaagcacgtaacgcggtcgataacgcgagccgcgaagtggagtcccagactcactaatgagctttctctttacgttactagag

SEQ ID NO: 7274 - DNA, 914 bp, Arabidopsis thaliana
  unsure (1)..(914): unsure at all n locations
tagtaacggccgtgtcgtgctctaaaggctgctgttcctgattaaaacccggcaagtcactgttttgcagaatataagcggagtggcgatgcaaaccgctgtggttgatattcaacccgacctcatgcagcatggcggcccatcgcagtagcgcctccagttgcggatggccacttncggttgctgttcccgccactgttcgtacatttgcatagtggtatccagcacccgtcgggcctgttcgctgtcgatgtgatactggttggcgaggctgctggcggtgcgactacgcacatcctgatgacggaaacgtccttccatttcatacagtacgccttcgcgtaacgccccgtcagaaaggcgcagttcacggatggctaaagcatcaaacacaccgcataaaatcgccagtcccggaacgaagactgttttccgctcttcggaaagacccggtaaactcagcgatgcgaaattacggtgacgtaaaacttcttttaccagtttttccagacgttccggggtaattatcccgtctttctcgcccatttccattaacacttcatgggcggcttttatggtaccggaagcgcccattgcaacgttccagccctgaatacggaattgccaggttaaagtttccagtttttgtgctgccgccatgcgagcgcgctgaaaattctctttattgatgaccccgccaggaaaataaagctgggcaaagctgacacaacccatccggcggctttcaacgagaataggttcgaaattttcaccaatcaccagttccgtagatccgccgccaatatcaataaccagtttgcgacctttttccggttgggtatgtccacgcccataaaaatcagacgggcttcttcattaccggaaataatttcaatcgggtagggaatgacctt

SEQ ID NO: 7275 - DNA, 769 bp, Arabidopsis thaliana
gaccctcttcttactattgggtcagctgggcatgctcttcatgtattcgttaatggccagcttgcaggtaacattaagataggccaaactcatcctcatggtagcttgcctttgtcttctgttaaacatttctttgtttcaggaactgcatatggatcactggagaagccaaagctaacatttagtcagaagatcaaattacatgcaggggtcaacaaacttgctctattgagtactgcagcgggtctgccggttagttctcctcagtttatctctgcgcttttttctcatacactgattacgttctaagcttcctggtccttcattgctcacagaacgttggcgtgcattatgagacttggaatactggagttcttggcccagtgacactgaatggagttaactccggaacatgggacatgactaaatggaaatggtcttacaaggtcctcctgaaattcaagagaaacgagtttgcttaccaacaatcattaacaatgaaataaacatttgttcatttgtgtttcaagcagattggtactaagggtgaagctctgagcgttcataccttagccgggagttcaacggtagaatggaaagaaggatcattagtggctaaaaagcagcccttgacctggtacaaggtaagagaaacagaggaatcaatgaatcatgaccaccaacaaagttagatcaatataatgaaaaccgaaatccacagggcagaattttcccatctctttttgcagtctacttttgactcaccaca

SEQ ID NO: 7276 - DNA, 611 bp, Arabidopsis thaliana
gattctggaaatggatccagagtttttcgattcaaacgcaggccttggtctaacattcgtgttggaaaccgaggagctgggaaagagggatacgatagagctatgtccagacgggaaactcaaggctgttaacagcaagaacaggaaacaatacgtcgatctcctcatcgaacgccgatttgccacaccaatcttggagcaagtaaaacaattttctcgaggtttcactgatatgctatcacattctgtaccgcccagatcatttttcaagagattatacctagaggatctggatggaatgcttcgaggaggagaaaacccgataagcatagatgattggaaagcgcatacagaatacaactggattcaaagagactgatcgccaaatagactggttctggaaggtaataagtaaaaaaacacaaattctttcttcaacttttaaactttggaaccaagtttttaaatgccttgtcgtattttgtagattctgaagaaaatgacagaggaagaacagaggagtatactgttcttttggacatcgaataagtttgtaccagtggaagggtttagaggattatcatcaaagctttatatctacagattatatg

SEQ ID NO: 7277 - DNA, 188 bp, Arabidopsis thaliana
gaggtcgtcaatgatggtgccgtcctcggtacacatcatggagtacttcgccttgccgacggcacggcggataaccgtgagatcagtgcgtggtcgagcgcttcggctgcctgtgggccgctgactcggacctcgcccatgtgggagaggtcgaaaatgccggcgtccgtgcgaacggctttgtgttc

SEQ ID NO: 7278 - DNA, 546 bp, Arabidopsis thaliana
ctgttttcactggattcagacattgcccttgtggaaaaagaaaagggtctcttacaagttggaacagcactgtggtttctcaaacatccaaggtttgataattggcgagtgcatgaaagtttatcccatgaagcgtttccaggattggcaccaacaaatgtagggttcctgctttaagaattttgctaggcgaagacatgctcggccttcgtgtagcaatttgtaagcttgaagctgctgtagccgccattctcacaacctttctaattttttcttctactaaaacaacaaatccagaaacattgtaagaaagaccacatatgaaacaaaatttaagaatcagatcaaacctaaagcacaagttgacataagttcactacttgaaacattataacaagaaccctagtttccaaaatttcaagcactgcattagagaaatctcaatctgcatttttctaatgatttggattagagtaacaaacaaagttcagatttttccatacgtgagtatagttaacaaattaaagaagcagatcaatgcagaga

SEQ ID NO: 7279 - DNA, 543 bp, Arabidopsis thaliana
gatccccagtagaatatcccattagtcggtgaagcggagagcctctagccacaggtagctcctcatcctgaacagaggatctcagcttttcaggtttggagggagctttgtctatgggagactctgatgttgaattgctattcctattagcatttatgtcatgtgttactgcaggaactaaatgatttctggactgaagtgagaatctgagaacagtggtgcaagtgccgcatctgagaagatgatgtttcctcttgaaaatgagaaagtctacaggaagctgcaggttttctgagcaactgtaacagctaacaaaaggtgccccaccagctgttggacggacatgacgcttggccacacgttgtctctctcttagacgacgggtctgtaactcatggtggtggccagcatgtctattacgctgatgatcctccacgtctgagactatctcacgcctccatctcggatgatactcaggttgttccattggtctctgtggacttgcagaatatgaactgtaagaattatgaagctgacctgaat

SEQ ID NO: 7280 - DNA, 541 bp, Arabidopsis thaliana
tgcatgtaactcaaagaatttggtgtaagcaataagtgattctcattcttggtcgtgctacattgagggagatacaacaaccatgggaaacacttatgcctaagcctaacttttgatttgggaggaggcaaatgaactaatgcctaagcctaatattttgcacaactctactcgcgtggcacctcttatcatcttcaaattggtggatcgtgagcttcgcaacctaatcacttctcgacgacatcgcaagcgttggcagcggctaatgcttttatggattcgttaaacacacctaaatcttttctaattctattgtagccttgtttttattttttttgccttggttacttttctataggttgtacgttcttgtattttctgaactctcattgtaatgatattaacaaatttagcaaaaaaaaaaaaaaactaatgtcaaacaaggatcctcaaatgccaaatgtcaaattaagttagtccctttccatgtttacaaatttgaatttgaagatggtaaattagaagaaaaaatgaaattatg

SEQ ID NO: 7281 - DNA, 982 bp, Arabidopsis thaliana columbia
tcaccacggcgtatatctctccttggtatggcggtagattcttcgaggaatacgcagcgattaacgccgaggacgctaatgccgcccataactttaaccctcttgccttgcatccctacaaatagtgattgaattgctccaacttttcagaaacaatctaaagcttttttagcacaaaccatcatcctcttagtcctttttgagttacaaactaaatgtagagcccttcaatgtatgcatatgtaattgcaacaatgagtatttgtagactatggattactcaaaattatgtacataacaataaaataaaagtaactattattttattttttatgtaatcctcgtgagatatttattttatattcatacacgcaaaaatggtaacaaatactaatactctatggttaacacgtaataatagtaattagcacataattaattaatcgaatggtgtggagagtaacttacagccacaagtttgagagtctgatctctatccaatttgagcctcaccaattgcgatctccggttcgaattctctgcgtccacgaaattcaaattcgaaaaccgaaacgcgtttaacgagtaaccaagcacgtcgatgccacgcgcccagaacggtttatcccctttcccactcggaatcagctcctctatcgccttacctaatcccaccgccgtctccgtcgccgccaccacgggaccgtttccgaaaccatcagccgccgtctctttcataaactctctcagaagcgtaaccgccgcagtacgatcgaccgccgccgtgttcagccgaaatgtgagtatccgttgctctccgtcgtcggttagatcgtagagactgacgataaacacgcgtgactcggatttgatccaacggtgtggattgatccacgtgtttttgttcatctcgtgttctaggatgattctgtgtggatcagcgcatggatcgtcgctgtatttatttattatccgggatcag

SEQ ID NO: 7282 - DNA, 611 bp, Arabidopsis thaliana
cctgcgatgtttctcactttgcttacagtacttgttccactcagatgtgtctttgaccatgagatggtaaatgaacacagcacgcttttgaccaattctgaaagctcgacttatggcttggctttcaacagaagggttccaaacaacatcaagaatcacaactcttgaagcgccaacaagactgataccctcagaacatgcttttgttgatgccagtagaactttagatccactgtctggtttgttgaagttgtcgatcatatgctgcctgtctctttgttcaactttaccatgcatcaagagaatttgttccccttcagtccagtcacattctgcaatgagctgctccatgatcagcttcagagtgtcaatatattggctatacaccaacactttctctttcacggttccactgatgcggatgaagtcgataaggaactttgttttcacaccttcctcgtatttaagtctaagcctcttgagagtcctaatgttgctggccaataccaagtctccttcttggtcggattgcacacaaatcagagatgggtgactgaacagctgaaacttgtgccaaatcaaatgtgtttgagagtgcaatctgcaagaat

SEQ ID NO: 7283 - DNA, 1142 bp, Arabidopsis thaliana
tgaagatctgtaggagttgacagcacgtagaggcagaggtaagaacacttctgcatgtagtgtgtctacataataaaatatagagtgtattttttacacacaccaaaaagagagattataattaatgtattatgtcaaagcatatatgaaggtcagcttagctagagacacgtcttttgtttatctctcgactaaacaacatggcgttttaataaaatcaaaacttaaaaggtccaattcagaacggccccatagtatatagtctacgttgaataaataaacctcaagatagcgtcaaactctttagtctttacccaaaaatatttttttttaaataacgtcaaaactctaagtcttgacctcaacaccaatatatatttgccttctccaatatctgatttttttaattgtttatccgagtcttcttggtcttttcgaatgtttgcccgaaccagaccttcccacgttcggtggttggtggccgcctcggcatttggttgatttctgtccacattttggtccttttcattcatgtaccatgttctagggtcatttgacttgttgaccataaatctactaaaacaggcctaataccgatgggccgtagcccgttaataaacaagacaatttatatttgtttcacttagcttgggagccacggatctctagaaacatccagagaaatatcaatctccccacttctccagaacattcactcactgacaatatcccaccttcaacacttaactcctgtatatagtcctcccctgtctccagtttcgtcgcacacagttctcagataaatactaaactcactgttaaaactttctcaacaaagcttcctgtttctctacaaatggcatctgtctcgctcttaagagactcctatcatcctccatcgctccacgttcccgtagtgttcttcgtccagctgtttcctctcgcctcttcaacaccaacgccgttaggagctacgacgacgacggcgaaaatggagacggagttgatttatatcgccgctctgttcctcgccgccgtggtgatttcttctcaggtaacaaaccaattgtttcgcttttcctccagatctatgtctctctgttgttaacgtagcgaaaatctagtaagaaaacgaggtaatg

SEQ ID NO: 7284 - DNA, 687 bp, Arabidopsis thaliana
ctctttttttacgctcggtccaaaattgtcctccccaaaactcagatggaaaagagccacaaaatcaggattctatgtgtcacgtgtgtgtgtttgtgaattgtggtgtcatattctacggctaacaaccacatccttcacttatattcttgatccaacgtcgttaccttcaatttgcattacccaaattgtctttgactctttgcatagaatactcattgttttttattccagaagctcttcaatagtccaaagggatttacaaatgcatttagcctatattcggaaaaagacttataacagctcattgacatggtttaacagattgctcattgttaatttagtgaatgatgataaatgataatattattaaattttgctaagagtttgtcttattacaagaaaataacttaaaactttaaaactgaacttaaagacaaataagaactaggatcgtaatcaatcgtacggtgaagatcaaagacagaggatgttgtcaagtctctctcaatcaaccgaaataagaccaattctcatctttgcccttgccgccgccaccagctgcagcttcatcgcagtagtaaacgccaaggttattgaccgctgcggtgagatcgtttgtagacgtatccatggaaagataaggcatgttggtgaatgacgtagcaagacacgatgcgactaata

SEQ ID NO: 7285 - DNA, 523 bp, Arabidopsis thaliana
accttcttcatctaacaagagattctccggtttcagatctcggtgataaacaccacggctatgacagaaatcaacggctgagatcaattgctggaaataaacacgagctacgtcttcacgtagtcttcctttagccaccttagcgaataactcaccgcctcgtacaagctccatggcgaaatagatcttggatttactcgccatgacttcgtgaagctcgacgatgtttggatgtttcaccatcctcatcacagagatctctcgtttgatctgatcaaccataccaactttcaccactttctcttttccgacgactttcatcgccacgctttttccggtttgtatgttacgagcgtggtacacttcgcgaatgttccgtgacctagaagacgccctagctcgtaacggccgtgaagcagccccgtactactaccaccgtcagatccattctccaccggttttgctccgaccatggttttttacttacaacgatgattagagaattttgtaaaaagtagaagaa

SEQ ID NO: 7286 - DNA, 478 bp, Arabidopsis thaliana
  unsure (1)..(478): unsure at all n locations
ccgaacaacagattctctggtgggctgtccaagaatattgaaaatatccaatctctaacggaattagtttaatctaacaatccaatgggtgaagaggatatggtgggaacaaattgggggaagatgagcaatttggtaatattggacttatccaaaatgggtttgagaggtgagattcctacaagtctaaccaacctgaagaggttaaagattcttggtctgaacaacaacaatctaaccggtattaatccatcgaagaagcttgaagctttgccttgacttggtgctttatacatcaatggaaacaacctaacaggtgagcttagattctctacaaagttctatgagaagatgggaagaagatttaaagcttcaaagaatccaaatctgtgtcaacctttagagatggtaatgtcagaatctcntnaacatttaaatactcttggagtgaagcatgcacttaagagaaggaagaagg

SEQ ID NO: 7287 - DNA, 694 bp, Arabidopsis thaliana
cccttggtaatggatccatgatccgtcttcatttttgctatttaaaatcaataatgatttcatcacgtgatattctctctttctcgtgatttgttaatgcaatttttttgggtgggtcagtagtggttgcgtaacgacctagctaaacctgtttcctatatttccccaaaaaacatgagtcgttaggcccaatttgtgatatataggcgtgctgggcctctaaaagactcaaacgttgggaccaaagtaaggcaagtaaacccaacgcagatacacctaaaacaaactttattcaaactaaaagctctttacacggacacagagaaaggttatcggattgtatgaccgtgacttaaaatgtacaaaagagccactgaaaccagtaacttatgatagtaaacattatatgatcctctttatcaatccaacattctcttccaaattagatttataaatcatgaatatgtaagctcctacacgaacaagagagtatctagacaatttacttgacggtgagtttccaaccataccagcaccctggtcggtcgcacaatagtaaccgtaagagcctggctctgtcaaagtaacctcgtaagtctcccctgcaccatttagaagcgctgtctcatccatcgagatcttgcttgcgtccacaccactagggatctcgtcttcgtcgaacaccacgttatgt

SEQ ID NO: 7288 - DNA, 561 bp, Arabidopsis thaliana
caataataatataagagaaagctccaaaagcaaatcccacatgaacccatttgacaacaacacatgtctagtaaccatcacacccattgatgaacttgactcatcctccttcttaaggttgctccaagtttgtttaattaccaaactatcctctgccttctccatcatgcaagacttcaatccaacaacatattgccgagattctgacacaacatcctgacaaagatttggattctttgaagccttaaaccttgttcccatcttctcatagaactttcttgagaatcttagctctcctgatagattgtttccattgatgtatagagcaccaagacaaggcaatgtctcgagctcttttgatgggacagtgccggtcaagttgttgtcgttgagaccaagaaacctcaatcttctcaaacttgttaaacctaaaggaacctcacctcttaaacccatctttgacagatccaaaatgaccaaattgcccatattctccactttatcccatcatgtcatcactgcccattgggttcctgataaaacaagatccgttagagatgg

SEQ ID NO: 7289 - DNA, 516 bp, Arabidopsis thaliana columbia
taatatctatgttgtgccttgagatcctccattagagcccagtaatggtctctgtagcatctagagagctgcttcaggttgtgcgatctgcgtcggagaagctccgggcgagtgaggtgattggaatttcccaggatctgatcctccaccgccatcgaaatcggtgaattcgatgacgtcgacgggttattagggtttcgaaattgggattcctccaatacaccggatttcgagggggttgaagcaatgatcggagatggatgcctaggaggtttggaagaagaagggttttgcttggaagctgacgccattgttactgttggaaaacaagggagagagaaagagagtggcgaagagtggctagaggaaagacaaggacgagacaggaaactctggcaaaattgacatttatagaaaggccttacttaaaagcccaatgggcgataacatgaaccgaaaacccatgaaaaaaatcgaagtagaccgattggtttaaatcaggttctgctggtgtgc

SEQ ID NO: 7290 - DNA, 938 bp, Arabidopsis thaliana columbia
acattttcagcaatctcaatgatctcatactccgagatctaccatttatttcccaccagcaaattcagtaagcagaaacacatcaaatcaaactagaaagatcactaaaaatacattaaaaactcaacctttttgggagagatctgttgttgcttctccttcactagctggtgtaaccgagaagatagtttctcgcaaacctgacactttatatacggaacatcctcctttctcggcgtcgaagaaggtttcttcgcggcatcggaaacaggtaataacgccgacgaagctagcagagctaatgtaagagctaccagaactcgattcatcacaaccattgaagtcagaagcagagaagctttctctatctctcttaaatatggtaaagtttgggactttaataaaattctttcacgggttctatatagaagatcatgggtttaaagaattctctgggttttgatcctgtgccgtgttcatgaagtggaatcgatgttacgcttgttaacgtgtttcctgcaatcttattggctgttggaatgctgacacgaacttgggtccactttctcgaccatgttagataattactgttttgtttttttgtatgtgtggtaaattattcggatcacagcacaaaatgggccaagcagtaaggcccattaattaatacgactggatggctcaaatgtaattaataggatggagagtggtaaacttgtcattggcaagacgaaaagtggcgtcggacaattggatgttgccgtcgaccaattaagaaagaggagaagtgatttgcagctccggcgagaagcagagctccggcgttgtgtttatatctcagaaaatggcaaaaatcgtgatattatttgatttcgatcggactttgatcgacggagatagtgacaattgggttgtcactgaaaatgggactcacagag

SEQ ID NO: 7291 - DNA, 887 bp, Arabidopsis thaliana
gtcatattgattagattactaatatagactgtggattatttgcatgactcattagcaagcggatctaccattggaagagttcacatctatcaatattggaatggagatgatgaattgattgctgaaggtttgttgttgtcaactgatggtgaagaattggtagacggtagacctctgggacatggtgctgcagccattaagatcgtgttggtggttaaacctgaagcttatttatggagaccaaatccgccaatctcattgatgagggatgcactaaatgagaccatcgcatggcctattgataggttacacctacttgatctacctgcaacagatgaatcaaccaaaaaaacacatcgagtaagtttttaattaagtagcttcatgtttagattagaaaatgggaatattagagtagcttcaggtttagattagaaaatgggaatattagagtagcttccttgatgtgttgatgttgctgtgatgttgatgttgctgtgatgttaatctgatgaattgttttaaattttttgttgttagagtactagtactcccagcactggtaatagcagcaaaggttcgaaacagaagtgctttctattagatattgataactctgggaagaaagttgcagtaggtcgtgtgtcttcaattgatccagcagagaaggtccatcacgtccctttaggttccaacgctagcaaggtctgggtagaggtttccaaggttgatggtgcacgagtgtggaggccaaattccgaagttacattcatagctgatgcagtaggaaccacagttggttggcctaatgacaagattgtatttgtgtgacaatatttgtggaacaagattggtcttaagtacaatgaacttcaaatcttggtgtg

SEQ ID NO: 7292 - DNA, 1107 bp, Arabidopsis thaliana
cccaatgagattattaacaacgtttttatattgttatgtttatttttaatatagcattttaacaaatgtaatggtttaattttgtttcttgctataattgattcgatacgaaatttaaaatttacgattatattgaatgaaaatacttatgaatttgtcacatacaacattagattacacaatacacaccaagatttgaagttcattgtacttaagacttcctgaaaaccccaaaatattgtcacacaaatacaatcttttcattaggccaagcaactgtggttcctactgcatcagctatgaatgtatcttcggaatttgccctccacactcgtgcaccatcaaccttggaaacctctacccagaccttgctagcgttggaacctaaagggacgtgatggaccttctttgctggatcagttgaagacacacaacctactgcaactttctgcccagagttatcaatatcgaatagaaagcacttctgtttcgaacctttgctgctattaccagtgctgggagtactagtactctaacaacaaaaaatttaaaacaattcatcagattaacatcacaacaacatcaacatcacagcaacatcaacacatcaatgaagctactctaatattcccattttctaatctaaacatgaagctactctaatattcccaacttaattaaaaacttactcgatgtgtttttctggttgattcatctgctgcaggtagatcaagtaggtgtaactatcaataggccatgcgatggtctcatttagtgcatccctcatcaatgagattggaggatttggtctccataaataagcttcaggtttaaccaccaacacaatcttaatggctgcagcaccatgtcccagaggtctaccgtctaccaattcttcaccatcagttgacaacaataaaccttcagcaatcaattcatcatctccattccaatattgatagatgtgaactcttccaatggtagcatccgctttctaatgagtcatgcatataatccagagtctatagtagttatctaatcaatatgactgcaagaggaacatagaaggagttctaatttacctctggatccacattgctaggttgt

SEQ ID NO: 7293 - DNA, 1140 bp, Arabidopsis thaliana
cttataagttatagtgatccggccaaatcgactcaccgttaatacttcttaacagctctcctaacagcgtaactaacaactattttcgtccttaaaccaacgataacggctgttaggccacgttttgtaacggctgttttatttcaatagtgatgtagacatacaccagctaaaaacttttatgtcaatcctttcagaatacaaattttatcaaagtactacaaaaattgactctaaaatccatttaaccactattgatatgcattttaaaggcacatattatatatatatactccatatatcccgcgtacatatttcaaaaatatgtgactttgcaaaaacattcgtacatttcgatatatggtcttaattgtgacaaaaaagtcgatactgcatgcaccacactttattaggtggtcacccacattcatagtcataggatccaaaactaacccgttgatccgtgccgtcaaatggttcctaacctttactcttttttttggttaaagaggttgctaacctggttcttattaatgaaactgaaaaacactcaacaagaaatatggactcaaaaaattatatcaagttaaaattaaacacacgcacatgcatgcaatctataaaaaagagacaagtccttatacactcggtgtcctaaagattttcagcttgttgtctcctccacttgtaacctcatttggttcccactacaaacaccgtagatatatctcatctggcttttactttcaacatctaaacatgcgctttctagtttttctacaaatgtcaaatagatagatcagttcatagacggcgccagtgacaatggtggtggtggaggtggtgagtataccggcggacatggtctagccggacgggtgttgacaatggtggtgaagtaggagatggcgccggtgccaatggttgcgaagatggtgatatttgactcggaggaggagaaaaacacgaagagccaggactacacttgaaagagtcacaatctacaggtttcgacaaaaacatcttacactccatcatcgatctttggtccctcacgtccttgaagcaattcatcgtataattataattctctagatagcgacacgtggctggttctccggtgaaatagttagacccgta

SEQ ID NO: 7294 - DNA, 590 bp, Arabidopsis thaliana
acctacagacaatgataaaggtggaggtgactctagttatttttcgaggtggaaagcggcacagttagataatgtggagttccttgttgaaagctgttcagtaaagagcatcactgataaatccgtagagatagagttcatttaccttggttcttcagcttctggctcttcaaagtcagatgccttattcaaagtcaatgtgacatatctgatctatggttccggagatatcatcaccaattggtttgtagaaccaaactctgatcttccaccgctaccacgtgtaggtatagaattccacattgaaaaaacactggaccgtgtagaatggtatggcaaaggtccatttgagtgttacccagaccgaaaagcagcagcccatgtggcgatatatgaacacaatgttggagacatgcatgtcccttatattgttccaggagaaaatggaggtagaacagatgttaggtgggtaacattccgaaacaaagatggtgtaggaatatatgcttcaacatatggtagctcttctctaatgcaaatgaatgctagttattatagacccggtgagcttcacgtgcacgcatgaagag

SEQ ID NO: 7295 - DNA, 582 bp, Arabidopsis thaliana
ccctagtcggtgtaaatatcaaatggaggaagaacggcgagttctgttcggaaagtacgagatgggaaggttattaggcaaaggaaccttcgccaaagtctattacggcaaagagatcatcggcggcgagtgcgtcgcaatcaaagtcatcaacaaggatcaagtaatgaagagacctggaatgatggaacaaatcaaacgcgagatttcaatcatgaagctcgttcgtcatcccaacatagttgaattgaaagaagtcatggctacgaagaccaagatcttcttcgtcatggagttcgttaaaggcggcgagcttttctgcaaaatctctaaaggtaagttacacgaagacgctgctcgtagatatttccagcaattgatctcagccgttgattattgccatagtagaggcgtttctcatcgcgatctgaaacctgagaatcttcttttagatgagaatggagatttgaaaatctccgatttcggattatctgcgttaccggaacagattcttcaagacggattgcttcatacgcagtgtggaactccggcgtatgttgcgcggagtattaaagagaaagg

SEQ ID NO: 7296 - DNA, 533 bp, Arabidopsis thaliana
tgaatctattcttaagaatctttggcatcacactgatgctataatctgctgctcaatgaaggtaacaaacacaatgttaaacacataaatgtgtattcgataggagtacttgactcgtgtattcgctgatctgttttgggatttgaacatcggttaggccttgcccgtcttcacatttgcaaaccaggcgggacttgacatgctggagactacattagttgctcttcaagacatctctttagagaagatatttgatgacaatggaagaaagactctttgctctgagttcccacagatcatgcaacaggttcttagaaacattttctgatcttcattcttatcacatatgtttagttttatcgacttactaggatctattttttcagggcttcgcgtgccttcaaggcgggatatgtctctcaagcatggggagaccagtttcgtatgagagagcagttgcttggaaagtactcaatgaagaagaaaatgctcattgcatctgctttgtgttcacaattggcctttgtgtgaga

SEQ ID NO: 7297 - DNA, 614 bp, Arabidopsis thaliana
caccagaccatcacagagcatgagaaaatgactatcatgcttataccttactatcactggcaaggaagcgcaatggaaacatatcgtataatcgcactccatgcaatttacttccaaactatccatatcaaaatcttctttgcagatttgacagtgcgtcactttatttgagtcctcccaaggtaggtataagggatgtttgtggccgtggaattcaaatggttcgataatcgaggcacaccgtaagtctagtgctatacgttcgtgatgtttatctaaataatgaaaatagtagaagccaacaaccagacgcctacatgcagtacactggcttacactttcctcaccaggagatgccgtgtttaaaagtgtaagtggatatggatgtaagggatgtcgcttcatgcatggagcatttgcacaactttcatggaggataaagtcgcattccatgcatgaatagaattgaccttcatagatcggaagcgcacaccctcgacaatacgtattttcgtcataagctctaaagatctcaagttgcagatggtgactatgaaaagggtggagtattattccatcagctatcctcttgaacggctcaccatcatctatct

SEQ ID NO: 7298 - DNA, 539 bp, Arabidopsis thaliana
aacgctcagcaaaatacttgtttagcaacgcagccttggcatgtccaatgtgaaggtaaccacttggctctggagcaaaccgaagtcgaacctttccaatttctgcttccggcaactccacttcaggtttgcctttatcctgtgcatctgctttagtagcttgttggctgtctttagattggagcgacaggcttccctgagcttttcttcacatatgttgctagaaccttgttaagcagctcgctgtactcgtctaatgtcgaactaaaccatctaaccaaactctaatcctttttcgatttcctcaaactttcccatctttggccagttcctaccaaaagttcaactaatcagcttcatcaaatacaaagaaactcataccaaagagtcaaagataataaatttatacctgcgagagatgaccaaatagcaacatcagcaatggtaagagaattgccaacaagaaacgtgctactctcaagatacttatcgacacgaccacaagcattctcaaactcggaaccagaggagaagacaga

SEQ ID NO: 7299 - DNA, 751 bp, Arabidopsis thaliana
  unsure (1)..(751): unsure at all n locations
gtcctgttttcagaccaaaatagacttcttcggaattttccctctctttcctgcaaggccatgcagatatctcgtcgcagactccataaacaacacctttgaaagcaacaacaagcttcagacttccgtgtttcaagtaatttccctaactcttgaaagaataaaaaaatgcttacatttgatcttcttggagaatgcccctccaacatgtttgcttttgagtttgatcatgacctgagaaattcatagaggttaagtaactaagtatagagaagcaaatagatatgtgtctcttacagattaaatccagtctactcaagtacctgagacttcttgttgatatagacacaaactcgcttatttcgctgcaatcctgctaataaattagaattataagcatcttaattagtggaaccagtcttgaatagagtttgagaagaataggattaccatttcgtgcacattgcaccagttcgccctctaaaggaaggtttggttcctccaatctaaactgacaattttcgccgggccagtgagagtctgagaagctcctttcacaaggtgtgatagttgcattcttccttgattccttcggctgcctcacctttaaagctgcttcccctctcaatgctggttcattttttccacagactcagatcaaataccatcttactaacccaaccaaagcctcaaacaccgaacgtttaaacaatagcgttaccagttgcagccgagctgtgagangcatgag

SEQ ID NO: 7300 - DNA, 712 bp, Arabidopsis thaliana
gagtgatagaagatctcactggatcaagatcactgataccggtaactgtacccatataccgacgaactccacattcttcagtctcaaatatcattctaaaccgcataccgagggaaacttgagcgtacatcgctttggtatacttggctaaaggaaccacaaactcagcaggagcagccctgaaaaaactcgggttgtaaatctctcagcaattgccatgaaacaagcatatatagtaaggttaacgtagacaaaaggaaacatagatcgccacctcgggttgtagaaaatggtgaaaggactgttattagcattagcatgagctgcagctgcaagaactccgatgtgcatgctatcacttgatattacagatgaagaaagtgcaggctgttgtctatttgcacgtcttatccccaacagaagttgcgcctttccatctcttaattgaaagaaaaaaagaattagcatcttgacaaaaaaaaataccgaaagagagcattggcacattgagattgatataccttataaaaagaacagagtctccagcaaagagccttttcgtgctgacaaacacactccagcctgtagttagcaagtgcctttttggttgacctgataaatgtcaacatatccaaaacgtaagaacaattctacgaaagccaaattgattaaagaaggtaatctaccaaaaacaaggtaaaacctcgataaa

SEQ ID NO: 7301 - DNA, 651 bp, Arabidopsis thaliana
tgaatataatcaaatatatacaggatcctgcatcacgtgtgaccagtgagattcagagatcccagcgagcatttggcagcctcaaagcaatttacttggcggagaagagactgaaccccatcaacccatctctgcttgtgaatcttgctcttgcacttgaactccaaaagaccttgtccggttttcagaccgaagtagacttcttctgaattttccctctctttcctgtaaggccaagctgatttctcatcgcagactccatagacaacgccttcagaaaggaagaacaagttcagagtgtcgtctttcaggtaatttatccaaactgaaagattagtaaatgcttacatttgattttcttagagaatgcccctccaacatgtttgcttttgagtttgatcattacctgcaaaatcataagtagcataataagcattgaatcaaaagtgaactgagttgtgttatgtgttatatatagatactaatcaaatctgctatacctgagacttcttgttgatatagacacagacacgcttagttcgctgcactcctgcaagttaaagcacaaggaagaagagttaagctctctgtcttatctcagatccagtgaactcttaaagtgatcagactcggtgacagaagacaattacc

SEQ ID NO: 7302 - DNA, 999 bp, Arabidopsis thaliana
gggatatcaaggccagcaacattctcttggacgagaggtttgaggccaaggttgcggatttcgggctggccaagttcaaccccgaaggaatgactcatatgagcacgcgggtcgcaggcactatgggatacgttgctccagagtacgcactgtacgggcaactgactgagaaaagcgacgtgtacagctttggggtggtgcttctagagcttctgagcaggagaaaggcgattgtgacagacgaggaggggcagcctgtgtcggtggcagactgggcgtggtcgctggtaagagaaggccagacattggatgtggtggaagacgggatgccagagaagggacccccagaggttctggagaagtatgtgctgatagcagtgctgtgctctcaccctcagctccacgcaaggccaacaatggatcaagtggtgaaaatgctggagagcaatgagttcactgttatagccatacctcaacggccaatccctctggtggcttgtagggaagagattgaccgctctgttagtagcagcagtggctcagggaagctcactagccccacgggatatcaggccttctcattcggaggtgatggcccctcagggaacacgaataccacttagatgagatatgtatgttgtagatattaatttagtgtgcattcatttcattctttgatgcttcttctgtcacttatgtaagtacagttgctttttccaataaactcatcttgttgtaacagctttggatgcaatattatacaggcttagaaatatatatatacacacatttcacattggtatcaaatgtcagaccacgacaaaagcttttgttggaaaaagacacgaaagatgcggaggtccatgaagatatccatgtgtgagtgtgcaacactttgattgatccgctccggtgatttctctgctaacgtcattaatcaactttgcaatgacattttggtgggtgggttatcttacattcttttcttttctttttact

SEQ ID NO: 7303 - DNA, 2189 bp, Arabidopsis thaliana
cagccttggtgacacacatggactcgaaatccgggctggaagcagaaagtgaaccacctctccatacacctagtatggggctgcaaatacaaaaggagttaaaataacaaagaaagagctgcaaatataaagagtaaaaaaaaaaaaaaaaaaaggattgaggttgtttactcctcctgagttgttatcttcacatcaaagtgatctgggacaagtggtcgaagctctccttctctgcaataatgtctcagaccatcaacttctctaataataaagcagtactaatgaatgattcatcacataaatttagccttacagtctctccttaagttgtggaaataatgtacttccaccagttaagataatgctgcggtaaaacatcaaacattagacatcaaagctcattcaataacagcagaagattaaaaataagtaatccatttgaaaaccacctttgatacaaaactggttgcaagtaagaatggcatgagtttatagctcggacaatgcactctgcaagtcccgcctgattcatccctatcccaaaacaaaataaaataccatctcatcatcatcttctatctacaactacattctaacattcatcaacacaaacctaaatctgcaggctggaataacgtctcaggtacaagaaaacgctcattcgttaaatcaatctcctgcaaagacaaaaaaaaaacctcaaacttgagagaaatccctaccaccaccacagagacaaaagaatcgaaaaaaagtttacatttttgttcatgtcagccttctttctctccccaaccttatccatcaccaccacagactctttctctgacaaactaagaaacctcttagcagcttgagggtctttaacatagcctttggtatgtgtaacaccatcaggaagaacataagtagacttgataagagtgttcccatttctagcaaggcggagatcacgaagaagatcaagtgaaacaaaacaaagcttctctttagcatcatcaactaaaaaagtttcatccataacattaatagatctataagaaaccaattccttcaagtaattagtaaaagcttttcctcctaaatcaatcctcttaatggcgtgattaagagtgaaattgtgaagaacaggaacagcgtgagtgaaggagaaaccacaatcaacaacgagactacactgagtctttgagaggattgaatcaggctgacgactagcttcatagagatgaacaagagattgaggatgagctatatagagagaagagaatccgaaatcttcgaagacgagttcgtcggtggttcgttgaacggaagggattgagagtggtgcttcggtgaggaggagagaggaggaggaaggagctatgtggaggagggaagtgaataggtgtgaccagatttcgcgttgtaggtcggagtttatgaggtagccacggtcgattgggcggcgtacggcggcggaggtgaggtcgatttcgtcggagagagtggtgagtggtgatgggtggatgaattttttggaagagagaggtttgtagagacagttcgggattacggtggtgggatcacgctcgccgccttgtccggctttgattagaccaccgccgttgtctagaacaacgatgtttgacattgatgacgatgactgcgccgcgccggcgaacgaactctgtaagtggttttttgttgtttaaatgaatcggtttaggatctactggtttaagctagtgcgattttaagaaaagactgtattggaattaccagtttagagatttcaaactgagggaagagtgaatttgaattagggaaattactaaaaccggtccggttgttccgttaaacgctacaaaagttagtaggcccgggagttcgactaaatcgggttggtcggatcgggttattcggtttaaggaaaattcagggttttgaaaatttcactgaatagactcggatttaaaattcggttcggatcagttcggtagtcggttaattcggatcggttattagctaaaatttatgttctgaacatgaactggattttgtatttttcttggtttatagattttttcattttggtttacatattacaattactctattacaaacacaaatctagtaaaatactaacaatgggaaatttacatttataacctacaaaaatattaggggatcctctagtctagagt

SEQ ID NO: 7304 - DNA, 529 bp, Arabidopsis thaliana
ttggatggattgtagagtccattgtccaacgctctttgatatattcctgaatatccataggcataaacttctcatttagcctcaacttgtccaaaaacaacctagcaattacaggactcttcaagatctgacatttcccattaggtgagcaactatgccacgtgcatgatgtcttaaccacaaacagttgcctatctggatcatatgaacaatacactctccatttacatttcccgctcataccacacttgaatgaaatcttctccttttcccatctatcttgaacaacattatgcccgtgctttaatgtcacctctaaaatagcttctttgaactcaatccctgtgaagaatgtacttccaatcacaaacttatcacccatagcccttctgattcttctatccctcaccataataggatcctcgtcttcatctgagctctcgggaattatatctcggcctatcggtatctcgtcttcgaaatttgctactccatcatctacttcaaagtcaaaacgctcaagaggatc

SEQ ID NO: 7305 - DNA, 1093 bp, Arabidopsis thaliana
gttctgtcggactccacggaccagaagtcggcggtaacggaagcttccctctgtcagaaccatgattctccagacacactgctttaaaccgttcaatcaaagaatctgtatccgtgcgcacagcggaagtatactcttgacagtcgtcgaaaccttctcgatcaaatccaaaggcaatccgtctccgtttgaccagaaaagatcgcatagaaacttgaaatcctcttctacggcagcagagtcttgaattgtgaagccacgcgatggtccacctgcaaggaggaccaataagaacccgtcgaaagaagctctcatgatgtccgaaatgactctggttcggactctgtcatgaaccgatgaggagataatctcaaggcaccgttcgagctcttgaagaaacggctcaatccttgaggaaggaacttccccgaggtacagaccatcccagagaacattgctcagatcgtggaagacgatcttgtaagcagttgcttcagacaattgctgtattcctttcgagcaataactaatcgactgttcaaatattttacgtttagcatccaaagctgcaacttcggattccgggagacgattcaatgtttttctcccagatgattcgatctctgtcctgatatactgcagagtgttgatcctgcaacagaactgaagtatttccgccgagtcattacccgtccccagctgtgattttctcctgtgagaagctaccattggcttctcctttttcttgaatacaccatgtagtctggacccgaccgtgcatcttgttaaagcaggcaaaacgggtagaaacgtattccgcgagcctaatagaaaccatataaaaacaaaaccagaaactccataagtgaaatgaacaaagcgtgacgttttttattccaaaaactaaacaatcaactgcttaccgcaggatgatttcgcctttgatacataatgctgcatacacttgtctagtcctgacgttagctcaggaagtaaaactggatgcaaaagaatcggcaacaagaaaaacgcttccaatgtctcatctaccatcctcagtacatccacagcagaaggagcgatactgagttta

SEQ ID NO: 7306 - DNA, 717 bp, Arabidopsis thaliana
gtatttttagtatgttaaagcatacataaaacctattgaacacatcttcacccttctcatttggatatgtatcaatgaaggcaacagaatttgggttttgagaatgaatctcttcaacatatcctcgaatatgagcaaattgttcctcatactccttcttaagcattttcagagcaagaagtcttcctctttggcattgtgggattgtagacaccaatttccaacgctctttgatatatagctgaatatccataggcataaacttttcatctatcctcagcttgtccaagaacaacctagcaattaccggactctttaagatctcacatttcccattaggtgagcaactatgatgcgtacatgatgtcttgatcacaaacatttgcttgtctgaatcataagcacaatacaccctccaattacatttgccacccataccgcacttgaatgaaatcttctccttctcccatctatcttgaaccacattatgcccatgtttcaatgtcacctctaaaatagcttctttgaactcaatacttgtgaaaaaagtacttccaatcacaaatttatcacccatcacccttctgattcttctatccctcaacacaatcggatcctcgtcctcatctgaactatctggaattatatctcggcctatttgtatctcatcttcgaaattggctaccccatcatctacttcaaagtcaaaacgctcag

SEQ ID NO: 7307 - DNA, 757 bp, Arabidopsis thaliana
ctaaagctttacagactgaccttccataatggtgcgtaaagtgatgttaaataccttattcaccacatcctgcggcgcttcatcaaaagccaactcggaaggcaatacctgttctgactgagaaaaataatcttccagcgcactgcgtaagttacgaaagccgctaaaccccagcagctttgataccttaactatcatcgcttcagataccgccagagcttctgcgacatctttaattgcgggtgcacaactcaggttaccgggtttgagtaaccactccacgatgcggctttcattttctgtcattccttcctgcttcattcgcaggtaaggcgctaaccctataccgttcggaagcgctgaatcaaactctgactggctcatcacgttctcttgtccttgaattgaagacgccactatatcaccacagcaagaacagaaaagatgctggcgacttcacaaaaaaataaaatttataaagtttattttattgtgaacaatggcgagtggcttaaaattttatttcatttaattagtttaaaaacatgatgttatttgtttttctggttttttagatgatagatgttgctggatggtgagtgtctttaacgctattgcgctgtcagatgtaactctgtaaaacagatcaggaaggcgtaattcatcgattttgggtgtttttaattcattaacatcacaaatgttttttgattgtgaagttttgcacggacgggctttaaagcacactggcggacgt

SEQ ID NO: 7308 - DNA, 588 bp, Arabidopsis thaliana
ttttgcttgaaaatatatatatccaagagtctttggaagtccttgttcaaacattggcaatgggttctaaaatgtaagagtttcgacctgagattttctccgggatgtatatcacattatagttatgaatgtctaatatattgtataaaaacatactgatataataataataataattttctaattattttatttatcttcctgatgtctcaaatccaaggtatcatttgaaaactacaatttgacctgcaaaatgaaaaagctcaaagaaatcatgaaacaagacaagaaaccgaaacatatcaaaagattaagatcaatgacgcaaaagattcgctatcgatgaaaggagcgaaaccatgaagcaagataggttgtagatgaactaggaaaggttgaagatggactaattttgtactggaaaaggtgacggtatagacctgtaagcttgaatttccttaacaagtaaccgagccggtttggagacagtagtgtgaagccttgcatttctttctctccacaaagtgtaaacagctgcttgaaaaataatttttttgttaaattaatattaattttttgaatataatg

SEQ ID NO: 7309 - DNA, 776 bp, Arabidopsis thaliana
tgtctgcgcgatcgtcgctcacttcaccatgccagccgtcgtcgcgcgaatcttcatagtctcgcccacggtcagggttataagcgtcattaatcgcctgctgaatattgccaatggtgtcgtcgataatatcggcctgggccggaacggtggacagcgtgagcagggtgaataaaagaaatagcggaaagcgtttcattagccaacctcaacaagaaactctatccacattaatcattactcatccatgcaagtagtggatgaatctcaatttctccgctgctctattgccgtaatcgcctccacgcgttgttgatgacgaccgccttcgtactgtgcgcccagccacgcatccacaatcatttttgccagttcgaggccaaccactcgtgaaccaaaagccagcacgttggtgtcgttatgctgccgcgaaagttgcgcggaataaggttcgctacagacgaccgcgcgaattccggcaaacttgttcgccgctatcgaaataccgacgccagtaccacaaatcaaaatcccgccatcaacctctccgccagcaacagccagtgcgacttgactggcgtaatgtggataatcagtacgctctgacgaccaggttcctttatcaatcacttcaacgccacgctcaactaaatgtgccactatttcatgttttaaaatgaaaccgacatgatcacagccaaatgcaatctttttcattcatcttcccctgtccgtgcaaaacttcacaatcagaaaacatttgtgatgttaatgaa

SEQ ID NO: 7310 - DNA, 593 bp, Arabidopsis thaliana
cgccagtgtgctctaaagaaatgtcgcgctggcagttgagctcccaattttcggccactgttagtggcgttgaccggctatactggaaggcccactcggtgagaggaagcgttggctcgccggactctgcaatgagttcacgattgcgggctgctgcatcggcaaaatagagagaggactttcttcagttagcgttgtttcgttgtatttcacggccgcctcgtatatggaggtggttcacatacaatgattttccaaccatggtcatggttgtagggctcccagtcaaccacgttgatacccaaggctcggagccgctctcgagcgtgcgacagggcccgagtcactgggggatgaggacgaacacatctagctccatcagattgcaaattatgatcaaaacatgggatgaacgtacccatcatcccacatgatgcccactgtaatattttccgttgaagaaacatgcttccaaggcaacggcaccaatgaggtctcctcatcccaaggctcttgatcaaggagtgccctttgaaacagctctaggtcttcgacgcactgacaggcaagtgggcgattacgcctaggataga

SEQ ID NO: 7311 - DNA, 896 bp, Arabidopsis thaliana
taaacaagacccaaagctccgcagggaggatacttggagctaatacaggtttggttgtttgcggatttcgcgagaggctgcagtttgatgctggccttttatcatgtatttttgaactcacgctcataaaatgaagactttcatagcgtttatgtaccatacataacttaggtctaatgttagacatggaaaattgctttagaacacacaagtttgtctcttggcttcccttagtggggtggttaacttatctatctgttacgttctcagtaagtcatggttttagttgtaataagaatgcttgtgttgtactaagacctcattatccaccctgcaggtcgactatgcctgtacacctgaagaagtgcaactacatttccaaacatgcggaacagtcaacggggtaaccattctaatggacaagtttggacagccaaagggatttgcttatgtggagtttgtagaagtggaagccgtgcaagaagctctgcagctgaatgaatcagagcttcatggtcgtcaactgaaggtatcttctcgtactaagaccaatactgaaggaaatggacagttcattgatctcaactcttctcttttggttttcatttcaggtctcgcctaagcgaaccaatgttcctggaatgaaacagtatcatcctgggcgtttcaacccttcaatgggataccgtttcgcagaccctttgtgcctccgtatttttattccccatatggatacgggtaagtttaaactctgcatatttaccatcagtttatcacaaatggctttctcttcttcgtctcacgagactcggcaatgcctcgtgcaggaaggctcctaggttcagaaggccaatgcggtacatgccttaccaatagaaacgtaccggaataagaag

SEQ ID NO: 7312 - DNA, 1127 bp, Arabidopsis thaliana
tgttagtatttatatattattaaatagaaaatcatatgtttagtaaatatttaccaggtaatgcaagatttgtgttggcaaaaccaaccaggtgagcgtaattgtaaactttaaatttctctttctctatctttagccatgattcatataccacaatgattttggtatcaatgttgactttgatgacaaaagggtggtccgtgattttggtgtatttggtgcatgacctaacttcaaaccacaacaggtgattctgatgaagtggtttgatcggtttatgagtaaaggagatcaatgtccaaatagcatttgagaagagctttcgtaagacaattcataattgagccaccacaaaggcttttacatttgtagtttttgtcacacagaagtttacattgatttgtagtataatattctttgtacaaggtttcatatacttgattctgcaactacaaactaataataaaacagagaactcaacatgaatccactaacaacaattataatactttaccaaatactacaaaatacttgcagttaccaacacttacaaaacagaactcaatcataaacaaactcaatcataaacaaaaccattgtgagaaaactctacatccgaacaaagaaacagatggtccacgagttcaccgatggtccacctcgaaccaggctccttaaccaaacacctcatcagaaagtcttgagcttctgcagataaccgaatcgagatttgaggagtgagatcactgtgaccgatcaaatcaacccaatcatcatgagccaaatcaccatattctccccaaacccttttcccggttagcatctccaaaacagaacatccaaacgcgcaaatgtcaacagcaaaatccagaagcccaccgcctattaactccggagccatgtacctagttgtccctctcatgtgcccacgtccgtttccatactctttagaacctttctccattgataaaccgaaatctgcaatctttgtcaaaaacccattagacctaaaccggtgatcaacagggctgagtaagagattgtccggtttaatttcacaatgaataatgtttctgcggtgaatgtaactgagaccagacagaacatctatagcgaactgcttgaca

SEQ ID NO: 7313 - DNA, 786 bp, Arabidopsis thaliana columbia
cttgctggtaattgagagtagctccagacattaatgtatgaatcctctgatgttgagatgatgtgttaccatctgaaatgaatgaagcagatgttgtgcgaaggctagaagctgcaagcgcaaaagaaagttacaatcttaatcttaaacacaacaaatgcaatcattcatctgcagttatgaacagatcctaacctttcagcttgcagatgacgtcttctccgcatatgatgcggatctgtgaatcagcagaagtcaccattactttgtccgagtcactgtcactgggaagatattgcagaccacttatccttttgcttgcaaccttcttcttcccatgaacgttgatctcttggtccatttgcagctgattctctgaagtacacaatatgaagaataataagctccaaccaacaattgcatcagttaagaatttttcattaaccaatgatctcaatatgtaagcagatcaacgtaccaaatatatggtagaagcggcagttccctgtcatagaacctattactgcaccctgcaaaactctatagtaagcagctgatcatcagactaaaagcaaactaaggtctttcaaagtacctttgcatctggacgatagcacacagctgttacaatgtctcttatatctgtgtagtcaaccaccgacaacgagtcacatcccatattcgaactttcccatcgatggatccgcttatgacataattatcggccacaggggttaatgcacacacagtcactgtgtagaggagagggagaagtgtgagtgagta

SEQ ID NO: 7314 - DNA, 1473 bp, Arabidopsis thaliana
tgacttctcatttctgtaggattctggctcctaccacatacatattcttcgcgtctgcgattcctgttatttcattcggcgaacagttggaacgaagcactggtatttaatcttctcctctgaaaagaaaaaaagttatcagctttgtgaatgttagtagcaaaagatcgcaacttgaataagattctgtaattttgtagatggagttcttaccgctgttcagacactggcctctacagccatttgtggaatcattcactcgatcatcggaggccagcctctgcttatactcggagttgcagagccaactgttattatgtacacattcatgtttaactttgctaaagggagacctgaactgggacgcaatttattcttggcttggtctggatggtaatgttttctcctaacttgattgttaatcttgttaaaatgtgaggaataaggtgttaaaatcttgttaaatatgtgtagggtttgtgtctggacttcgttgatactgtttgtgttggctatatgtggagcttgttcatttatcaacagattcaccagagtagctggagaattgtttggccttcttatagctatgctcttcatgcaacaagccatcaaagtaaaagaatttgcaattttttaaggtaccaataaattgtattttgattgcctctaatgctttgattatatatccagggattagtcgatgaatttcgcgctcctgcgagagaggatctgaaacttgtggagtttttaccttcctggagatttgcaaatgggatgtttgctttggttctttcctttggtcttctgataactgcacttagaagcagaaaagcaagatcatggagatatggaacaggtaacgaggcacttagtcaacttttctttaattctcatgatctggaatctccttattctatggatcttgagagaaatcaataatcaattaagcagtcattgcttacaagtggggagatctcagtcaaatattccttgttatggaagaacttaattccttttaaaaaaaacattattcttggaccaggctggcttagaagtttagtagctgactatggtgtgccactcatggttctggtgtggaccggtgtctcctacatcccaacaggagatgttccaaaaggaattcctcggcgactttttagcccaaatccttggtcccctggtgcttatgagaattggactgttgtaaaggtgtgtctttatcttgaaattcaaacacaccccaacaagaacatatgactaatgaacagtgactttgatttctcaggagatgcttcaagttccaattgtctacataattggagcattcattccagcaacaatgattgcagttctttactacttcgatcatagtgtagcatcacagcttgcgcacgagaaagaattcaatttgagaaaacatcttcttaccactatgatctgctcttcttggattctggtaagatctcaggacta

SEQ ID NO: 7315 - DNA, 839 bp, Arabidopsis thaliana
ctggaaatagcctgatttaagatccaactttgaaaacactgtggctcctttcagttcatccaatagctcttctataacaggaatcggatacttatcgggtattgtagcttcattcaatgctcgataatcaacgcagaagcgccatcctccatctttctttttcactaggagaactggacttgaatatggactcacgctaggtcttataatctgagcattcaacatttcacgcacaagcttctctatctcattcttttgagcaaaagaatacctgtatggtcggatattgactggtgaagacccttcttgtaaggtaatggcgtgttctctgttgcgaactggtggcaatagctgtggagtttgaaaaaccccttggtactgatccaaaagcctctggattgcaggctgcaaggctgtttgctcttcctgtttcttgctttcaaacaaagatgctagttccaagagatatgcagttccagtgtatttgataactctttccatagacctcatcgaaatttgtcctctacatagatccgggtcgccgtataaggatacccatgtgcgacctatctgccaactgatcctcaaatctctccagttggctcttgtttctcctagtcctgccaaccaagaaaatcccagaaccaaatccaaatctcccaagtcaaataagtagtagtcttctacaaactcaattccttggacctctagtggtatatcgacacacttcccactacttttgatgattctgcctccaccaactttaactccaaaactgcgagtttgagtcactaaccatcctttctctcttaccaaagcctcactaatgaagttgcaag

SEQ ID NO: 7316 - DNA, 908 bp, Arabidopsis thaliana
  unsure (1)..(908): unsure at all n locations
tgaatatttaatactttgaataaaacagagacgaagctcgttgtattaaaaggaacgatcttgttgaggccttatccgatgcccttccgaaaggaaccatccggttcggttctcatattgtttctattgagcaggacaaaactacgttgtttccggttgttcacttagccaatggaaatagcatcaaagccaaggtaaatatcagtattgtttatttagacattaattgttcaaaggcaaatattacatttggcttttgcatttactgaagactttatctccgtctgctttcaatagtataccacacattccgcaatacaacgccttccttctctcataggtcctgattggatgcgatgctgccaattctatcgtcagtcattatctgcagttaaacccgaaaaacgcgtttgcttgtcgtgcggtgagagggtttactaagtacccaaacggccatggatttccacaagaggttctaaggataaagcaaggaaatgtcttaataggaaggcttcctttgacggataatcaagtcttttggtttctagtacatatgcaagacaataatcacaatggtaaagatcaagaatcgattgcgaatctgtgtcgaaaatgggccgatgacttgtctgaagattggaaagaaatggtaaaaatatgcaatgtggagtcattaacactcacacacttaaggtaccgagcgccatcggaaatcatgttagggaaatttcgtcgtgggacagtgactgtagccggcgatgcgatgcacgtgatgggtccgttcttggcacagggcggctcagcggcgctagaggatgcggttgttttagctaggtgtctagctaggaaagttggtccggccacggagacttgttaaaggattgttcgatgnaaaacattgaagaagg

SEQ ID NO: 7317 - DNA, 798 bp, Arabidopsis thaliana columbia
gacgtactacgctatattttcaactctttaatttagataaatagatgtcttaagaaaaataaaattagttgttttttgttaccgaaagaattagatgttatttcgctcatttttagtttttcatttgagtttacgtacatcaaatctacctgtttctggattatcaactgattttttgtttacgtacgtcaaagtttacgcccatgttttgtatgtattttaatttagatataattaggactaatgattcattgaatgccataaagataaaactttacttatatttaaagggtaagaataattaccatggagataataatatcattagttgatcgagaaaatggctttaattagcttttccaccaaaaaaatcatttattgttgataatcttttcaaatatttcgtacaagttaatcatttgaatgattttacaatggagttttctaaataaaaaaattaataatccgttttgcaagatagttatattccttttcataatattacattattcttatcgttacttgtttgctaacactacaattaaagtaaaacaattaattattcaataattgaaaaaaactaactatttaaggaacaatgttacacgtcagaattcgctggctcaaagtagactttcaaaattttaacataagttttgtgttccacaattatgttttaaaccttatagttcagtatatttacagtttaacccattattacataacagagcaaccattgggattctcgtcgctgaacattccaggagcgttcaggtttggctgcgcgtacggcacgta

SEQ ID NO: 7318 - DNA, 464 bp, Arabidopsis thaliana columbia
aggtggatgctactgggtccttctttatgttagagttgttctttgtttaaagaagttatcaacgtcagtgtgctttagtttataaagcttctcgttcgacgatttttcctctgcaactagaaatggtggttctgtttatgtcaatactagaaaccgtgtatatgcttagctacttaggtcttgtgttggttatgctttatagatatcttgtttctgaatgtatacttctgcttgattgtgctggatttgtgaatgtcttcgtttgtatgtttctacgtaaaaccaggagtgcatcgcagatggagtcattgttagaatgttttgcaatcacggatggcaaatgtcatcccgattgcttatcagcaaacaatgagcaagatgattacggtatattatcaaatcttgaatcttaaatttactttctttgcatcattataagaaactgtgatttggtttaactgtta

SEQ ID NO: 7319 - DNA, 592 bp, Arabidopsis thaliana
gtcatacaattaacagtgcacggctctccaaactcataccaaagacactgacgtctcatgaatgcattgtgatccatgaggcagtgaaattctaaatttctaactaggatataaactgactacatgtaattgaagatagtttaagactttaagttcgtactgaccagaaagtgcagatttgtcatctgtctccacaccaagctcctgcattggatgacttaaatgaatcaaaccaaatatgtatatatattacacagacatggtatgtggatgaaaatagcaagcatattttgtgaagcgggctgagtaataccttctttatagccttgagctgctcatttagcaagtaacgacgttgctcaccgctaattttttcttcaattgcttttgctatggtttcctataaaaggctcagaagataagaatcttatcccattcaaacagttaccggataagtagtcccttagtgggaaagacacaagaataagggaatgaagtacctgtatcttgctaatttccatttctttattcacaattccagcgtcaactgcagaagtttgtgacctgggtcaataaacagagatgagagatt

SEQ ID NO: 7320 - DNA, 829 bp, Arabidopsis thaliana
tttttcggtttttttcttgccaatcaatttattttgttcctcagaaaaaagaaaatctaaaaccaaaatatatattataacctcatttaataaacaacaaaaatgtttgttgaaaaaaaaaaagtttttatttatcttgaccttatttctttgaagaaaataaagcttggttattaaagaagtccaagttagttgccaccatcagtggcataacggtaaattaaagccaacttcctctaactaaagttttctataaattcaaccactcacctcccactctaaaacccaacaacataatttcacatatctctctttctttctcttgaaggaaagacgaagatctccaagtcccaagtacgtaactactttctccatctacattcaattgtttctccttaatttctctagtacatatttacttgtgctataagtaattgattttatatcacccatgtgcaggttgttaacacaagacgtaaacatgggtcatcttgggttcttagttatgattatggtaggagtcatggcttcttctgtgagcggctacggtggcggttggatcaacgctcacgccactttttacggtggtggtgatgcttccggcacaatgggtaaaaaccgttatttacataactcattccttacaaattatcatatttactaatcttcaatgttacttctttgtaggtggtgcttgtggatatggtaatctatatagccaaggctacgggacgagcacggcggctctaagcacagctctcttcaacaatggacttagctgtggttcttgctttgagataagatgtgaaaacgatggtaaatggtgttt

SEQ ID NO: 7321 - DNA, 662 bp, Arabidopsis thaliana columbia
atccagcaatactgagattaaggcatccaagcaggctccttgctcaagtactcctcgtgttgataatacattcatcattacctgaaacattttatgagcatcccaatcacattaacatcccactgcatcaatctaaaacatgaagggtccagcataaatagacaaagaaatgaaaaacgttcaaagatgtctcatacacaagagtctcccttttcgccaaatcagagtgagaggtgacaaatgtcaaatgcaggattctagtttctagagttctctatgcatcaatagacaagtaataaagtaacaaaggaaagtctttcttacgcggactgcaccatgcttatgagccaggacagtgctctgaggatggagaaggcagcatccttcgagaactctaagagcaacagcaacctcagcatccgtagaaggacttgttatcttcatcggctccacactgaatatatgatccaagctcgtcactttatcatcctccgcttctttcaatgaatgttgaaaaagcaccggaaccactacgaaatcacgaagcttccatcatcagataacacattacacagcatcgatttgagaacgacaatgaggaaaataaagatatcatacgttggagatcggaaatggtttgcttatgacccataatgccttcc

SEQ ID NO: 7322 - DNA, 1042 bp, Arabidopsis thaliana
atcccctaccatttacaacaatgttagttcttaagaaacttatggttacaagtcagggcatctaatcttgtttcttcttttttggatttttctctttcttatttttggcaaagaaaatatcttaacttcattattactccctcttataaagtacataattagtttggatattaattaaaattcaaacaaaaataaatttcttttaagaagttcaaacaataatttcttcattctcgatttcacatttagtccttgaccatatcagcaagaagaataagatagagagatctcactacttcggctgaatcatattgactgccttattcgctatgtatgcgtctctaagagggtatacttatgttcttatttaggttcttgatcagcaatctctagtctaatcatattgatgatgatctgttctcacacaacataatggttctgaaagggactctcacttgctatgaatggtaattgcagggtgtgccactatgtccaaacatgatccccactacccaaaacaacaccgatgacaccgctttctgataaaggaaatccaacaagcattcaggactggaactgaatcaaaacgactgtacatgctgatatgacttgttcaaaaaccaattgattaagatgagataaaatgaaaaaccagttatcgaaacacaaagatccttcacaaaacatagtcaaagcttgtttacattgataacagagaacaatgtaaatactcgtgatttcgcaaatgatgatgctagaagtttttccgactcagctgcgatgcaaactgatcagctgcagccatagcttgagaagctgaaccaattgatccatcatatctgcaaatcataaccatcttatttttgaactgaaaatgtaagagtaagatatgcacttgagcaaagtattcagtgcactcacagagcaaccaacacgtaaaccgcagtctgcataacaatagctccttcaccagcaggctgggaagtgtttaaacacctagcagcgaaccagttctcatgaatagatgttattatgtctgcag

SEQ ID NO: 7323 - DNA, 714 bp, Arabidopsis thaliana
ttttgaaataatcatgagctgcatctccggccgatgtgttcggaaacgccgttacctctgtgttacggaaccacgaaacggccgttacgaagacgatcccgtagatcatcgctcctttcacgttctttaccaaacaataagctatgatcacgaatccgacgatacctaaccagaacgttggactctccattcgtccgtgaatacacataatatcgccggaaactgatcctccggcgagtaaactaacggttccgttagctgacgttataacgggagctaacgatattcgtgatgaggctggacaagcggcgagagtgactagtgttgaaggactataaccgactaaaccgattccttgattgttctgtaaaccgatgaaagcgaggaaaagtccgattccggcggaggaactgattctgaccggtttaggaacgagtttcgcaagttttgctctgaaacctatggcggagatgaagagaaatatcagtccttcgatgaaaacggcggcgagtgcggtccggtatgagattgaaccggatccgtgaaatccaacgacggtgtaagcgaaataagcgttagttcccattcccggagctaaagctagaggaagattcgccatcaatcccatgattacacaaccgattagtgacgcagctacggtggcgacgattagatcctttcgaatttcttcacgcatgcggcgtaaccaggatt

SEQ ID NO: 7324 - DNA, 1017 bp, Arabidopsis thaliana
attgcttttgcatcgctttttaccattgctaagttgtttagtttccttgttcaagcttatgcatgatagctcttggtatgtagtttccttgtttctttgcatgatcactttaggttgttagctactaaaaaatctatctgatcacatcttgtctcttaacatctcacctaattggattgacacctcaagtgatataaagactatgatagctatctaggggaattgaactgagtaaaatcatagtatcaatttggcgttgttgccgtttgggtgtttgttttttacattcaagattttggcatcattgagatcaagttctatttacattatcttggatactaatttctatttttatctacttgtctttgttgtgcaggtacaagctcgaccaaagagctcgacttctgatcgagtaagctcatcgttcttgcatgcacatttgatccaaaggatcagacaatctcatttgctacaacaacaacattaaccagttacctagcgaattgaaagatcaaagagccaataccattacagatcaccaggatcaagtagagatggcatatgctcataatgaaaatgagttgcaaaggaatattggtgatggtgatacaccaaagaatcatcaccaacgcactggaattgttccacctcatgtccaaaataacaattttgagatcaaaagtggattgatctcaatgattcaaggaaacaaatttcatggtttgccaatagaggatccactcaatcatttggatagttttgacaggctctacagcttaaccaagataaatggagtaagtgaggataacttcaagctggactgtttcctttctctctaggggacaaagcccacctttgagagaagactcttccacctcatttcattggttcttgggatgacaacaagaaagccttcctagccaagttctctcaaatgcaagaacagcgagactgataaatgaaatagcaggcgccaccagaagaactttgaatcatgtcgtgagtgcatgcagagat

SEQ ID NO: 7325 - DNA, 557 bp, Arabidopsis thaliana
gctataaggaggcatccaacgtagcgtttcttgatcctcaaactcgctcagacaaattgcacattctacaccgcctttgcctatcttgagccctttaacttctgaataaaggaaagttggaaaagactcgatgacttccttctcgagcccacgccttgctctactgtgtaatacatcttgacctgccgccccaatctcttccctatagaatatgcagtgcaagcaacaagagaccatgcctaatgatataaatattgcaagcacaacgattgcaattattgagtcagctgagagattggtttgtctaatgctgtttgttggtaccgactcttgctgacatgtaacgtaaggcaaaagatggaaaaggaagagcggcaatataacacctgatacgacccgaggaaggtgatatctcgtgaagatattcataatgttaacgtcctcaataagattctgattttgattatagcgagagatagagaagaagaagttgttacactttagagattctgattcgtagatcaataagatctgctcgtcacgacagttaatattgt

SEQ ID NO: 7326 - DNA, 585 bp, Arabidopsis thaliana
tgtgtaaagagtttgagaacataagtaatgtgtgtaatcattgatgtccatgtcgtatacaagaccgggatctgtggctttctccagattcacaagacctcctccgtaatcgaatgcatcggctaccttatagttccctccatctacagtcagacgctcgccgcatggatcagttttcattgctgaaacacctagagtcttacgttttaaatgcagtgttcctattgagaacacacttctagagagacataaattaaaccaaacctgttgtgacaagagctgatttgattacagcaggagaccaattaggatgcgatatcttgaggagtgctacgattcctgcaataaccggagttgccattgatgttcctgagtaaacgaattctctggtgtcttcgtctgttggtattctaggtgttagcaaggtcaaacccggagctgctatatccggctgcattacagagaaaatacaaacaagttagttgaagaataacacatagatgatagatttagtgatctggaataagagatgaaggaacaaaaccttaagaatggcaggtgaaaatgactaggcctcttgccgat

SEQ ID NO: 7327 - DNA, 632 bp, Arabidopsis thaliana
tctctacaaggtaacgttcaaaccaagtaataaaacctgaaaacgatgttacatatagttcatgagtatgtttttctttcccaggttattctcccggacttcttcctcgcagatcaattgacaagtcaggtacaacaagctgcttggtttagcatctcgttaatctatcggttttcttcttgacaaatcattaattaggttttggttccacaggtccaaacattcagaagcttattgttttatgtttgctactatggttggggaggagattttaagagacgaacacacacatgttatgatagtgagatttacaaagaactctaccttgttgttgccatcattccttactggttccgcttcgctcaggtacttagaaaaaattatcctagtttacgtcgtaaaccgtatcatttactgtttcataacattttcaaaatgttcaaaactttgtttgtttttttttctttctttcagtctattaggaggttggtcgaggagaaagacaaaatgcatggccttaacgcactaaagtatctatcgactatattggcggttgcggctaggacaatttttgagatgaagagagggacgtactggctcacggtggcagtaaccacttcgagcattgccac

SEQ ID NO: 7328 - DNA, 1227 bp, Arabidopsis thaliana columbia
tcaataaaacttcacaaacctcgaacatcatcgtcctttgaaagctctattgcaagagtggttttccctgaaccgctcattccagagatcccaaacaaatgtgtatccgtaaacttaaacatcatctccttcacctttttcttccccaattccaataccgtctgaatctccggatcgcttaccgtctcaatctccatcatagtctccggaaacgacaaagaatcattccgctcagtcaacagtctatccatattcctctcaatcctgtcaccattgacccgtagatgacatacctcagcaagaacaaagagcaaaatctggctgttgaggaaacgagatatttgtttctcgagatccttcatcttattcgcgtggtacacatgtttaaggttccacctattgcatcttaaaaccttttcacatagctttcttgctttctccaagatctcatagaatactcccagttgagtttggtgatggttactcagctccgcgccactgtattggatctccctgatcgttggttgaacgtctctgatcatcgtgatcagtcgttcggcgattcctttgcaactgtagactgtgttagctactagagcgagcagctttaagagttgcgtcgtgatgtcgccggcgaaaagatctatgaacgaagccatcgagaccgatcttggagtgtaagacagaaaaaagaaagtgagatggttgagtggtaataagggttgatacgtttttagattagaaaatagcgaagaagacgaagtttcttagcaacttccaataacatacgttttgtcgtttagtgttttaaagttttgtttctgcggtaacacatgtaatagctttgtaatagatttcagagaatgtatggatcttatggttacgtatcagtttttcacttattatcaaacagatcgatttagtagttttttttcgaattcgattatctagacaaactctaaattacgatattccctaatacggccatacgggttcaatcactttgggagtgtaattgtttaaagttagctaaatcctatttggattaatacctctaatcttgttttttttggtcgctatctctatctaatttaactaattgggaaagactaacgatcccatatgcaaccttgtttataattttttttttcttgtgattatttggtgttgatatgtgtataaactatatagggattagggactcgaactttttcaatgtttattttg

SEQ ID NO: 7329 - DNA, 584 bp, Arabidopsis thaliana
tcctctattcggaggttaaagggctcaagataggcaaaggcggagtagaatgtgcaatttgtctaagcgagtttgtggataaagaaacactacgttggatgcctccttgtagccacactttccatgctaattgcattgatgtgtggctctcttctcagtccacatgtccggcttgtcgtgcaaatctgtctctcaaacccggtgagagttatccatatccgatcacggatcttgaaacgggaaatgaacaaagagatgaacattcattgcttcaactaggtacgaatctagatcgattcacacttcagttaccagaggagatgcaaagacaattggttagcttgaatctgataaggacaagcaacatgaccttacctcgagccatgagttcgagacagggctacagaagcggtttctctcatggacgacaaacacttcggcgggccatatctatgtctctaagtttctctttacaagctgcttctgttcgtccacagttggcagagacgatctagtgctagagacttcccaagctaaggacaaagatttatgtgaacagtcgttctacacctcatgccagagaa

SEQ ID NO: 7330 - DNA, 812 bp, Arabidopsis thaliana
cgtataaaaaagctaggctataatgctgtgagataatggccattcaagagcatgcctactatgccagctttgggtatcttcctttctcagatataacatgtctacctacctatcatttaatgaatacctgttaaaagccatttgttgattcttcagagtcgtaaaacctatttgtctccttgatgaatgagcatgtgactttgctatatgcaatgcaggtatcatgtgacaaattttttcgcacctagcagccgctttggaacacctgatgaccttaaatctttgatagacaaagctcatgagctaggtctggttgttctgatggatattgtgcacaggtattggcttctctttaacgcacttctccaatattgtgaattagttgatatggactttttcatggataatcatcattgtctttaaataaaaccagccatgcatcaaaaaacacactggatggcctggacatgtttgatggtactgatggtcaatatttccactctggatcgcgtggttatcattggatgtgggattctcgtcttttcaattacggaagctgggaagtatgtctctttccgtagagttgatattgcaatatttatgggaaagcctttagtgtagccccatgctggtggttatgtctggtccttgtgtattgacgtttggtccttgtgtatttaggtgcttaggtatcttctttccaacgcgagatggtggctggaagaatacaagtttgatgggttcagatttgatggtgtgattcgatgatgtacactcacatggactgcaggtggtattttgtatggaattag

SEQ ID NO: 7331 - DNA, 1089 bp, Arabidopsis thaliana
ccccaacattgtctccaacctgcaagaagatgagagtgaagcttcagtgatgacaaaaggttccaggcccgacaaaatcatacacaaaggatcgtgaaatgaaagaactaataccaaatcagcaataactgcagggttccgaggatcatcctcaggaataccgtgctcaactttcccgaccagatctgccccgacatcagctcccttagtatatattccaccacccaactgagcaaataaggcaacaaatgatgcaccaaaaccatatcccacaagaagaagaggcactgtaagaaaaatgggaaagtcaaatcattaagctaaaaagtaacactagtacatgcaaatgcaatttcgggtttgcaaacgttaaacatttgagaacaacatcaaaaaagtttgcattccggttctacagatgaagactcgacccatgctgttgcttctttagcaaatagccatttcttgaaattcagcaaaacggattcctcaaacccatatatgtaccaacttggtataagaagatactgtttgtgattaaatttgaatctctgaaaataaacatgaactcagcgcactgatgcatagaatatagctggttactatagaatggccaaacataaaaggaaagatatccagagaacaggaagctatgacttacggtcagtaacattcattgagcctggtgaacccacgcccaaccacacataaaatgtagaatagaggatggcgataccaatcacagccataccaacaacaaccagggctgaaaacccaccagcacgaacggctatctgcattatatctgccacttagtatttggaaacgtgtacatgacatgttaccaaaatagctaaactaaagaagaacctgcaatgcttctctcgcagatcgtctggcagcactggagacccgcacattagcacgaactgacacccacattccaacatatccagcaatacctgagcatagagccccaaaagaaatgcagcaacagtaatataagcagacatcgccctgcagcaaaatagtaatatggctaagcttcattcacaacaattcaaaagataaaataaatcttgtgaatgt

SEQ ID NO: 7332 - DNA, 1007 bp, Arabidopsis thaliana
tgacactatcattaaaagacactttaatcacttcacaacttaaaaacatcttaccaacaaatatgacgaaagcacactacaacctaaaagttataaagttccattggtcaaaactactaaacagatttagaaatctctactaaacagttataaagaaaattatccattactacaaaaaaaaaggagtaaatttcttggagttaggaaaaaatgaaagagagaaacagatgccaaacaatagtggcatgctctgattcttatctcttaaacacacttcacagtcacttctctaattggacctctctctcactccctcgtgctttatatattgctcctctcagaatctcctttctttccacaaaaattgtctgtaaccaaatcacaacaaagacccacaaaattcttttttttttctttttcaaatcccattaataaaaaccttaccaacccatgaagtaaagtaaactcctttcttataaactctcttttgttctttttttttcaacttcatcagtctcttaactcaccatcacaagaacaagaaagatgaagagaggatacggagaaacatgggatccgccaccaaaaccactaccagcttctcgttccggagaaggtccttcaatggcggataagaagaaggctgatgatgacaacaacaacagcaacatggatgatgagcttcttgctgttcttggctacaaggttcgatcttctgagatggctgaagtagcacagaagcttgaacaacttgagatggtcttgtctaatgatgatgttggttctactgtcttaaacgactctgttcattataacccatctgatctctctaactgggtcgagagcatgctttctgagctgaacaacccggcttcttcggatcttgacacgacccgaagttgtgtggatagatccgaatacgatctcagagcaattccgggtctttctgcgtttccaaaggaagaggaagtctttgacgaggaagctagcagcaagaggatccgact

SEQ ID NO: 7333 - DNA, 1222 bp, Arabidopsis thaliana
atgaacctaccatcaacttcatcggagaaactccaccagcttccacctggtaaaatcgtccggagaaatcaatacattgccggattttctcagcaagtgaaacgttatctccttctccttcgtaatattccgcagtttccgctactgctccattcaccgtcgagcaattaatcgaaggcagacgataatttctagttgaagattgaagagaaaacgacaatctcgggtttctaacgaatcggagattcttccttctgatagtgtcactggtggtaataacagaacaccggtgaagagaaacgcggatggggcggctcgtgcagccgagtacttgctgagccatttatgttcggtggactaaagatgaagaagcttcacgagtcacgacgcttcaagctttttccttggttcatatgaaatgcagaagaagaattaaaacgcgtcgtttcgaaattgaagaagaaagacgtcacgtaaggaagaatcgtgtcaaccaaaataaaccgaggtggaacccacggagatccaccaccgaaggcatgaaccacatggtaacaacaacaacaccggcgcgtcagaaaggcgcgtgaaggttcaatcatgtggttgtggtagatgatctctcttccccctctacgatataatcgggcctaaaggcccatctcgcgttataactaaatagcccaaaatgtcgtaaaccctagagggtaaaataggaaacgtaaaaatccttatcgtctttataaactcagtgatatcttaagaaaccctagccgcaaagagagaaagggagggaggagagtgtagcagatcggcgaaaatgacaaccagattcaagaagaacagaaagaagagaggtcacgtcagcgccggacatggacgtatcggtaagcaccgtaagcatcccggaggtcgtggaaacgcaggaggtatgcatcaccacaggatcctcttcgacaagtaccatccaggttacttcgggaaagttggtatgaggtatttcacaagcttcgtaacaagttcttttgcccaatcgtgaacctggacaagctatggtcacttgttcctgaagacgtgaaggcgaaatcgagcaaggataatgttccgttgatcgatgtgacgcagcatggtttcttcaaggttttggggaaaggtcatttgcctgagaacaaacctttcgttgtgaaggctaagcttatctctaagactgctgagaagaaga

SEQ ID NO: 7334 - DNA, 612 bp, Arabidopsis thaliana columbia
tgaagatacatccttccaagaaattttcctataacgtgattagatactatcatcaaaaagtcaaatctattcttcaaagaatttgcttaatcatataagcctataaatatgaaaccaaagctccttctccaagtatcaccaccacaagaaccaaactaaagatgtatgttacaaggcgtttatcggaataccagaaaaagccatcggagctgaaactgcttccaccggaaggtccaaactccggcataatggtgattcaagacgaagaatcacaggccacttgctgctttggttcttgctatgagggtagacttaagggcttgccgtttccacaaaacgtgaagctgaatgcagcgtatactagtggaggaggagaacaccagacaacacatcttactccagttgtgttcattcctgttcttgatcagccattgtcttcaaacctttactatgttttacaaaggcgtgggaagcatactgggtaatttatttacttgtcatctcaataattttcactgttttctttaggatttaggcattgttactaactatctaggtatgtgaatttgtgaatatagcaagcatctgcaagtgcacagaggaggcgatggt

SEQ ID NO: 7335 - DNA, 618 bp, Arabidopsis thaliana
gccagtgtgcagtgtgctctaaagttcctcgcaagtctggtagtttcctggctgatcagtatcagcacgccattgctcaccaccaccagcgtgatgttatcaacagtagtgctggtcgcgctgggttacatgatgcaacgttgtgaagaagttggctgccagaatcatggcaatgccgaagtcgctcatagcgaatcacactgatctatatcgatatacttatacttaggctgctaacaaaattttgttgtatgattgaaattagcggcctatactaatttcgagttgttaaagctacgataaatattatgtttttacggggacaggatcgttcccgactcactatggatagtcatttcggcaagggttcctcctttccctctgttctacgtcggattatagactcgcggttttttctgcgagatttctcacaaagcccaaaaagcgtctacgctgttttaaggttctgatcaccgaccagtgatggagaaactatgagttcatcgtgtatagaagaagtcagtgtaccggatgacaactggtaccgtatcgccaacgaattacttagccgtgccggtatagccattaacggttctgcccggcggatattcgtgtgaa

SEQ ID NO: 7336 - DNA, 631 bp, Arabidopsis thaliana
acaactcaatgcaactgggcggagctactgtttattcccaccgaacgcgatgacattttttctgaccatcccccgatcgcctcgaattgcgcgaaggctggcgaaaactattaccccaggcgatagccgatccgctgaacctacaaagctggaaaggcgggcgagggcacgctgtttctgcactcgaaatgccgcaagcgcctctgcaaccgggatgggattgtccgcaagcgccagaaatacctgccaaagaaattatctggaaaagtgaacggttgaaaaagtcacggcgtgtatggatttttaccaccggcgatgcaacagcagaagaacgcccgctggcagttttgctcgatggcgaattttgggcgcaaagtatgcccgtctggtcactgctaggaccttacacgcatagatacccctcaccaactctctctgtctcgcctctctctaaaactccaacacttctccttcttccatctctctcaaacttctgaaaatcttcttcttcttctcaatcataaaccctaaatcttcatctcttcagatcagaaactaatgtccattcaaagacaccctgtcctgtttcatctctgtcattagtcttctgttttcagattccaattttttt

SEQ ID NO: 7337 - DNA, 686 bp, Arabidopsis thaliana columbia
gaagaagagagtcacttggagttgatttggatctttagagttagaagaagtcatggctgaaaaagacagcaacccaagtccctgcttgtttcattaaatcatttcaagaaacaacaataacatgttttagtagagatgtttttaagaggagattgttatataccatgatataaagagaatacgcgatcacgattgtacgaaaacgtccaagaaacgagtcagcgataaagcccccgagaaggggaagaaacgacaccccactccatgcgttgacattggctgcagctgcagcatgttgactcccctaatggtccggtcagatatgttatcaagttcaaggaaatcccataaagagattccagttcaatattttgctttgaaaaattagtgattcaacaataagttaaaagagtgtgtcacaagcaagttggctctgaatagagatcataaaatattcttgtcgaattttatctttttccttagaaatttcaaatttctttaacagaaatcttataagcttttgatatactcacgaaatttctttcgcctgaggaaattcttatttccttggttgtgaaatccagcccaatttaattggcagaacagaggagagacaatttaaaaggtgtttgatctgctgtagacatatgacttggcgaaccataagtagaaggcgaaaccaatga

SEQ ID NO: 7338 - DNA, 743 bp, Arabidopsis thaliana
acgggattctgcaaaacactgtgtgacctgtcaacggaactcataatagtttctctaatcaaaactccttgcatgtattccctttcataaacaatacggttcttatcttgtccctcgctttggcctgagccagaaaaccgtgcagacttagatactggcccatgacatgtaaagtctcttggaggatcacaggtggtttcaccagctgaagttttcacagaaagactttgtgtcacagtgtttaaactccttagctcctcaacatttaccgatgcactgcgagaaagtacaaactttccagtgtcatcatattcaagagagcgacaccacttctttagagatggttgtttagttccagcaggataaaagactcccttcccgtcttttaggcctcgggaccaggtaccataatataaacatccatcagcaaacttataaactccagagccatgtctaaagccattcaaccaaaaaccgtcataaagatcaccgttttcccatctcataactcctctctcacacatcttaccctttttccagttccctatgtacctatttccattggtccaagaataactaccacgcccgtcttgtaatccttctttccacaaaccgtcatatagatctgagttacaatactctttcctgccaagcccatgcctcacattcattctccaggctccgctgtagacagactcatcaggtgaggtcatggtgcaaaaccatgaaggtaccaccagaga

SEQ ID NO: 7339 - DNA, 839 bp, Arabidopsis thaliana
ccaccacccattttttagtgaaatgttgttccatgaaatgttaacaagttgttattccttttttttaaacagggcaaatgggtcaacgtgtttgcacctatagtccctgtggcatcaacccataaagtgctatctaccggttctggtggaaccaaaagtggctcactccaacaggtataatatatatagttttctgagtcgtctatattggttgataatccaagagaagtagaaacatttcaaatttgtgatcatataattttggcagattcaagcagaatttcaagtaatttctccgctggtaccaaagagaaaagtaacgtttattagatactgcaaagagatcagacagggcttatgggtggtcgtcgacgttactcctactcaaaatccgactttgctgccctatggttgttctaagaggctaccctcaggccttatcatagacgacctgtccaatgggtactcccaggttacttctgaatcctgttctttgaacaatatatgttggttcacttgttattactcgcaatcataattaatgatctatcagagcatcttgtactgtggagacataaataaatggttaatggttattattatattcaccacatgtataacacatagagatttgatttcacaggttacatggattgaacaagcggaatataatgagagtcacatccaccaactctaccagcctttgattggctatgggatcgggctaggtgcaaagagatggctcgcgacgctgcagagacactgcgaaagctctcgaccctttcatctccaacttgactgaaattagtccaggtgaaagctatttaaattatagaata

SEQ ID NO: 7340 - DNA, 730 bp, Arabidopsis thaliana
ggtataagaatcttattcatctttagatctctttactcccatatgaacttggttgttaatgtttcaagcatccttgtaatcataatcattagtccttaggcttagtattatgattcagcattcttcacacttgctaaagataggtttttgtatagagcatttagtttatgatacttggggatctaactatggttgatggcaacatgctctgaaagtttgatgtttgtgtgtgtagaggccatcacaaagtttgaagaggcattgttgattgacccaaagaaagatgaagcggtttggtgtattgggaatgcatacacttcatttgcgtttctgactcctgacgagactgaagctaaacataactttgacttagctactcagttctttcaacaagctgtggatgaggttattttgctttccattcagaatcaatgttgatactcatctttttgtgttgtgattttaaatctgtgatgtgaaaaacgtgtttttgatctttgcagcaaccagataatacacactacctgaaatcactcgaaatgacggccaaggtacttctttctataaaccatcaaccaatttgtgttcatattcattttgcgtctaaacccaatctcaaagttttatgctttgatcaaatttcttctcctttgtgctgagtacaggctccacagctgcacgcagaagcttacaaacagggcttaggctcacaaccaatgggtcgcgttga

SEQ ID NO: 7341 - DNA, 605 bp, Arabidopsis thaliana
tgcttaacctttacacatacaggaagcactatacatcatgttaggaactaggaagagacaacagtctctcagtgcttataacagatttagtttgatttagttgtccctttgaacctatgtcatgggatctccaatctttgtaggtggggttaccatcaaacttcctcttaggtggtaggctttaaactcattcctcttgatgatcttgcaacttgatctcgatttaaaccttttgtaaatggattcgctaggttgtcaactgacttgatgtaatcgattgtgattactccagttgagataagttgtcgaatagttttatgtcgtgttctgatgtgactagatttaccattatatagggtactttgtgccttacctatagttgattggctatcacagtgtacacgtattgcaggcacaggttcccccacattggaatgtcttccaagaaattatggagccatttggcttccgctgcagttgtaccaactctatgaattcagattccatagttgatttcgctgccacaatttttttgctagatttcgaggatactgctgcactccgaagtgtaaagatatatcgaattgtggatttaaagtttttgg

SEQ ID NO: 7342 - DNA, 1205 bp, Arabidopsis thaliana
gggtctagcagatgttattttgggtataaaaatcatcagaactaatgaaggtcttaccttgtctcaaacccactattctgagaagatacttgatcgtttcaagcattactctaatgagactgcaaaaactcctgatcaaaaactctggtgaacatgtgcaacaggtggaatatgcaagagtaattggcagtttaatgtactttaaacagtacaagaccggatttaatgcactctataaatgtacttagtcgctacacaagtaatccaggacataagcattggaaggctataactagagttttgaactacctacattataccaaagatcatggcttgcaatatggtaaagaacccgcagttttggaaggttacagtgatgccaactggatcgcaaattccaaaaactctaaatccacaagtggatacatctttacacttggatgtgcagtagtatcctggaaatctagcaaacaaactatggcagcgaaatcaactatggaatttgaattcatagaattggataaaactgcagcggaacgcgaatggtccgtaatttcttgatagacattccagtgtgggggaaacctgtgcctgcaatacgtgtacactgtgatagccaatcagctataagcatggcacaaagtacccaatataatggtaaatctcatctcatcagacgacgacataaaaccattagacaacttatctaaactggagtaatcacgatcgattacatcaagtcagctgacaacctagcggattcatttataaaaggtttgaatcaagatcaagttgcaagatcatcaagaggaatgggtttaaagcctaccacctaagaggaagtttgatggtaccccacctacaaagattggagatcccatgacatagattcaaagggacaactaaatcaaactaaatctgttataagcactgagagactgttgtctcttcctagttcctaaaataatgtacagtgcttcctgtatgtgtaaagattaagcatttgctttcaatgatttgaacctagctttgtaagatatgtgaagtatttacatgatattttttaaaatacaagcagctagtaaatcaccttgtgagtgtgaaatggggccgtttctaggagaatatgtgaggctatactctctaagttcactcatgattaaccaggcatgttcaaggccacaatgaacaaaaacaaagaactc

SEQ ID NO: 7343 - DNA, 611 bp, Arabidopsis thaliana
cggttgttgttctccctgaggcacattgtctggactaaatgaccccgtcccaagactcgttaactgcggcgctcgaaccattagtcgatgcagctcttcaagggaaacaaacctgttcgttctaagtttcttcaagaatggtgacctaaccacgagctcctccaatgccttgaaattgataggggattcaacacagtcaaaagacaaagactccagatgagtttcaccctcaggaaaacaagaaatccaatccaactcatcatctgtgacttctgactccatcaaatcaaggacctttagctgcctgaaaacaaagtcccacttgataagcatttctagaagactctgagaacaaacaaacaaacaaacaaagagaagagatctacaaagtacctgcatttgttagcaacaatagcaataccactagtcccaaaaccttcacagcagaccaaagtaagctctttgaacccaggaaacgactcagcaagaagagccaaatcatcatccgtaacaaacatacgcttcaaatgaaccttctcgagccaaggataagccttagctgtagcagcaacccaaggagagaattgagctcccaattaggaggcatgaga

SEQ ID NO: 7344 - DNA, 1415 bp, Arabidopsis thaliana
agcaagacacgatgcgactactagtttgtcgttccccttatcaccacaagctttgttgttgttgttcctcggctcctcggctcggtgtttaagagtctgaaacatgagctcaggctcatgctgcattgctctgaggacatctgcagaggattggcccatcacagcacgggtcactgcgaatccgtgaggtccatcgctctgcaatacgcgaaccacgcttggtccaccgaacagattgtggactccaccgagagcttcctcataagctccacctaggaacattcccaaatagtaccgcccaccgctgcagccattgttgtccatctcgtgcaatggcaagctcgattctccgcctatgaacttgttgatctttccgtcgctgtcacacgtcaaatccgataagatccctctcgcggcaggcctttggtcaagtttatggattggaacaataggaaacagctgatcaatcccccagaaatcaggaatcgaagtgaaaaccgatagattgacatggtaagtaagaaccggatccgatgcaccaatcgccttaatcacccactcgcataatccatcaacaccagctaactgttcaatgcccaaggaaccttctttgaacccttcaacacatctctgcttcagctgatcaacataaagcaagcagctttcacgatcaccacgcatagcagcaccataaagattctcgtaatcacctcgaacttcctcagagtacccttcaagcataaactgatgatcagtaggggtctcatgttgttgaccagctgagacagcttcaaagatcaacaccgagtgatgagacacaatggctcgaccgctctcgctgcaaatcaccggatgcttcacagacttctgatcacaaacaaacctaaccgaagccacaacagctgcagcatactcctcgagactataagcaacagagagatccgactcccccgatttagacccgtcgtaatcaatccccaacccaccaccaatatcaatcaccttcatatgagcaccaagacggacaagctcacagtaaagctgcgcagcctcagccacaccgtcggaaagcaaagccgtggacggaatctgtgaaccaatgtgaaaatgcagaagctggagacaatcaagcataccaacttgactcagcttcctcaccacacgaagaatctgaaccgtagtcaaaccaaacttccccttctcaccagaagtagaaccaaaatgaccagaatgtttagttctaagcttagctcttaacccaataacaggcctaacattcatcttctggctcaaatcaataaccaaatcaagctcttcttcttgctcaagaacaataacagtattcaattcaagtttcctcccaaacaaagccaatgagatatactcagagtctttaaaaccattacacacaagaa

SEQ ID NO: 7345 - DNA, 896 bp, Arabidopsis thaliana
gaaagattcagtctttagttattcggtctgggttttgtgcttctttgccggttaataattcgcttattgacatgtatggtaagtgctctgatactcttagcgcaaacaaagtgtttcgagatatgtgctgtgatagtagaaatgaagtaacttggtgctcacttttgtttgcctacatgaatgctgaacagtttgaagctgcacttgatgtttttgttgaaatgccgaaaagggtggcatttgcttggaatataatgatctcagggcatgctcactgtggaaagcttgaatcttgtttaagtttattcaaagagatgctggaaagtgagttcaaaccggattgttatacgtttagttctttgatgaatgcttgttctgctgattcatcaaacgtggtttatggacggatggtacatgctgttatgttgaagaatggatggtcttctgcggttgaggcaaaaaattctgtgttaagtttctacacgaaattaggcagcagagatgatgccatgagagagcttgagtctattgaagttctgacgcaggtatcctggaattctattattgacgcgtgtatgaaaattggagaaacagagaaagctcttgaggtgtttcatctagcccctgagaaaaatatcgttacttggactactatgattacaggatatggtaggaatggagatggtgagcaagcactgagattttttgtcgaaatgatgaaatctggagtggattcagatcattttgcatatggtgcagttcttcatgcatgttcaggtttagcccttttaggacatggaaaaatgatccatggttgtctgattcattgtgggttcaaggtaatctgatgttggtacgcgttggttaattgtatgcaaagtgtggagatattaaga

SEQ ID NO: 7346 - DNA, 982 bp, Arabidopsis thaliana columbia
tttaacaataagatcattcaggtagattacactaccaaacagagaatatgaaataaggttttacgactgggagctagcctccaaaagattacaaagccttattcatacaaacatattttacaaaaaggcaggaaacctacactggcttttcctaacgtcctagctccctctatggtttaccctctactggttacctccaaaacaaataggtagcgtcatgagtaatctaatattactcaatgagtccgggttctctaatggttagtaatccccaatcccaacccccaatcaaacaatcaaaaataactaataacaaacaaaacggcatagaagccacaagcaacggaaacacaatcctaaactagcatgctatagactccataattcctaaggccttttaacttccggcgagttcgatttcccctccctaggcgatgcttcctcgacccttagccacaaaggctagaaggatcacaccccttctccgtgccgtaagtacgggaccttattccatttcggcataatatttactacctcgtcaggtagtgcccggcggttgcgacccactccgagccgttggggacaatctgataattcgcctaacaactaccataacaattctacgaatatagactaaatgcaatactcatactaatctactaacaagcaactaccacacaaaggttaatcgagccgaagcaagattaaccatcaacaaacaatgcaattaacaagcaatgcaatcaacaaacaatgcaatcaacaaaccacaattcaaatgcttgatagtaaataatgcgtaataaaattatgaaatagtataaggttatgcgggcagcataacggatatactaaatactaatctaacatcctgcaactacccaaataaaccaagcaagcatgcaagatctatcctaaaaatacttaagccgattatacgataaaacgtataataagctaatcctaatctatgcataattta

SEQ ID NO: 7347 - DNA, 605 bp, Arabidopsis thaliana columbia
caaacacatcacctcaagtttccagagttaacgggctacagaaataaattagcttgtgctaaggatggttggttgcttgtggtaaaagataaccccgatcgtggtcttctttcttaacccgtttaccggggaacgcatctgcttaccccaggtgccacaaaattccacacgcgattgcttaactttctcagccgctcccacatcaactagttgttgcgtcatatccttcacccctcaaagttttctttacgcagttgttaaagttgatacttggcgccctggtgaatccgtatggaccactcatcactttgatcaaaagcgttacggtgaggtaatcaatagatgtatcttctccaatggtatgttctattgtctcagtaccagtggccgcctctcggttttcgacccgtctagagaaacctggaatgttcttccagtgaaaccatgtcgggcctttcgtcgtaaaattatgcttgtgaggcaagtattcatgacagagcatgaaggagacatctttgttgtgactacacgccgcgtacacaccagataactgttgacctttggactattaccttcatggcactgtatgggaatagatgtaagta

SEQ ID NO: 7348 - DNA, 542 bp, Arabidopsis thaliana
tacacgatcacatttatatatcactatatcacgttacaaaatttagacaaaaaaataaatatggagctcgagacctcagtttatcgaccaaacgtcgccgtttatgattctccggatggtgtggaggttcgaggacggtacgaccaaatcttcgccaagattttgacgagagaagctcttagctttgtggctgagttacagagagagtttcgtggccatgtgaagtatgccatggagtgccggagagaggcaagacggcgttataactccggtgccgttcctgggtttgatccttccactaagttcatcagagacggtgattggagctgtgcctccgtccctcctgccgttgctgaccggagagttgagatcaccggtccggtcgagaggaagatgatcatcaacgctcttaactccggagctaaagtctttatggtccattttctttcactctctctttatacaacacattagttggtttggattggatttgaccgacattggtgaaacttttgaataatactgtaacaaacttttaattg

SEQ ID NO: 7349 - DNA, 699 bp, Arabidopsis thaliana
gattatactgacaaaactcctatgtgatcttcaggtatacatctattaaagatccattttatctccttctgttcatgtcttaattgcattgtcgatattgtagtggagatcaagattctgtagttccattcgggggttcaagaactctcgtaagagaacttgctcaagatctcaacttcaagacaacagttccctatggagcctggttccacaaaagccaggtagtttgcctacaccattaaacaatacaatcagcagaagccaagtttactttttacccctgcaaaagtttctcaaactgattacaaacttgtggatgtgactaggttggaggctgggccatagagtatggaaaactactgacgtttgcaacggtgagaggagcggctcatatggtaccgtatgcacagccctcacgagctctacatttgttcagtagctttgtaagtggccggagattacccaacaacacacattcttctactgatgaatgaaagagcagaggtatatcttttgtaagaaaaatgtagtttttgtatttaattgatctgtctcaggccttagattagtagagatagaaacatgtaaaagtttgtgttgtggtttggttggatcttcaagtgtagtttgttttagttacccaaacgttgcaacaattctctttagttaattaatcttagttattgaattagtattaca

SEQ ID NO: 7350 - DNA, 1029 bp, Arabidopsis thaliana
gatctgttaattgagctgagccagaagatgaatgtgaggcctgtcattgggttaagggctaagctgaggactaagcattcgggtcatttcggatcaacttctggtgaaaagggtaaatttggattgactactactcagattgttcgtgtggtgaggaagctgcgtcaatctggtatgcttgattgtctccagcttctgcattttcatattggttcacagattccgtcgacttcgttgctctctgatggtgtcgccgaggctgctcagctttactgtgaacttgtgcgtcttggtgcacatatgaaagttattgatatcggtggtggtttggggattgactacgacgggtctaaatctggagaatcggatctctctgttgcttatagtctcgaggagtatgctgaagctgttgtagcttctgttcgggttgtgtgtgaccggagctcagtgaaacatccggtgatatgcagcgaaacgatagagcgatagtctctcatcattctgtgctgatctttgaagctgtttcagcagataaaccaatggttcatcaagcaactcccggcgatattcagttcctgcttgaaggtaatgaggaagctcgagccaattatgaggatctttatgctgctgtgatgcgtggagaccacgaaagctgccttctttatgtcgatcagctgaagcagaggtgtgttgaaggtttcacagaaggtgttttgagcatcgagcagttagcttctgttgatggtttatgcgagtgggtgttgaaggctataggcgcatcggatccggttcagacttacaatatcaatctatcagttttcacttcgatgcctgatctctgggggattgatcagctgtgccctatagttcctatccataagctcgatcaaaggcccgtggctcgcggaatcctttcagatttaacgtgtgatagtgacgggacgatcaacaagttcataggcggtgaatccagcttgccgttgcacgagctggacaagaatggcagtggaggaaggtactttttgggta

SEQ ID NO: 7351 - DNA, 525 bp, Arabidopsis thaliana
tcgtctggtaacatctctgttcgtcctcatggctctgaaactttgcctcaccaagacatcgatttgctcaaaatcgttaagaaggtgacgggtccgaaatcttccggtggtttaggattgcagcttccgttgatcgttcgtttccctgatgtgttgaagaaccgtctcgagtgtcttcaatctgcgtttgattacgcgattaaaagtcaaggatatgattctcattaccaaggtgtttatccggtgaaatgtaaccaagatcgattcgttgttgaagatattgtcaagtttggatcttcgtttcgatttggattagaagctggttctaaacctgagatccttcttgctatgagctgcttgtgtaaaggtagccctgatgcctttcttgtgtgcaatggattcaaagatgctgagtatatatcattggctctgcttgggagaaaactggcgttgaatactgtgattgtgcttgagcaagaagaagagcttgatctggttattgagctgagccagaagatgaatgtg

SEQ ID NO: 7352 - DNA, 991 bp, Arabidopsis thaliana
tctgtagggtctgcacatgttatatattggactgtgacttcttgtagttcactcataacttgttcttttgtagggataatctgagggggggatccaacttctattggacttagccttcttctagtagctagcagggttggcctgaaagggatatgatgattgttgaccaatattttttacatttttctccaaggtggtacgtcttcttcttgaggaatcagtgagttcaaactgggatgcaaaatcactcttatgtttttctctccactgttgctgggagtttcttgggtgatagctgcttcttcttgacgggtagtgagagaccaaatctctgctgggagctctgtcgaaagatctctctgctgaccttctactatgagggtgcctatctgtaggggggacagaatctctctgagttgaagtcctaacggataaggtattactctgccttgaatggcgattattatcctcatatgctttgttatagctgccagacttttcagacctttccctgggggctaaaaagttatctcttggcgtataaaagtttctagaagctgtctttaaactttgggagaaagctgatgatttgtttcccgcattcttttctttttcaaatatcaaatccggacaatctttctgttcatgagtgagcctattgaagtgaagacaatggttcttaagattcttgtaatccagcgtaataagggcttcactaccacctggaaaatcaacaactgtctccttagttattggttgtagtccatcaatgaggactttgagcttaattgaaaagcagaaagagatatttactaaaaatctgtatatattcattcgtaatctgtcattttagcatatattagtatgtgttttctaaaagatacacgatttttttttaaatcgagttttattcatggtgatttatagaaaacacatattatatcgctcacgtgaacaatcacttgatttctttgtgaaaggctaaaatgat

SEQ ID NO: 7353 - DNA, 970 bp, Arabidopsis thaliana
aactgagactgtgtttgatagactagaagaactcttatcagcttaccaatcatggaaagcgccatttaagcctctctcgaaaattccagacaaggtatcattcatggttgcaggtactatgttcattacccaaacaggatacgaattcatagctgcagcaaaaccaccaatgaatgcgttcatgtccatcacattccgtacttcagtctcattgacattcattaaccgccagtaatgattaacttgttctctccagaacactgtatctgatgtatattcatcttcactgatccctgaatgaaagttttgctaaagtggttagttagggaatctaacagaaacataataatgccaccgaagaagaaagatatacctatttttcttagagttgctggatatgcagaaagacgttcagctaaagaagagggtctctcttctgtttgtccactgatttgcacacaatctttaagaggaactttccatgatggtttcaaaacatcttccacatcacataaacttattagctttagctctgctttctgcttaagacatacctccttctcttctttaatccatattgcagtctgtaccttccgggaaataagcttccagcacattgcactagttagattgaccaacttatcccaaatcataggatactctttatcctttctatatgctggtggtgatgaatacacgaagaatccatttggtcggagaagacgatgaacttctttaagtaagatgccatctgaggaaccaagcggaagcattatcaaccaacttcttataaccaaattcaacacaagaatacatacataccatttgtatgccagtcaacacgacatctcgaacaatgaaccatctcaaacgaggctgcaggatatggcaattgtttggtggcaaccgcggatatcattgcaccaatgcctctctccaatgcaaactgaatctggttttcatgaccatc

SEQ ID NO: 7354 - DNA, 737 bp, Arabidopsis thaliana
tgtttaatctcagcctccgtcaactgaacctgcttcgtcgtcttcccgtttttcgctcctagtaacctctttataacatcatccaccacactatcttccatcaaaatcaatcaatcactacgaaacctaacaaaaacctctcgaattcggtacaccggagcgatgagataagagtttttttcgtcttcgacctccagtttcgaaacgccgtttccgatcaagatggttcaaaatcactttcctcttcgtagagaatcaatagagagagaagagaggttttgtggtatgtgaaggtatgagaagaagaagacggaggagccctagacagagagaatcggctagagaacggggaaggagaaaaaaggaaagcacacgtgcggctcgtgtgaaccggaagggacggctttgtcttttgaccaaatttattttttctattattttaaaaactaaagatggggatactcttacattttttttattaattatttttgtcaaaatgcggcttgaatattacataaagaaaatatttctatactattttcatattttgaagtccgaataatttgatcaaaatcgatgcttcatttttgtggaatcttgcttagactagtcatcaaatatgtctcttcaacgtgtccagaagtatatttatattatgattttctctacatctcttttttcttcttgcaatcctgagaatatgtgtaataagtgtttagaaattatgaaacgtacga

SEQ ID NO: 7355 - DNA, 525 bp, Arabidopsis thaliana
tggtaatcctgaatcttttcttctttttcgtttgttgtatgcttatgctctttttgtctgttggaagaaactgttcccatcagaaccgtgaacagacagtgttcatctgggcttcaggctgttgctgatgttgccgctgccataaaagctggtttttatgacattggtaagatagtaactagctttggttacataaattgtctcatcttggcatgaagaattgagctgaaattacgttgaatacaggtattggagctgggctggagtccatgacaactaatccaaggggatggaaaggatcagtcaacccaaatgtaccatgctcttattgtctctctccttccttcccggagtgtattgattggctctgttgaatgattagctctcatagaacgtattctgttgttttaggtgaagaagtttgaacaagctcacaattgccttcttccaatgggtattacttcagaaaatgtagcacacggtttaatgtgcaagggaggacaggacaagctgctggaagtcaat

SEQ ID NO: 7356 - DNA, 588 bp, Arabidopsis thaliana
ggtatgtttcttctatgtacagtacaatacaatggtggaaagtctttgtttttatttcctgtatgctcatcctgttatgttcatttgcagaaaccgtggctgtcagaactgtgaatagacagtgctcatctgggcttcaggctgttgctgatgtagccgctgccattaaagcgggaatttatgacattggttagtgaataaccgtctttaactacgccacattttttcatagagaaccgagctgacgatatgatggatgcaggtatcggggctggtttggagtccatgactaccaatccaatggcatgggaagggtcagtcaacccagcggtactgattctctcttatctggagtcttacttggctctgttattttaatacgtactataatacggactatgttatttcaggtgaagaagtttgcacaagcgcagaattgtcttcttcctatgggtgttacgtcagaaaatgtagcacaacgctttggtgtctcaaggcaggagcaagatcaagctgctgtaagggaactgaactttttcagtatggttgtatttaaatacctatactttgatcgtatctaactatgga

SEQ ID NO: 7357 - DNA, 635 bp, Arabidopsis thaliana
acactctcgttgaacgagtagatagcagcggatctaagcccccggaaagacaagtctttcgaaaggtcatacacgatatgaactctttccctgtcgatattctcttccgtgtcaactatttcagccatgctaacaaactctccttcttctccgtggactgacccagcaaagatttcgtttgatataatatgaatgttcctctcacgggcaaagtccaaaagcgcatagagattctctctgctcagtaggcttcccatgggatttgaaggattcgagattataatgccgcggattcttacacctcgtttcttagcttgatagaatgctcgatcaagcacgaccatcgacatattgaaattatccgcacttctacatggaacgtgtataatgtcaactcctgttcgccatttaacatccctatcatatctacacaaagaatgtccccattcagtattctctcgtagcattagcatcgggtccaaacagtatagacataaagttttacccgggagaacacggagttggaacaaggaaggcgtttccgaatcagctaagcagaaggaaagaatctcaatagcagatgatgcccagaagttacactaactgtgatggataaaagtcccgagtttttggta

SEQ ID NO: 7358 - DNA, 915 bp, Arabidopsis thaliana columbia
tcgcaatcactggaacagatgagctcttcgggcagttgcttcgcaacagtcaaactgaagatagacctgtagtcatgaataaccttcaatcttgtagcgctgatgatgtcctagatattacaccaactgagttaggtattgaagattcttcaggtggggtttgcgaccttgatgacgatgtttcttctggactacttcatgaatcatctgaggatggaaaacagtcaaatccatttggggaatgcacctcagaaccgttgttggcatctcagaactctgatatgccatcatctagagattctcatcctgtaacaaatgcctcaaaagtcacttacacacaacctaaggtcagctacttaatatatgaaacattattaacgttatttttttctgcctgtcaactctgcttgtattgtccttgggttatgtccaagtctgttagatttccatgcttctctgggaaaacagtgcatttcaatttatgatgctcctctcacatctaaacagtggaaatctgagggtttaactgttctactactgttgtgttactatcaccattataagtcaattgttcattaagagggacggttcctgcaatctgtaaacttagtggattctactatatctccttttgattcttttatttttgaatgaagttttatggttttggattactcatcttgcagaaggagaacactgagctaaatgacttctatgatgattttgttcatgatatggaagaaatactgctcgactctggtgaatcatctggggtaaggttttctaagaatgacaagatgttccaactacagctctctctgcctaacagggatggggggcaaactgctacaacgtctggtctagatgattcatctccaacagtttcccagcgatttaggattgatagggttgaag

SEQ ID NO: 7359 - DNA, 522 bp, Arabidopsis thaliana columbia
cacaaacctccgtgattttcgttgttaatgtcttcacatcatcctcgaggctttccatgtctagtttcacgtccacctcatctccttcactcccaatagcatcatccacagtttgcaacagagacgagatctgatcttttagctcgtcgacttgttcaggtacggacttcataccttctttgtcggcttccataccctcagttatcctttctggtataggtttcaccttgttcagagctttaagctgtttctgaagagcttctaaactgttattcaagacataattgacacccacccattgcaccacaatcactggtaataatgtaaccattccagcgcccagagggcacccacgcctgtacacattagagctatacatccggcggcgtaaccgaaagccgcagcgccaaaaaccacgtgcgaaactatagtcgctgtgtttacattactaattcttttctgaacctcttcaatttccttagcaatcctttctttagtctcagtcactctatcaaaaagaga

SEQ ID NO: 7360 - DNA, 535 bp, Arabidopsis thaliana columbia
tcccccgcattgctggatacttgcaacgatctgacttttggtggctcatctacttctgatggccagaagccagcttctagtggcaagggctgtgaagaattacgggtatcggtgagttcgtctttgatagtagttaatagctgaacgagttggtgatgttgctattcattttctttcagggtgacagtcagtcttctcggaaaaataaaaatgtagatcaaagctgctcaacctctaaacagcaatccaaagattttcctgccgcacagcgaatatcaggtcttatttttcttgcaattaagctacacatctggaaaatcatctaaaatatatctcacattgggagttcctcttggcataatagtgagagccagctagatgagcaaagaagaaagaataacgaagaggtttcacacaataacagagtaatgacaagtccatgttgattatgccgtttaatcatgattgcattttgcgtttcattgttgttctataatttttagcattggttatttggcttcctctgtataacata

SEQ ID NO: 7361 - DNA, 510 bp, Arabidopsis thaliana
gaatacgaacttccgttcaacaatccccggtccctccgcagcagtgagaggcaaatcagcgacatcgatcacattcagatcctgctgcgggaaaaggtttagctcacggatcagcttctccgcgcgcgtagacggcaagttcgatctctcaaaggtgcgatcattcaagaggaacgatgaagacggtatcgttgaagcgatgaagacgacgaaatgcaggagaaggctgagaaaagttagtttctccatttttggttctttcaactgtgcttctttttttttccttttctgagattgttgtatacaacgaatttgggggaggagagaatgtacacgtggcaggaactatcacagaaatatcttccgatacgtgcccgagaaagttggggctattttgcgaaatatgagaaatagtgggtgaatctgttacgtacaacaaagataaggtttggcgtagtaatcgacggttaggcacgcgagttgaatgtgaccaaaagatggatgagtgtg

SEQ ID NO: 7362 - DNA, 528 bp, Arabidopsis thaliana
gggattataatagaaagtaataatacctgatcccatccatactcattccaagcaagagacatgttactagtgatcttgaaaggaccattctcatagaacacagccaactcactactacatccaggccctcccgtcaaccaaatcacaacaggagcatccttcttgttccgtgactcgaagaagaagtagaacatgctaacacacaccaagcaaacaaatcaacaaacaaagcaaacaaacatttataatctattcccactactttgagattccaattagaaaaacgtcaccaacagtccaatgttctaatcgaatcaaacataacctagtcaagagctagctgcaagcttctatatacctatgaaccaaaatctaaagtcagatataaaccttgcgccacgagatttcgggagcttgtaataaccagcatgatgacctaaatcgtcgacagtagggccaccatcggcaagtatattcgggaatacgaacttccgttcaacaatcccctggccctccgcagcagtgaga

SEQ ID NO: 7363 - DNA, 626 bp, Arabidopsis thaliana
taaaagcaacgtaaaaatcgaagtaaataacctcttcagaaactaaaaacaagcgtagtaaccaaaatctttcacagcaaatagaccaaaaaaggaaaacgagttcaccttatagtacatagtctcatttcggtcatgtaaccgattaagaatccgccatttagccaaagcattaggatcagaaggtccatctctagcttgctcctctaatctcttcaggtcagtcactgttatatcaaaatcaatcatgtcaacaactaagacaacaacataaacaataaacaaagtttcaacaagtaaaacttactaaaacgaaaaatctgttgctcagagtccataacattaggaggaagaagacctctaagatctaaacgatttctctccgtcatcgtaaacgcagtcccctaacatgaatcaaaatcagatccaggttcgtgttcacactcaaaatgtgagaaactgagtttcaagtttttcaagtaccttgttgaaccaaggatcatggaggatatcgagaccttgtttatgaacgatggtgggacggtgaccttctgatgtggtgaaagatctgacagcggatgagtaaagtattctccggtggaggattcggctgagagatgatgact

SEQ ID NO: 7364 - DNA, 603 bp, Arabidopsis thaliana
taaaaagactctatccccacgttcctttaacttcaaagaaagaaacaacttcttcaacctcttcttcaaagtgctctcggaaataccctttatatcaaccgcttgtccgtcatcaatcattttcaaaagctacatcaaaaacgaatagcactagctatgagttcagggttcaccacaattccactactgagtactcataaaccaaacctatcttagagtaaagaagtatcatattacctgtttcaaatcattgccaacattaggaaactccaaaagcatctctttaaccacagtttcaggatcatcctcttgatcagagaatgaatcagaaccagagtaagactcagtatcagactcatattcacgcttcttagtcttcttcttcttcttcatatccctcctctttctctccttcctctcaatcttcttcctcttcctctccttctctctcttcctccgtttctctctctcataacttcctccgtcacttttccgccgctccttttgcttcttccgccactttctagaagatgaatcagattcgtctgagctgtatgacgaggaggacgatgttgctgacgatggagtatcgtctcccgaatc

SEQ ID NO: 7365 - DNA, 518 bp, Arabidopsis thaliana
taagagactaagttcaggaacgcaaagaaagaaagaaaagaaggcgtctcttacccttcatatccaagaagaatgcaaagattgcagaggtcagactgtggcaactgcaagaatatgttatatatttcagcacaattcttccttcttgcaacagataggtcagcttcacccactagctcagattcagcatcttttcgtgtttcacttgaagcttcttcaccgacaggtttgttttctaatttctcaggtactcctgatgacggagaccaaccctcaattcgggacgctgctgtgtagacaactacttgcagcaagcccatgacctgaaacaatacagatacaataaccaaagaaattttcaggacattgctgtgagaaaatgcctactttctgaaaatcatgctaaacataccagccctagatgagatgtactctgcagaagctgaggccgattaagcagttttaggaagacaaccagaggtatctccagatctcgggaatctgtcacatgagtaact

SEQ ID NO: 7366 - DNA, 554 bp, Arabidopsis thaliana
agttcaccctaaatccttccttgtctcaaggtaattctgagaaatttctcaaattcaaaatcaaacggcatggtttccggagtcgggggtagtggcggtggcgtggcggtggccgtggcggagaagaagaaccgtcgtcaagtcacactcctaataaccgaagaggaggagaacaagctcaatcgtcgggaacgaaatctctcagaccaagaagcaacactgaatcaatgagcaaagcaattcaacagtacaccgtcgacgcaagactccacgccgttttcgaacaatccggcgaatcagggaaatcattcgactactcacaatcactcaaaacgacgacgtacggttcctctgtacctgagcaacagatcacagcttatctctctcgaatccagcgaggtggttacattcagcctttcggatgtatgatcgccgtcgatgaatccagtttccggatcatcggttacagtgaaaacgccagagaaatgttagggattatgctcaatctgtcctactcttgagaacctgagattctactatgggactgatgtgag

SEQ ID NO: 7367 - DNA, 373 bp, Arabidopsis thaliana
gcttaacatgatgaacaagacaatgtccgaaatcacgatgataatttgaaattcattagtccattaaaagcttttctaacctttcttcactctcgcaaattcttcgccggaaaagcttctccgccggtatatatataatgattatcaatatatacacatcagaaaggacctcttccaccggaattccccggccaaccttccaccggaagttgcacatttggttgcatattcatcggtatattaaagaacggaagtcctcctcctcctccagctgccacctccggaaacaaattacctccgccgttagatcctcctccaagctgttgctgctgctcatcttcttctaaaggaagtctctcataagcaacattag

SEQ ID NO: 7368 - DNA, 1341 bp, Arabidopsis thaliana
ttccattgagctagatgagcgagttggctttaactaatccgcaaagactctatggctgtcaattaaatgttgtttatggtcgatcccagctgttgaatggtagtaataactaccgaaagtctttgtttgctattctcgcaagcgtccagagcactgactgactttctttgctcttaacacaggtcttcctcctttagtgttccgtcgggtgcttgaggttttgacgtacttggctacaaatcattcggctgttgctgacatgttgttttattttgattcgtcacttctatcccagttgtcaagccgaaaaggtaaagagaaagttactcatgagacagattcccgggatctggagatacctctggttgtcttccttaaactgcttaatcggcctcagcttttgcagagtacatctcatctagcgctggtatgtttagcttgattttcagaataatagaaattttctcacggcaacgtcctgaatgttgctttggttgttatcttatctgtattgttttaggtcatgggcttgctgcaagtagttgtctacacagcagcgtcccgaattgagggttggtctccgtcatcaggagtgcctgagaaactagaaaacaaacctgtcggtgaagaagcttcaagtgaaacacaaaaagatgctgaatctgagctatctgttgcaagaagaaagaattgtgctgaattatataacatattcttgcagttaccacagtcggacctctgcaatctttgcatgcttcttggatatgaagggtgagggacacctttctttctttctttctttctttgcgttcctaagactttctttttatatgtagtagtctacacaacatagatcttttcttttccttggtctcaattatttccttgaattgcttaagacgaactcacatgttttattaccgtaataggttatcggataaaatttactcgttagcgggagaggtactgaaaaagttggctgccgtagatgttactcatcgcaagttttttacaaaagaactctcagagttggcgagtggtttgagttcctcaactgtccgtgtgctggcaacactaagcactacacagaagatgagtcagaatacatgttccatggcaggtgcttcaattctccgtgttctgcaagtgcttagctccctaacttccactattgatgatagcaatgtgggaccgacaaagaaacagatcaggaggaacaaaacattatgcagggactaaaggtggcattagagcccttgtggcaggaacttggccagtgtatcagcatgactgagttgcagctcgatcatactgcagctacatcaaatgtcaatcctggag

SEQ ID NO: 7369 - DNA, 826 bp, Arabidopsis thaliana
gttcacccagctcgaaccaggctctatcatgaacttcaacgaattatccgttgtgttcctgaagcagtacaccatccttatgggtaaaagcacttcagacactaacctttggaatctacagcaagggccaaattagtcactccaaactttcatcacaaaattcaaagctgtactttcaaagctcatgagggtgtttccctatggcaagtctgatgaccaaggaatcgttatgataactgtcaagactgttcttctagctttcttcgagcatgataacatcgtttggtcggtcgaaaggtctcgaccagttgctacttgagtcgactcgtttctgataagctttgcttgcagctaaggtgtggaggcaatacgctgatccacccattatggtaaaaatcctctatcgggttccacttggttctgcgtcgattgcccttcgatcgctttggattctcttcggattctctgatagtaggattttactcaattaatcctaaaacactatcgtgtcgttgtagtattttaggttgtcaatccaatccggtgtgatgcaaacagatgagatatgattgaaagctctaagtcaagccaagtagagagttggttggttctaactatcctagtatgcaataacataaatgaaatgaaactaaaagaagaaatggcaataacaggcaggtgaataacaaagcagaaataataacaggcagtcaaatggataaacgattcctaaggatggggtaatcgaatagtgtgatctccttaatctattcaggcggttgacaaaacttcacagaagctatccctagacaacaagttcagggat

SEQ ID NO: 7370 - DNA, 791 bp, Arabidopsis thaliana
atgttggtgccttattcttgacctgaagtacgctttcttgttgtcaaaatcaatcagccttggtgccttcagcatcattgaaagggacttctccagcaaactcggattttgcctaataaatgaattcaaaagtcgcctatgcttctcagcaaactttgaaaatgtaacagaaccatcagtttttttctgagaatctacgctggttttagatgaggaaccatgagcagaggactcctttacttctccagctgtcacatttgtatcctgctgtaacattgacggagtttgaatcttctcacagagaacaaagaaagcctcaataagagggaggagcctctgagttcctggagagagagaggacgtaggagagatccctagaacatgatctccggggtttatatttgatgcagctgcagtatgatcgagctgcaactcagtcatgctgatacactgactaagttcatgccacaagggctctaatgccacatttagtctctgcataatgttttgttcctcctgttctgtttctctttcggttcccacattgctctcatcaataggagaagttagtgagctaagcacttgcagaacacggagaatcgaagcacctgccatggaacctgtactccgactcatcttctgtttactgcttagtgttgccagctcacggacagttgaggaactcaaactacttgccaattctgagagttctttggtgaaaaatttgcgatgagcaacatctacggcagccaactttttcagtacctctcccgctaacgagtaaattttgt

SEQ ID NO: 7371 - DNA, 537 bp, Arabidopsis thaliana
gaggatgagggagccaaatttttaggcatgcatgtagtttaatacaatttttctaactcttaactacaccaatacatgcagggatggtgtcagtgaatctcagtttaaccaagttcttaatattgaactggatcagatgatgcaagtaaggattttggttttaccatttttaagctcttaaatacttagcctatgtttgaccattttggagtttaaggtttaacttttgttacattattaggcatgcaagttcttggatcagaagtaagatcccaagtttacactgatcatagctcagataaaccaccacacgaagttcttccaaaccgaaagccctaataatgttcttccaggtaaacagttgcagatatttttttgtgttttgtttgtttgttagtgttgttgaaatgacttgaaacctgttctctatttacccgcaggaacaataattgacagcaacatctgtcaccaacacaacaacgatttctatctttgtgctcatgctggaaagattgtaagtgataagtatatatatta

SEQ ID NO: 7372 - DNA, 705 bp, Arabidopsis thaliana
agacctgtaatatgccaatgctgctacaaatgaacttgataaaactgatgtcgaaaaatgttaaaaagaagttgtaattgtatatgaacatagaagactgaatacagttctccctatacaatgaaatctttaatgggttgacttggaagccttcctgagtagaataccccagcagaggattcgataaaaaacgaaaaaggcaagcatgatcccgacgttgatccatctcgtatccttgtcaagccctctctccttcaacacatcctctccggtcatcaagcagcccatgttcccactggagaagcattcctctcgcatgctccagtactcattcaccaccatagactccagcgggtaacggtacaaggacacatagtacatgaacatccatggttttgggatcttctcttttgggataaagtagccggagaagaggaagaaggctccaagaacagtgcatatgagggagttaccagagatgaagtcaggagaaacagcgctgaggaaaagcaccagagaactggccatgagaatgatgagccagacgcagaggacaaagaaggagaaggcttgaatcgatgggtttaggcctacgatccagtagactgggatggagaagaggagagatacaacgaagaggaacggtacaaatgcgatggtgttggctatcatgtaggatgagattcggtaggatccacgagatga

SEQ ID NO: 7373 - DNA, 860 bp, Arabidopsis thaliana
cccataaatggagttttacactgttaagccggggtcaaaatggatggcgctccttgaatgaagcaattcctcccaaactgtgtttgcgaaagtatttccaagagcttggaacaaacttataacagatggctcccatactttcacgtcgagagtgagtgacctaacctgtagcaacagccaacttcagattgctgtataacttatgtcaaattgaaggccgagccatccaaagttcgaattcgatcacatgctctataatctgaattgctattgaatataagcctagtgtcacttcaaaattctcatggacttctgtacgtccttccataagttggttgttatagagcctacatatattttctaagcaattaagagttctggagattttttaccttagatatatgcacaccaagattacggtgaacaccagaacattcgatacagacaagaacccccagatttaaagaagcccagtctggttctggagctccacaatccgcacatttgtcattcccacagacctttcgaagagcatcaatgggcttctcaccctttctaatggaccgttgcggctgaaaacttcttgatggcctttcattgtaccccaaaaagctcctctcacatacaaattcttcagtagtaggatgatcatattcagaactttcatatgagctactttcactagcagatcgatggtggccacttcccatgggactaccaggaagacgctgaaatgtagccgatggacaatcaccaaagttgcattggtatttaatatgagcctggtcaggtaaaggaataatgataatacttacctgttcagggacctgagaactaagtagtgatgcaataaccccagt

SEQ ID NO: 7374 - DNA, 472 bp, Arabidopsis thaliana
ctaaagcttcgctatagccgcgttgctggaatagttttctctgatgttccataaatccctcttaatttcacgtatcgaataacgttgttttaatctagctatgaggaacaaataaaataaaaatattatttttaatactgaagcaacatctttggctgctttcttttttaatattgctggccgattcattttctgatatcggccatttttattgcgggtatcaggccagtttatggttagccattaattccagcgcctgcactaacgcagagtgatccaactggctgccaccgtttgccgcacaggtattaaataactcctggcaggtcgcagtgtttggcaggttcagcgcaagtgctttcgcactttgcagtgccaggttgagatctttctggtgcagagcgattttgaagcccggattaaaggtgcgtttaatcatacgctcgccatgaacttccagaatacgtgagga

SEQ ID NO: 7375 - DNA, 547 bp, Arabidopsis thaliana
ctaaagcacacggaaatcatggtcaacttgagcccgcgatagtcaagtcattcgcttttcagcttctgcggggtatcgcgttttgccacgataatcggatactccaccgcgatctcaaaccccagaatctgcttatcaactccaagggccaactcaaactcgccgatttcggccttgcgcgcgcgttcggaattccagtcaacacattctctaatgaggtagttacgctctggtaccgcgcaccagacgtgctcctcggcagccgcacctataatacgacaatcgatatctggtcgatcggttgcatcattgcggagatgttcactgggcgcgcgttgttctgaggcacgacgaatgaggaccagcttcagaagattttccgcgtcatgggcacgccttctgagcgtacttggcctggagtttctcagtttccggaatacaaaagtgattttcccgtttacctcctcaggacctgcgacaagtcgtccctaggattgatcatacggtcatcgacctactccggtgtatgttgcgccttcaaccggat

SEQ ID NO: 7376 - DNA, 524 bp, Arabidopsis thaliana columbia
tgacggctttggtggaaatcggattcttgcaggttgctgactattgccatgatagaatccactctgctttggctgaagaaatcgaacggattaaagaggaattgtgtaggaggaacactggcgagggtaggcaggtccagtgggagaaagtctttgtagattgttacctaaaagtcgatgatgaggttaaagggaaaatcaacagacctgttgttggttcttctgataggatggttcttgaagctgtgtcccctgagaccgttggatcgactgctgtggttgctttggtttgttcatcgcatataatagtctcaaactgtggtgactcaagagcagttttactccgaggcaaagactccatgtctttatcagttgatcacaaagtgaaagatcttctcattccctctaaaataatttaacacaatctgagaaagtttcttatttctaattcatgaaatttcctaccctttctctgcagccagatagagaggatgagtatgccgaatagagaagctggaggaaaa

SEQ ID NO: 7377 - DNA, 678 bp, Arabidopsis thaliana columbia
  unsure (1)..(678): unsure at all n locations
cttcagaatacataacacccacggcaaagcaggtttagggcgaaactcacaacatggcttacttgatgttaaacagttgcctcgaacatcttagtatacattaacaaaacactcatgaaaatcaaggcggatcaggctggctccgattcttgtatcggattgaagagcttgctgaatagtcctgcgtacgatggcagaggcgttcggacaagtnccagagtaaaatgctgcgtttagttgcgcagatgatgtccaaatattgaagaaacgatgacaataagactgataatcaacaaatcatgacaagtaggaagacttgttacagngattaattaggttttgaaaacgatgatacagagttttgattagttatttgcagtgattggtgcggaacttatgactatgtttgatgattttgaaagaattgtatatatagagagaaaaagtcgattaaaggcgtatttcttgactgatgatgaaagtgaaagattttgaaattaagcgaataagtatagattaacgtgtgtgtttgtctanatagtncaaaagatgggaaaacgaaagtggtggttctanattttgtctagttagaagtaatttgtgtttaggttaatagtatgtgatgaattgcattattgtaatgatcgaacgcggttggtagatgacgttatatatagg

SEQ ID NO: 7378 - DNA, 718 bp, Arabidopsis thaliana
ctatctgtgggtgagaattgtctccaattataaaagcatgaatctgtttgtttacttcgatccagctgcatccaggttctttcttgattcctctgtctctcattcgtgtccgaatttcttcaacactgtcccatttctgagagtttgcgtatatgttagacaatagtgtgtaagttcctgcatcctcgggatcgagtgctatgacctttttagctgcatactccgctagcaccatgtttctttgaaccctacaagcaccaagcaaagttctccatgtcacagcatctggctcacactccatttcatttaacagcttcactgcatcgtcgagctttccagcttttccaagcagatcaatcatgcaaccataatgttccctcactggatcgattccataaagtttcttcattgatctgaagtagtaccaaccatcttccaggagccctgcgtggctgcaagcaaagagaaccccgacaatcgtaatgtagtttggcttcgtcccagaagatttcatacgctcaaacaacttcagtgcctcctggctataaccattctgtgccaaccctgaaatcatagtgctccatgtaatcacatctctctccttcatctggttgaacacacggagagcatcctccaaactcccacacttgcaatacatgtccacgagtgcgttgttgagtatcaagtcttggtcatatttcacgatatgaacatgagc

SEQ ID NO: 7379 - DNA, 468 bp, Arabidopsis thaliana columbia
actgagtgtatcggatccccttcacgggtacaggaaagggtattgcatgggtgaatggacagagcataggtaggtactggccaactagtatcgctggaaatggcggttgtacagaatcatgcgactatagaggttcttaccgtgcaaacaaatgcctcaagaactgtggaaaaccttcacagacattgtaagtactaaaccagcttacatcattcagcagaatagaacgcttcctcaagcctaagttatctttcgtaggtatcatgtacctcgctcgtggctaaaaccgagcgggaacatacttgttctgtttgaggagatgggaggagatccaacacaaatatcatttgcgacaaaacaaacaggaagcaatctttgtctaacggtgtcacagtctcatccaccaccaggtggacacatggacttccgactcaaagatctcaaacagaaacagaaccaggccggttc

SEQ ID NO: 7380 - DNA, 543 bp, Arabidopsis thaliana columbia
gggtcacattgtgcttatcgatcaagtcgtacatcctcggtccgtcgcctctacgcgtgcagatcttggtggctccaaccgctgcggtgccccaagtgtaaccccaaccattggcgtgacacatcggtagactccacaagtcaactggccggtctggtactctaccaatcaagcaaggagctaacagtgagcatgacactcgctctgtggctaagtaccactcccttgggagacgacgtcgttccggaagtatagttaacacccattggttgccattcggtttgaggacggatccacttgactcttgaatttcctctctccataattccctcgtacgtgtcaagacaatctgatgcggatgaagaatcgttctcttggtcatcgtccaggaggacgaggtgaggcttctcgtgttgtgtgaataatgaaactgcttcaaggactaaggatatagaacggtggtcgacgaaaacgagtctggattcgctgtgacgcaggaggacagagagtgcgtgtcagtctaacggaggcttgatgttgttt

SEQ ID NO: 7381 - DNA, 1171 bp, Arabidopsis thaliana
agttggtggatcttggtgggaagatggcggtgttgtgggataaatgggagtattctggggtctgcatgattttctgtgctgagatttcacttgaaaagcgcgatggagatgagatttgggggaaggttgagtggtttgatactgtacttgaagttggagcgtcttgtagcttgaaaagtgcggatgctctttcagcttctgtttgatgaaatgatgactattcgtaagaacaagcttgaagaatgatgaaattagaaacactacttgaataatgtgggtagcttcattttgttttgaatttttacgtttccttttccattagtatgcaactatgttgaatgatcggttcatgtttttagccgaatgcaattacattatttgttttcttctaaacatatgcactgacgcacttgtagatgatttagcttaattgtgattgcaaattagtaggcaacaaagtcatcttctaaaccaagttttctctgcaccggtctaacatctttgtgtttactttaataatttgtggacaacaaagtcttttattattcgttccaaacaaaggagcacacgttaaccactttagataaataattttctaatttattgttgtgcatcttgaccgagtcaaactttagagtcttgaatctctctctagtttatcgagtcttctctgactgctccaacattttcttcttatatgattttcatttgtggaaaaaaagtcacaattccaaaaagatcataaaataatgtattgtaaattttgtaataaagaaggcatggtgaagaatcggatgatctatctaacttttttttttttcttatctattaaactccgtgttgatttgttctaccattagaagaaaagaaatcttcaataattttttctccaactaaacctctggcggccatgaacgaagaggaggcaccatctgagcagaagaagacgttatcattggtaccctcaccgaccacgaatctgtttcttcctgatgacatacttttgagctctctaagccgcatttcaagattgtatacccaactttctctgttgtctccaagagtttccgctctctaattgcttcccagagctttatcagactcgctccatctcggccgaccgagagttgtctttatgtgtcttacggttacttacgactctacctccgat

SEQ ID NO: 7382 - DNA, 574 bp, Arabidopsis thaliana
catctatgtcaaaatacatcacaacatcgcatacattcagagagatctatcccttcttcacgttgatcctagcaccatctatagctaaggatgctctacccaagataagaggtctttgggtaacgagctacccaaggtaagagcttctatggaattattgatcttaacaagaatcgaatgaaccggaacatagcttgtacgttctcagttagcacattaccaaaagataagagggtctttgggtaacgagctaattgagaacataccagctatgttccggtactttcgattcctaccttttaaaattcataattccatatgcaataaaaactccataagttaatactattgcaactcatatatcttgtttatttattgatatactaattacttcgaaaagtaatttgggacccaaaaaatatattgatttatcgagattttaatttataaagtattaatttataaaagattatacaatgaagcgaaggaaatgggtttggtcaggtttgggtacatttctttcgagtaattattaggaaacaaaaatgtttcggttattctttagttcggggta

SEQ ID NO: 7383 - DNA, 1027 bp, Arabidopsis thaliana
actcctgaagaacaagctgaggaagtctctgatcttccacttgaacgttgcatgaggataatacctcatgatcagaacaccggagccttcttcattgcggtccttcaaaaaaaatctcccttaccaggtgaactttctttttttcttggtgaacttcagattcttacattaacagctatggttctgtagaacttataaatagtttactcacagaatttcaggagaaaccaaatacgaaaaggaactcaactgctaagtctactgactcgacagaaaagtctccgagtaaagaatctgttgttacagtggatgctggtgtaccagatgagagtgcagtggagaaagttattgaagcagattcaaacattgagaaaaatgatagcttggagcctgagaagaaaatcacagaaggagaaagcatcacggaagataaagaggccaattcgagtaatgcgggaggcaagagaaaagtaccgatgcaagggaagtggaaaggctttgacccagttgttttcgtgaaagatgaaacagtaatcaatggcatcaaggaattctacggtatcaaagatgaatcatttccattacatggtcatctcgtggcaagaaacaccgacacaagcagcgttaagaggatttactatgtttcaaaatcagttaaggaagttcttcagttgaattttgcagtcgggcagcagcttaagatcgcttctgttggcctcaaaatgtttgtaagtaaaaaattcttttccccacttatcatttcggttgattaagcacaagctccagaagtgaaacttaagaatatttgcaactaattgaaacgcaggagagacaatcggcaaaagaaggttcaagcacgctgtcccattccgtatatcatccgagggactacctgtgattcttccatacattaccaaacaagtactttatactccaatggcagacttcaaacttctcctgcaagacaaatcaatcaagtttcacgattttgtcatccacagttggcccagaaagcactgaccttgtt

SEQ ID NO: 7384 - DNA, 711 bp, Arabidopsis thaliana
tgaaagacgttttttcttgatcttccgatttcatcaagatttgattattacatgaaaaagcatccataaaggataacatttcatgtcccgtagtggactctacaagacggtcgatgtggggaagtggaaaacaatcttttggacaagctttgttgaggtcggtaaaatccacacatacacgccacttgccatttttcttcttaaccactacggggttagcaagccattttggatacttgacttcacggatcgagcctgctttgagaagtcagacgacttcggtgttcaccggttttacgctatccaaaccaagctttcgacgcttttgcttgaccagtttgaatgttgggtctacgttcagctcgtgtgaaatgaccttcgtactaattccagtcatctcttcgatagtccatgcaaaggtgcccttattatttttgagaaattgaatcacttcgcttcggaagctctcacttagactagccccaatgctgacaagttgatccaggtgctccacgtttatgaccaccttttctacgtggttatcccctacttttttgatcacattcaaagataccttgagttgtggttgctattggattttgagcttgtgcccagtcaaatagcacattctcgaggtgcactgatttcccatgatttgcctgactccactatctctcgctgaactcgatcgctgtgcagggggatcttcta

SEQ ID NO: 7385 - DNA, 529 bp, Arabidopsis thaliana
taaagtttaatatgaatgaatgtttacccttctatatatatcatatatatatatatactatgtttaccaattataaaaaaaaaatgaaaatcttgtgagttgtgaatatcatatacaaattcaaaactgttactgatatacaaaactaatatccataatttgattaaataaagagaaacaaaattccataaaaaaattcatataccattgtatttctttgtatcacaccattacaaaacttcgtaataaaatagaaacaacaaaactaaaatctagcattttcgaatccatggaggtcgctgactctattcatatgcttcctcatgatcgccactttagccaatctctcagccgctctccacgctgaagtcggtgtaagcggctcactcttctgaaccaccggctctggactcttcaccgccacgtgtctacctctcaaacggttcaaatctgccagctcagcttccaaaccacgtaagcacgaatcacttgagctcaaaccgtattgcccaacaaggctctagctgat

SEQ ID NO: 7386 - DNA, 794 bp, Arabidopsis thaliana
aaaaggtttagaaaataatgttttaggaataaatggaatagttatacatatatgagataatgagtagaaatacgaaccaagattgtacttccatgtcttgatggagccgtgagagtcccaatcgccctcgtggaggatgacaccttggatgaggtggccgatagtgtcagggatgcgatgggtctcgctactccacaacttgtagtgtttctcggccgatccattcagaggcacgtccgtcatgtatgttcccgacatcgccattgatggattaattaggtttcgactacttctttgttgtgatgtctcgggtgttttaattctttttctctgatgcaattactttcgtcaagctttcctttatatacgcaagatcaacaccaaactacattaacaacgtaattgttaatacgacttttcaaaattgtctgacagtttcaatatatctaaacaattatggtcacgtatttgtatacacgttatcgtctgtttcgattgactactattatatgagtacatttttgttaaagggtttgctatatgacgaagactttctatttccaaaacattttaagatttattagtttctttatgaccaaattgaattaccattaaataacactattctaagaatatatttttaagaagctttcttataaaatacaaaccatattaatgcgataattttagagcatgtgtcgaattgcgctgtggatctcaagttgttcagaaaaaataatttgcttatatttcatgcgcttactttctttggtaaagaaagtcttttttttttt

SEQ ID NO: 7387 - DNA, 644 bp, Arabidopsis thaliana
ggagtaggtaaggttcaagagatgaagaatgttgttggtgttagagatgatgcaaagacgacggggttcacggtatatgtgaaccggagaccaactagcatggctgaagtaatcaaagatcttgaagatcagttcacaacaatttgtgatgcggctaaggaagtctcggggctattggaagctggtagagctcaatacacatcatcctttaatgaccatagtggtgagtttatgaacaatgttgcaatatttctctgtttaatgacttcacttataaatatgaagtccttttttatgtgtgtttgtagccaggaaaatgctgaatccagtagcgttgttccgctcgggttcatcaagatcttcctcgtcaagattcttgatcacttcttctggtggttcaagagagagcgggtctgaaagcagaagcgatgtttcagatgaatcttgcatgatttcaggtagccaccagacaacattggacagacttttcgcgtgggagaagaaactctatgatgaagttagggtaagtaacaagagatataagcaactagtgactacatattaatctctgttggttatactgagcgtctttgtggtgttgtacagtctggagaacgtgtcgaagagcatatgaaaagaatgta

SEQ ID NO: 7388 - DNA, 508 bp, Arabidopsis thaliana columbia
caattccggccgaaacaccggaaaacttgtttaattggcatagctcactcgtcgctcaaaagattaatggcgaaatttcagttgtagcttggacgagaatttgactccacgaagtgcaaatcttcttcttcttctttttctttttcttcctcttcttcttcaatcaacatctttttaactcttagggttcatcaatctttgaactacaagcagaagataaaaaaaaaacaaatcaaatctaaatccggtcaaaaaaccggagaaaaaaccggctaaagacgccggagaaaagcccgacgaaacaagatagagggtatcttgctctcgggagataagccagccaccaccgctaaaagtagccggtcgatgccggaagctgagccagccaacgcttctaaggaagccagcgatgccggagtagaagccgaccaaacactgctgataaagccagtcattgctggccataaaagctgaaactctctgaaagatgaggagagagaagagagag

SEQ ID NO: 7389 - DNA, 586 bp, Arabidopsis thaliana columbia
gaaatggtaaagagaatcaaaaggagtccaaggatcccaccaaaagaacgtggaatcaccatttccaatattgatgctcagaaattgaagagttttcgaacgaagcttgagtaattttctgagtaagcaacattcttttcattcagtgcccacaaaggagctgtagacaagtacttacttcgtatccatgcaacccataaagatctggctctaaaaaacagcatccaaaaaagtttcatggcataagtctcatcccaactaccaatatgtctcaatccaagtcaccttcagatttagggaaacaaacattataccatgatacttttgcacctgaaggtgtatccaatttcatagaaaggagctgcaaagcccattgatctttcgaataacctgcttaggaagtaagaaagcactagtccaaaaacctatgatgcccgagatgacagaagagatcaaagttaatctgctagccaaactcagaaacttgtgagtcccgagtttaatttttcctgatttgagatacaagggatccaactcgaccaaaagcttcttgacataagggagccaagtactaattggaagaggg

SEQ ID NO: 7390 - DNA, 509 bp, Arabidopsis thaliana columbia
tgtgaaagtttctaactcaacattcttatctctctggtttcagctcatccatcattactcagaatctgttcagctacctcaattcggttacatgtccagtctatacattactctcaatgcatcagatttgaaatggtttccaatctttcttaggagtatcccgaatctgaaatccctcatcttagtgatggtccgctattctataaatcctatatgagtttatcatccctatgaagtttctgcatattgtttcattgtgtttattcccgtctcattattctccacaggaacggactggttcttcccatcaactgtctcccaaggcgatcaaacgagttagtatttcatctgtgcctgagtgtttgctatcgtccctcgagtttgttgaattcaaagccccaatcctgtggacttgctccagagatgatgctagtatggtacttcctagagaactctcccacactcaagaaactcactctacgtttgaagtctcattcaacaaaagatga

SEQ ID NO: 7391 - DNA, 581 bp, Arabidopsis thaliana columbia
gattactctttccttctaatcattctcttactcacaatctctacttcatgttgtgctgctccttcttcttatgtggaagaacaattgagagacagaatcagtaacttacctggacaacctagtaatgtcgattttagacagtactcaggctatgtcactgtgcatgaagaacgtggaagagctttgttctactggttggtcgagtctccgttggcccgtgacccaaagtctagacctttggttctgtggctcaatggtggccctggttgttcttctgttgcttatggtgctgctgaagaaattggaccttttcgtgttggttctgatggcaagactcttcattccaaactttatgcttggaataaatgtaatatccatctttaactaaatctctcaccatatcttgctcttctcttcacgattccgattcagatttgttctttgtctctttctctcagtggcaaacttgctattcttggagtcccagctggagttggttctcatattcaacacaacttcagatcttacacaaccggtgatcagagacaggtctgctttttgaatatattgtctgaagttta

SEQ ID NO: 7392 - DNA, 1221 bp, Arabidopsis thaliana
caattccatggctgtgtctaatgaacacttccacactgctcttggaaacagcaacccatccgcccttcgtgaaactgttgtggaggttccaaatgtctcctgggaggatattggaggtctcgagaatgttaagagagagcttcaggagactgttcaataccctgtggagcatccagagaaattcgagaagtttggtatgtctccatcaaagggagttcttttctacggtcctcctggatgtggtaaaaccctgttagccaaagctatagcaaacgagtgccaagcaaacttcatcagtgtcaagggacccgagcttctcacaatgtggtttggagaaagtgaagccaacgtccgagaaatctttgacaaggctcgtcaatctgctccttgtgttctgtttttcgatgagctagactccattgctactcagagagggaacagcgcgggtgatgccggcggtgcagctgacagagtgttgaatcagcttttgacagaaatggatggaatgaatgcaaagaagacggtattcattattggagcaactaacagaccggatatcatagattcagctcttcttcgacctggaagactcgaccagcttatctacattcctctacctgatgaagattcccgtctcaatatctttaaggcctgcttgagaaaatctcccgtcgctaaagatgtagatgttactgcactcgcaaagtacactcagggattcagtggtgctgatatcaccgagatctgccagagagcttgcaagtacgccatcagagaaaacatcgaaaaggtcagtgatttgattacctcctgaaacatgtgattaaggaaccttaagtgccaattcgttttaattgttctaatcttgacccttttttgtgtgttttgttcctcaggatattgagaacgagcgtagaaggagccagaatccagaggccatggaggaagatatggtggatgatgaagtttcagagattagagctgctcatttcgaagagtcgatgaaatatgcaaggagaagtgtgagtgatgctgatattcgcaagtaccaagcttttgctcagacgctgcagcaatccagagggtttggatctgagttcaggtttgactcaaccgctggtgtcggacgcaccactggtgttgcagccgccgatccctttgccacttctgcagctgcagctgatgacgacgatctctacagttagattttgattcttagtg

SEQ ID NO: 7393 - DNA, 510 bp, Arabidopsis thaliana columbia
taacatttttgccaaatgtaatagttgattttcgcaaattgactgcttgacccgaagcttcctcgtaagtacgtagaaccgttttaattgcatggcatgacctatgatttgccatagtaaaaaatagagaatcatcagcaaagagaagatgagagatagatggacctcttgtggatagttttatccctttaagctgcttgttgatctcggcttggttcatcatgtgagagagaacttcagcacaaagtatgaatatatagggagataatggatcgccttgtcggattccacgagtggggttgatgtgaccatgtggagaaccattgattagaaccgaaaagctgactgtagagatacacttcattatccaagcgatccatgttgagttgaaacccatatgtgtcatagttttttcgataaaactccactccaaacggtcgtaggcttgtgtgatgtctgtgtttagagccatgtaagaatttgcttgacgtttcgttgattgtagggagt

SEQ ID NO: 7394 - DNA, 513 bp, Arabidopsis thaliana columbia
  unsure (1)..(513): unsure at all n locations
nnnnnnnnnnnnnnnnnnnnnnnnnnnctaaagttgctgagtctgcatctgggtttgcatccgctgctggctgggtatctgataccccggctggttagggttgttcagagtattaatgggctgtgcaaagccgacaaacggcaggagtgccgtaagaatcagaagtcgtttcatcgcgtatcctcctctgaagatatcctttaagtttactcgcttcccgacaaaacgatgattaattcagagttatataccaggcttagctggggttgccccttaatctctggagaataacgatgataaaaccgacgtttttacgccgggtggccattgctgctctgctctcaggaagttgttttagcgccgccgccgcgcctcctgcgcctgccgtctcgtatggtgtggaggaagatgtcttccaccggtacgcgcgaaacagggaatggtagcgtctgtggacgcactgccactcaggtgggggtggatatctcaaggagggcgggaatgccgttgatg

SEQ ID NO: 7395 - DNA, 557 bp, Arabidopsis thaliana columbia
tagtaacacacgccagtgtgctctaaagtatttatccacgccccagttgtaggtcagttcaatcaccgcttcttcggtttccgggccgtagccaacaaacgccagtgagtatttgtattccgggttttcgctggtacgcagcagtttcatgcccagcactttggtataaaaatcgatggagcgttgaaatcgccaacggcacatggtatgaagaagacgcatctttttatcctcaaaatggctaacagattcaaaatgttgttttagtatagcggcggctttacgccgtcagcaatgttggattacaacgtcgggtaatcggtatagccttccgcgccgccaccgtagaaactttcggcacgctgtgggttaagctcagctttgcgctgcaagcgggcgaccagatccgggttcgcaatccagtcacgaccaaatgccaccgcatcaattaaccctttgccgatcagcgtttcagctttttctactgtgtatgcacctgcgccgataatcggaccgtggaaacgtgcgcttactttttcgcggaaccgatcagtata

SEQ ID NO: 7396 - DNA, 609 bp, Arabidopsis thaliana columbia
agggatcttgggcagagttatgactcaaacataaccttaacacattatgagaataacccaacaaaagggcaagcggttttgttcgtcggcgatatctcatacgctgatacttatccggatcatgacaataggagatgggacagttggggaagatttgctgaaagaagcacagcttatcagccttggatttggactaccggaaaccatgaactcgattttgccccggagattgtaatgcttcttgcttcttcttctttgtttttttctgtaggcttaaaaatgctataagagcatctacttagactaaagattgagatggattgtttttatgtaatgtgtagggtgaaaacagaccgtttaagccgttcacgcataggtaccgaactccttaccgatcatcaggcagcaccgaaccattctggtactcgataaagagaggaccggcttacataatcgtgctagcttcatattcagcatatggcaaggcatctttaaaaatattaaacctttttgtgcaatattctcaaaccatgagtaagaggatctgaatattcttatctttcttggacaggaaaatacacaccacagtaccaatggctcgaagaggag

SEQ ID NO: 7397 - DNA, 621 bp, Arabidopsis thaliana
tcctcaaatctctcccacaaaaatctcatctttcaaggtttcaagatcattcatgggtcttcttcttcttcaacaagaaatcaactttccccaattccactctgaaaaatccaatctttaatggagattcaacgaccagtcatcaatctcatggttcttcactcacaacacgacaaaagtgacaacctttcccgacgagaatctctcgccggtaaatccaaatggagaacctccttatcccgttcttcttcatcttcttcatcaaacaacaattctccgaccaaaacagagattccggcagagtttctctgtccgatctcaggttctttaatggctgacccaatcatagtctcttccggtcactcctacgaaagagcttgcgtcatagcttgtaaaaccctaggctttactccaaccccacctccagatttctccagcgtgataccaaatctcgctttaaaatccgcaattcacagctggtgtgaacggcggtgttttcaccgcgaagccactcaactccgccgccgcgagaagcttatatcgcattaatggagaaaaacacaaagaagaaagtattgttcagagaagagttaccaagctattaggataaccacagtgagg

SEQ ID NO: 7398 - DNA, 464 bp, Arabidopsis thaliana
gaatgctataacgaattatatattaaactcgattgtgcttgtcccagagaacaacttatttgattatctattcttaaaaagtaatgacgtcagctttcaatatttcacgttttttcaaagagaaaacatattatatttaggtaataaacaaagcctgatcattgatcaatgcatgggatctttttttgtattataaaaggctactctgtgtcatttgcatctctccactttgagcaacaatggcatcaatgatcactgttgactttgaaaactgcttcatcttcctcctcttatgtcttttctcacgcctctcttacgatcttttcttcaggaaaacaaaagactcacgagctggctgtgctcttcctccgagccctccttcattaccaatcattggtcatcttcaccttatactctttgtcccaatccaccagtctttcaagaacatctcatctaaatatgga

SEQ ID NO: 7399 - DNA, 807 bp, Arabidopsis thaliana
ctgaagttgcttctagctcaaggaacgttgatcacgatgttgttatcagagagccgcagagaatgtaagttagaagtcaaagaagaaaaagtcttcgagcattgtggtagaggaggcttaagtatttgtcatctgatgcatcattgttctcgtttcttcctttattttttcctctacgttgctgaactttagtgctttttctagtttaagaaacttgtttcttctttctcgtgaggtttttggtattacctatgaggattttctcaacgtcaatgtatctaatgcttatttgtcatgtgttgaagttgtaaagttgatcccatgaagcatattttaacgaactaacgatgccattggcttttactagcttcttacttcttgaccaatctcctgagcctccaagatagataggctcagcctcgcaacctcctctgatatgtgagctctctcagacgcgagttccatggcgtcgagaagccaccgcagcgacggtcatgggttctccgccgatgatgactagtttggttaaacgtatactgtacttcgatcttatatgaaagtaaggcccatgggctggcccaaagtatttgcgacgcataagtccaacatataagggagtaagaccgatgggcctggccagattatttgcatctgccatttagtgcattgtaaaatttagggaatagacttatacgtacaaccaaacagattcgtcttcttctggtgcggcaagaaatcgccggagaaacttccgaccgaacgtgtcggagctgataagaaatagtgtcatgtcacaaattcagagaa

SEQ ID NO: 7400 - DNA, 577 bp, Arabidopsis thaliana
tattaacggccgccagtgtgctctaaagcattcggatcaagccttttctgctcgaggttttctttctcgtgtttctcaacaaaggtgtggaagttttggactatgttccctgcatgagaaacatcgaacacaaaaagactgggccccgcaagccattgttgtaggtcgtacaaggacacagggatgtactgtgtgtaatttttgttgaaaacccatatctctccggactgagtgggcaacgggacaccgtgaccattgtagtggaagagaactctttcgtctttggcgtttcggcggacggatacacaaaacttcttggtttcgtcaacagaagggtcgaggtattgcttgtaccgcgtcctaagactaagtgtctcgtattgctcttgcagtttttttccaatttgctccatcagcttgttgttgccgccgccggtggtggatgtcgggtcgcccagcattcgagtttagcggttggatttgtcttgacgacatccggagatcaacaccgatgttcagacaaatcgccaacgcagcagaaacagtcttgaggcggtcttcatccgcagcctgggat

SEQ ID NO: 7401 - DNA, 926 bp, Arabidopsis thaliana
gaatgtgatgagagctcctatgtttctgatggagaaagtatagctgcaacgcatagagctgaaaggaaaggtaaaagaggatcgtgttaccggtgccagttggggaaccggtttactgagaaggaagtctgtattgtctgcgatgccaaatactgtttcaactgtgtgcgcagagccatgggtgcgatgcccgaaggaagaaagtgtcaagcttgcattggttataggattgatgagtccaagagagcaagtctcggaaagtgttcaagaatgctcaagcgccatctcacggattctgaacttcgacaagtcatgaatgccgagatcacctgcaaggcgaatcaattgccttcacgacttatcattgtcaatgacaagcctttaagtgaagatgagctttacacgttgcagacatgtccaaatccacccaagaagctaaaacccggacactattggtatgataaggttgctggctactggggaaaggtacagtttcttatatatgtctgcgtatctattatcgggattgtattttgagtgctcagctaaatcagagcctctatgtgtttatttaatcagataggagagaaacctagtcagattataagtcctaacaacagcataggaggatacatcagtgagaaagtaagcaatggagacactgaaatttatattaatggccgggaaataaccaagccagagctcacgatgctcaaggttcttttgcttttcacctttgttttggataacaaatatgcttagtgtatgtgtcattgtactgaactgagcgcttctatgctttgatgtagtgggcgggggtgcaatgtgaaggaaaacctcatttttgggtcgattcagatggttcttaccgagaagaaggtctaaagcatctcattgggaacatctggagtatggtatggtttcct

SEQ ID NO: 7402 - DNA, 981 bp, Arabidopsis thaliana
ccagctaatttcctgctatctactggcaacaatacacgaatttgttttcataagaataatgaaaaacagattaatatactctcaaatcaataaaagattaatacctttgaaaagatttgatataatttcagaaaccacagcaacttcaaccatgtgtttgggactatgtccatcatcagactcttcgtttccacgtccaacattgatctgagataatgagccaaacatgtttcctctgaagatacctcttgtgataaatgccttcattaacatcttcagcatctttgattctcccaccataaaactccttgttggggaaacgactaatagaaggatgcattcgatattgaacatcaagcaagtgtttgttgtgaccaagcaaaaccaatctctcaaacaagcttcttccgaatttcgccttttcacacatctgccacattattcccatattacaatactatagcatatatgactaagaaaaagaaagttttttatttaaggtaagtgcttacctcattatgaaccattgcaggcaattgaaactcatctcctattaaaatggcgtgacgcagtcccggaagttgcaatgcagcaactgattcacattccttaagctgagccgcctcatcaaccacaagcagttctacatttcctgtcctttccacgttcatttccgcagcacccgaggctgtgcagaggataatatccgcgttttgaagacaaaatttcctaatatcttcgttttctaacatgtctggaatctcaaaacgttttggaagtaagcgtagagccttgaggcaatcaacactgagtcttttgaagcaatcaaatctgaaatttccttcctcgaaatcaaccctagaagaattctcccgcaagaaatatctgatacgctgaagagattgacgagaagcaatcattatcttcacatcatcatatggaaggtaaccttgggaagatgtgtgacaaatcacgatgcat

SEQ ID NO: 7403 - DNA, 570 bp, Arabidopsis thaliana
tgtttcaaaaaataagcaaattagtcagaagaataattaatgaaaaaacagattatagattaagatactcactaatcaatcaataaaagataatacctttgaaaagattggatataatttcggaaatgacagcaacttcaaccatgtttttgggactatgtccatcaccaaactcttcttctccacgtccaacattgataaaagagaaggaaccaaacatgtttccttgaagaaacctcttttgataaatactttcttgaacattagcagcatctttgattctcccaccatagaactctttattagggaaacgactaatcgaaggatgcattcgatattgaacattaagcaaatgcttgttgtgaccaagcagaaccaatctctcgaacaagcttcttccgaatttcgccttttcacatatctaccacattattctaagattagaaaactatagtatatataactaagaaaatataaagacagttttaagagactacctcgttatgaaccattgcaggcagttgaagctcatctcctattagaacagcatgacgaagctcagaaagttgc

SEQ ID NO: 7404 - DNA, 1016 bp, Arabidopsis thaliana
ctttgtaaagatttgatataatttcagaaatgacagcaacttcaaccatgtttttgggactatgtccatcaccaaactcttcttttccacgtccaacattgataaaagaaaatgagtcaaacatgtttcctttaagaaacctcttttgataaatactttctttaacattttcagcatctttgattctcccaccataaaactccttgttggggaaacgactaatagaaggatgcattcgatattgaacatcaagcaagtgtttgttgtgaccaagcaaaaccaatctctcaaacaagcttcttccgaatttcgccttttcacacatctcattatgaaccattgcaggcaattgaaactcatctcctattaaaatggcgtgacgcagtcccggaagttgcaatgcagcaactgattcacattccttaagctgagccgcctcatcaaccacaagcagttctacatttcctgtcctttccacgttcatttccgcagcacccgaggctgtgcagaggataatatccgcgttttgaagacaaaatttcctaatatcttcgttttctaacatgtctggaatctcaaaacgttttggaagtaagcgtagagccttgaggcaatcatcactgagtcttttgaagcaatcaaatctgaaatttccttcctcgaaatcaaccctagaagaattctccctcaagaaatatctgatacgctgaagagtttgacgagaagcaatcattttcttcacatcttcatatggaaggtaaaccttgggaagatgtgtatacaaatcaacgatgcatgtcttcacttcttcacttaagctattaaaattcttctgaacgaattctccaaaagtaggaatgttaacaacaacttcttccctttcatcttcttcattcattctttcaacttcttctaactcgtagacatgtctctcatactttccctcggggttttcaagaaactgtatcagtgactctaatctctgcatccatccagaaaatggtgaaacagtttac

SEQ ID NO: 7405 - DNA, 544 bp, Arabidopsis thaliana columbia
gtgctgtttactttctcacattagttgatgactattctcgttccgtttggacgtatctcatgtcttctaaaactgaagtctcgcagctcattaagaatttttgtgctatgtctgaacgtcaattcggaaaacaagtcaaagcatttcgtactgacaatggaaccgaattcatgtgtttaacaccctactttcaaacacacggcatacttcatcaaacatcatgtgttgacactccgcaacaaaatggtcgtgtcgaaaggaaacatcgacatatcctgaacgttgctcgggcgtgtctatttcaaggtaaccttccggtcaaattttggggtgaaagtattcttactgctactcatcttatcaatcgcacaccatccgctgtgttaaaaggaaaaactccatatgaactcctctttggcgaaagacctcatatgatatgcttcgtctttcggttgtttatgctatgtcacattcgccgcgaaacaaggataaatttacttctagaagtcgcaagtgtgtctttataggctatcccatggcaaga

SEQ ID NO: 7406 - DNA, 542 bp, Arabidopsis thaliana columbia
ggatcccttgtcacttgagaagtcttgaagaagatctggacggccagaatcgctacgacgggaaaagaaactgcgaggaagaatttcgttctgtgcatgaagccaatcgattgctccaattttctgctcaattggtaccttcaatcacaagattaacgtctatgaaaatagggctttatttttatttttgcgcgggagagaatataagtcgctaatgtttcgatttttgattttttaccactatttattttcttttatcttaaaagtcaaatatttttcttccagataaacccatgaaattaaaatcttactttcttacatcatgaaataactatttaccttaattattttcataaacagataaatccattataatagtattgataacattcataaaaagagactacttgcttgatatttttctaaaaatctaacaataatttatttatttgcagaaatacaaaaatattgaaccaatgatgcaaaatagttcaaacctgacccccatactatttgggtagatagattttaatctaacaata

SEQ ID NO: 7407 - DNA, 609 bp, Arabidopsis thaliana columbia
cacatttatatatcaatccaaacttactgcggtagtgacatgagtattgtcgccatcaggtccttctctggcaagcccaaagtccgataattttggacagaattgatcgtctaaaagcacattagaggatttgaaatctctatatatcacctgtcaaccaaataaataggaaattatcttccaatctaaacactaaacacacatccccggttcacagaagtctcgatcctaaactactaatcatgtctctatgaccacatttaatataacttaatgtttaacattgtgcctgtccgaaaatatcaagaacaataaaaagggtctgtctaaaaccagatttcctctaatgggtttcgaaattttaccttaagatcatgtaaataagtcaatccttcagcagcaccaagcatgatctcgagtctttttttccacggtaatgtgtgtgatcgacgagggaagagatggtcttctaaacttcgattcgacatgtactcataaaccaaaagcctctcgatcccggtctcgccgtcttccgagcaataacctatgagcttcacaacgttcggatgatcactacccaagaaactgaactctgctagcattgcttgt

SEQ ID NO: 7408 - DNA, 597 bp, Arabidopsis thaliana columbia
cgagtcactagacacattaggcttatcatatgaagcagaatcaagatcctgagctgaatttccttcttcgggtagagaaggatctccgtctacaaagtagagacaacctgactctgcctttggtagtgcatctggtgaatccgtctccaataagatcctatcagatggaacctaccaagaactgatatcaatgttccattctacctaaagctgtaatttggtgtacaaaaatttggaaatcttactgctttcaacatcttcttggcttttttctcactcatggacataaggaaaccggagaaggagaaatatgcaccgagcttagcaaattcaggaaccatctcagcagaacccaaatacgagtgaagcatgaccccagaaggaaaaggccctacagatctgcatattacaataacacatcataagaacacattgacataattgtagcaacacatgagaatataaagccgaagatcatactttaatatctcgagtagatcccaaatgcacgaacacaatgaactgacgcaggtttcttcaattcctttgcaagttcaagctgttgacgaaagacggtaacctgaaattaaaaatgat

SEQ ID NO: 7409 - DNA, 556 bp, Arabidopsis thaliana columbia
ggatcccccctttgtttgtttgtagggtcatagaaaccaatgtttcaccacttcgcctctcttttatcactgtcatcgtacgcctttgttgaggagttgacctaatttcaagtgttactgctgcgaattttgcttagtttccttttccctaaggcttaagagtcgaaagtattggactttgtctctgtatcaaggtagctgctgaagttacctcatatcttcttcttctactagttgtattctcatttgggcattctttttcgttcacagtctcaaaatctttttgctttgggtggtttcctatttgggaattgttgatagtttaatttcttcctttgtatccgtgcagagaagatggatctcttcagcagtctaccagatgaggttctctgtcatatattatccttccttaccacaaaagaggctgctttggcatctgttgtctccaagaggtggcgaaatcagtttgcacttgtccctaatcttgacattgatgaagaggggaagagggaaagagaagaaattctgctgagcttcatggattttgtggataatg

SEQ ID NO: 7410 - DNA, 482 bp, Arabidopsis thaliana columbia
tgtagacaattatgtagaactatatcgtcaaggaaaaaagatcactggctacctgaactacacgagaatacatgactacacatacagactatacaaatggatattgagctacatgaactatatatatatcatggcgacatgtacagactatgtgacgtcatgtgttgtgcaccatagacatcaaatgtcgattaaccggtgcaaaaattgccggcgttgactcaacgttgactcatcagaacccatttcatttccggatctaagacttgttgacccgatcctatacccgttgacccgatccaacaactttgtaacattattgggctttttgaaataaaaagtcggtccactcatcttttatctctggaccactcatctctggatcccttctaatgccttccatgaacaactcaacaatgataggagtctttatattttcacaccttcctcttggatgacactgatgcttaggatgataagtc

SEQ ID NO: 7411 - DNA, 472 bp, Arabidopsis thaliana columbia
gattataaggaaaaagaaaagaagcggctggattttgtacttgtaaggatgttgagcatcaaacacagtgtaaccattcccatttgccatgtttatatcattgaatttggcatcttcagagtcgtgaatagaaactctgtattctaacacagctgcagtgtatggtgtggcaacagctgtatccccttcttccctcagtattgtatcaagctcgggccacaatgcttctcgcctgcaagaggtagcaaatttagccccccaaaaaacaaatgaccaaaacagcattgtacacgataagccacgagaagtggaagtgtaaaataccaagcggtaaagtcatcttcagtacactggtcatcatctccaagaccaacttgtacaagacgctgtgcacctgaacaacccactcaatgaagttagaaccataatacaacacattaagaccggatcagagcgatccaaaacggatgat

SEQ ID NO: 7412 - DNA, 553 bp, Arabidopsis thaliana columbia
gatttagcttggagaagagcaagttccgaaaatggaggggcgtcgtgtatagatccaccacccacaggttcgtagattccataaccttggattgtgttttctttttgctttctcggcgacaaattcctccgattttagtgaacatttctctgattttggtgtcctgtggtggatcttccggagcaagtcttaaacttgacttggactgtttttactagctaattctgggcgctatttcgtcttccttgtttccatttctatctctttctctctggccagtcctcatatgtcatcatttcctagctttgccactactcattactttccctttatcgtgtttatctctctagcctgatggaagcagacaacggaggccccaattctagtcatgcatccaaacaacgtctgccttggacgcatgagctacatgaacgcttcgttgatgtcgttgctcaacttggtggccctgatagtaagtcttgttttttcttgtatagtctatggtaaatttagtaactcatgttttcctcatcaatatctgtggtaataatat

SEQ ID NO: 7413 - DNA, 440 bp, Arabidopsis thaliana columbia
ctaattaacaattcattattagtatgccatgttagccggatcagccacgaagatcctcgatattagatggcgacattctggtgagaggtgtaagtcctctgggatcgagtatgtgacactaaggattctctgcgttttaaaatcagtggagaagcaaacatatacaatcaacgtttgaaagataatgagtttgtgaatgatgatgaatgagacagcaagaacaattgaaaaacattacttgtattgtctttcgataatctcgtggctcctgtggatcctcgaatggataagctccaaccaacattacatataatgttacaccgcaagaccatacatctgcaagctggaaaaatgtaacaccagctatttcagaggacaactcaaagaatatttgtggtataaacagtcatatggataagctggtttgaactctagacaga

SEQ ID NO: 7414 - DNA, 523 bp, Arabidopsis thaliana columbia
tcagctgcggcgagatctcagaggcatcgtacgtgtgaggatgaccaccaacactaccggtccaattaacacgtgtgagtgtaaagtgactacatccttgaggatcctcaagagacaacaaagtcggaaaataatgttcttcagggtaacaagattcaacatcaaggcatggtaatttgaatttcctccatagctttctctctttgatcaccattagagcatgacgtttcgctaatacgaagaactgagatccaacacggaagtcttggtactggatctcaggaagcatcgcgtcgtctcctcttgcgttgtatcgtttcagaaggaacggttcatcggagaggatctcgatgaagctttgttgatgatgatcggagaagaggtggttgtggatgtaagagaaggaatggagagggatacagtgttgtgagattatagcgaaatagagattgttaggatcgtcgaggattgcgtttgctagtaatcgtcgttcggcggagattaacgtcggagaagctcgtgc

SEQ ID NO: 7415 - DNA, 421 bp, Arabidopsis thaliana
ctttaatattcatgggaagaatttctgttatatctattaatctggttaatttgtaggctacgtttcgtggaaaagtatgcgtgtgtcctatagttgatggtgtgcgattcaaaggagatggttacagccactgtgagcgtaagtactcgggtcatcttttgaataatgtttatgattatgttgacttatgttatacaatagcaattgagaatggcaaaattcgtttaagttgtggtcttacagtatggcaagatataatataatttatatattcagtgaatcgtaaacggatgttttgtttcacatgtgtttggtgaaattcaaaatatgatcttcgtgctgaattacaagaactttcatagcagaatatactcttagatgacttttggaagtgatgtctttgcccgttgttggttgttgt

SEQ ID NO: 7416 - DNA, 485 bp, Arabidopsis thaliana columbia
aacaacttacttacttgaatgtcagtccctcagaatctgagctttccttctgcatcaacccaaaaaaaagaacgacgattatactttccaatctctaactaagctgcattgcattgcgtggctactaacaagaacaaacaaaaaaattggcgagtaaccttatcgagagcactattactctttctcttcctcgacccaaactttccagtcaccggaaccgagcatacactgtcaaaatttccatccaccgccctaaatctcggcgacctccgaagctgacaaccgttcgtcaaagtaagcagcggctgtgacttaccacgagagaacttcctctgcgaaactccccctttggtaaccggaaccgagcatacattgtcgaaatttgcatgcagggccctaaatctcggcgacctccgaagctgacaaccgttcgtcaacataagcagcggctgtgacttaccacgagatgacttcctctgcgaaac

SEQ ID NO: 7417 - DNA, 626 bp, Arabidopsis thaliana
ctggtcgtttatctatcactttccacactgaagaacgaactcttgatgctttcgtaatccaaagtctcccctaatcattaataaaacacagaatcaaattcaaaaacctaaaaaagaagaaacttgcaaatcaatctaatcaaattagagaattttcaaatcaaccaaactaaaaaaacctaaaacttggaaaagaagagattgaaagggagggaataaagacgaaacctttctagcatccttagggactccatacccagagtaatacatctgacctaacaaaacctgcatagtgatgttcccagctttagcttcctcaagagtgtctttaaaccaccgcttcgcacaatcagaaaccaccgatgaaagcggaacgaaacgtcgtgtagtttcgctggtggtggtggtggatgatgaatctttgtcggaactgtccatggaggaaatgggtcggatcggttttgaggatttgatgaatccagctactgctgcggaagtcctcttagccctgttttgacgggaacgatttcccatttttaatttataacataaaaataaataaaaggaaaaaatcggtttcttctcaactcttgtttggttttggtttggcacattgtataaatata

SEQ ID NO: 7418 - DNA, 881 bp, Arabidopsis thaliana
ctccaatctcctccgcatcataaaccgacaatcccgatttgaaaagtcacagtacctggtgactccccggtatatggaactccttttcccagcagtgcacggaggcattttactaatacgctccttagctgtacaacctctctccttcttcgccttcttaaaacctctatacaacaacatctgatcactcgccgccactgtctccgagctctctcctcctcctccgccgctacatcctgcttctgtcttaggtccttgatccgacgacgacaccgacgccatgatcggaaccttcttcccaccaaccaaaccctagacgcactatggctaagcaaaacggagcttcttgatacagtagaagtaaagagagagaaaaagagagtgagagctgagaaaattcaactttgactctttcctttttcaccgaatacaatgattttgatttttgagtcttttctagtaatctaaacaacggcaaaataaaattacggacttaatttaccattacgtcccaattttgtttttcctttttcaacgaagcgaaagataataactgcaacggctatgtacggagacgagggtgctttcgtcattagtagaataggtttatatgctgacgtgtactaattatgtccacgtgtacgtgatctgtttctggattctgacattttaatgtgaagtgtttcccaactctcgcctcgttccaaggaatattcttcctatggtacactcacgatgttgttgttttgtttatcaaactaagcttaataattttcggaatattttaaattcggattttctttcctaccatttgattcttcatattgctaccgttgtaatgacttacacatcgaatcattccatttaaaaatcataattca

SEQ ID NO: 7419 - DNA, 1234 bp, Arabidopsis thaliana
tccctgtgaaacaaaacatccgtttacgattcactgacaataaattatattgtatcttgccatactgtaagaccacaacatattactttgtaagaaacttgactaatattttgccattcttaattgctactgtataacataagtcgacataatcataaaaattattcaaaagatgacccgagcacttacgctcacagtggctgtaaccatctcctttgaatcgcacaccatcaactataggacacacgcatacttttccacgaaacgtatcctgcaaattaatcagattaatagataatagatataatagaaattcttcccaggaatatcaaaagtaccttgcaagcagttatgttggctgatttatcttgccaacaaccgccattgttatctaagcactcgtttgtctccatatctgtcaaatgcaagagaaacttgcaaattcaaaactttcacaataattgttttaagtgtaatagtagtgtatagtctacagtccagccattaatttgatgaccgaccactgggtctgggtaagggtatgtaaaacatacctgtgctgaggcatatagctggttcagttgactcctcaaaaccagagcatagagccttgagtactgcactcttctccaacttgcctgcaatggaacgattataaaataagctaaactacatatattgaagtctcaagttgaacactgcggaacaaacctcggtactgtctgttgttgacaactaaggtaggcaatatggtaacatcaccccttgtacccttgccaacctacataatataatatgtcaaacccaaaacaggttacgtacagaagagtcaaattcagatgtgggaacagtaatttacttgagcatcttgttcttcctttaaaactggattgtccaagtcagcatcagggtctcccatacacttgtcaatttttctgctatcgattcctgtagggacatacatagagaatatgacctcattctcccaaaaattgcttttctttcaactatcgagacctgtaagaagaacactcaccaagagatttgattacagactcagcacaaatctttgttgtattttttctccttcattggacatctgatctggaaatcagtaacataatcccacaagacccaaggtttgccggtttcattcgccaccttgtaaacacaaagctgtctcaaattttccacaaccacgtcttttccattgtatcccgagctaaagtcctgc

SEQ ID NO: 7420 - DNA, 1077 bp, Arabidopsis thaliana
attttattaacttttatatattaatcagtcaattaaaaaaactatacagtttttacgaccgtccaaaaaagaaagaaaaaaatttacgaccgcccaaaaaggaaagaaaataaattcatgactgcccttttttatttgtgttagttgtcatcgttttgttactaaatacatatagtttatattatttgagaaaaaaacgaatgtaaccgttagatttattactctatctgcccaattatacacatccatctagagtattatattaattattgaaagtgtcgagagccggccaaaaaatgcaacatataaagcattaacttggtgttttcgttacccacaacataaaaccattctccatcaaccaaaaaaaaaaaacattttttgttgtttgtttgcattgaagcttataggcttctttagtgaaaatggagatcgaatccgtgagatgtgagtgttgtgggttaatggaagattgcacacaagactacattagtgaggtcaaatctaacttcgacaacaagtggctctgtggtctctgctccgaagccgtgagggacgaagtgagtcgccggaagatgaccacagttgatgaagccgtcaaggcccacgtgtcgttttgtggcaagtttaaaaaagataatccggcggttcatgtcgctgatggtatgaggcagatgctacggaggaggtccggtgagttgacgaattcctctacgtccaagaagtttggtagatctaacaccaccaagttgtactgatccatttttcttctatttcgctaattacttaatgtataatatttgatgcttctttcttccttgttttgtttaattaatgtcataaataatggtcggtgatatgttatataactaatcaattaatttcaaacagacttgtcatttagtttccacacatgacacattgattcttctcttaagctattaacatggtcaaaattatccaggaggaaaccatgatctcaaaattcactagccattgttgagaatatcttgtcgtcatttttaacttgtgaattgagctcaatattttcatgttatgttatttgtttggtaacca

SEQ ID NO: 7421 - DNA, 497 bp, Arabidopsis thaliana columbia
cgccagtgtgctctaaagaccaccaggtgtgcgaacaattcggcgtctggggtgaaaagtccttcatgggcaaaacctacgatggcattcatcgcatcagcttcctgattgacgctgatggcaaaatcgaacatgtctttgacgatttcaaaaccagcaatcaccacgacgttgtgctgaactggctgaaagaacacgcctgattactttgctccattccgtgctggctgcgcttgcggccacatacctcacttctcgtgatcaagatcacattctcgctttcccctgcgacacgggtgtcgaatccattttttgctgaacgttaatgaccatcatttttgtaccgttcagaatccagttaatacataacttattgaatatattgagttaatcagaatggcatcctttatgcaatatgaaatgcaatgtttcatatcattttcaaggagccgacatgaaccgctttgtggtggccgaacactgtggtgtacaggatg

SEQ ID NO: 7422 - DNA, 578 bp, Arabidopsis thaliana columbia
ccgtagacaacagacaagacgacggcggagtaggcggagggatttcgtccgccgttcatcacatggagatcggttggccaacaaatgttcgacacatcactcatgtaacattcgatcgattccatggctttcttggtctccctcacgagcttcaagttgagatcccatgtcgagtccctagtgcaaggtaatctctcaaaatttcactactgctttagaatctgaaactggatctgaaattgtagcttcttatttaatggtggattctctttgattaatgcagtgtgagtgtgtttggtgtatcggcggaatcgatgcaatgttcttatgatgagaaaggaaacagtgtcccaacgattctattacttatgcaggagagactctattctcaacaaggtcttaaggtaatgggaattggtaatcaattttgttgagaaatttgttgagaggagactgaatttgatatcttgcttttgttgtgtaggctgaaggaattttcaggataaaccctgagaatagtcaagaggaacatgtaagagacgcactaaacagaggtattgtacctgagaatattgatg

SEQ ID NO: 7423 - DNA, 580 bp, Arabidopsis thaliana columbia
  unsure (1)..(580): unsure at all n locations
cctctagcaacgtccgccagtgtgctttaaagttgaagcgcgcaacgaatcaaacagttcggcaatgtagtcgtgcggttcgatctgggtggtgtacgggttccactgaatacccagcgaggtgacgaactcttcgctgaactgatgccagtcaacttccgggtaagcggcgatgtgggcgttatagttaccgaccgcgccgttgattttgccgaggatctccacctggttaagctggcggtactggcgctccatacggtaggcgacgtttgccatctctttaccgatggttgacggcgtggctggctgaccgtgggtacgagacagcagcgggatatcgcgatactgaacggcgagatctttaatgccacccatcgagttgacgccagtatggcaggatcacttcatcacgcgcggttttcagcattaatgcgtgggagaggttattgatatcttccgaagtacaggcaaagtggatgaattcagaaaccgcgtgcagttccgggatgtccgcactttttctttcaggaaatancaaccgctttaacgtcgtggttagtggtcgctcgatagttttgat

SEQ ID NO: 7424 - DNA, 1903 bp, Arabidopsis thaliana
atttgcagaccatttgtagaccagcagccttaaccggattctgtcttgcagaatggcgagccaacctgcaggaggatctaagccaccaacggtccagatccgaggacaacctgttaaccagcaatcaggctgctgctcctcttaattcgctttggtaacacttaaccatattatgtcattcgtttgcatgtaagaaatctaaacaacgttgcttcttaaatcttttgtatttggtttttcaatttttcacttgtgtccaaaagcttttaaattctttgtaatggtacttggattattaataaacttctttagtaaaaagtcccacctaaatataattgaaacctaaacaacaaaaggagaatggttgattttttggcctcatttaacttaaaactcccaaaattgggttcgcaaaacaaaaaaccttcagctctctaaagggaagagtataacaataaaaatagaatcagaagaacaaaatccaaaccgagtgagatattacagagaaacgagtccagacagaagctgaaggaccaaaccggagagattgccttacttacccaaagtagggaactgtgcactgtccccaatggccggtgttggtgcctgtgctgcagctcctccgtccctctggtttctccctccttccctcaggtttcttccaccgtccctctggtttccttctcttggtccacgtccttcccttccaccttggtaaccacctcttggtctgtagtaactctttccatccgcaggtttcagaaactcattgatgctcaatgactacaacagaagtgtacaagcaatgagaaagaattcgaatgaaatgcttagactttctctttttaactaattaaacgagaaaccataagtcaactagttaccttccttgtcttctcttctctctcagtaatgcgcttgtccttctctgttccctgataataccatttcaaggttcgataagcacacactcaatcataaatacaagatactaatgaagattactgagacaaaaatttatatgttaaaaagtggacagtgatcatcaagatacttaccagtttgatgaagacttcatcgttgttgctctttttgcttgagagctgttgcatggcctcaaatgctttagtgtcaaccttcctttcctcaaccttggtcgcctgcagagctttcttcttctcctccaaaaccttctcatactcttccaaagtcatctcctacaaacagcaaattggtattagatataaccaaacattcttcttaagctgttaatataaacagatatgagttcaagaagtaatactgtaccttgtcctcaggcttttcctctgctttctcagcaggtgtttcattctttgcatcagttgcttcaccttcaccatcttgcttctcaacagtcaaattcttgtccacaacagctgtggattcttcagtcaccctagtgattcgaagaacacgagttaatttatcaaacacaaacacaacagaaaacacatatctagaaagaaaagaactagtttttacaagaatacttacggagtaatatcatcctgagtggttccccaattcgcacggccagctccatcacgtttatcctcattcctactcaacaatgagtttacaattaggaaaaccagacagaactcaatcagtacaagactaaacaaacaattaagaaagctagcttacccgtacgctgttctactgtgacggtcatagttcttgcgtggtctttcagagtcacctgaatcaccaccattgctgtagcttccacggcgatcaccacggtatccaccaacaggcccaccacgtctagctccatctccttcttctgagcgtctgtagcctccaccatatccgttttcattggcaggaccatcattgttccttgaatccctattgt

SEQ ID NO: 7425 - DNA, 605 bp, Arabidopsis thaliana columbia
  unsure (1)..(605): unsure at all n locations
cgagagtccaggtaaaaatactacaagagcccatgtaaaaacacttggttcatatatttgattttcgttttttgatttgtgtaacacaaagcaaaaccaagtgtaaaacgcatgtttctaacaatcaaatatatgaacatgaaattgttgaagaatcttattatgttattacttatcaaatacaatttgtacgttacgttgatcattatgtaaaacgcatgtttctaacaattatcaaagagatacttatttacttgatgattttgtctgtaatggactgagtacaaatttcaaaccaaagttcgtaaaaaccaaatcaaaccacccggttcattcgtaccataatcgcaaagtagctattcttacaacacctgagaaatcttcaaagcaatgtttctgattcatcattgaggagaagaagaagaaggagtaggaggagctctgtaaatggcaggaatagttcgagggaagaacatttgcctcacaccttctgcttttattattggaaatatgatccctgaagcactctgtntcataacacaagaagaaacaacgattcaatatttctcaaattttaaagtatttcaagagttctacaaaagatg

SEQ ID NO: 7426 - DNA, 208 bp, Arabidopsis thaliana columbia
tgcataacccagacgcaatcaggaggattgtggagtgggccttggagttgtcgagctttggtttgaagtttgaaagtacttcaacaatccaaagcagagtcttggcagagttcattgcggaatggacctcaacgcccgacgaagatatccaggagaccactctccccagcaaggaaacaagtcgcaactggatcatgtactttgacgg

SEQ ID NO: 7427 - DNA, 645 bp, Arabidopsis thaliana columbia
  unsure (1)..(645): unsure at all n locations
caaaaagagatgatgttgttctccgataaacaattttctcaacattgaacattgacaaaaaaagatcaataactgatatagtccacgtcctaagggagttgttgatcactcctgcgccgttcctccccatctctgaactcgactctccgcttgctcagcctgcataattcagaattcacagctaattcacgacatgctcaaaccaaacacaaaggaggaacatagcagcaactaacagacaaagtaagacacctctttgttccagttagtgaagtagatgattccaatcaatataagtctctgccagcatattccagctaccatacctccccatattccctacaaaaatatacaaatgatttaacaccagattaacaagaacaaggctaatacaaaatggtcatattagtaaatagctaacctgaacgccgaggtctagtgtgaatccaagaacaagaccagcaggtagtccgataatgtaataccacgcaatgttcacgtatgnacacagacgcttgcacgctgctccaactgtaaccctgacaagacgggctggagcgtgttaagaggacagtgaagcccaaaagacgggtatcttcgtggtttctgctgcgaacgttgcttgaagtgaaagataagggaagt

SEQ ID NO: 7428 - DNA, 641 bp, Arabidopsis thaliana columbia
caatcagagctcaggacacattgcttcgcacacaagcaatcactatcccagccatgactattccctgaatcaaagactaacgtggccggtcgacaactacgacagaggtttcaccggatttcctaaccccgactacaataataaccaatggggacaaccagagggacctcaattttaccatctttatcaaccgctagatcctcgctacaggaactactagccgctactttactattagggttcatggaggattaaagtctcttgattttttttctttttttttgtaggattgctagatttgattcacctccgctattttagtcataatcaaatgtcatggttatatagtgtgaaactagatgtgataaaaacacatgtaaatagtaacttttgtacgttcattttaatcttttgggttttgtttttgtttgggtcagcttccttgtcttgtgtgtttagtaactttagtttgaacaaaacaaaacctttatctcgtacttgaaaacaaaattagtggcagacatttaaaaaaacatttgattcatctaaccattgagctaataacttattaaattgataacgacccgcactatatatgggataaacaattactaataagtttagtgtattgatgataataa

SEQ ID NO: 7429 - DNA, 570 bp, Arabidopsis thaliana columbia
caccaaacccgttcgctcggtcacgtgcccaccaccaccaccacttgcgtaaccaaaaccaaccaagaaagccacgacgtcacacacaggttgatgaatcaacagagagtagtattgagtcgagagtaatgacggtgacggcggatagtccgagactcaatgcttcggggaagatcgtgtttcatggactcgagagaagctcaagcagtcccggtaacttcactggaggaccaagaatgaagcttcaccatggaatgccgagatctcactcagctaatgtcagaatcactcctgttctcaatgttcctgtctcttctctccgtagcgggcccaaatcaggcctcttttttggccagcttttcgcttcttcatcttcagcttcatcgtcttcgtcgtctggaaacagagcacagttgcagagaataacatcaagaaccgtaccaatcgaagcagacttgaaccgacaagcgaactctaagtactgaaccggattctaattgtaccgactttattaggtggtaaatgtttcacttttagttttattggggttgtttcgttagataagattag

SEQ ID NO: 7430 - DNA, 552 bp, Arabidopsis thaliana columbia
catcgcaagattgttatattcgagatctccggtgagtacgttgggagttatacaccgtttgatcggtttcaagaaggagtttgtgccatcgttgacgaattacaaccgtttgatgaatcagttgtgtacgatctatagagtaatcgatgcgcataagctagtattcgatatgagaaacagagggcatctcccagatgttgtgactttcacaactttaatcggtggttactgtgagattcgagaactggaagttgctcataaagtgttcgacgaaatgcgtgtgtgtggcataaggcctaattctctcacattgagtgttcttattggtgggtttttgaaaatgagagatgttgaaacaggacggaagctgatgaaggaactatgggaatacatgaagaatgagactgatacatcaatgaaagcagcagcttttgcgaatctcgttgattctatgtgcagggaagggtatttcaatgatatctttgagattgcagagaacatgtcactatgcgagtctgtgaacgttgaatttgcttacgggcatatgataga

SEQ ID NO: 7431 - DNA, 456 bp, Arabidopsis thaliana columbia
tatagagaggatcccctcaacgataatctgtgctggatccctctgaagctggtcattccttgtttccagttaatagtggagtcttacttacttgaattcctattactgttagctattagcacttgcttgttaggtgaggactctcttatctggttaaccttagtggtagcacactccaagtctagacaatcttcctcccaagaacctctcgataccagaatggctaccagggcgctactagaccaactcagatcagatcgtcggcataattaattctttttacttgcccagtagtggtctctgaagtttactactagtggtagtgcataggacctctctacatacccggctactgagagggtctgacgtcgatagatacagtgctatagcgtaagtcactcatcagaggagtagacgcactcatcagcagcagtggatgagttgggtttcaggtag

SEQ ID NO: 7432 - DNA, 527 bp, Arabidopsis thaliana columbia
tgaaaaacggacgatcagaagcagtcaaagttttgagaatcatattgatgattttgtcattcagatttggaactttgttgctttgtgggtctctctgtcttgataagagttggccttttgttcttaaattctctcaacttccattggataaaagagaagcgatctttgagaaattggtctagacaaagtggattccttcttccatttcgtatcactttcttccttgcaaaattctacaccctcttctacttcttctcccagacggatgagaatctgaagaatcctgcactggaagctatagggtattgcatcgatgggacagagagaagtagcaacaagaagagtgaagcagatgagaagcgacgacctctagagaaagggatcattgaaactatgcatgagagtgacgtaaccatcacacaatctctaactgaaaaaggtgttcatgttgctagagacgatggtgacaatgtgtacaggatcagatgcgatgcggttgttgtagctcaggaagtggaggaggtgtg

SEQ ID NO: 7433 - DNA, 615 bp, Arabidopsis thaliana columbia
gtttccaggtgcgcataacacagaatcacaagaaggagaccgcttcaaggcgtggcaaagggcgtgttctctccctcctccaccaattacaagaacattcactctctcttctgcagaaatcgaaatcgatattactatataatcaatggcgttcaaattcgatatctttacaataacattcaaccaagtttgttaattcataatgagcaaaagggtatttaccagagccgccgttaccgatagaaagagacggctgagattcttctgaaacgcatcggagcaaaaaaaggcgtctttggattcggttcgaagagaaacgagagttactaaggacgtgattggtagtagagaatttgagaggagcaacaaatggaagagaattggaggaggcgaatctgagggagagaagaaagggtttagttgggttgttgttgttggagaagagattgatagaagaagatgaaggatagcaattagatgcacacaacgacgacatggagggagactgtcaaagtagaggactctggactcggaccagcgtagacaagggtttaaagtggttcgcccttcttgtttttgagtttcttatttttttggtagttaaagaataaaggg

SEQ ID NO: 7434 - DNA, 828 bp, Arabidopsis thaliana
ttcttttcctgcggtggttcggcttcggaatccatagcttgcggcagagattagggttttcttagaagagattagggttaaacatgaataagcaaaccaacctcgagatggagattttgtttgcggtggttctactttggacttcttcatacttaaacaaacacaattaggtctaagcaatgaactatatatatatatataaaaacatgctttttctaatctttaaaaactaaccccttgatttagttaaattatcaaaatcgtccccgtttgggaaaataaccaaagtccgtatacggtttcttagatttaacaccaagcacacacacacaaacacacaaatgtagcatagtttcatgtcaaactatttaataaaggttaagcaaagctttgaacatcaatgatttaagcagtactactatgtttcaaacaacggatgagtgtttcaagaattacatataaaagccatcctcaacaagtaaagacatgttgatcaagtccgtatcactgtagaacgcaagaaacggtatgaactgggaaccgtaagcacaacattagaccactcaaccttaccccaaacttgaccatttttgcgcttattaaacgaaatcaacgcacagcagctatacttgtcttcacaaacacgacggcgaggcttggtaggcttgtccacaatagtaagagattccatcgtagcaaactgtttcaatcaaaccactacgacaactatgattcaacgaagacaaacccttgatcagtctccaatttttaatttcattgtcaaaccacaagaaactgttgggacgacaagagtccaatcattaccta

SEQ ID NO: 7435 - DNA, 986 bp, Arabidopsis thaliana
tattatttaaagagtaaacaaaggaatccacaccatatgaaccaaattggtccctaaaggaagatggagaatcagtagaaataatgattgttaacgaactgagaagcggttgcaagcgcgccaccaagaatggcatcgatcacaatagtgtctttgcctttcttaccaaccgctgagagcactgctcctgtcgccgcgcctgctaacattgcgtttttctgatacaaacaactcaaccaattagttctacaaaactgtaagaattgaaaagagtgtgaaaatgtattagtagtatacccaatctctgctgccacggatacgttcgattccgtattctgttccaatgtacactccaccagcagctcctgatcatattcatatgccacaaactttagacttttcttaatcactcaaaaatgagataaattagaaagcaacttaccccagtaaacaccttctttacacaacttcttaagctgcaacaatattcaacaaaaatttcagaaacttaaaaaaagattacacatgtcttcaaaccaaaacacatagatttgattcagtagtgtactcaccgcatgctccaaagtgctcttggagagactccctacaatatatgaaccatggagtaaaaaatgatattttgcagctccaacaaacaaaggtaattaatgataagcacaaaaacagatccatcaaaggtgtgtgctagttgttctatatatatacaatacattcttctatgcctttactaattcatcaacatcaccaaaaacacaacagtaaagttacataataaaactagacagaacaagaactaacacttatgtgttgtgtttgataaagttaagggcttacctttgtcgatggccttgtaagtgtcttctgcaagagatttagtgactccaacctaaaacccatcaaagaagaaaacaacaatgagaaacagatcacagattaacaaaatgatccatcagaaagagatgagt

SEQ ID NO: 7436 - DNA, 866 bp, Arabidopsis thaliana
cttaataacattgaattcttcagatctcagattgaagcttatcagagataacagtttatgattgatcctagctacataatacacaaccccatccatacatattcctttcttttcaggatcagctagataatggtgatgcttacattcaatcattctccattcttgtttagctcctagagtgaaaacttgatgctcctctgtccgaataattctaatatcatctatgaaatgaacatatagttgcgtcatgcacaacactttgtatagatcgttaacgggatcatatccaaaaaatgatactctatctatatatgaaccttttcttagttttgagtttaggcaaagttacgaattgaccagtactaggattcccaatcaacactttagtaccatttagacagcagatcaagccccggacgggtggagaaaaccgatactctagatcatgattcaaagtaacagctaccctgtgatgatcacaagacgggccctccaaggagctggagtgcaagaactgcatcttgagacgggagactgagacttgaaaaagaagacgaggcagagtggaagatcgagtcaggtacaactccgtgatatctttgtcgaggatgatcgatgaccagtgtttcgaaacgaagatgagattggctatggatttggccggcaatttcaggagaatctctatcatcagctccagaggaatattcgaaaacagatcgttttcttcactttggtcttgtttcttatccatggggagttttcagttctgctcactttttttttacgcttgattggttaaccctaatcgccttatatttttgcaagtcgaacgctaatacaagattttaagaaaaaagttacaaggg

SEQ ID NO: 7437 - DNA, 640 bp, Arabidopsis thaliana
atgcatatatatgcagacgcaccggcaatggtggaagcacagaagttgtgcgagaagcaagtgggacatggtcaggggtttgcggaaacagtaatgcatgcaagaatcagtgcattaaccttgaaggagccaaacatggatcatgcaactatgtcttcccagcacacaagtgtatctgttacgtcccatgttaaatctaccaataatctttggtgctaaatcgtgtgtattttacataaaataagtctctgtcactctatgagtaactttatgacatgcatatttctgttttaatgtttattttcccgttgttgttacaataatataaaaataatttatgtacgacgtaagactacttccatattttgtctacaacaggaccactgaatctttattcttcttcttctttgttcatgtcccacatgtttctttcaaactctgattctaaacattgaactatttaattatattgagagtcttgaccaagtcaaattaaccggttgcttatgttacatttgatagagaggcagcccgatatgtggttgaaaaaccagcatcgacggtgcatcttatctactattattactacttgcaagttaatattgtctagtagaagagggaaatgtgtttatttgtgggt

SEQ ID NO: 7438 - DNA, 595 bp, Arabidopsis thaliana
gtatacgtcgtacgtaaaagtttatcttattaaaacaaagcaacataacatatctggtacatgtcataagacctctcatagagtgacacatacttatttaatagaaatacacactttataattaagcattaagagctcttggtagattaacatgggaagtagcagatacatttgtgagctgggaagacatagttgcaagatccatgtcgtgctttctcaaggttaatgcactgattcttgcacgcgttactgtttccgcaaactccggaccatgtcccacttggcctctcgcacaacttctgtgcttccaccaccatcggtgcttctgcatatagatatatctctcacagttaattatcacaataaaatgaaagaaaaaaggttaaaactcaattttccatgcatatggtatacgataacatcattactcaccaagagcagcaaagaaaacaagagcagcgaagaaaagagtaacgatggtagcagacttagccatgactattgtttatacttagttgttttcgatgtatatatgttttagtttgaagaaatctgcttgaaatcaacactatttatagtgaaaaaatgatgggga

SEQ ID NO: 7439 - DNA, 584 bp, Arabidopsis thaliana
attttatatttttatagaaaagtcacaccaaacattaaaacataaacatgcatgccttaagtcactcatagaatgacacagacttatttttaaaaatataaatacacatcgataaagaaccaaagaaaattggtaaattaacatgggacgtaacagatacacttgtgagctgggaagacatagttgcaagatccatgttttgctccttcaaggttaatgcactgattcttgcatgcattgctgtttccgcaaactcctgaccaagtaccacttggcttctcgcacaacttctgtgcttccaccattgttggtacttctgcgtatgttacatctctctagttatgtaaatgaacattacattttaattcatattataagagcattactaaccaaaagctgcaaagagaacaagagcagcgtagataaaggtgatgatggaagcaaacttagccatgatgattattactactttgttttcaatgtatgtatgtatgtgttgtgtgaagaaataagcttaagagatcaacctttatttataatgaaatgatggtgagtttatttctacttgtgcatgggtacaatac

SEQ ID NO: 7440 - DNA, 567 bp, Arabidopsis thaliana columbia
gttttcggtttcaaaacagaaacttgtcaatgatgagatggagaaggtaaaagggtttgctaaagacagcaacgttgctttccgtgaaaggcttaagatagtagctggacttgttaaccccgaagatctagctctaagctcgactgaaaagaagcttgtacaggcttacaatgaaaaacctgtcctctctcgtcctcaacacaacttctttaaggtttgagcacaccatcactacctcttaaacacacaacagaagtcacctaattaaaatttacttttacctctctccacagggtccaaactacttcgagattgatctggatgtacatcgattcagctacatatctcgaaaaggacttgaagcattcagagatcgactaaaaaacggaactcttgatctcggcttaaccatccaggtaacttgatacaaagtctatatgcaaaccggactagatcctttgttcttgaagaagataaagatcatgaatttggaacatgaaacaggctcaaaaacaggaagagctgccggaacaagtcctatgctgtctgaggctgagcaagattgac

SEQ ID NO: 7441 - DNA, 125 bp, Arabidopsis thaliana
gcttgtctccaactcccgacttcaggtgatgcgtccacctcggcatcccaaagtgacgggatgacaggcatgagccaccgcgcccggcgtattgtattgtattgtattgtattgtattgtattgt

SEQ ID NO: 7442 - DNA, 706 bp, Arabidopsis thaliana
cggtgatactattagtctttggaaacttgagcagaatctagaagatgcttgaacttgattgtgtcgtttttttcttttattggagacgatgttgatatttgaatgttttgataatgtcaggacagagacaagaatttagcaaatggtgcgattgcaaatcttgtggatgaagttggtggagcacttgtacatggcgaaggcttacctatgagtgtttcagtggacatgtctattgcattcctttcaaaagctaagcttggtgtaagtctgctcaagtcttttttcaatctgtactttgggactgtttgtttgctatagaaatggattgagagatatgatattgaaatggaaatgaattttcaggaggagttggagataacgtcgagattgttaggagagagaggaggttataaaggaacaatcgttgtagtcagaaacaagatgaccggggagattatagcggaaggtcgacattctatgtttggtagacaagctagtaagctctgagtccaacttttaagtcttgtatcactgtaatgtctgttttcaataataagattatggttaggtaaatttggttaggtcctttgttctttctggttgtgaatctaaaaccttggtacatagcttataaagatcaaaccattcagtaactgtgatagttatgttgatgaggatggtatagatatgtaacataagaaaacaa

SEQ ID NO: 7443 - DNA, 566 bp, Arabidopsis thaliana columbia
taattacatatttgcattaatgaatattaacaaaacctatctctctgtctatatatacacacacacacacacacatatatctcctatcattcatcgtacacacacactctctatgacaaagctccccaacatgacgacaacactcaaccatctatttgatctgccggggcagatttgccatgtccagtgtggtttttgcaccactattttgctggtataccttaacttcttctcttattctctcccttcctttctcccttcctctctttatatatatgatcatgagtttaatgagtgtaaatgtgttgcaggtgagtgtaccgtttacaagcttgtcaatggtggtgactgtgagatgtgggcattgcacaagccttctctctgtcaatttgatgaaggcttccttcattcctctccatctccttgcgtctctctcccatcttgatgaggtttcataacatctatacatagacaaacacacaccatctaaatatgaccaatatatatatatatatacctacttttgattatatgtaaatatatgtgcatgacgggaaagaggaggt

SEQ ID NO: 7444 - DNA, 1680 bp, Arabidopsis thaliana
caaaattattttgatatttttataataagactctaaaccattgcccaatttcttaagcaatgtgaaactttttcaacttacttttttttttcgtcgattgaataatatatgtctgtttttaaaattttgagttaatgatgcagaaaaaatataatatgttattaactatatatattttatataacagacacatacattagatatataaacaactaaaagtgaaagaaaaaacaaatatttatatttaatgtagataaagaaaatttaagaaattcgtaattaattgaatgtagttcaataatgataagatttaattaaggatataaacttaaacacatattttttagatagattttgtagaggctaaatatgtaatataggaaagagttaatttaagtatttaatgcaaactaacaaactataaatttttagtaatagaatatttggttgagatataatttgtaaggacctaaatgttattagtaaatagttaacggatttttggccaaaaagtctaccaaaaatatatatgtagatttttcttcttctcttcccctactttttttagtctctcccaaccaacaaagagttatttttttcaaaagcatgaaactaaaattacaaacaacctaatagcagccgatactgctctgcttttgtttcctcacttgcgtttatgtgcacttgcttcttctgctccttttcacttgcctgctaacaacatcatcaacagtctcagttatgtatttggtttacgtccaagttatttcacttttggacacttatatacaacaaacatcacctctactgctactttttgctttgacttaggtgacttttgctgtgtgataccgaagaatcttcgaggtcatcatcgacgtttgcagaccttcgagtagctgcagaacacagatacaggttttaaatgaatcgggcatgaccagaaatcaggggaacactatgcaaacttccacacataaatgtaaatcttccatttacttactctagaagttggctggatcctgcggatagatctacgtggctccattccctctgatgtttttgaagaattttcagccaacgccttgtcctcttcgattttggctaaccttcctgcagtaggagccactctccctttattagtgctcaaggaggaactattcttcgaaccagtatcatgagaggatgatgtggtttgctcttctactgttcccttaaatgaaacaccagatccaggacccctgttttctgcactctcatcagattccatatctgatgctgttgtattacgcgagtccttgcggggaattatcctagccgtagcacccggtttctctttgggcttgggcgcaggtttgaaagtcttgggcctagatattgttgtctgtttctctatggagatagttttagaaggcattttccagctacctattccagaattttggggcacaattgatctcacaggcttaactggttccttcctttcctgagttttagtgcttgcctctgaaacatagtgtttgctcacgtccatgaacttccttttctttccaggtttagggacaccaaaaatcacttttgatccttgcttttgcaaaccggttctcttcattcggagtggatcgggtttgttctcctctctggtactctttccaatgttaaaagtattctctgaaacac

SEQ ID NO: 7445 - DNA, 462 bp, Arabidopsis thaliana columbia
cctcggaaataggattgtctgttgcattcagggagcttccgagaataaactagcaccattacaaattcctttgcagatgaacctattgacgcagcgactctttgatgcttagaagttgtttccaaccataggtctactaagctgtgaagctgcaacgttgggatcactggttctcccatacatgttatctctacctgtttacaaaaaaaaaacatagagtagttaaggttcaacaccggtgggtcgaaaaagtcccagatcataagatatcacccggtacacaagtcggaaataaaagggagagttaactttagtttaaacatttatggggaccttacagtcatattgataagcacaagacttgaaccaatgtatagaactacggtctatgtgattccatattagaccgagtggatacctcatataaaacagaaaagtagccactgcataagataagattgc

SEQ ID NO: 7446 - DNA, 544 bp, Arabidopsis thaliana columbia
tgttctcacttatcctgtcccccagccagtgagacaagggacaaccagagttaatgttggctatggtccgatggctgtaggtccaaggtggcttgcatatgcgtccaaaagttccatgaccatgaaaacagggcgcctaagcccacagacgtttacttcttcacccagtctcagcccaagttcatcatcaggtggaagcagttttatggcccgttatgccatggagtctagcaagcagttagccaatggattaatcaacctgggggacatgggatacaaaacattgtcaaaatactgtcaagatatgctccctgatggatctacttctccagcatcaccaaatgcaatctggaaagttggtggggtttctggatcagatgcagagaatgccggaatggttagtattaagatggatctgaacattgcgggcaattcttgggtcatgctattctcttacaccaaagatcttaatcatagtcacttactttgagctttgctctcttgctatttttttttaattgccagattgtgatattatttgaat

SEQ ID NO: 7447 - DNA, 536 bp, Arabidopsis thaliana columbia
tacaataaggaacaaaacgagttcattgaagttttattttctagtcatttgaaagtgttgggatgtatgactaaacttatgtaactccttatgaaaatatatgaaactactaaacactaactccttattttatagcgaattgctcaactttaagatctttcgtattctcaaaggcacaataaagtagtgttttaacagctctgtactgctgtaacctataagctccgaaagattgcacctttgatagtagagagacactaacctaagagtcaagtgaagaagatggagcatcttagtaacctctccatctttgactagatattggtataaccccaaacggagatgcatgaggcagaggaattgtgcccggaccgagaattccaggttgatccattgatgagaatgtatagtttcttggtgttagtggtggaggatattgaactcctgtagacagcagcggagaaggtgacctaggggagagcaaattccggtaagcagttggagattgtggacgatattgggaagttggagtaggt

SEQ ID NO: 7448 - DNA, 616 bp, Arabidopsis thaliana columbia
actaatggtcagtgtttagaactagacgaaaaatataacttctataatttacaaacattttgacttatagggttaactttatcaagatttgaatttctttctctcgtgggtcttaaataagtatttgaaaatcttatcagggaaacttagatgaggcaaatctacctcgtaagcgaaagacagacatctgcacaataatgtacacaagcgggacgactggagaacccaaaggtgtaatcttaaacaacgcagcaatttcggtccaggttttatccatagacaaaatgcttgaagtcactgatcgatcggtaatttttttgttacaatttagcagacacatgattacataattggaaattatattttggtttatttctttggaaattttgtagtgtgacacgagcgatgtgttcttctcgtacttgccattagcacattgctatgatcaagtcatggagatttactttttatctagaggctcctctgttggatactggcgtggcgtaacgaaaattttctcttaattttgaatcctttttcccacaaaatgcccattatattttctgatttttttttaaatttgagacaggacattcggtacctgatggatgatgtc

SEQ ID NO: 7449 - DNA, 652 bp, Arabidopsis thaliana columbia
  unsure (1)..(652): unsure at all n locations
gatgggtcttgaaaagaatttcgggattttcaccggttgcaatctgaagacaaagtaaaacatagatgtattcatacaaagataaaatacagaaagtgatgaattcaagaaaactgtaaaatgcataggaagctcttggaaatagttaagaaagaacgttggagtacctggacttggacaaatccatcttcttggttaagaatttgaagtgacagggttccctgcatatcaaagctactaagtccaccatctcgtctcaatgcaacattgagcttctcttcaacagttaatgtgaaaggatcagttggaggtggggcagctgctttggattggccagtaggcttaacatcttcaatgacgtcttcaccttctgctttaagggactccattaactggttctttcccgacttgccaagtttcatgccagaactcttaggaggagcagtaacagaagaccgtgatcgatctgtgaagttaagcacggtggataagaatttcaaaacaaagagattatctaatcgaaatcaagtatatatatatagaggcgcttaagaaacccgagatggaagggcattttgatttgaatacttgggattgacggtcatttgtgaatgatcactagttanagccactaaccttttggtttggtatg

SEQ ID NO: 7450 - DNA, 517 bp, Arabidopsis thaliana columbia
tgtccgactctcatcgtaggtgtatggcgctagacgcctatcagaagatggctagacaggaaagtcgtcacagatatatcaatcatgattgtccgacacgcaatcggtgacgattccattgtgtgcattgatgtaaaccaggctaaaactcatcttgtctaccgaatagataacactctttttctgaagatagaccaaacattagatgttgtgattcattcagggaataagacaggaagaagcaatgacgaagatgacatggtgactttaaggaaaaaactaaaaaatgaagtggtagtgatagattgaagaacgatgagggattaaaagttagattgatagtggttttcttttttagtttatatgtatgtaagatttgtgttagttttgttgatataggtttgtaaatgttagaacaagaaggaataatgattatgttgagaaacaaaaagaaataaatggttttatgggtgttaaactggaagtgttttaggaagtttggtgtttcaggttagtg

SEQ ID NO: 7451 - DNA, 412 bp, Arabidopsis thaliana columbia
aaattttaattttaaatttgcctctccgttaataattggttagagaacaataatcatcagagaaacattcgaaacagtagttgcagagtcatggtagctccgctgacgctgccaactcgtcgtctcttccgtatacattaaggttcagctcagtttttctcgggaaaaagagattcttttgtcgaaaagaatgtctccgagcaataaaggaaccgtcttggctctgattctagcgttgaccatggtggtggtcaacgggttttcatcgagattcttcgtggagaaaagcagcttgacggtccttaactcatgggaaatgggagctaagcacgacgcggccatagcaaactttggtctcccaaagtacggcggtttcatgatcggctgaaggtgcatagtgagaagagtaagt

SEQ ID NO: 7452 - DNA, 582 bp, Arabidopsis thaliana columbia
tatctctgcagacacactcttaatgttcttcagtgttgtcatctttcttccatcccctcgcagtacatattgaagcggtggacaaaagatgcaaaaagccggcatttttcaggagaacctcagcagttgcagactaggctgctgcggtataacgatttgtgcgaacgagcattaaagctgaatgaagaggcatccctctctcaagagagttacaatattgcattccttgctattgaaggagctataggaaactgtgctggtattaatacttccggcagaagtcttccagatgttgtaacgtcaccaactcaaggtctgatttctgtggaggaggacaaccatagcagaagtgcaggcaaaaccagcaagaaaaagaatccaactaagaaaagaaaagtaacttacttgtttacgatctctctgtgcagacagcttatggattttgttcgctttgcgcttttatgctttgcaaatttgatgataccaaatactaatttcaggtgacccagagcaggatgttatgccagttgcagcgctagaaagcttgcaacagatggtctgtcgttgttgacatgtcgtggc

SEQ ID NO: 7453 - DNA, 478 bp, Arabidopsis thaliana columbia
tgattatgtaacctgattatgaaatcaagattgctaattgttttgattttggtcttttggttttgccttgtttatcaagaaacccgagaaaccgaagaggaaatggtcgtttgggaaacaaaagagtagagaatcttttgatttccctctggaggagactccaccggttgacccttcaccttcttctgttcatcgtccatatccaccgcctcccccgttgccggattttgctcctcagccgttgttaccaccaccgtctccacctcctcctcctccggcatataccatcaatacaagaatctatggtgagtctaaagaatcaaagaatagacaagctttagctcttgcatcggctgttgcaccgaagcagctgtggtagctgcacatgctgcgcggaggttatacgtctcacgaccccatcaacactcaaattgaggaacaaaggaggaactgcgcaacaagatcaaatgcgtataga

SEQ ID NO: 7454 - DNA, 565 bp, Arabidopsis thaliana columbia
cacatcttccgtgagcatcagcactccaagcttcttgaatcaggtctcgaacttcctcattcacttttagtctcctgtcataacggaaaatacctttcttctttttctttgttaggtctaaaagggtgatgataggtctatgatctgaaccctcgaatctaaggtattcacagtgactaaacgggtacacttcagcccaagaactgttggccatggctctgtcaaggcggcagtgaacaaggtgatcattcctctttcccctccaggaaaagaagttacctgagtgtcttaaatcatacaggtcacaagctgccatgaatgatctaatgtccacaaaggtaccttcatgtcttaatggacctccttgtttttccgaaacgttaataatatcattgaagtcccctgttaagaaccaaggttcatcacgagagaggcctttttcagtgaattggcccaaatgatttcctttttgcctctcaggttcccataaacaaaggtggaataaaatgatttccagcatatttgatctttgtatcaataaattatggcaagagagataatatga

SEQ ID NO: 7455 - DNA, 381 bp, Arabidopsis thaliana columbia
caatgtaagtgctgcttgatcttgaaatgttgtctgcatccattgatattacatactctgtgtatgtagctctccgtgagcgctttgccgagagaagaaacttcccactttcaacaagtatggctgtacaaatttgacaagattcaaaaactaaataatagagaaaattcgagttcttgatattttcaagatcttgataagtattgaatttaaacaaaagtatgacatgtgtgttctactaaattttgagtccaaattttactgaagcagaggtagtaacatcgacaaagacgaataacttaccaggactaagagaaaggtaaaggtggtaagtcatgttagacttgtctcttttgatataacattgtatgattccatcct

SEQ ID NO: 7456 - DNA, 558 bp, Arabidopsis thaliana columbia
cataaaaattgcaaagcaacttattatttggtacatgataagtaaaacagtttcaacaacatattgatccgtgtaatggaccaaaacagatcaagctgagttaagtggagctccaagttcggtagagccttcacggttttgaaacacgatcacgtatagtgcataaattatccctgggatgtatcctaagattgtcagcaccaagcaaatcaagaactctacctgcaaaaaaactaagagtcagattttctaaactaaatctcaagattcatgattccaaaattccaataacttacagtgcaacagccacgtttgagacaaactccaagaggtggaagaaggatcgcgattaagatctcgcagaaaacttccatgttgctcgccattttttcagagatgtgagtgaagaagattcttgaatgtgatctgaattagtggagaagaagagaacactgaaagtagtcggtagcacagagatccaattataagagcaatccacggctttttatttttggcgctaccaagtcaactacgagatctgcaccgtttatttgtttg

SEQ ID NO: 7457 - DNA, 730 bp, Arabidopsis thaliana
gtgtataatgatgttgacaagtccagcacggtcgatattgaaggagattggatcggcttcaagacagaagaggcatacgttttggtattctgtgtgattacactctgtcataatcagctcttcgtctgctctagtcgacatcacaagaaacaacaacagcataaccatgatcatgggattagtcatttctccctagttctattgataataggtttttgcgtttgatatttggtggtggtgatgctttgatcaggaggtgtttactacttatttaaactacgaaacttgagatttgattggttcacgagtcagtatctcattaatgagggtttatgaggtggttgctagattgtaacctcttttttgccattcatagtgcaagtttcatttaatccaacacaattaatttaagctgctaatcttattttgctcctcttgggtaaattatacgtgctcattaattttgacatctgccacataagagacttgtagctgcgtcttaaggttttgtctaacctacattccagcaaagttccagcaaagtggatatgggctttgattttctaaggttcacagatttcgcagataaacccatattggtggcccagtgggtttggcttgtagagatagtcttttcaaatatataatttcgatggttataaatcgataaatttataaatttgaaggtgcacacaaaaaagttttgctaactcaaatgaatatgccatga

SEQ ID NO: 7458 - DNA, 976 bp, Arabidopsis thaliana
ctcctctacttgtaagagcacaatgtcataatattctgataaagaaataataaaaatgaactactaggtacttgcagtgaagaaaatcgactcatctgcgcttcccacggatactgctgatgattttaccgaaattgtatcgaaaatagcgcatttggatcacgaaaatgtcacaaaggttgatggttactgttctgaacacgggcaacacttggtggtctatgagttccatagaaacggctcattgcatgactttttacatcttgcagaagaggaaagcaaaccgttgatatggaatccccgtgtcaagatcgctcttggcactgcacgtgcattggagtaagtctttaaacatctcaatcacattattgctcaatataatagcatgcagcagagtctcatggaaagtattgttgttgttgcaggtacttgcatgaagtttgctcaccatctatagtccacaagaacattaaatcagcaaatattttacttgactcagagctgaatccacacctctcagactcaggtctcgctagcttccttcccactgcaaacgaggtatatatagtatagactaaacttctcagaattctagtatctctctctctcttttgttcctccatggaacttgttcctaagtattcatgacattgtgcagctactaaaccaaaacgatgaaggatacagcgcaccagaaacttcaatgtcaggccaatactctttgaagagcgatgtttacagttttggagtagtgatgctcgagcttttaaccggaagaaaaccattcgacaggtacttttacaatccatatccctcgccttcctaaaaaaacttaagagtgatgcaaatgtgttcagaattgaagtaagtcctggtgattgttgtgtgtgacagcacaaggtcaagatcggaacaatcattggtaagatgggcacacctcagcttcacgacattgatgctttgggcaaaatggttg

SEQ ID NO: 7459 - DNA, 1351 bp, Arabidopsis thaliana columbia
tttataatttggttagatcacggttaaataagaaaccaaacttgatagaaaataagaaaccaaacttgatagaaaattagaaactaatatataataacccattcctttgacaccgtatctttgaccgggtcaatatccccggctaatcggagaactaaacctatctcagccgtacacactctcctcacgtaccgtcttagagagatcatcacgaatcggagaaggagacggcgtgtaaaacggtggggaagcacatggagtagaaaacggcgtagtttgattatagtggctaaagtcaacctcgtcgtcgcttatatccgtcgcgactacctcctcttccacttcatcatcctttacatgatcctctgtaaagatgcttccacgtggatcaatctcacccgtccgatgatcggactcgctagtatagtcttcagcgatggtaaacaaagtctccgaaggtccgcaaagtaaattttctccgtttattgaccactttgatgccacgtcattaaccggcggtgcggctgcagggagcggcggagcggtggcagatcctattctgaactgtttgttttcgagacagaacaagaagaagtaaagaagctctttcgatggcggtggtgtagccgttaggtcaccaccgcgagaggaaaaagcgtcgcgttctgatccggcgatactccgacgacggaaccgacgtttccaccacaaaacgtaggcgaactgcgccgttacagcgacgaggcaaaacgcgaaaacagcgacgagtagggttgcagttggggtaagacccatttaggagacgagagtttgagagagagtaccttaatactgcgtcgtttcgtttgtcgtaattatggatatgatgttttaagataagaacagaaactgaagtggggtagtctcgtaaattattactaattattgggtagttgaagtgtcataatcggaaaagagttgctgagtaggttccggttagaaagatcattaatagtcaaatcgggattgaaagcgaaggtacacgacacgacttactatttggagtcatggagtgtctaaaatttctttagttttagctgaccaaaaaaaacgagcatctacgttgaatgtgctatatgcgaatgcgaaattggtgacttttataacaatcagagatttgagtttatcgattatcaaaaaagcccaaataattattaacattttaacggcccattttagtctaacacgccactgttcagggtttatgattaggattctagtttttttgcctgatgcatctccatcatctagattttaatcatatatgaggtactaattacaaactgtttttgaaataaatttctaggaattg

SEQ ID NO: 7460 - DNA, 851 bp, Arabidopsis thaliana
gtgctcttgatggctgtcaaagaatttgatccaagttgtggtgactcagcctacactatgggcattgtggacttgttacttgaatgtgtagaactatcgtacagacctggtaaatgtagtctacatagctctaaatatgttatgtccgtatgaaagaatgctgcgtgagagtagaacattcagtagtcacattatatatgtggacatgtaagctaaagctgttctgattatggctactaatctttttcatatttgactttgtagaggctggtggtgttaggctccgggaggacatacgtaatgcacacggttaccactttcttgttcagtttgccctggttctatcttccttgccaaaaaatccgatttttgtgtccagtaatcatgatagtggttccgatgaccctgaagtgtttcatgatggagaaaatacaaacagtacggaaaatgctgatttttcatcacaaaactttgctccatcgttgtcaagattgcttgatgtcctcgtcaccctggctcagactggtccagctgagccatctgtagggagggcctcacggtcatcccaaacgaagccaactgggcatagcagaagtcgaacttcatctgttgacagtatatacgatgagacatgggaacagggaagtggtaaagttaaagacctggaagctgttcaaatgctgcaagatatcttcctgaaggcagagaataaggatcttcaggcagaagtattaaatagaatgttcaagatattctcgagccacgtggaaaactatagattatgtcaggaattaagaaccgttccattgcttgtcctcaatatggctggtttccttctcgctgcaagatat

SEQ ID NO: 7461 - DNA, 867 bp, Arabidopsis thaliana
ctctctcttatagttcttctccttcttgttccgtctgcttctctccatctccgtccatatctattgttctctctctcttcatgcccgaacgcatcgggtctcaaaaaccattgatacagacatcgatccttgtcaactagtactgatctagaaatctcataaaaatctgtagagatatggccgccgcagccgtttcctctaaccctcgcaccgttgaagagatcttcaaagattattccgctcgtcgtgccgctcttcttcgtgctctcactaaaggtctaaatcctctctctctctctttctctaaatttcccagatttcttcgtaatgcctttggattcgtcctttaacttgttcgtttttgtgattttttccagatgttgatgatttttactctcaatgcgatccgggtatgaaagatttcgacttttagatacccttttatgtgttttattgagatttgatttcaatttttgggtgtttgtggttatagaaaaggagaatttgtgtttgtacggacaccctaatgagtcatgggaagtgaatctaccagcagaggaagtgcctccggagctacctgagcctgctcttggtatcaatttcgctagagatggtatgcagaggaaagattggctttctcttgttgctgttcacagtgattgttggttgctctctgtttctttctactttggagcccgtcttaatcgcaatgagaggtacgtttgccttttgttcttgcttgtttcagtgacttttataaattgtcgaagatagttttactgtgctagctagattgtggtggtaatgatgagaaaaaatatgtctttggacaatggactgtatcatgattcatgagcttgtgtcatc

SEQ ID NO: 7462 - DNA, 1149 bp, Arabidopsis thaliana
tattagccagtgaaaagcgctataatatgttattaatagcgttttcataaaagctatcttatgcccctgttattgtagaccccccacatacgatagcgtcagaattgtatgctatgttatagttttctacgatagctctaatgaaacgctttattagagaacaccaatatttttgctaaattatttaataatccatattcttctctatgttaggtgtttcaaccatagcattacgaaaacattacattacatttgaagtttttaatagtaggatttgtgtctgcgataatatatgtttttcataagaatgataacctgtaatgattgaactcaccgaaagtttttaacaaaagcatcattcatttgccataaacatccaatacacataagtctaaatccaggatacacaatacaattctcaagccatgttctacttaactacattatccaaaacgaattacaaacacaacaaaagtctaaagagtatagtaaacctcaagacatgataaccttgtcctctggccatgcaatggctgtgccaagtgcatcttccatgatctcgacttcatctgatggcctccacacttttacatcgcttactttcacaatatcgacccacactttaactacattatcacccaatggaacaaagtgaaccttctgttttggatcgtttgttgcccaacgtccttccgccacaactcgtttctttccggtaatatccatcaacttgcacttcatattttccttagaaacgccttgattgaaacactgccatgttcataacattaataaaccaaagactgattcaatatgacagaagcaatttcaagatactaaggaaacatttacctgagatttctgtagagttttctgatttgtagagcttggagcatttgcattctccaaaggagtttcagatcctgaagctgaagacttagaacttgtggatttagaagctgcagattttgcccctgctgaagatttggaagctgatcctgagggctgaagagatgacttctgattaccactagcagatgggagattttcaaataccactttatgcacaggccatgatataaaagccttcaaacaatcctcaaggtacgtcatttccattgtaggcctccatcaaatgtttctggcatg

SEQ ID NO: 7463 - DNA, 1060 bp, Arabidopsis thaliana
tcgcttcgtcaatcaacagtattggagcattcttcagcactacccgagctatagcgattctctgtttttgtccttgggtaagctcaacacctctcatcccgatatgtgtgtcgtatccgtgaggtaagctgctgatgaaatggtgggcatttgcaatccttgctgcttccttcatctcagcttcacttgcattgtgccttgcgtatataatgttttctctgatcgttgtggaaaagattatgggttcctgttgaatcagacccatatggcttcttaaccatctcaaattatatgacttcaagtctcgcccatctaataagacctgaccagcaactgggtcgtagtatctctcgatcaacgatattattgtgctctttccagaaccagaaacaccaaccacagctactgtttgtccgccattgactttgagactgaagttgcttagtactaacacttccgggcgggttgggtagcagaagtcgatgtttttcagttcaatgcttccatacacgttaggcggactaagagccgaggtatcatcaggttcgattgtaggaactcgatctattatttcaaaaactgaagcgagagatctacggcgcttgagaatgtaaggtgctaatccgaatggctccacaagagcaaatgtagcaaaggagaagaccatgtactcggttagagctgtagacaatttcatatatctgcggtctactgataacgcggtgtaccacaggaggagcgcattacaggcgaagagaagaaactgtgagaagccaaacgcaaagccaatagccatcccatggaaaaagctctgcctgagtatccgttggagttgcagtctgtagagttccatcaccttgttgccggcacagaacgcgacaacagtatatatgtttctgacagcatcctcgagtactaaggacgcctttcgatgcatctcctggatgccctttgagaaccagcaagccacagtttctggaaattttataatgttgttagaactgcagaacaggcgaatacttccaagctaagtgcatgaggataggatgccaaaatgagg

SEQ ID NO: 7464 - DNA, 1663 bp, Arabidopsis thaliana
atatcacccaacatagtcctacttcattgcatagcctcctgaaagaataagcggaatctaacgtctacaaactcctaagttgcttacagaaactaaccgtggttgtacaacttctgctcatctgctgtcatcccggacccgataagcctttgatcagatgcatgtcctgtaactacatccaataacgttatctcgtggcatatcacatgatggttggtatgtgactgaactaatctcaattaggcacatgagtccaatctcttttagatcagttgatgtcgccgtagattcttgccaaaatgtggttgcattaaacggacatacaatccgtttttacccgctaaacaatcatgcgtaccttcctctactattttgcctccattgagaaccacaatgttatccacatgtctcatcatcgctactctatgcgctatcagaattgttgttttgttccccattatcaatgtatcaagagcctcctgcacaacccgactcgattcagattcgatagacgagctggcttcatctattaagatgatgggagcattcttcagtactacgcgtgctattgctattctctgtttctgtccaggggtaagttctacgcctctcatcccaatatgtgtgtcgtaaccgtgaggtaagctgctgatgaaatggtgagcatttgcaattcttgctgcttccttcatctcagcttcacttgcattatgccttgcatatatgatattctctctgattgttgtggaaaagattatgggttcttgctgaaccaaacccatgtggcttctcaaccatctcaagttatataactttaagtctctcccatctagtaggacttggccagcaactgggtcgtagtatctctctactagtgagattatcgtgctctttccagaacctgaaacgccaacaacagctacagtctgtccgcactgattttgagactaaagttgctcagcactagtatctcgggtcgagttgggtagcagaagtctacgtttttcaattcaatacttccgtagacattaggaggtttgagagcagagttatcatctggttcaatcgtagggactcgatcgactatttcaaacactgatatcagagacttacgtcgcttgaggatatacggtgctaatccaaatggctccacaagggcgaatgtagcaaatgagaaaaccatgtactccgttatagctgtcgataatttcatatatccacggttaacagataacgcagtgcaccataggaggagcgcgttgcaggcgaaaagaagaaactgtgaaaaaccaaacgcaaaaccaatagccatcccatggagatagctctgtctgagtatccgctggagttgcatcctgtacagttccatcactttgttaccagcacagaaagcaacaacagtgtagatgtttctaacagcatcctcgagaactaaagatgcttttctgtgcatctcctgtatgccttttgagaatccggcaagccacagtttctgcaaattcgttttgagaatgattagaatgtcgtgtcagctgaataaacaaacatttttgagctacatgaattgagaatgagatggcagaaaacaaagaagcataagctaaaatcgctacttgaactggaaaggtatgcaaagtcagaacacatgtgacaggggaaaatg

SEQ ID NO: 7465 - DNA, 584 bp, Arabidopsis thaliana columbia
ctattaatcttggggattaatctcacatgtgtatgatttattctctttggcaggatccccaatgtgaaaaaactttgaacctcagagacaattgattccccaactgttgaccaattagactggagctttatctgcatggatcgaaaaacaagcttctttaattgcagtagggcttggcagggagatgagtgcagcatttgtttcagcagaaatgcatggtttgagtgcttcagacacagtggtaagtctctctccctcttgagaagtaaataaattcttgtagtaagtagagatgacatgaactatttgatcctcttcatagacaggttgacctgtatcatcctctataatagagatattgttaatagcttttctcccttttgtagcagcatggaaatagccggtatttttatctttgcttccagaattcctcttctgccttataagctaagcccaatttcctattgatatcctctatttgtactgtattcaggaaattttttgtcattgcctcctcaagtctctgccttaaatcttctatctgctattgactattgagctgttgttgtttgtccactttatga

SEQ ID NO: 7466 - DNA, 579 bp, Arabidopsis thaliana columbia
  unsure (1)..(579): unsure at all n locations
nnnnnnnnnnnnnnnnnnnnnctaaagggtgcggttgaacccttctaacgggtcagaacgcccttgctgatctgtaccggaactcgcacaccccaccagaagcgtagttcccagagcaagcgccgacagaangcgttcataaatgtctccctgtttttttatggcttatgcagtttgccatccatgacggaacgataccgtaatcgcctgtttaggtgtgggcgattgtaacagcacgtcaactgatgtccagacgccctgatttgctgatttgatcatagcctggtaatcgccgccctgtaggctacttgattctatagaaacagaaaaaggcaaacgcagccttttctacattttcagagtaactcccgtcagttgcgagcaaaaaagccgctacgctttagctatacgtgctaattcaagagaagagaccatggacaacgacaaaattgatcaacacagcgacgaaattgaagttgagagcgaagaaaaagagcgcggcaaaaaaatagaaatagatgaagaccgactcccctcccgggcgatggcaattcatgagcatatccgccagatggtgaa

SEQ ID NO: 7467 - DNA, 980 bp, Arabidopsis thaliana
gtcgccttgtattattgtcaaagaacaactccgggaggtcttctcatcagtgaagccaccggagtttctgaaaccgccatggcgtaagtcttttctaaaaccaattcacagaaagttgactttttatgattttcattgacttttttaatctcttaaaggtatcaaaacatgccagggatatggaggaaagaacaaatcgaagcatggaagcccatcgttgacgctgttcactctcacggcggcatcttcttctgccagctctggcacgctggtcgcgtttctcatcaaggtttatcaaagaaactgttttacaagtttactcttttaagatttgaaaattgctaaacatggttctttgtgtaaatatttgtagattgtcagccaaatggagaatctccggtctcttcaacagataagccattcgccgatgatccatcgaatgagtttacacctccgagaaggttaagaactgacgaaattccgacaattatcaatgattttcgtctcgctgcaagaaacgcaaccgaagctggtaaaaaaatccaaactttcactttccaaccaaaccctagaaaaaaagattccaacctaatttttttattatctttttctaggttttgatggagtagagatccatggagctcacgggtacttgattgaccagtttatgaaagactctgttaacgatcgaaccgatagttacggcggatctctagagaatcgatgtagattcgctttacaagtaatcgaagcggtttcgaaagagatcggacctgatcgtgtcggaatcagactctcaccgttcgctgattacatggaatccggagatacagatccaaaaagattagggctttacatggccaagtctctcaacagattcgagatactctactgccacatgattgagcctaggatgaaaaccgtcagtgagattttcgagtgcagggaatcacttacgccgatgcattccaaactttaat

SEQ ID NO: 7468 - DNA, 555 bp, Arabidopsis thaliana columbia
  unsure (1)..(555): unsure at all n locations
nnnnnnnnnnnnnnnnnnnnnctaaaggtatatcggcccggctttcttctcagatataaacgggtatttgatgttaatttccttcgctttaatccccgtccactgggagaaaaagcctaagaagtcattggctgagcggcgggctttaatcacacgatgcgctttatcgtcgctggaaatgaccataaaaggcacctggaaattttgctgatatttatcatcatgggcaaggtattgcacgtctttaccgcgctctttaaaggccagaccgtggtcagaaaagtaaaccagcgagaagctgctgccgctgttgcgtaactgatcgtacagcttgcgcagtaaatcgtccgtttgcgtcatggtatagagatagcacgacgtttctttcgattgcacaaaggtttcgtattttccttgtgtcctgtcgcaggcctgcggatgtgagcccatcagatgtagaacaatcagctgcggttgcgagtgctcttgcgccacgacttgagcggtcatatccagtaacgcttcgtctttggtgtttttatctgcttcaaaatt

SEQ ID NO: 7469 - DNA, 307 bp, Arabidopsis thaliana columbia
gagatacttagtggttagagggcttacttctgtcagtaatatcagagtgaccggcaatgatcttgtgcacaagctcttcttttgtgataacccaacgccttatcgattgaattaagtaatggatgacattgaaaagtttaggtagacaagcgatcatctttcgccttctttttgccagagagattgctggattttgatcctcaatcgctgtcctctcttgttcttttatctgacatgagcaagaaaacaatctcagtaagtaaagccaatctcagtttgtacttcttaatctcaaactgataagtat

SEQ ID NO: 7470 - DNA, 574 bp, Arabidopsis thaliana columbia
tctgacattgtgggtctgattaaatcctggctcccctggcgatccgagccagctactgtgtccagggatttttggatgcctgatcagagctgtcgtgtatgttacgagtgtgattgtcagtttaccctcatcaatcgtaggcaccattgtcgtcattgtgggagagttttctgtggcaagtgtactgccaactctattccttttgctcccagcgacttgagaactcctcgtgaagactgggagaggatacgtgtttgcaattattgtttcaggcagtgggagcaaggtgatggtggcccacacgtctcaaatatcacggaacttagtacttcaccttcagagacaagtcttcttagctctaagaccagtacaacagccaatagtagtagcttcgctcttggctccatgccgggactgattggtcttaatcaaagggttcatcatggttctgatgtcagcttgcacggagtatcttcaatggagacaagcgtaaccaagcaaggcaaagaaacttcaaggaggagcagcttcattgccacagacgtggaagatccactcgctttgctttaaatag

SEQ ID NO: 7471 - DNA, 324 bp, Arabidopsis thaliana columbia
catcataatagtcgttttttgtgtgtatgattaacacatgtgttataaatcttaaacgcaaatattttcttctaaaacactcaataattttttattcttagagtgtggaatgagtttaggctttaccggatagtaaaacgaggtccttaagatcaagtcctgtggtttgcaaagagtgtctgaagattggtgatattactggttggaggaggaatgttggctaatgcctccgctgcgtttgatatcctcccggctctgcttccggtcggtacactccaattcggtcttccctacaacataccagaggtcagaatttatgatgag

SEQ ID NO: 7472 - DNA, 533 bp, Arabidopsis thaliana columbia
gagatagtcaactgcaaaaaccttaaagttctcaatctcacctccaacagactctccggaacaatcccaaacctttctcctctaaagtccctagaaattctcgacatctccgggaattttcttaacggagagtttcaaagctggattgggaatatgaatcagttggtttctctcggtcttggcaacaatcactacgaagaaggtataattcctgagagtattggaggtttaaagaaacttacttggctgttcttagctcgctccaacttgaccgggaagattccaaactcgatctttgatctgaatgctctcgacactttcgacatcgcgaacaacgcaatctccgatgatttcccaatcttaatctcaagattggtaaatctcaccaagattgagttgttcaacaacagcttaacaggtaaaatccctccggagataaagaacttgactcgtttacgcgaattcgacatctcttcgaatcagttgagcggggttttactgaagaactcggagttttgaaggagctcagagtt

SEQ ID NO: 7473 - DNA, 526 bp, Arabidopsis thaliana columbia
caacaaccatctgaggattaaaagaaagacacaagtcaaagaaccctaaagattacatcctctagtaaaccctaacttttagtgaaatatctctgtttaagactttaacaactaacaatctgaaagaaaaaaaataccattacgctctaaaaaaatctgaagacaccgaaataaaacaactcaagattcataacacatatatgtcggattctttccatcgatcatcagcttggaacctcggtgtcagattcgctatggcctccgaattcttcatcatcttcaccttctaaatcatcctcatcttcttccctatcttctccagggagggaagagaagagatccttgatatggttagctgtgttatttgcatagtaaccatggacggtgttagtacttggttcatgcgaaaaggacacaggtggtgcagacaccggtggtggctgaataacaacaggcttgttgagcccgtatctagccttaggatcttccgctgagccaccgaatgagatattagagcttgtgttgt

SEQ ID NO: 7474 - DNA, 595 bp, Arabidopsis thaliana columbia
cctctaacatttcaatggcagtgagagatagagaggatgagaagtacctcgaattcccaggatcctcggtactgactggagcataagaccgatttggattcaatagagacgtgctcgccatctcgatcaccgggcctaatccggatttagctccggtcaacgaattgtgctccgtcaatgtcgacgacgaagacgaccccattggagcacgaacgctcctgagagagtttctgtacttcctaaacaacagcgtacgattcctagtcgccataacagctcaaatataaaccctataagaatctcagtgatagctaaccaagatctcggcgtctagatggattttagcttcccttccgatcgaaagctatagatctaaacaggatcgcggtttcatcatagacaaagcatcgaaaatcgcgcgaaagaaacgaatgcgactgcggaaaccggccgatctccggcgggatcaaattctccgacggagaaaaacagcgcccagattcacaaattggaaatttaactataatttcgaaaattaattaaaacatccaatcgataaataaatgacagttgcacaaaaaaaaaaaagaaaaaa

SEQ ID NO: 7475 - DNA, 485 bp, Arabidopsis thaliana columbia
gctatctgcaacatttcaataaggaagacatattaaaacgtatgcccttcttttaaacatgaacgagaagaatgaatactattcttaaattttacctgcaatccgctttgaagaagcttgtcatagtttgctgtatctaatgcactttctacgtcttgagacatgctggttattttgttaataactgactctatatccaatggtggcatctcgtcctcaaagtctaaacgagcttcaatttcagtgaggagctcaatgcattgtgctcttaaggatttgaccaaagatgaaaaacctccctaaacaaaaggtagagaacgactagaagttataacaatgatctcagacaagccacatcaagctattattagacacgatttatcataaagaattgcaaaatgaatacctgaatcccttccaaagcagcatctgcggcacgagaagacttggccgaaataagtttttcgcattttcagcttgcgaaa

SEQ ID NO: 7476 - DNA, 598 bp, Arabidopsis thaliana columbia
cttcattttcttcaaatgccaatcgaggatgcgtttcttgatcaaattgactacaaagatccaatctcaaaagacactacagatttagctgtgtctaaagatgataattctgtccttaaagatgcacctgaagaggcagagaacaagaaacgtgttgatgaagatgaaactatgaaagaagttccagaaccagaagatggcaatgaagaaaaagtctctcaggaatcttcaaagcctggagatgcgagtgaagaaactaatgaaatggaagcagagcagaaaacacccaagttagagaccgccattgaagaaagatgtaaagatgaggctgacgaaaacattgctctgaaagctcttactgaagcttttgaggatgttggacattcctccacacctgaagcctctttttcctttgctgatttaggaaccctgtcatgggactggtaagtattttatgtgacacagaaattttgcagtaagggagagattgatctgagattcttcttaatttacaatggcaccctcttccctttctgatcctgcaaggctctttttttctataggcagcctttctagtgagattggcaggatctgatgt

SEQ ID NO: 7477 - DNA, 702 bp, Arabidopsis thaliana
gaaaatggcgcaattgtagtcgtgctttttttggctgcaaatcaagttgtgaagatgtttctaataacttctctgaatcttacaacaatgctattaataaagcaagggagatgccactagtggagatgttggagacaataagacgacaaactatgattcgtattgatatgaggttgagaaaggcgattaaacatcaaggaaagttcactttgaaagtggccaacaccatcaaagaggaaacaatctatcgtaagtattgtcaagtggttccttgtggaaatggacagtttgaggttcttgaaaataatcatggctttagggttgatatgaatgcaaaaacatgtgcatgtcgaaggtggaatatgacagggattccttgccgccatgtcttgcgaatcatattgaacaaaaaggttaatcctgaggaactcgtcaactctgattggtacttggcatcgaaaaatttgaagatatattctgagtcaatctcaggagttaatggtattggattttggataagatcaggtgaacctaggattcaaccaccaccacgaccaacaggtaccaaaaagaaagaaaaaagaaagaagggcaagaatgagtctccaaagaagaagaagaaaggaaaaggagtacaagagcctccagaaaagaggaccaaagtttcaaaagaaggacggagcattcgttgtggacgttgta

SEQ ID NO: 7478 - DNA, 477 bp, Arabidopsis thaliana columbia
  unsure (1)..(477): unsure at all n locations
tctagaggatcccctctccaaagagcaactcttcttaaaatctcaaaaggtgatgagctggaatcccattccaactaaggattcttgtggttctaganggaatcgaggctacagggagaacctcaggaaacggagagcctttcccccctttttcgcccaactttttcgaatgctggttttaagaatgagtgattgcccttctccgacccttactgcccaacctgcgagcggacagctaatgcattccacttattgaacagggttctatggtcggtccgcgaccctggataccgaagcgtccttggggtgatctcgtagttcctacggggtggagacgatggggtcggtccatggattttccttccttttgccgcatttcgctcaaagggttgaagggagatagtgcatcaagctgttcgcaagggccaacttgatcctcttccccagggatcaatcccagacgagggaaccctagga

SEQ ID NO: 7479 - DNA, 835 bp, Arabidopsis thaliana
tcctcgacgcgtgtatcgttcccggcgaagatttcatatctctccggtatatcttcgcaccgtggcgatgaaatgggtaagagaatggaaggattcgttagaagcgtcgatgggaagatctctgatgcgtctttctccgaagcttcatctgcgactccaaaatcgaagtactgtgaataatatttgcttaaagtcgtttccttttggcctttgctttgattgattctttgtgcattaaaatcagggtgaggaagcacacaatttcagtatttgttggagacgaaagcggaatgattaataggattgcaggagtgtttgcaaggagaggatacaatattgagagtcttgctgttggtctgaacagagacaaggctctattcaccatagttgtctgtggaactgaaagggtacttcagcaggtcatcgagcaactccagaagctcgttaatgttctaaaggttgttcttttgttagatcgcacttattagtttctgcatgactatagtttcattcgcaccaactttacgcatcagccaatttgcttattcattatttgaagattacatttgcgatttccttttccattctcttcattgacttggacatgaattaggttgaagatatctcaagtgagccgcaagtggagcgtgagctgatgcttgtaaaagtgaatgcacatccagaatccagggcagaggtactattccttgcctatgggaaattagagtttactgtacttgctggttgcttctgatttagggcagaggtggtgttagttttctctctaaatttgattaagcttctgttttaatgaattcacagatcatgtggctag

SEQ ID NO: 7480 - DNA, 576 bp, Arabidopsis thaliana columbia
ccccagaataaacttaccaatgaaatctgatctgaggacttcacaagtccgttgtacttgctcgatgcaaggtgagaaagagcatagaactccatcctgctttaacatctttgctgcagaaggaaccgcaagccaaggctgtggaaggtctagaaacacagaatcagccaaacctgacagtttctcaggaaaaccctctccttgaatgtctctaacctctacggtgactaaactacttatgcccgtcttctcaaaatcttccctgttgcaaagtaaagtaaaggatgaataaatactatagcttcaaaagaaaagcacaacgagatagctaaagaaaacgaaagtttctaccttgcagagacagctcgctgctcatggaaatcaaatgaataaacgtgtccagttggagccacagctcgagcaagtgaggtcgaaagcgaaccacctactgtgcctgactcaagaacaacacagccaggcacgacttctagatacataaccacaaagctaatatccgcaatgtaaagcatttgagtcctgtggcttaaaaccaatgtccatagttcaggagtagga

SEQ ID NO: 7481 - DNA, 408 bp, Arabidopsis thaliana columbia
gggtaccgagctcgtactgtttcatgacagattcctcacggccatcaggcaacgtcattgtcaattgtgggaagtccataagaacctaatttatgagaaacaatcagatcaaatgtccgatttgtatgaacaatatgcaaatttagaatgagaagagatatacctcagccatttcatttcctctctctccacaaccaacatacacaacagcatcagagttggagtactatgtaaataagaaaaagttagctttggaaattcaatctatccagtaattaaatggaacaaaaccagagagtgtcacaaggtaccttggaaagtgcctgactgataacagttttcccacagccaaaagcaccaggaatggcacatgttccaccaagaacagaagggaaaagggcatcaaga

SEQ ID NO: 7482 - DNA, 951 bp, Arabidopsis thaliana columbia
tgagatacagaacataatagaatatccaaaaaaaaactacgaaattaagctcttcttcgttgtgaaccaactaaaacatatggcaaggctctaatctcccactagagcatactatctaacagaattattatcactataagctaacaatcacttaccggcgatcacagagaacaaggtctccaccgtcgaagcaaataaagcaaacatcttcttccttgtcttccttcttcggcggcggtgggggtggacgaatatgcaacggcgtattagcctgtgcccttggaggcctcccccgttttcgttttattggggcagcttcatcaataactttaacctcttgctcattggacataggcacagcaaccgccccagcaaccgtggaggcaggtacagagagagcaggaacttggtaacaccgatctcttcacattgatcaactctcataagatcgattcctctgacggaactctcttcgcgaccagccaaagaagccaactccggcacgccttgctggagttgcttctgttgattctccatgattagtgaagaatttgaaaaaattgtgagcagtacttgcagatcaactagtgaaatagaaaccctaatctgaggttctttggggattttggcgatgatgaatgatgatgatgatggagagaagtatgggtgatgtgtttagaaaacgaagactagtgggaagaaaaaatcatatggactttttttttcttcttctattcttttccacttctttagttcttactttgttatgaccaaatgtataacaaaaatgttgtcacttctttctgcttatagaatttttattatttcaaaaatactagtaccaatttctacagattccaaaaatactataatttctagatttcaaattcatttctaaaatcttatgttagatttcctagcttggttaaaccttcaaatatttatccaaaa

SEQ ID NO: 7483 - DNA, 586 bp, Arabidopsis thaliana columbia
tgagaagacaaggtcttgtcggaactcgttacacgcctcttgtaggagatgtgagaaggagttttagcatgttgaaggaagcaagatccaaaccgatgaaaccaacggatgatctcatctcacttgtcatgccttactcttttcacatgctcaacacttacggttgagattttaaattctttttgtatttactagaggtctaaacggttcttcttctaatatatatgcatgtatgtatctgtggctacaacagggaagacatttttcacatggtcaggacccatacctgccataacaataatgaatccacagctgatcaaagaagtgtacaacaagttttatgatttcgagaagacgcacacgtttcctttgacttcattgctaactgatggacttgctaatgccgatggagataaatgggtgaaacaccggaagattatcaacccggcattccattttgagaagattaaggtttcaaatcctcttctctaatattgtcacaaaaccatgcatgttaatattgcttctggctgacgagtgaatggcctttttttgtgacctgattatgattttgtgtatagaatat

SEQ ID NO: 7484 - DNA, 549 bp, Arabidopsis thaliana columbia
  unsure (1)..(549): unsure at all n locations
gttcgcaaactagcttagcatgtacctcagccatctgattccttgaaacaactcttgcaatcttcttcctctcgaagtcaacattcttggtactgttgctacaggcaaggttctcaatcaaagctgtagcatctaccagatacttggtattgaagttaccattgctcattaaatcaagagccatctgatatctccaatcaactcctttgaagaaggtacctagaagttgtacctcactgaagccatgatgctggcagtcccgttgatattccttgaaataaacccaggctgccttgaaagcttctgtcacaccttgagtgaaggtatacatctttttttcacagcttgtctaacttagcatcatcatagaagtggttcaagaaggctatcttgatgcttctccaggtggtgagtgaaccaggcttcaattgcttcaaccaagaagcagcttcaattgcttaagggtcgaattccacaaagttcttttgtcacacaataagctaaagtatcaagattaagctanatgagtataaggagataaaagaaagt

SEQ ID NO: 7485 - DNA, 869 bp, Arabidopsis thaliana columbia
tatgggccacttcttgggtttgaaaggttaacgcaagtgcttatccccactacatgttaaatttaaaactctgatttttcaatggtgttgaattggactgctctgagatgttgaaaatgctagatgatcaataggattggatacgtttaacgtatttaggatatactaggccatgaagtagtaatatttgtactaattgtcttgctaaaaaggtaagagcatgagggttcatgttttcctatgtaagcagcttggtgtcggatttactctctttggagagtagcctcttctcatcggagcattgatctataacgttttagccgcaaagaacaaaaaccccgaaaaagatgatctcatgatcatgttcaaatctagaaacataaagaggggtatcaatctgtttatacttcacatagatctccattcctgtttttgtgggtgaataaatgtaacaaaaatatttgttccccttaatattacaaccttatgatgattaccaaaacatacttaaaatgtatacctattattaataaataatgagttctacctcgaagaatttgcagagatcttattagtagatctcttgatagactcgattctttgtaacctaatctgttctctgaactttgcaatgaactcatctgccttcttgtccacgtcacttccattgttgatctcactaactccttcttcctctactatcttcttctcaacctcgtcgtggatttcattttctcctcttctctgttctccattctcggattcttccactgccttgcttcccaagttacttctttgatcattcttctctgtgtcttgttccttcgattccacgattggatcggaccaccaaacctttttaggagcgt

SEQ ID NO: 7486 - DNA, 527 bp, Arabidopsis thaliana columbia
tttgaaccgttcgatttgatgacggggaagttagtcttcgcgctctggccgttcattagaaccgcggcttggtcgtaggctctagccgctgtttccgccgtgtcgaatgttcctagccacactcttctcttcctgatagctcacataagttacgtaagcaaaaaacacacattttattcaaacttcaaagtactaaaacaaacacacaacaaatttgttataaattgttactgataataaattgggtcgttttctttttgaggaaagtttatagtgagtagtgttcgttccttcccaattctttgctatatgattttctataatccaactaagacatagaaaatacatcagtatcaattatatgacaaagcatttaaatttatgtacactcaaaatttcaaaatacaacacaaaaagtacaaatactcaacatatgtatatgttaataaacgtgggttttttaattggaaaaaaataaggaaaacgacttaaacaaaaatgcatgatattataagagctttgcatga

SEQ ID NO: 7487 - DNA, 602 bp, Arabidopsis thaliana columbia
ccgtgcttctgttacggaaacaactgagctcttacaactttctgtctcaacatccacaggttgagaagactgctccaccttcaaccgttttaatgatggttgcaaatgacctgaaatatcagcaccaggcgaagtacaagattttgctccagcagaggtctgtacagcgtcacttgatattcctccaccattcactgacctggctgcatcggtttcattttttaatcgagcaagggaccgtgcatttgcctgttgctgtaggtaggccttcacaggaatacagacagggcagttaggttccttacaacttcgatgatgattaatcaatgtctttgtggggaggcaacgaggatatgaacattgaggtgcagcacaactgtccatgtgtttccagagcttttgaaccgtaacacaatttcgatcaggacacttcccttcaggcgctttgcagtggcgagcatggcgtagaaagaggagccatttctgttgatttttgaatctcggatcccggttgccatttccatttctacaagtggtagcagtaggattttggggattaagggattctgatgtagtcgagacacgattttgacctataattg

SEQ ID NO: 7488 - DNA, 567 bp, Arabidopsis thaliana
tcacacactctgccaatttgacctttctctctcgcttctctttctctatccaatcggaaagagatcaaccaacgatagaggagaagaagaacttgcatacgcaaaaaaactttcccgggaaaattccagaaactgctttggaaaaatgtgcgagcccgatgataattccgctagaaacggcgtcactactcaaccttcgaggtcaagggagcttctaatggatgttgacgacttagatcttgacggttcatggccactagatcaaatcccttacttatcctcatcgaatcgcatgatttctccgatttttgtctcctcttcctctgagcagccttgctcgcctctctgggctttctccgacggtggaggaaatggttttcaccacgcaacctccggtggcgatgatgagaagatcagctctgtctccggtgttccttctttccgtctcgccgagtatcctctcttcctcccttgttagtctcgccgaccttttaagcctttttttttttagttttatcggaattgcgatacatattgatcgtatattggatttttgaatttcgttat

SEQ ID NO: 7489 - DNA, 2255 bp, Arabidopsis thaliana
ttacctttaaaatacattcaagaatacagtactgatgtagaaagtgcataactgtatatgtaaatgaaatgatttacatgcagttatgcatataggcagcatgaatattgttttatcatctcatttcttggctttcattttttaaaacttttgtcctttttttctaaaacgagaaagtttcagtgctttaaaattaatgatgaacacctgctagctttaacatccaaatcacatgatttatgcacatcagctctcatgatcaacattcccctctctctttttggtttctaatacatttcgcctctactttagtaactaactatttctaaacgtctatatgtataaaaagtccggccacattttctaccaaatcattttgtgaaatttgagtctctcaatggcatttaagaacaataacaataccaaactaaccaaaattatcagtcacatctctcaaaacctatcattatctaccttatggaaatccttaacagtttccggtgctctacttttcttgttacacacatttgcattcaacaatcctcataaaatgatgacccataacctttttgcgcctcttgaccttagtttctcctcctcttcatcttcctcctcctcgtcagtatcattgtccttgcaaataacaagagagcctccaacaaatatcagccatctattttttgtcattgttggtagtacaaagacttggagatataggagaggctacatagagccttggtggagaccaaacattacaaaaggatatgtcttcctcgaaagaccacctggccctgatctcttgccttggcctcaacaatctcctcccttctctgtcaacaaagagtcattcatcacaaacaaattcaagactcagatccgccttttttattcgcttcaagagtcttttaagaaggcgtccaaagagacaagatggtttgtgataggagatgatgatactctcttcttcttggacaatttggtgaaagctctcgaccgatataaccacaagaagcactattacgtcggaatgaactccgaaaacgtttggtccaacgcgattttcgcttttgacatgggatatggaggcggcggataccagttgagctatccaaccgtagtaacacttctcagcaacatggaagaatgtatcaaaagataccttggagtttacagcgatcttctctcatttcgttgcttggccgacttgggaattgatcttactttagagaaaggcatgcaccaggtagggttgttcagtccaaatttatcagttgtttagtgtgaaaagagtgactaaaatagtaaccaaagattcttgtgtctcactctgtcttccttgtggtgtatattacataccagaatgatctacacggtgacatatcaggtctgttatcagctcatcctcagtctcctcttatcagcctccaccatttcgatgtaatagacccgatattcccaggcatgaaccgccagcaatccgtgaaccacctcatggaaaccgcgaaaaccgaccagtcccgtgtcttgcaacaaacaatatgttaccaaagaggatataactggtcagtctctgtctcttggggctactcagtccacatttaccaatctatatacccaagaagccacctgaaacgccctctcgaaacattccgaccatggaaggatgttagaataccggcgtatggatttaacactagacgggtgacgaatgatccttgcgaaatgcctcgtcagtttttctttgattcagttgtggaagacaagaaccaaagcttggtaactaccatctacaagatgaaaatggaaaggcgtttgcctccttgtttgctaaatggcaaccattcttctcgtaacattacacaagtccgagtcattgctactactatgcacaatatggtaaccactagaccctctatactcttttaatcaaatcattaatcaatttctatattatctgaagtcaacttcaaatattaaacaggttgagggaatcgaatgttgcgatgtgcaaaatgttaacagtacggagattttggaagtgaagataagagattgtcatatagatgaagctcttgcttagactaagtcttatgataccatgtaatcatcaactatgattgatctgaaaatctttttcatttgtataacaacagcatctgtcatttattgatatgctgtacaagttccaacctgttgagaaaatcagatcccaaatggggggaatcaagcggtttcaaaccccaaatgcataaagt

SEQ ID NO: 7490 - DNA, 587 bp, Arabidopsis thaliana columbia
aacctgagctgctgttttttctgggctgttgcatagatttcctattctcttcgtcttgtaagagtatagcatatcttctgtcatcatcagtaccatcaaccagttgatcagatgtcaaggcctcgctctccgcaacttgagaaacttctttaatcctcacaccattagatgggtttctttccctctgcagaggcttgtcaatcttactactcttctctctgagagctacaagaacaggaatctcaacatagcttgattcatgtttcttggctgtctcatccaaaccagcgagttggttatatataaaatctccctgggatataacaaaatcgatgattgccgcaccactagaaaagtacttgcttccactgctcattgatctgacaaccgccgcaagtaactcctcaagacctatatcaggatcccaccagatgacttggacaatttcttatacacagccactgaagcacgagctttctcatagaagtaatcataaaccttcctgtagctagcagcaggtttacgacaatcataatccgcaattccgttgagatcaaataacaggggaacatcttcataaccagaga

SEQ ID NO: 7491 - DNA, 580 bp, Arabidopsis thaliana columbia
atcccctaggtcaacgctgtgtggttgatagtaatttctgtatttcatttccatgatgttccaggctgcaattatcaattctcagacgatagaagaaattgccagactcgaacaggtcccttgctttttcttttgaatatcaaatttgtgcctgatgatgttgtttttgattgattttgacagtcttctttttttttggcttgtggatatataggctttgaagtttggacaggttcctgctggcctgataattcctgatccggccacaaatgactctgctcccatggaggtatttgcttatctttttaattttgctccttgttcaagaaatctggatagctaaattcagtgtgaccgacaaatctcttgcatattgtctttacaggaatagaaagcgtgactgttgcccctccaatcgttgtagctactgctccagaatgctcacagcaattgttttctctggcaatcctgtacggtttctgtcacttccttaggaactcatgcgcaacagttggaacctgtagactatttactgctcgaggcacctgttttgaaccttaaaaagaatgccaaagaggat

SEQ ID NO: 7492 - DNA, 558 bp, Arabidopsis thaliana columbia
ctttatgtgcgttcgactggtgatatcgatttgtctgtgtcgttgacgagctcgaatggatcacggactcttgcttctgaaaagatcatgtgagaaataatttcagattcttcagttaagtctgaatatgtttattttgctgtttcagtgtgtgaaagtttcaattgtatgctttcatttgtttcaatgtagagcttctgcttctgatgtttcgaaatggattaaaaaagaggttcttttggaggcaaaagcgaccgatcctagtgcaagacttcagttaacaacaaccaagaaagggtcaatatggattgaccaagtctcggccatgccagtggatactcacaaggttcttgtttcgctctctctgattccctgtagagccttgagatggaagattacagattgctaatagagaaaatattggaagatgaactctatcagatactcgatcttgttggttgattgcagggacatggttttagaaacgatcttttccaaatgatggccgatataaaccccgtttcatccggtcccaggtacgtattatttaaggctagt

SEQ ID NO: 7493 - DNA, 454 bp, Arabidopsis thaliana columbia
ctcaaaaagaattaatgttgttcttgtgaatgtttgtttgcagataatgatgatcttttggtgcttgaatatggaatgcttgcgggaacggtgttagtttccttttgtagagctgtcatatattgtgttggtttctttctacatggaagcttacagagaggaagctctcagagtgaaacagatcgctgagaggagatttgcggagaaagatttcacaagcgctaggagttatgcgttgaaagcgaagtctttgtttcctgatttggaaggtttatctcagatggttgcgacgtttgaagtttatttagcttctcagactcgaagcggtggtcagattgattattacgcggtacttggactgaaaccgtctgcggggaaaagagaagtgaagaaacagtataagaagatggctgtattgcttcatcgtgataagacaaatgcattggagctgatg

SEQ ID NO: 7494 - DNA, 616 bp, Arabidopsis thaliana
  unsure (1)..(616): unsure at all n locations
ccgtctttacccaacgacgttgttcttaactgtctgtctcgtgtctcgagaactcatgatccaattctatctctcgtatccaagagtttccgatcactcgtcgcttcgccggatctcgaagccgcacgattccgcttcctaaatacggagaggtgcctctatgtctgcttaaaacttaataacaaccataaccctagctggttcatactttccgaaactcccaaacatanactgataccacttccttcgtttccttacccacatcccaattgctcaactgttgtcttgtctctactggttcagagatttacatgcttggcggattcgacgcaaagggaaagagtagcaggagagcttatgttctcgattgtaaatttcatcaatggcgtcgactccctaaaatgcttatagctcgaaaaggtgcagccgctaatgtaattgacggtaagatctatgtgtacgtaggattcagcagcgtttacaataacggcgtaaacgggggagagatttacgacccaaagactcaaacttgggagccatttccgcaaggagaagaagattctccaataaagagggtgtactcgatgtgctttttgttggattatgagagaaagag

SEQ ID NO: 7495 - DNA, 501 bp, Arabidopsis thaliana columbia
taaaacaatgatcaaaaaatcattactcaggtgagttagtgaaactgtagttacaagtacattatgtcactatcaataagctaagctaaattcacaaattcatttcttcatttaaaaatctttaaagtatagattttttaatctgatgtatcccaatatattatggataagatagatttttttttgttcttttgtatttaaatcggatcattctaattggtggagagacagactctggactctgaagaagcaaatggctgggatcaccagcaccgttggattcaacgccatactcgccggagccaccaaaacggtgtcgcatcctgttaaatctaagctctttggtcttcgactctgtgtacccgaattctcaattgtttctctttccccttatcatcatcgcagttgtcccgccatcacttgcagttacggaggcggtggtggcgtaggcctagattcccggcgataggagaggtaggcacaaagaatccgaggatgatg

SEQ ID NO: 7496 - DNA, 564 bp, Arabidopsis thaliana columbia
gagttgcctatctttttccgcacaggtcatgtttccatatcaagctgattcagattttgagctcagcttatcagttggagactatgttgttatcagagaggttagcattcaaatcaaagcatataagataccattctttcgcggctcaggacatcgaataacggaaagaatcttaaaactctttttttttttaatctctgtggactcattcacatgtctttatgatgttccaggtagtgagtagcgtgtgggcagaaggagaatgtaaaggcaacgcgggttggtttacttacatctacatcgaaagaagggatcgtgtcttcgcaactaaggtcatcgaggtcttctagtggcttcttttggtgtgtttcggtgacttttgttgccattgttgttctgtatctaactttttttttttttttttggtcaaaaattctgtatctagctagatttctttttcttcctctctttacttatacacaagatctgatcattgaagcaaaataaatctcatctccgatgatctaacaataatttccataattcaaatgctttcagaaagga

SEQ ID NO: 7497 - DNA, 557 bp, Arabidopsis thaliana
tgaataacaacaacaaccctaaccctagctggttcatactctctcaaactcctaaacataaactgataccactcccttctcttccttacccagatccacatcccaattgctcaactgttgtctcaactggttcagagatctacttgctgggcggattcgtcgcaaaggaaaagagaagcaggagagcttatgttctcgattgtaaatctcatcaatggcgtcgactccctaaaatgcgtatagctcgaaaagaagcagccgctaatgtgattgacggtaagatcaatgtgtacggaggatgcagcagcgagtaccataacagcgtaaactggggagagatttacgacccaatgactcaaacttgggagccatttccggaaggtgccttgaacaaagagggtgtgattccatgtgctctaataaaggatggcatagcttttcctgattgtggcctcctaattagtggaaaagtttatgacactacaacgatggacacgcttgattacaatacacccatggacaagcttgacttgtgtccaaatgtttgcatgctaaag

SEQ ID NO: 7498 - DNA, 610 bp, Arabidopsis thaliana columbia
ggtttccactgttagccggtaagccaaaattcatacttcgtcttattgattttacttcttaaatcaacattctcatcaccttgacatttttggctttctttcccgtgcaggtttatctgaacttagtttcgacccaagagcagaaattaggaaggttgcattgaaagtcctgtttgatactctgaggaaccatggtgaccatttcagtctggcgttatgggaacgggtttttgagtctgttttatttcgaatattcgactatgtgcgtcaggacgttgacccatctgaggatgattcaacagatcagagaggttacaatggtgaagtcgaccaagagtcttggctttatgagacatgctcgttagctctacagctggttgtagacctctttgtaaatttttacaagacggttaaccctctccttaagaaggtactgatgttatttgtaagcttgataaaacgtcctcaccaaagtcttgctggtgcgggtattgctgcgcttgtccgtctgatgagagatgtcggtcatcaattctctaacgaacaatggctcgaggttgtgtcatgtatcaaagaagcagcagatgctacatccctgacttctcatacg

SEQ ID NO: 7499 - DNA, 402 bp, Arabidopsis thaliana columbia
tctagaagattccgggaaacacttaccctgtatgttccattctcgctcttttctttgataaataccaaaaaaaacttcttgacttcttcatggagaaatcacttaagatttaacaatgtcatatgaactgaacccaggttttctttctgactgatgcgggaaacgagattcacaatgacgagagaagaaactcgctcgaagaagccattcaagtttgcttggaaggaggtcttcaaggtattgtttcagatgtaaaaggagtgttcatgaacccagcagccattagcaagatcaaagaatctaacctctctctcctcacatacggcaaactcaagtaaaccttctgcacttgtcttaatattgtctaatggtcttaagtttgtttccttattgctgttggat

SEQ ID NO: 7500 - DNA, 516 bp, Arabidopsis thaliana columbia
catacaatttcagctcaaaatcctgcaaaattctcgctgagaaacgagtcatttgctggaccgaatatctctatatccgtggctcggttcatgcgatgtagaccggtaaatttcgatttgaatatgtatatatccaatctttagtctcaatctgtttcatcttcttgtttagagtttattgttttcatgaccaaaaatcccgccaagggtaattgttgctggattggtccaagagagtagtagtatctgatttgaaacctctccaatcatcagatgatgtcaaacaactatcagctggttcaacaatgttcattaagtgatctggttcttcctcaaacccaccaaaatactctctcttgatgttgttactataaccattatcatcatcttcataatcatgatgatcacacataaccccatgatgacccttatcatctttcatctccatctccggtctaacctcttccggtttacgcctccggttctcttcgttttctgattcatgatgtgtgctgc

SEQ ID NO: 7501 - DNA, 620 bp, Arabidopsis thaliana columbia
agatggattaatcttgagctgcaggctctctacgcttgatgttctattaataaatcgcgcaaatttccagtaagttctacttaaggattcaccttcatacctgaatgtcttcacatccttccaaagagatcgccaccgttttgacaagacaccagtggctacgacatctttactaggaagtaaagataatatcttcaacaacactttatctggaaactcgctgattgtccgaatcttcttctccatgttttcctggtaaattttgttgttagtttccatatactcagaatcatacacagttagtgaaaagttcttgttcgccattttgctctctatttcggatggcaaccttaagactataattgtttcttttgtagtgttttggatcatcaatgtaaatcttgtactcatcattagatttctctaaataatatataatactgtccatttctgtaatattttcaagataaatcctttacatataagataaagcacaaatgtgaaaagtggcaagtttgtataaaattatataaaaggtttaaaattaaaacagaacaattccttgagaaaaaaatagaatagctatattactttttacgaatttaatattttataggata

SEQ ID NO: 7502 - DNA, 542 bp, Arabidopsis thaliana columbia
gatccgaccataccggtagcctttggattaatcgcccacgcgatccatccgccaggctttgcggcggagcagagaagacgacggccagagttgtgttagaggcatcataggaataatgaaggaaggctttgagttgagggaggtcaaggcagtgacggtaagttttatcgccggaaaaagtctgtgacttacatgtttgtgacacagccggtgagattagcagagccaagaaaatgaaggagagagagattcttacggaagaagaagaagacattgttggatggcttgtagtaaccgtaaaggcttttggcggaataaatagaaggtggagataaaactagcatgtgttttggtgtgtgaaatttaacatggactagccaataattgattatttttttcggttttagttattttatttttattttttgcattttgagaatacatcagaatgatgtaaggaatctaaagagaacaatttcagagtaagtacgttttgatagttatacattacaccaaagaaggactttgttcataccaagaag

SEQ ID NO: 7503 - DNA, 675 bp, Arabidopsis thaliana
ctcgcttatgatcaatctggcacagcaagtgaaatgaaattaccaaatacatgaactctcagaattggttaaagaaaagaagaagtgcagaccaccaatacagcaaacataagaaaatgcagcggcaaggggtcaacattcctgctggacgagccggtaccaacggagggaactgtcttggaaccacctccaactcctgtgtaccgatgtgcaaggagaatgtattcaataaactaaaatcaaccgttgatggtttggtgatatatagtaagaggagtaagtacctgaacgagcacccggcaatgaggttggggttagtgtcacatctggggtcttttccgtcggtgagggtgcgggaggctgtgctgttggaccagtggccgctaattcacaaacactgttatgagtgaaacaatattataacgcataggatagaaaaatatagttaggtgggataccgttgcattgtgtgaggggaggcgtctgaatgttgcaggcattggggagctgcaaggcctgtgtgcggttaatgttaaggccgatgtttgggatcggactgttgacggctgagcagatgcactgcggcgaagatttgatgacagagtcgagctgagaacagcaaggctgtgagggagtggttgagtttccggtgatgtagctgaagcacggagagag

SEQ ID NO: 7504 - DNA, 471 bp, Arabidopsis thaliana columbia
tatcagtagctttgagttcatctctatggcccttacttggtgctattatgacaacaaagaatatgtttaaattgctttgtttagcgggttgagaggataatgcgggcaacccaaggcgccttgtttgttgcttctaccctgcagatgattcttggtttcagtggtctctggcgtaatgttgttaggttagtctcgaggaaaaaatggtctcagacattcgatttgcttacacagcaatagatttctcagacatgtcttcagaattacaatgacgatgtggtgatgtaatttcttttgtatttcattttcaggttcttaagtcctatttcagctgttccactggttgggtctcgtttggttttgggctgtatgagtttggtttcccgggggtaagtctactctatatgagcacttacgagcagaccagaacctcgataccttttagtggttgaaacctttttacatttaagg

SEQ ID NO: 7505 - DNA, 457 bp, Arabidopsis thaliana
tcccctatggctaaaaccatacagcttgagcacttgattgtctgcaaaattaaaggccctctccatactcttcaagcacctctcgactgcataatcagcatagctaccacacggtttacacccaacgaaatgggtcacaaatggccatctctcatcacccaatcccgggtgatacttctctatcatctcctcatacctatcaaccaaaccttcccaaaacccgtgcaaatagtattgattctccacaaacactttctccatccatgtatctttctgagaaagcaggagatagatcaatgctgactgatcatctgcctcaaaagctggtctacctttcagataagccgtcaataccttcccggcctcatcacgaattggccctttaggtcccataggcgcccaagcatctaacaaatccaacgaccactgacaattcctcagcagaaaactacctgtg

SEQ ID NO: 7506 - DNA, 601 bp, Arabidopsis thaliana columbia
cctgacgaaacctcccatatgcaaaccaaattataaggtgaatcaatgataggtttcattggcaaattggtttcaattaaatagatatctcttgaagaagagacaaaatatctatgtacagcttacgcaacaaagctagggacttgtcatgattctggtagatctttacgacaagtaggacatgtgagatgattcttaagccaagcgtcgatacaaagcgcatgatagatatgtctgcaaacaggaaatactctgcattcttcattaacgacataaccactgagacaaatcgcgcattctcttgattctagtgacttttcttcatcctcctcatggttgccttgtccaacaagcaacttcggtagtagggtttcgatcacgctttgtttcagcccgcgcttttttccttctctctcgaaatctggtaaccgtagaccggtcgagatgattgtgtggtaggtaacgattctagcacgttgttggcctctttgtactccgatttcgagatctaggtcgagacatgttcctaagaatggtcgcagaatgcaatcgatgatgacgtagattacaagaatgagagctgaggttgcaaatgagacac

SEQ ID NO: 7507 - DNA, 562 bp, Arabidopsis thaliana columbia
taacggccgccagtgtgctctaaagtcattttcgtattgctgacactgcttttggtcagccctttttcctttgcgatgaaaggtattatctggcaaccacaaaaccgagatagtcaggttaccgatacccagtggcaggggctgatgagtcagttacgtttgcaaggcttcgatacccttgttttgcaatggacccgttacggcgatgcatttacccagccagaacagcgcacgttattgtttaagcgggccgcagctgcgcaacaggctggtctgaagcttattgtcgggctgaacgccgatccggaattttttatgcaccagaaacagtcgtccgcagcgctggaaagctatcttaatcgcctgctggctgccgatctccagcaagccagattatggagcgccgcgcctggcataacgccggatgcgtggtacatcagcgcggaaattgacgacctgaactggcgcacgaacgcgcctcgtcagcctttgctaacatggttaaacaacgcgcacgcctgattagcgatgtttcacaaaaccggtttatatcagtagtttt

SEQ ID NO: 7508 - DNA, 640 bp, Arabidopsis thaliana columbia
  unsure (1)..(640): unsure at all n locations
nnnnnnnnnnnnnnnnnnnnnctaaaggattacggttcccagcgcagttcgtcgtttgacaatgcatcgaacggttcgacaagcgttacggggatctcattggaggagacacgctgcccctggttatcttccaccaccacagacaatcgccagtgattgcttgccccttccccgttctgccagtcaggcatgatcagcgtccagccctccgcgctgttggcttgtgcgcccggcgtcaaacttaatatctgcgtatcgccctgccaaatcagttgccgaataccgtaacgactgcggatttgtaatttcagcggcactgtttcgccaggttttagatcccacggcggtgtcgccagaaacaccgttaacgtttttcgctgtcggtactcaagagtcggtagattatttcgctgcggattgtcatagcgactaccacgtaacgactgactttcggcaacctcgcccgcagaaagttgttttttgagcggtacaccaaagcggtaattaagattcagcccgaggttattttgattttcgccactttcaccctgtttatgctgggccgtcacagtgactaatggcacaggggtgtaatttaacccagactcaacgcgacgggattgtgatacccgtccagagt

SEQ ID NO: 7509 - DNA, 898 bp, Arabidopsis thaliana
caccgtccccgttccgttccgttctgttctctctgtcacttttgtctcttctaagtttttaacacttaccttgtcgtctctgttcttcttcttctctcattcctttcgtttatcgttttcttcttccaattttggatctctcttccttttgatctgattcgttacttgctctatgttgcttcaattttgaattcttttgatttttgattgtgtgggggagatggggcaatgttacgggaaggttaatcagagtaagcaaaatggtgaagaagaagctaacacgactacttatgttgtttccggcgacgggaatcagattcagcctctaactccggttaattacggtcgagctaagaacactccagctaggtcatcgaatccgagtccttggcctagtcctttccctcacggatcagcgagccctcttccttctggtgtttctccttctccggccagaacttccactccgaggaggtttttccgacggcctttcccgccgccttctccagccaaacacattaaggcttctttgatcaaacgtcttggagtgaagcctaaggaaggtccgatccctgaggagagaggaactgagccggagcagtcgcttgataagagctttggttatggcaagaattttggtgctaagtacgaattggggaaagaagtgggtcgagggcattttggtcatacttgttctggccgtggtaagaagggagatattaaggatcatcctattgctgtcaagatcatctccaaggctaaggttttaaattctcaatcttttgaacatctagtttttgattttgggattgcttgcattggtgttgaattttagcttatattgtgatttgtttgttgctgatgctgctacaaagaatctgtgagggttttgaaatgt

SEQ ID NO: 7510 - DNA, 623 bp, Arabidopsis thaliana columbia
tgtttagtaaatcctaacacaattttgtctctaggggacaggctgagaaggaattccgggttgaagttgaggctattggtcatgtacggcacaagaatcttgtaaggcttctaggatattgcatagagggtgttaataggtgagtctgacttgtctcttatcagtctgaatgtactactaatttagtctcatgagtaatctcctattgtactaccgaatagaaacttgtcccatgtatcaatttctgttttgatgtaatgcaggatgcttgtttatgagtatgtgaatagtggtaacttagaacaatggctacatggagccatgggaaaacaaagcactctcacttgggaggctcgcatgaaaatccttgttggtactgcgcaggcgtaagttgtttaaaatgtgactgttgttggaccttttacttgaaatttcaaaaacaactctttaaggggatattgacatgctctgtactacaattttacaggcttgcttatttacatgaagcaatagaaccaaaagtagtccacagagacataaaagcaagcaatatcctgattgacgatgacttcaatgcaaagctttctgattttgggttggccagctcttagacttgggtgaga

SEQ ID NO: 7511 - DNA, 506 bp, Arabidopsis thaliana columbia
aaaatgattttaagtatatacatgacgctgaagcaaaattctactccaactctccaaggccttagaaaagaagtttacagtcagtaaaagtatttacttgtgtgccagcgaacaatagatcagtacccacaaccaatgaatatacttggccaacaggtccattgaggctcaggtctgcattgttttggatattccacgcctgcatataattcaaaaatgtatatccgtaacaacaataaacctcaacacataggacaacaaaagtgattctcagtatagatgaagagttttaatagtcaaggaaccatgcaaatgaatcatactctgaacttaccttaacaagatttggcatgccaccaatagccagggaccttcactaatgatgcagccaacttcccaccaagattgagtacacctgtacactacatcgtagaagagaaaacaaatactagaatgagaagtacgcctataaagtagtcaaacaaccagccatatcgtaatgatgt

SEQ ID NO: 7512 - DNA, 806 bp, Arabidopsis thaliana
tttcaagacctttgttctaggtgttgtgcattaggcccggtccgtcgctcgcgtaaatgtgttgaaaatgtacagtatcttcgtgcatcgctcgcaagagagaacggtatcgtgtaagcaggagattaacgtgtacagcacgaagatggcatagagtggaactcgcatctagttaacatcaagggacgcgatcagttttacaatagaggttgtcaagatttctttgtagctaatggcgtaaagaatgttggtgatcccttcacattggaggttattcgaggaggaccatctccaattctcaagatctgttccaaggttaacataaaatcagttacagtctttgttcttggcttttgctattgtgaaatcgttgttttaaaacgaattgtgttcaggtgaaacaagcagcatcatctgatggccataagactgcggataggaaaccccgaatgacggatcaagcaccactggctgaagaacaaactgataatcgggtcgaaaagagagctcaagttactgaggaaggagggccatctcgcagcactagggctgatccgggaaacttgcagcaaaagcaaccttgctcaatatctgatcacgttaaaaaggtgaaacagagtattgtggatactttaaccgatgtaaggcggtttcagtcggagctcaaggtaaaagaacagaatctagaagcttcattgcaagaaattgatgcgttaggtatgatctgaataccagtgaacactacttttaattgtgtgtgtggtttattttgggtccagattttttgataatgtgatgttggaaca

SEQ ID NO: 7513 - DNA, 418 bp, Arabidopsis thaliana columbia
ccgaagtcgaattagtgctggacacgagatcgaacttctctgggagcagaattctccggtggagaagaagaggaagctgaagactttgaaggtgaaatggaattagccaactgtagctgagaggacaatcggaactcaggaacggaatatctgattccaccgggaaatctccatgaacggtgaggagaacaagggaagatgagaaaaggaggagcttgaagagaaagaatcaaatgatcggccataacttaaacattgaagtctgtaacaaagagtgtcacagaaatggtttagagtagacgaagaagatgataattgggtgacgttacaaccggtggtaaccctctgtttctatcagatgtgttcgcttcacagatatgttgtggctacggtttttttgtcataattgggctataaa

SEQ ID NO: 7514 - DNA, 544 bp, Arabidopsis thaliana columbia
attcaaatagtaaagtgactagctcttggtctaatggtttccgtgaaaaggaacaaaaacactaaagggtatgcagaaagtaggagatttgtccaacttagaggttataatttgtatgcttagaaaaagtgtatatgtgtgaagtaagaaactcatctgattttagaaaacagcattggttattagagtggttaaaaatggtaaacattattgtggccatccattgcttatatccgagaccgtaactatattgaaatgtaggagctcatccaatttttgtggccaattctttttctccataaacccgttaaaatcatcgttatctctagtcgaaaccatgacaaaagcataaacatcccaagcctacacataaatacaaagtatcataaagaaacaaatcacccactaggacaaaaaagaaaatacatgacaaaaccttattaaggaccgaattttaatttattagccgaatattctatgacttatgcctagccgcgaaccggtttacaagagccaatgcattactagtaactcgagccacatg

SEQ ID NO: 7515 - DNA, 601 bp, Arabidopsis thaliana columbia
cgaaccagttccttctgttctttttcgtatgcaacatggtctcaaagttaatatcactaggatctagtgatagtttttgtattttttttgctgttaaagatttcaataaaacatgcatgtttactcatgcttagacttattttgcaaacacgtctttaatttgtatcagtcatttgccttataagagtctctatttcataataacatcacggttttacaatagcatgtgctcacattttgtggtctttagaatctgatgtttagttactaatattttttttggcagctatggtttgtattattggacccttccccacagttataacacccaaaatcgataacacacataatagcatgtgtcttaacgaaacaaaaaaaataaaataacattactttcactgtttagccataacattactttctatccaactgatattacatgtattttaaattatttattaattatgtttatataaactattaacatatagaaaaaatttagagattgaagaaatatcttaaattacctttgatgtaatttgtttcctttcaatggactcctaaataaagtataatctcattagatatgtgatacactgtt

SEQ ID NO: 7516 - DNA, 661 bp, Arabidopsis thaliana
caataagacttctaagtcactctgtgaagcatgtcagcttgggaagagcactaggctgccatttgtttcttcttcatttacttcaaatagacctcttgagagggttcactgtgacttgtggggaccctctccaattacttctgtacaaggctttagatattatgcagtctttattgatcattattctcgattcagttggatttatcctttgaagctcaagtcagatttctacaatatctttgttgcatttcacaagctagttgaaaaccaacttaatcataagattagtgtgtttcaatgtgatggtggtggagagtttgtcaatcataagtttctgcaacatcttcagaatcatgggatacaacaacacatctcatatcctcacactcctcaacaaaatggactagcagaaaggaagcacaggcatttggtggaattaggcttatctatgctgtttcagagtaaagtccctcttaagttttgggttgaagccttcttcactgccaactttctgattaatcttctccctacatctgctgttgaggatgctatttcaccttatgaaaagctgcatcagacgactccggactatacagctctcagatctttcggttgtgcttgttttccaactatgcgtgactatgctatgaacaaatttgac

SEQ ID NO: 7517 - DNA, 1261 bp, Arabidopsis thaliana
tcttctgtatctgacaatctgtgcaaaatgagcattctgactcaagtgtggcatcgttcaacaacagctagcaatatgaagacctccctcttgctctggctacaatgcgaattacagatgtcacagaccaacacgggaatgaatggcttccggactcagcagcaactgctcatgtcaccaatagtcctcggtctctgcagcagtctcagccttatcacgggacagatgcaatcatggttgatgatggcaattatctgccaatcactcacactggatccacaaacttggcttcctcatcaggtacagttcctcttactgatgttcttgtttgtccaagtataacaaaatctctcttatctatgtcaaagctcacacaagattttccatgtactgttgagtttgaatatgatggtgtgcgtgtgaatgataaggcaaccaagaagcttctcttaatgggaagcaatcgtgatggtttgtattgtctgaaggatgacaagcagtttcaggccttcttctccactcgtcaacgctcagctagtgatgaagtgtggcacagacgtcttgggcatccacatcctcagatccttcagtaacaggtgcagaatcactctatatctatcaataagactactaagtctctttgtgaagcatgtcaactcgggaagagtactagactgccatttatttcttcttcttttactgcaagtagacctcttgagagggttcactgtgacttgtggggacccactacaataacctctgtacaaggctttcgctattatgcagtgtttattgatcattactctcgtttcagttggatttatcctttaaagctcaagtcagacttctacaatatctttcttgcttttcacaagctagtcgaaaatcaacttagtcaaaagattagtgtttttcaatgcgatggtggtggagagtttgtcagtcataaatttctgcaacatctccagagtcatgggattcaacaacagctctcatgtcctcacacccctcagcagaatggtctagcagaaaggaagcacagacatttggttgagttaggtctttctatgctgtttcaaagtcatgttcctcacaagttttgggttgaagcctttttcacagcaaacttcttgatcaatctattgcctacctctgctcttaaggaatcgatctcaccttatgaaaaactctatgacaagaagcctgactacacttctttaagatcatttgggagtgcctgttttctacgctacgagattat

SEQ ID NO: 7518 - DNA, 764 bp, Arabidopsis thaliana
tcagatgcagtgatggtagctgacggtaactttcttcccatcactcacactggttccacaaatttggcttctccatcaggtattgtacctttaactgatgtgcttgtttgtcccagtgtaacgaaatctttgttgtctgtgtcaaaactcactagagactacccatgtactgttgagtttgactttgatagtgtgagtatcaatgataaggaaaccaagaagcttctcataatgggaagcacacgtgatggtctttactgtctggagagtgataataagttcaaggcgttttactctactcggcagaactcagcaagtgatgcagtctggcataggcgtcttggacacccccatcaacaagttctccagcagctagtcaagactaaatccatctctatcaacaagactacaaagtttctctgtgaagcttgtcagcttggaaaaagctcaagacttccctttatttcttccctcttttactgcaaacagacctttagagagggttcattgtgatttgtggggaccctctcctgttatctctgtacaaggtttaagatattatgcagttttcattgatcattactctcgtttcagttggatatatcctttaaagttgaaatcagatttctactcaacctttattgcctttcacaagcttgttgaaaatcaacttggtcaaaagattacagtttttcagtgtgatgggggagggggcacgagttagtaaagacatcggaagatggaaggtaaataggagtgtagcc

SEQ ID NO: 7519 - DNA, 1342 bp, Arabidopsis thaliana columbia
ttttcataatcaaccgattctttagtctattaatattgaaaaagtagtttgagatttcttaaacaaaaaaaaacaaaaaaaacaacagaaaatttgataactcgaagaaataaagatacaagggagctcttacagttagtgaaaacataacaggaatctctggaaagcaaaaattgcttccttaaaatgagttcctgagctcctcatccaaaggatcctgtcctagtaaatatttaacaatctgagtagttttcttcttcatcaaagaatccctaaatcatactttgtaattcttgtggcataattccagacagtagaaagtcagatcgaagtacaacgcagctaataaataaagcaagcatttagggatcagatctttcaaaaaaggggcctattcaactcttatcttctttttgctcaccatcatgggattttcaacctccatgatatcatcatcttcactctcgacgttctctgtttctttcttatgattactggcctcggtctcagagagtcttctcttcttagaagcaggctcggatcctgaggaactctctgtaacatcaactgggttctcgttgtttgatgttgatgcgtctcgccattggtagctggagatggtgtccatccagagagtaccattccttcaggttctttttcctcgtcaaattcttccctgtgacagaacagaataagtaaaggatacgttaaacgtctgccagtttcaaacatggtaaggactctcctaatagttacatttgagaatcctaggatgatgtctaatgataacccatcttgatttcgtgattcagtgaaatggaagagtttagggaaagtcgatggtaatataatcagaaaccaaactgaatttaaaacaggattcaaaatttcagacaaccacctgtgcttgacattcatcttgcaagacagctcttgttgaagatcttcgactgtcagactgcttccgttaagaatgggagaaggaagttctgatagatactgaaaaagattacaagcatgtgagacattgcgatatctaaacctgtgttttaattgcaaatggtagaacaatcaagaccaaaccttctcaagattagcgttgtagtttgcacacataatatcatcaagatcatcgcaaacttgatacagaagtgaattcccgtgcataatcaacggtaggttcattccaagcttggttttcacaattttatcaactagatcacgtagttttgatttccgagtattgatatagagtactaatggggtctgttgataaaacacgaagaaaatcagatgactggtaataaaggaagttatgaaagaggtgaaatacaatgatgtg

SEQ ID NO: 7520 - DNA, 563 bp, Arabidopsis thaliana columbia
cggaagtggtgaaaagtcaaaaactacagaagctaagtaaaggttgaaactgtcctattaattttgacttttgaaacgcttacaaaagctgtgacacttttgttttctacttactaataaacaaatataaattgaaattatagtgtcatcttttgatatcacccaaattcctaacttgtcctttaccaatccactcttttgtccttcataccactatcaactccatggacaaaaacgtcacaatcacctaatccatattccccacaaaactcgaaccaatcacacacacttcttagctaaaccggaactctattctataggccggttttactgaactaagatctactaaccggttagaatagcaatgttaaaccaggagtggtacgtgatatggaaaaacttacattggagcggacgagagagacaccctgatcttgacctttggtgatatgggccatctcctgcatgggaccaccgttggatagaatatccattcgcatctcatccgttcgtccgcaagaaatcatacagacgctgtggtgcagcaggtagccaacagaagt

SEQ ID NO: 7521 - DNA, 549 bp, Arabidopsis thaliana columbia
agaggatcccccgatgcaaagagagagatataggcataagtgaggatatagagaacgaaggcaacggtaataccgctgataatgttccaggtgttaccgattaaatctttggtgatggtgttaaaactggagccgacgggataatttaaatttgcttctaataacaataacccggaatgaagcattgaaaaccaggcaatgataaggataaaggcaccccagaaaaaccaggcaccggcaagatcaacaggtaaagcaaacatacctccaccaattactgtacctgctataaccataacaccccaaaatgcagagtgctttttttcagcttgatcagtcatgatgccacctttagaggaaggctatttttgttattgaggatgtagggtaagagagtggctaacatccttatagccactctgtagtattaattaaacttctttaagttttgcggtgaagtgacgcaatactttcggttcgtacgtaaaggttaatcctttaatattcgccgcgttctctttcacatgtttaaaggcttcaataatgaag

SEQ ID NO: 7522 - DNA, 544 bp, Arabidopsis thaliana columbia
cgaattggtttgggaacagaggtttagtcatgatatctgctacttgatcttccgtgcgaacgtgtaacaacttcaactcaccatcatctatcttttctcgcacggtgtggcaatcaatctcgatgtgcttggtccgctcatggaagaccggattgattgctatgtaaatcgctgctgtactgtctgaaaataatataggaattgtagtagcagcagtcaaagacgcaagcaaagtatgtaaccatactaactcgcaagtagcaagagcgagagctctatattcagcctcagctgatgaccgagaaaccacatgttgtttcttggatctcaatgatataagggaatcaccgacgaacatagtgaaaccagtagtggaatgacgactatcaggacaagacgcccaatccgagtctgcaaatcctttcaaagtaagatcagaagaagcagaatagaataagccttgaccaacagtgcctttaatgtattgaagactctgtgagcagcctgaagatgtgcagtcgtaggtgcataagagaattgacat

SEQ ID NO: 7523 - DNA, 996 bp, Arabidopsis thaliana
aagtcaatcttactgctgcagatttctcttcccatggactattctcatcaacaacgaacctaaaaggctcaagctgtgctctcaaggtagacatcaaggagttagcagcatccactgaaagcatttcctgctgtcccaaatccatctttctagcctctaaatactctactcccgaatcttgtactgcattttccacagaacctttggcgtctttgatcatcttcaatgcttccagttctttctccctaaatataccccagcttataagaattcaccaacaatgaactagattgtgattcactatctataactatacccagaaatcgaaactccgatactcaattgattcattaacacaactatacaacttcatgtggctttacttacattgatttagccaggttaagcgtatcttgaagttgtttaagctgatcggttatgttctttgtattccaaaacataccacaacgaggcgggtctggaggtaacatcggagcccagtggaacggaggatttggaggctgaaaattcgccggattcatcctggagaccctcttaccagaaaaccccaaaatccagcgatttcagttccacaacctaatgtgagactcagcaacgaaaacaaaaaatatggatatatggaagttagcttatagattaaaaaatcactaccaacatggaagttgataatcgtgagactaactgagacttacagatagataatttctacggaggagactttgccgagatccgacgccggcaaaagcaaaacagagcgcgcgaggttgagaagatgcttatgaaataattgggctttaaatttatacactttggcccattaggaaaaatataagcccatttaaaaggttttgtatccgccactaaagttcattgaatcacaaaaataggatgctaatttttaaagtttagaactaacagtacttttccactttttcctgcttttgtgattttattctgttattgacactttaaagt

SEQ ID NO: 7524 - DNA, 570 bp, Arabidopsis thaliana columbia
cttctcttacattggaaactaattttaaatagcagaagcaaaaagtcaaaatgtagatatggccggaaattcgcactacattttaactgacaacggttcctattgagacgaaccagtagtaacagcagcatcagcagattgctgagaggatcctgaaggtgctgcagacacagagtcaggtggtggagcagagactgaacttggatgtggaggattaggccttgaaccgggacctggttgttgtgggtaatcatgatcagcttgttgtgaatggccatggtggtaaggaggatactgctggtaaggtggttgcatatatcctccatatgatggtggcgggtatggctggtgctgaggatagtggccatgtggtggcatagtgtaagaagaagaagaagctcctctgttgtcactggtgcttgaaccgctttctttggacgaactaactgcacccattctctgagggtccattgatgggtaaaatggtctgtcttgatgaggaggttgtggtggtggtgggtgcatatagtattgtagcattggtggaggttgattctgttgctgagatat

SEQ ID NO: 7525 - DNA, 599 bp, Arabidopsis thaliana columbia
aataatctaaaaacctcagtaatttaacgctacgacaagataccttgtcggcgtatccaacagcatatttgaaatggtctacaccatgtggacggtgagaatatctgatttggatccacctttcttgccccaaatacggattccaaaccacaatcctagtagcgtctttcaaaatacataacagcaaaccctcatagtggatgactcgatatataaagaattccttgtcaaggaaactaaactgacctttaagctctgtagatggattaacgccgtcgacgacaacgctcactaaagcaagagtgtgaggcatcaccgcaaccatcatggtcttctcttctcttgttgcagctttaccaatgtgcatcttcataaaactctcacttttagataaattgttccaacttttgcaagttaatctcattgctttcatggctctcaagggaaccctagaaagaatctcctctatcaactccctcggaagattagagatcgttgtcgccattgttgggtttccgaaaacctatttttctttcctcaaatttcacttgccgttaaggaaagtatatacacttattgatacaaaaccctaacgaatg

SEQ ID NO: 7526 - DNA, 588 bp, Arabidopsis thaliana columbia
tttctcattttgggaaattagggttccaattttttcgaactaatgttcacgccacagagaaaacaatggatgtcaccggcaatgacgccgagaagcgagacgcataaaatcggcggtgttactaaccctagaaacgctgatagaaaaggaaaggcggttgctttcagtgatgacctagtaataccgactcttcctccgcctccgattggaacactgaccggacaaggcgtttctcgaggtcacactgatgatatggatatgggtgattggagaaggtttagggaagtgggtttgttgaatgaggcttcaatggagaagaaagatcaagaagctcttcttgaaaagatctctacacttgaaaaagaggtaacctttatcaacaatttgaatattctgctctcatgggtttatgatgcaattggtaacctttagctgtctgaaagttgaaatgagtgttttgactctttgttatggcttttgataagtacaaatatacaggctttaacctcttagaattggttcttctgtgcagttatatggctatcagcacaatatggggcttcttcttatggagaccaaagagttggt

SEQ ID NO: 7527 - DNA, 306 bp, Arabidopsis thaliana columbia
tgttattatgtttctgattcactaagttgaaaattgacagacgggagcagcattccctgggcaacaacacccaatgatgtataacaatacaacacagcttagtccgaatcaaacatattattctccaaatagtccacaggtttgtttattgctattaatagtcattactcttgaaaactcgttaccttctctctattgtaggactgaattttggaatcaatgtgaatacagtacccacaaccgatgatggttactcagcagagaccaatcttgttcatgcctgccaacgccataccaaccggttta

SEQ ID NO: 7528 - DNA, 713 bp, Arabidopsis thaliana columbia
tgctaagcatcagaattctaatataagaaagactttgcttctgcagatagaattttctgctctgctcgatgttcgcagtgtcaaaactagcagctcagattctgcagaagtcgccaagtcagcactgcccgagcctgaccagtcagctaaaaagccaaagctaagcgcaaacaaagaattgcaaacccctgcaaaaggtaaattttccatcaatcttggatcgacattgtattgaaatagatggagtcttatctactttcattggaatattgcagaaaatggagaagtgagcccttgggaagaactaagtgaagctttaagtgcaaagaaagcagcgttgtctcaggccaacaatgggtggaacaagaaagggagttcaagtggaggctcatggtcttacaaggcactgcgaggcagtgctatgggtcctgtaatgaactatctcagatctcagaaagagatttgagaaactaggtcacatctctctagaagaaactctgctgcttttgtcttcattttggatatgaaaaactcagacaaagggtagagaaagccattttgtttttgatgctgtaaacgcacagtttagctttctaaggttaaaggtttatgtatagagaaaaacgatgaatgtgtaatactctctcaagatctttttgaatttcacgtttgaatccattcaaaaatctgaaaaatgaatgtgttatatatca

SEQ ID NO: 7529 - DNA, 429 bp, Arabidopsis thaliana columbia
agcaggactagcatcacgaggctgaagttgaggagtcaagtggtgttgaccactcgtcaccactgactcacagctagtatctgtggtagccaaattcccctgctgagagcgacagactatttcaattccttaacttatgtgtcaactaattaatgtgaatgaatcaaataaattaatctatctacgttttgaggatgttggcgaaaatagctgttctcataaaccaagtgagacacttgcttttgcaagcggtcattctcttccatcaaaagcttgttcattgccgttagcttcctattcacagcttgaagtcgtgacgcctcttttcgctgtgtttctctacacctgtataaactcacagcgccaagagttataaacctagaaagtttcttgggtgtcaagaaatgatgagaattaagaagaaattga

SEQ ID NO: 7530 - DNA, 898 bp, Arabidopsis thaliana
acctatcccgattctccgctccttcacctccgagtagagaaacgtcggaaatgagttgatgatagcctcgtcgagcccacgcaccgccgtaatactcgtacggattcaacgtcggagtcagtgaaagggttgatggattcttgtgagtaaaattggcgagaggtccagcggaagcaaaccgaagccaagccaacgatgaagattgcgaagagtataatcgtgattactagtagggttaggtcgcttgcttttatctcggttccaggctgcaccatcgtctcgcttgattcgtatgcaacggactgaagcaatactcggatatttctctcaaaacttaccataagattccttgaacgaaagtttttattttgtggtttagaaaaactaaggatgtaatcattcactctcacaattcttgtaagaggcatggaaattatcaaaaaaaatatcttatggctagacctttttttttttttttatatatataaaaaactaagttggcatgtagaaacataattagcttaccataaccaaatttgaaataaaaaaatcttcagatacagatatatataaggaaaatacctaatgcatatgtttgacggtttgaccagtttgttggtttccacaaatgcttaataaggaagtcactgtaattgcattttgatgggataagcgttattaaaataaaacccaactccatttatccatcaaatgtgtaaaacccatctgctacatttcaaagattcacaatctcacacatacttttttctttctgaaaccttcaaacgatttgttttgacaaaaaatagttgtcatttttgttggtcatgctcaaaagaaaaaaaacgcaaataagaggcatgacaacattaaatcccaattacaaattgtaaaaaag

SEQ ID NO: 7531 - DNA, 508 bp, Arabidopsis thaliana columbia
ttccttgtccttcatcaccatctctttttgcaccttggaacgcattgaaacagcctctctagctttctgctcagctacatagagggcctctgataacttggcaaagttatcattgatctgaacgtcttgtaggccccttccatcagcagctagacgtttgtcaagagggattgtgtaacctttcggattcttccaattggagatacaaggagggattttccagtcttgctggtccttgacggtaacaggcctgggcggtgaatgcatgaccggaacaggcggagaaccagaagcccttgggactctcttgtgcttgaactttggtggatcaagtggatctacaggcatctccaccatcctaatgatcctctctttagcaccagaattgaaggcagaagattgctgggatggcttatatttaatgtactgtgaatctcccgattgccttgctatattactaggctgcgctgcactcagtctcacattcacaatcttctcaatggcagct

SEQ ID NO: 7532 - DNA, 630 bp, Arabidopsis thaliana columbia
cagcgcttttgttgatcaggtcactaatttgagcagccaaaccctgactcgtatcaccagcacttacgtttaacatcatctccgcactgctaaaagtatcccatttggcactttgagattcatcaagagcagcggctgtagcttgccctaactgaataatccctttatttttcaacaaagacgactggctttgggacaatgctttgatcatggcctggagctccggttttgtagcataaccaggacgagctctcacgttaacagagatattttcgcgacgcaaagcctcttgaagccatttcttcaccagtacacttccatccttcgttttcctatcaatcatggcctctaagtaaggtgttcctctaaaacattcagtagcgacaagagatccatttagtagttcagtccagttggtggtagatttcttgtcacattcattaaacaaacctacattttgtggagcagaggtatatgaatcccagccacgtaaaaaagcttcaattccttcaggaagaccagaatcccgaatcttgcttggttctcattaagcagtccccaagcggcacttgaacatcaagagaaggacgattgatgcttgggacccttgtttaagctgtgcttgtgaag

SEQ ID NO: 7533 - DNA, 1215 bp, Arabidopsis thaliana
gtggtggaagaagttgtgtcttaagctttttgtcattgttgaacgaatctatgataacattctaaaataaaatacacaataacacaaaccaggatttacgtatcacgtattatatttatttatttaattatttaggcgtttattatctattttgtgtataacatcttaggctatacgggttgggagcaatccttagcgtaaagaggactaaaagaagatggacttggcttggttttgaccgtctggtggaggaagaacatgagcagattgtatagtcgcatgttgatggaacaatttaaagtcggtttgcaattttgcagatggatttggattgaagccaagctggtgttgaccgtctggtggaggaagaacaggagcagattgtatagtatcaggttgatggaacaatttaacgccggtttgtaattttgcagatggacttggcttgaagccaagctggtcttgaccgtctggtggaggaagaacaggagcagattgtatagccgcatgttgatggaacaatttaacgccggtttgcaattttgcaaaaggacttggcttgaaccaagttggtcttgacgtctggtggaggaagacatgagcaaattgtatagtcgcatgttgatggaacaatttaacgccggtttgcaattttgcagatggacttggcttgaagccaagctggtcttgatcgtctggtggaggaagaacaggagcagattgtatagtcgcatgttgatggaacaatttaacgccagtttgtaattttgcagatggacttggcttgaagccaagctggtcttgaccgtctggtggaggaataacaggagcagattgtatagtatcaggttgatggaacaatttaaagccagtttgcaattttgcagatggacttggcttgaagccaagctggtcttgaccatctggtggaggaagaacaggagcagattgtatagtcgcatgttgatggaacaatttaaagccggtttgcaattttgcattcagtttaagagaaaaaggctgcctcctggcattagtaaagtcagatgcaataagaagcagagtgacaccattgttattgtagagagcttcccatgatcatcttcatattttaatttgggattgaaaatgtttattctacctttcttatttatattattgtgaaaacaatagcataaggagtatattaatggtttgttgactataaattatgta

SEQ ID NO: 7534 - DNA, 552 bp, Arabidopsis thaliana columbia
tcttattattttaacaatttcggttaatttttacattgaccccagcttgaaaccgataagatttattaatttatcatgtttattaatttatcgactattaatttatagagttgctacggtagtacgaaagcttcatatcttaagtctttgtttttcattttgggctaaaattaataattccaattttttttttttttttttgctggtgtgcagtatatataaagacattgcggttgcaatatatcaaaacatatgaagcaaagcaaaagaaaacaacaacaacaaaaataatggatgaaaaagatagaccaaagaacttgagggaagaagaagaaaaaccgagtgaagaaaccaaaattctgatatcttcacttccttgggagatagattacgttgggaacaagctgttcaactacgaaggatattggtacagcgaagacattctccaatcaatccccaatatacacactggttttcaccacaagaaactgatataattcttgcttctttctacaaatcgggcacgacttggctcaaggcactcacatttgc

SEQ ID NO: 7535 - DNA, 387 bp, Arabidopsis thaliana columbia
aaacttggttttaatttgggatatcattacaacgtttcaacttgaactgttgttgttgtgatgtttttgaggttggctttcggtccaccgcaattttcgttaattgtagccttatgtttaaggggagtggcgacccgtgacatgagccatctaagaatagcatgtgtttcaataactttcatgttggaaaattttggttgcttataaattggatcacaagttaactctctaatagtcctttaatctattctctctagtgttcttcccaaacaaacaaatgaagctcttgttttaccttgttgtgttctttctccttttaaatggtttcacagccaacagagttgcaaattccctgattcgagattcttgcaagaaagcttcaaaaat

SEQ ID NO: 7536 - DNA, 674 bp, Arabidopsis thaliana
aaaacagcaaaaggttggtaaaagtctttttccccataatcatttgctccataattgacgtttgtctggcaacaactggaaacacagatatagaaaaaaagattggacagtaaatcataaaaaaaaaaaagcaaaattaaatagaaagacgaagcgagagaaagagcgttgagtggcgtgagagtttgagtccgaaaattaactcctctcccatctgccaactttcctctgtttctcctttatatcccaaacctattcttcctccacacctcatcataggcatagcaaaactcttccaaaatgtctgatttctcgagctccgtgaagcttaaatatgttaaactcggttaccaataccttatcaacaacttccttactcttcttttgattccagtcatagcaaccgtcgccatcgagcttctccgaatgggtccggaagagattctcagtgtcttgaactcactccacttcgagcttcttcatatcctttgttcctctttccttattatctttgtttcaacagtttacttcatgtccaagccacgtaccgtcgtacttgtggactactcttgctacaaacctcctgtcacgtgccgtgtcccgttctcttcgttcatggaacactctcgtctcatcctcaaagacaatcccaagagtgtcgaatccaaatgaga

SEQ ID NO: 7537 - DNA, 528 bp, Arabidopsis thaliana columbia
ctgtagaaccttactctgattatatttcatttaaaaatgctatttggttggtaaagagaaacatcacaacttttcatacttttctatttttttcagaaattttgattgtggtggaaacttgttgtggcaactctactgagaaagtttgaagaagctggaatcaaagatatagctagagttaagagggttcatactaacttgtgctcgttttgtgatgtgctgttgttaacgtttggaggaaaaagttgtagtgtattaaaattcagcgtccgagttctggggcggagttgccccatagcattgactttacgcctctacacatagtccgaaggctaattcagctcaaaacatgatgatggatgaagatgttgagcaggccagtttgatgtctttcaatgacaggcctagggcttttcccaacatgcgtagtaaaacctatagtccactggtacaacttttattcctctctttcttgagtgcttttatttttgcttgcatcagatcactgagatgcgtattataactagt

SEQ ID NO: 7538 - DNA, 483 bp, Arabidopsis thaliana columbia
atcgggcgccccaactcccgatccgtgggcccctctggcgagatcctcactgccttggaggccttcaagctcgctggagtatcgtcttttttcgaactcaggcctaaagaagggcttgcgctcgtgaatgggactgcggtggggtctgctttagcctctacggtactgtacgatgccaacattttggtggttttctccgaagttgcttccgccatgtttgcagaggttatgcaggggaaaccagagtttaccgatcatcttacgcataaactcaagcaccatcctggtcagatcgaagccgccgctatcatggagcatattctagacggaagctcttatgtaaaagaagctctacatctccacaagattgatccgcttcagaaacctaaacaagatcggtatgttcttgggtatcaagcaactagtttcttgtaactcaagtaacccttttgatttgctttctgattaaattgacttatagtt

SEQ ID NO: 7539 - DNA, 568 bp, Arabidopsis thaliana columbia
gatttacgtctcaaggagcctcatgcagcaatttcaggaatagtaggtactctctttaaaaaaccaatcccctaaagaagtctcgttccttttcttttcttgaccttgaattgaatgctgagttctctcaatgtttcactctctaggaagcagcttggcagcttggatcacaggccgaggcatgttggttaatggcaagaagcggagtccgataagcgcagatgtatttggttctgcttgttatacgttccaaaaaggacggtttagtaagttgtatggcgatcttacccgagtagatgctcgcgtggacctaccctcagcttttgcccttgctaaaaaactcttccatgcaagtagtaacaactcagacgacacattgtggtctccagactcaacctgatattccagcaacaggtattaagcttttgtccaaagatcaaaagatgtaaaagagtctatgatgtttaagcaatcccactaatcacactgttatgcaggttgcgggtccgattgtttcaaagtagcacgcagttcaggtaggagctgacgcatggaagatgtgatatca

SEQ ID NO: 7540 - DNA, 513 bp, Arabidopsis thaliana columbia
atctaaatcatagtttataggaaaaaaaataaaacattataaaataaagagtaaaaaacttaaatgggcaaccagaaaagaaatatggataaaaaagagatggaattagagatacttcaaatccaaagctgtttcctgattggctaatcccaacatctcactctctatctatatcccatctctgattctcccacctctcttctcatccacaaaatactaacataaaagtcaaagtccctgagaccaatactttcaccaaacagcaaaacaagaagaacaacaacactaagcaaaaaagaaaagctcaagccgagagagacaatggcatcaacattcacgagctcaagcagtgttcttaccccaacaacattccttggccagactaaagcctcaagctttaacccccattcgtgatgttgtctctctcggatctcccaagtacactatggtctgttttctttttggtcttaatctcgtcatattaaaggtgtttcacttcttcttgagtttgtg

SEQ ID NO: 7541 - DNA, 467 bp, Arabidopsis thaliana columbia
ccgaagaaacacgtgagtggagacttagagcaaacgtcattgttactacctccagaaccggagctaacgtccatagcttcggagtcctgatgctcgaaatcatctctggaaagctctctttctcagacgaatacggatctatcgagcaatgggtatatatatataaacaataataatccctatctaataatataaaaaccgcagaggatatcatctatatactaacggtctggtccatatttcaggcatcgaagtaccttgacacagacgacttgggagagatgatagatccatcgttcaagacattcaaagaagaggagcttgaagtgatctgcgatgtgatacgagactgtctgacaacagaacagagacaacgaccttcaatgaaagatgtagcggaacaactgacacaagttatcaacataactcctgagacagctactccaagatcctctcctctttggtgg

SEQ ID NO: 7542 - DNA, 514 bp, Arabidopsis thaliana columbia
ttgattttggcaagagcttcctgttcacgctgcctgatgagaagcaaaggatcagagtgaagtttcctccacgaatcattagcagattgtgccttctcctcaaacagcgcaccaggagctgactgatctggcttctcactggcactactaccagcttcagatttggctaaaggctgctcttctttctgaaacgaaacacctgaaccactcgcacttcccttccctacagctaatccagaatcatacagaaactctaatctctcttgtctcctacaataagataacaaaaagtataagactttagaacgacccacaacttccaatcaccgaatccatcatcaatcattaaaaactaatcaaactaccagcagatgcatcttatagattctaatgactccaaatcataaaagtatacaactttactactttagaacgacccacaacttcaaatcaccgattccatcgccaatcattaataaaaccaactaactaccagcagatgcatgttatatat

SEQ ID NO: 7543 - DNA, 632 bp, Arabidopsis thaliana columbia
tgaattcaacacctttctgaatacttccggctaattcatcttttgctttctccagaccaatcctacataagaataaggaaattaagcttgagaactctctttctatctctctgagataagtattttgaaagagatgagttatgttttttctgacctttcgtattcgtttaagggtccaagctgatacacttcctctgctcctgtacggccaaggcgcacttttgttgcaaagaaagctaattctgtcacctgtggtcaattgccatttcaagttaaaaccgttgaaacaatgaaagagagtgaaagagttttcaagattcacctgtgaagcaacaaaagagcattctacgacattcgcatctcctcttaacccgcgaaggcaagcatctgcaaacttggctgcagcatatgcctatagtagtagtacatttcacatggattcagtacactgttccagagaaataaacaggtgtaatgatgatgtattaaagtgatttggtttggtttaccattgaaagtgttgcagaccagctccagcttttgcctcacaacttcagttccacattttgaatcaggtttgtcaggtatcaattcttgaggtgtgaactgctaggaggtttaccctgagaaaa

SEQ ID NO: 7544 - DNA, 149 bp, Arabidopsis thaliana columbia
tcacttcaagggacactcggtcgaagagaacaacattgtccagacgatcgcgtcggcggccggcaccctctccgcgattattttcgtgctgcccggacttatcatggtcggctggtggtcaggtttcccgtactggaccaccctagcta

SEQ ID NO: 7545 - DNA, 607 bp, Arabidopsis thaliana columbia
tagaggatcccccaccctgaaaagtctatgctgtgggcttactgggggacatccttccttgccggtatctgcagagctgttccacaagcagcaagagtttctacagctgtgcagcacagtttggccattgaaatcagaatcagatgaacacggtttgatatctaaagcgttcagtactacatgtctgattgtttattagagaaaattaaactgtcttctgatagctgtttttgttggcaggaaatgatcatcttaccaaagccattccattttctggccctgaattatgtttgcttgccttggaaggtaactctaccttatcaatattgctcatttttggtttcattttaagtgtatatatttttgtcttcaaccaagggataattgattgtcatggttaaacgtagaagtatatgaaactgaatcataattctttgactgtatagaataccgagaatactgatcgtttgttatcctcttgggatttttcccttacccaaaaacctcttctgtgaacaacaggcttaacaattttttttatgggaacctaataacaatttcgtagttgttgtgattgtatgattgtgatgtgattcaaattgttgta

SEQ ID NO: 7546 - DNA, 1666 bp, Arabidopsis thaliana
tgtagttgggcttttgggttgattgactagtgtttagaacatagaagctgaacccacgaaataggactaaacgaaagcaatgtttatctcttaaccggaaatcaaaatctagacaaatgaaaccgggaaacaaaccactatgttaccctaaccggatattaaccaagaatgttgagcttgttttcaatctcttatccctttgatttctcgtgacattatcgatatcgaaaacctcaagttggaaaatggcagaaaatccatgattcgacgtgtgtttctcggtaacatgtagatagaattttcttcattatgattttgttggaaggtctgttttcgaaatcaatctgaaattctggttggggtatgttttacgttacactatctcacattatatgtagggggtggtgaaatcagcatattatataaacaacataaataatcttgtaactgctaatcaaatttgaagttagaagcatatgattttagattcatgattgatctgatagattattcccactttgtagtggtatttttgcatgatgatgtgatgtttccgttctcctatttgaagtggaaatggatctaacatgatgtataaagaagataagctaatccacttattataaattggcccgagttggaaattttttctcctcgattgttatgataacctcgtcggcaacgaacatacccaccaaatcactttaggtcattttcttaagcatttatgtgggaacccaattactttccttgtagataaagtcaaggatatgattacaagtcacggagagcactaatgtaatgggctcaagaactcataaacaactgtttttaagcccatcactctgtagtgttcttcatgcttcccaacatggtagacaaatagaagcaagtgaattgcaatgagagacgagcagagatagtagttttgcaacacaaagatcacatttataagacaagcatgttttcttcaataacaattgcatctgatggaatcatcttatgtacaaacacaacaaatacaagatccaataaacacttatgactatttgtctctgactttctagatactaaacacatgttcctctcctgatctctgatcaacatgtgtgatccatcttctcttattgttaccactcttccctgagttcctagccgcaacatgagctatctcaatacctccggtgaccggaagagtcaccgttctaacaactttccggtctcttaaaacccttctcaagctcgaatacccgtttctacaaaccacaacagctcctctgtttccaaacgcagcgtttttcaacgcagccgctgcaaattctttgttccgccaatccacgaccaagaagtcgactccttgtagcttcttcatcgcttttccgggttcttcagcgacgatagtctctggaaagttcaagggagatgaagattcttgaatagcttggagataagcagattctgatcttgagttttgtactatacatatgtgtttagcgtttgcgtgtttgcttgctacgtttaaaccaatacttgaagctattgcgtctccttctgaccaagtttccacgatcagcttcacgttccatcccgccgccatcgccgctattagctcgccgcgtccggcgtttcaagattctcacactgaacaaaaaagaaaagaagaaaa

SEQ ID NO: 7547 - DNA, 581 bp, Arabidopsis thaliana columbia
caaccttccatatgcatttgtaggttaaacatccaaaggaaaatttgccgcctcatctcggtgcttctatgtatgcaatagcttctgttctctcatatgatagcctcgcacaatcttcagttcaaactgtagctgtgcaacctattacttcagtggtagatgcaacgagtcccagagatgacataccttccactaaccccaatgagcttcgggagcatgacccgaacactactccaatggggtcaaagctcgaattagccaacaagttgggtttgggtaatatggaagagagcttgccttcaaatttcgctgatgggaatgagcaacctgacccaaacacttctccagtggaagatgtttcggcggctacaaaacaaaagaagatgcagtcagagtccaaaaggtgcaagtcgctcaacaacgtggatttggggaacattgaagagaatttcgggaacatggaagagacccaccttctgatctggctattgggaatgagcaaacattgccgaagttagctagcaacttggccatggggaacatggaagagacacgccttctgatctggcaatgggaatgag

SEQ ID NO: 7548 - DNA, 459 bp, Arabidopsis thaliana columbia
gttgatccataaatatgagcatgttgtagtcgtatccaagatcacacttgtctggtctgtcagtttctactttctaggtttgattcacatggctattcccatatgcaggttccaaaccacaagccacgtgttgtccgttgtgacacataacaataagccatcttaacgaaagactttagatatatcaacttgattgaatacacatttacatataaaaaaagtggaatctttttgttactaaattagtaaaatgcaaaattccgtatcgtattggaaagcaatttgctctgtaggaagcacatcaacaagagtaacacagttgtttactctcttctaacattttgttctgtacaaaacctctaatacttaggaggctaatatagtttacaataatagtcttccactactttctttttctaaccaaacgatttaaatttatgcagaatctcaataccccaa

SEQ ID NO: 7549 - DNA, 542 bp, Arabidopsis thaliana columbia
gcaacagtcaagagcgaccctccatctcctccaggggctccactattggcattaccatcaggaagaatagcaaaacctgatggaagcagagcacatagtctggatcacctccattaagcactatgttcatagctacaatatcgactggagcatagatcacaaaggaagctgtaggatcagtgcagctctcttgtaggatcagcatattgctctggctagagtttgcactctgtgacataaagaaagattgaaaactcttagctaggatcagatgattataacaatagttcaaaacctggtgtaactcacatttacccgaagaagagaaacacagtttcaggtaccctcccgttagcaatatgtgccatttcttgcacaactcctccattagacagaatatccactgcaaaatgtcacaaaaacatcaaaactctgtccaaaacagaacaagagagcgtagtaactaaaatagttcctcatttcttgaattctcgctctgaggaagcaaagatcgctttggaggacagggatcaaaaagaagt

SEQ ID NO: 7550 - DNA, 589 bp, Arabidopsis thaliana columbia
cccaataacattcgtcgacaaatagagatccgtggatacatgcagatactaaaccattgggacaaaggcagactcgctagacacattaaagaaaatgacagagaaatcaaacataatgaaaacaaactcaacgccctgtttttttttgtcgttttcttttttagtttatttaagggcattttataaaagaaaactaaaattacttcttctcgttgatgagctcttcaatgagttcagcagcttgctcaactgtggcaatcttctgtgctttctcttcggccatttggatgttaaactcttcctctaaacccattactatctcaacctgaagaaaaacactcagttgatcagtatcaagaaaattaagaatttgtgttaattgccacttgagtgaatggataccgtgtcgagagaatctgctccaaggtcagcaaatttggtttctgcaacgacttttttatccggtgtaagtgatagttgcttcttaactatagcagacactttctctatcgtctcttgttttgctataaccaaatataatgtcttttaaactttgagcctatatatatagattacaaacttgaaaaaa

SEQ ID NO: 7551 - DNA, 496 bp, Arabidopsis thaliana columbia
ctggacatgggttttgagccacagattagaaagattgttgagcagatggacatgcctccacgtggggtgagacagacaatgctgttcagtgctacatttccaagtcagattcaggttggtttacttgtccatgaaacacctttttcttgctcttaaattctattctagtgaagtagcatggtaacaaagaacaggataacagtgttcttggatttatgtctgtaactctgttccttcccagatcatgaggtgaatctttgatgatttagtctttagagtgttatatttcttatgtgagaacagctgcataatattcagcacgcacaagaatgattggttcttaacgtttcttttaatattaccgtatttgtttcctgtgcagagacttgcagctgatttcatgtcaaactatatatttttggctgtgggaagagttggttcaagcactgatttaattaccacagggttgagtttgccaagagtctgacagagaagc

SEQ ID NO: 7552 - DNA, 603 bp, Arabidopsis thaliana columbia
attcgatgaatacgccactttgtatctgcagtgtaacaagagtcttacacgaacattctacatatataactaaaaacttgaatctaaacattatggttttacctgatagctagaggtgaaaagaaatcaggggttctttcattagaaccgataaaaagagtccgtcctggtgggatttgtttctgaattctgccaatgatgaattctggccgtgtgtctctatctaaatgtggaaactggcttctttccacgcgaaatctgtcttttcttgttttcagtttgtcacctcgacgaacatggattgcatcgtaatcaccaagttttgcttttatctgttcaaccaaaacctggtcataaataagctataaggcgtcaacagtacattaccatctggtcactctttcctgaaagctagattatgtgaactccttcacattttctgcagcgatctctcaatcttgacgtctgcatagtctggagaaatgaataaggaagcatgacgtcgctacgattacctcgatccttgcattcaacaaacctacaatgaagatagatatatgatctgataatgatgatgcctacacgaacaagataagaaaataa

SEQ ID NO: 7553 - DNA, 1188 bp, Arabidopsis thaliana
ggaaataaagaatttaacattttgtaaaagcaaatgtttttgcaaattttggatcttgatgctaagagacagaatcggctcaagaaatgatatatgactaagcaatttgacaagacacaagacagtttcaagccactaattaatgtaacatatgtaaggaaacagaatcatacatcttaagatttttttatctacaaataatgcttttgaaaccaaattcatgaattgaataaccactctaacactccaatgcttccatggagaaggctttgggcagcatatttggataataagtgaagaacatatgagattccataaagatccaaatacctggacgaagaagaaaatactcaagaggattagtttctcatattccaatgacatgccatttgggtttgcctagttgtttatgtcaaccacgagccttcccatttccaagtgtaagctcaagatcctccatacccacatcatgtatcctctctccttcccagggtttaacttggctattctcaaatttaaactcagagctttgaccaatctcttggaaggcagcagtatttggagacatctgctgaggcgcaggtttcacaagattgaaggtaggagaggttggcaccatagaggcagagaatggctgttgttgtgcaaacttctgaaagcttatccaatgaccagaatcaacagtggaagagtcagactcatcacattcaggtatagtagccggggtatgaaactggtggcgatgtgtcggactagcaggtgcagaaaccgcatagaaaggataattaaaagacgccattgattgtttagcaatggccatggattgcttagcgatagattcccagttaggcaacggtttcgggttcttagaagtcggcgatgagaccggtggggtaactggacaactgtttgagattctgagggaaggaagagaagaaggaatgccaccatttctgaggaaagggaagaatgtagaggacatgttgttatttggttcaccgcgagaaggactcgggaatgatgaagaagacgggctaacttggtaagatgggatgggactttgaaaggctgatgaaagagggctctggttctgtgatgaatatggagttactcgagatgaagtcccagctatctcaccaggtaaaggcttgcatccctgatactccaacaaaagcaaaacaataacca

SEQ ID NO: 7554 - DNA, 440 bp, Arabidopsis thaliana columbia
atttctaatgatcaagcattgaaaattgacagttaacgtgtttgctgtacgtgaactagcaagtaatttgttaacactaataaagataataatcaatagtcaataatggcttggttcatgcatagatggccatccccggtacaagagaaggttccatcaggttcagtgtttcagatgactatggtgtgaacacctttttaagtgtcatgagaaatgtcaaaaagatcttggaacatcgagttggaagagacgatgagagcacgagatcattttggacatggtacgaggaaatcgtatcctagaatggcaccttatatttctgcaaagcgtaaaggtattcatattataaatctgactagaactgctcgttttttatcagaagcttgtgatttagtttttgatgcggcaagtaggggaaaacaattcttaattgttgggac

SEQ ID NO: 7555 - DNA, 610 bp, Arabidopsis thaliana columbia
ttgggaatcttttaccaaacaatccatgtccatggctgctaaacagtcaatgacttctttgaactacccgttttatgcggtgtctgcacctgccagtcctactcatcatcgccagttccatgctccggctactatacctgaatgtgatgagtctgactcttccactgttgattctggtcattggataagctttcaaaagtttgcacaacaacagccattctctgcctctatggtgccaacctcgcctaccttcaatctcgtgaaacctgcaccacagcaattgtctccaaacacagcagcaatccaagagattggtcaaagctccgagtttaagtttgagaacagccaagttaagccatgggaaggggagaggatccatgatgtggctatggaggatctagagctcacgcttggaaatggtaaagctcatagttgagatgaagtatacatgaacctgttatgtcatgtcggaaggaaggattggagaatgagaattagtgtgttgtcattcagttcatggttttggttcttgttctagaatcgatattcattgtaccagtgagtttgtttcacaacgcattatttgtagatagaatgtttaagatgtatg

SEQ ID NO: 7556 - DNA, 539 bp, Arabidopsis thaliana columbia
tactgacttatatgtggtgatgaagtaatgcagaaagagagcaatttgaaggcgagccagttctgctcctgggcaaaaccgagttcctccaccaaatgggcaataaaaagggctcgttctccaattcctcttttgctgcattcacatcaatgaatgttaacctctagattgatacaaggtttaggaaattatgttacaatgtcaaacgaaaagtaaaacctgagtttcagggtcaagccatcgccatggattgaaggagagactttctttgtaatagctctcgtctaagtgcactgccgagagaaacggaactacgaagcatcccttgggaatgacataatctgcataagaaccgaaaaaagttgatttttagaccatgtatctgcctcaatatatgtaccaataatcaaagacgcaataacgtaccttgatatgagacatcttctttggcctctctcataagccatatcgcaattccaccaagcctgagtgtttcatctattacctgttgagaaatcaagaaagcatttagtgaaggt

SEQ ID NO: 7557 - DNA, 178 bp, Arabidopsis thaliana columbia
gtgaaacgctggagattaagtacaaaggcaaaaccatccacgaagtgctggatatgaccatcgaagaggcgcgtgagttctttgatgccgtacctgcactggcgcgtaactgcaatcgttgatggacgttggcctgacgtacattcgactggggcagtccgcaaccaccctttcaggc

SEQ ID NO: 7558 - DNA, 586 bp, Arabidopsis thaliana columbia
tgaatgctagaagtggaaagtataaccaacatgttctattagaagttttattatattatacatcattcatattttctgaaaattccttttaggtttgcacaatttgtaagcagacacatggttcctgcgttcattgctgcaagtgtgcaactcacttccacgcaatgtgtgcatcacgggcaggttacaacatggaggttagtcaagtccttaaactgcttagcctctgtgcttatgataatcttcatttttcacgttaaaccccttgcaaaggtgttctgtcctgttagttaatcatcttagggatgtgtaagtgatgtttttgtctatggaatttagttgcactgcctggaaaaaaatggtgtgcagagaaccaggaagtcagtttactgttcatttcacaggtttgtttctccgacatattctttaactgacctgttatgtgatactgggaccaactgatcgcctgtatcattactatgtagaaagccagatccagatagtgttgtagttgtgcaacacctcaggagtatttggctctagaaatttgcttcagaatcaatatgggcgcgccaaaggttcaaga

SEQ ID NO: 7559 - DNA, 613 bp, Arabidopsis thaliana columbia
aaggcatgacctgtactaaccatgtgtttgtataagttatgaactcctctgtcatcaacttccacatgctccacccaagtcacctgttacaggaattctctctacttaagtaaacattttgtataaccttatgtttttattatattaccttagaatatccatttggcaattcttgaatcaaacatcctgaagctcgccgcctgcatctagccgggggatttggttggagactatccaacgaaatatcgacaaccgcccacgaaccatctccttgttgtttacagtaacgtgcgaaataggtttcacgtgttgggactaatggagatggaacttgaaactctgcactcatctgcaagcaaaacagagtggttatttcagtttgaaatttaatttttacagaataaaagcaaaaaaaattaccacttgaagagctccattatagtttcctgcaactcctgtcgataaaaccgctaatgtcattgctctagaaaccatccccgcgaaaatcgtcgaccattgattctgcaacatcatatcaatgttgttgaactaacagagaagattgcttttaagaaaatgaaatgttattccacatcatgagaactcacgatgt

SEQ ID NO: 7560 - DNA, 647 bp, Arabidopsis thaliana columbia
  unsure (1)..(647): unsure at all n locations
tttaggatcccctctctgcctgtggaaatctgtgaattgccaagactagtgtatgtcgacatctctcactgtctcagcctaagttctcttccggaaaagataggaaatgtaaggacacttgagaaaatcgacatgagagaatgtagcttatcgagcataccaagttccgcagtttcattgacttccctatgctatgtaacatgctatagagaggctttgtggatgtggaaagaggttgagaaggcagttcccggacttcgtattgaagctactgaaaaatggttcaacatgacttggcccgacgagtagtaggttcttaattctccctccgagcttttgaaaatgcatgttgtattattatttattaactcgattaggacccctgtatgatatacgattttattaatacatgttttgctcttataacgtcaatatataaattatatgttgattttaagtattaaaagtttctatttggaatctcaaagatatgtttttaaagattcacttataagtaataacaaacaaacaaaaactatttagcttaatggtaaaaagcatgagtctatatagagaaggggtcataatttaaaattagtttgaatgttgtntgttattaagtgagatacattttaaaataatttagt

SEQ ID NO: 7561 - DNA, 541 bp, Arabidopsis thaliana columbia
gaggatcagaggatccccggttaagatttcctatctaagttataaccaggaaataaatacataaaacgcttgccgatttaacagatagactcacatctgttgtagttttgtacatctcccaatctcatctggtatagaaccggaaaagttatttgaactaataccactgcaaaaagatatacatatgtataaggaaccgtcaagatctttcagaaacattgtgaagagacaattatattaaaacaatgaagaagcatccataagcttacagtaatcttaaatctgtaagcaaaccaatttccttaggaacagggccagacaacgcattgatcccaaaagtcctacatattaaaaacagttaagcgtgagagacaagaaattgttgtagaaaatcatcacgacaacaataagacaaagaagttgtcagagacatacatccattgcattcgagtcagatttccaattgcaggaggaagtgagccagtgagaacattttgacccaagttcctgaaagaagtgattttgatttgtgaaatttgtg

SEQ ID NO: 7562 - DNA, 464 bp, Arabidopsis thaliana columbia
aaatgacctttgatttttctcaaatgataggggttcgaatcccaggtctgtcatttctttttaaagaaaaacgaaaacgacgtcgtttagaatggttaatggaggtgttaacgggagttgaataatccgttaacgactaatttttttggcctggtcaataaaatattcatggtttaaatggtgatcaacgataacttcatgtttaaaatgaccatatataaagttaacgtataaaactgtcataatttgaaagttgaggtattaaataacatttttcccttttaataactgtaaccaatatgtaacagaaatccatccaacccaatttgatcaatagcgtaaaaactcattattgttataaaattttaggtagtttacatcaaaataatatcattcattttttatactataaaaatagtatttagattaatatttaacaagaatcagaataatttttatatata

SEQ ID NO: 7563 - DNA, 224 bp, Arabidopsis thaliana columbia
cgtgctctaaagcgagcggattcacccaaggtgattatagaaatttcactttccactatcactactatggggactcgtcaaggacatacagccattatatttccacaacctgatggttcgactaaccgttatgaagggaagtcctttgaaagaaaagatgagagttcatttccacctgaattactaacaaggttctggcgtgttaccaaagtgaagctaacaag

SEQ ID NO: 7564 - DNA, 570 bp, Arabidopsis thaliana columbia
aacacgggagtacaattcatatcttcaagacaggtaaagctatagccactgcgatattggttggagttagtttggaaagagttttgtatataacttgtgtagttttggttgttcacagaaaacctgtgaaaaaggtgggagcattctgttggctgtcactggggatatgcatagtagaacttctcatctgcatcaagtttggaagtggtaggtggttccttacacatgctctgccttagttatttatggttacagttacatagtgtggagagtgtaaacttggttgtatggttatgatacgaacaggattgtacccaacagaaatgccattgtgggtagtgacactatggggaagtgtgggacttggacttgtggccttcttgctgtcttggacatggaagatccagaagatcctcgcgcaaaagagacgttaagcgcatcattattgttgcagcagagacgagagagaaatagaggtgagacagtgaaatgccattgtggtttttttttgtaaatagggagaagaaggaacgatgtaaatgcaattttctttagggatagtgtgtgata

SEQ ID NO: 7565 - DNA, 613 bp, Arabidopsis thaliana columbia
catccactgaagctcccttgaacccgtcaccactagcaatgagtgttgcgccgcggctgatgtcccggcgaaaaccacgtatgccgccgtctattttaacaacatgtattatcacacacatatagtgtcatcaacgataatctataaatgaagagagttctgcatacctgatccaagaggtaagagaaccatttgggattggaggtcttttgttcaacattgtaccaaccaagccctagttgaaccaaattatacgcagcaaccacaacatctatgtataactcagccctgtcatatatacacatcttttaattaataatcatacataacacaaaaacataattataaaatgaaaacttatatccaacttttttgtgggaggatatttgaagagttgttaaaccaaaaacaaaaaagagtagcagtccccactgaacaaaatgtcattttcatgtagacttaaccaaaacagaaaattttactaaaataataaacaagatccttcaaaaaactgtgaaatcattaccctctttttcagagctcataaaaactcaaatcattaaatagaatctttatcagacttattatttcagtgagttttaaagacattgat

SEQ ID NO: 7566 - DNA, 592 bp, Arabidopsis thaliana columbia
gtaacaaaccatctataacgatcaatgcgcgcattcacaaaaaatggtttaaaaaaaatgaaacggtctttaggtctttgatggttaaccttgatgctgtcttggtattgttgagagatttcatttttgaaattttctcgtagtttaaagtaaagtacaatgctcatgccttctccgttactatcaccgagaaacattgcggctggataagttggcaactgcaaaagccaaattcattagagtctttaccacacatctcttttgatctaaagaaactttcttagtggtttttacctggatgttgacaattagaagagcagggaggtttgccacagctttgatgttgggaagctcaatgtgttgggctatatgatcaatcttccttggacacacaaacaagtcaacaccaattggagtgtatggacattggtttggagccgggtgttttcgtttatctctacaaatttatcattgtattaacagtctacatccacttagagccggttaaatgcatacatatatgtatatataaacatagaagttaaggaatatacttgaaataagtttcgcacgtaacttcaagtttgatgga

SEQ ID NO: 7567 - DNA, 762 bp, Arabidopsis thaliana
gaaagtaaagccaaagggtaactgtgggataccgcatcaagatccacttgtgaaatgatgacctcaacgtctctcaacgagaattgtgagccttgagcaacaacattcccgtttacaacaatacatgcacatccatctgcacttggttacaaatgaacaaatctcactcaaaaaagtagatatgatttactcaaaaatgatactttcaataattttaagggttgtcaaacataccgtagtataagcggctaccatcgcatccttgttgattactgtacatatacaccccaccacgagcatgagtagcccccataaaagcattcagacgaatatctagtttcctaagttggtgatgactcccacttgcattcataaatacttcaacaccattcaatgcgagctcggcatgaggaggaagtggactaaacagttcctcacagacttcagctgcaacagccctgataaggaaatataactgatacagttaagcagacaaaatcattgacagtgttgaaatggaagcatttatccaaactcacgtgtcgataaactggatgtaaccataaccaaaagggactgatttctgctccaaagcctctgaaatttcaatggggagctgaaattcctctagctcttctctctgcttccaagctgtgaaccaccgtagctccctatagtttccatcgtttgcgagcacattttcggtcgaatcatgatgatcttctgttcatacagagaacctggcagttataacgctctgct

SEQ ID NO: 7568 - DNA, 518 bp, Arabidopsis thaliana columbia
agagtgtgtatggagttgagaaaggcggacgtcaacaattgaagaaagcgtgcgtcgcagaagctattattcacaacgtggaactgcagctgaaggcaatgcgtttcgacgctgatgatgtaaaaatattgttacaacaaaacacaatgtatactaaggtttgtgtcttttttgatatttgatatcagtttttgacattggatttctgattccagaatattgttgagcatcaagctctttaggtcttttgatatatgaagacaacgaggctgaggcccattgtcataagcccattatggggtggtccagtgttttatcccggatcgagcgtgggatttgaatagttagtgtgtaatcttattcagtgagtgggacgttgaaatgaggtgtatgagtcagtcaatgaatacccgtgacatgtagttaagccataatactccaagattcccctttggcaccttttaaataaaccacgagatgaagccactctctcttttgtctttttgtaatatgtttta

SEQ ID NO: 7569 - DNA, 553 bp, Arabidopsis thaliana columbia
tgtcgtctcatcccacgatctttgaatggaaaggatatggaggaagagaagatgaaaaagaactcataagatacattctggagaactttaagtgtttaaaaagggcggaaatttcgatgaattcaacctgcagtcttgaaaagaaacagaggatgattgacgagttagaatctatgcatagtgtttcaacgtctcttatgtgtcacttctttgcttaaacgttcctattgagactttcgtataattaactttgcctatttttcacaagatgatgtttctaaatcctaacttctttacgtttatcaaacttatgttcgtgtaatttcacatgtgttggcaaaaaagattagaagtcagataatgcagatgcatcataactaagtacatacaatgagattagataacagaaagggcaataatccgattttatgaaacttcaaagttatataaaaacaatttgccaatgaacaaagcagagagaggttcattttctcttcaaggagtgagaaccatattattgcacttacaatgtctgaagacgtgacccatgagt

SEQ ID NO: 7570 - DNA, 307 bp, Arabidopsis thaliana columbia
agtctaaagaggacaaagagtatatgtctcgggttccctatgctaatgctgtgggaagcttgatgtatgctatggtctgtacaagaccagatcttgcacatgaagtcagtgttgtcatcaggatcatgagacaaccaggaaaagaacattggcttgctgtgaagaggaatctcaggatagctcaacggtacgtataggtggtggactcatatctggaggtgaggctcctggccagattgccggagatgtagacagcagaagatcaatgactggttatgtgtgtgccctgggtagttcagtaattagc

SEQ ID NO: 7571 - DNA, 555 bp, Arabidopsis thaliana
ccctgacttcctcaaacacattttgtcagcaacatgaagaagagaaagtgctatttctttgttttgtaccttccggttccgagtttctcaacggcttggaccagtgcttctacttcagtaactgagaaaggtcgacgaattctgcgttgtgcagctagctgctgctcagtccttttaaacttacggttaggaggccgaggagccagcattgctgctgaggcaacaggaatcaaagctctagaatgatcacttgtgcctagtttcccaaatgagtcagctggggatggttctggctcatgactagaatccaacgcattgtcgtggcataacgtcacatcatcacaggcatgatctgacagataactggcagagagaaaacaaggcccttaagccgcaaaagattgattttttatcgatgtggcatctctgagagtgaagagaagagtgaacctggataacagtggttgaggggtggtctctaactaggttcaaggctgaaaccaagagaatccaagtggttgttctctcagagatcccagtctgagaagagttttg

SEQ ID NO: 7572 - DNA, 594 bp, Arabidopsis thaliana
gcttaatttcttagatgttttccagtcacccgttgggacatgcttgtgaggagctgctacctgtgtgccaagctactaaaatagacaatgtgttggaatctgaccatcatgactcagcattattcccatctgactcattaggcaacaataatgtgacagaagattctaaagctatgatttctgtggcgctcaacgaattgtcttctcaatcacaaccaccttcccggaaatctagaagaagtgaacagcagcagcagcaggctgcacaacgcagaattcgtcgacctttctcagttgctgaagtagaagcacttgttcaagcagttgagaaactcggtactggaaggtaaaaaaacactaatacaagtcatatagtgttggcttatttgtgattgtgaatagaagaagatgatgattaaagtttggtgaaaactgtaggtggagagatgttaagctttgtgctttcgaggatgctgaccaccgcacttacgtagatctcaaggtttgcattttaatcagtagtttaaattctaaattcggtgaaacaaatcgcatgattaggtctgagaaatactgtttggtatttgtgcagga

SEQ ID NO: 7573 - DNA, 588 bp, Arabidopsis thaliana columbia
gactctagaatttgttgtacatattataatacttatgctggctcgcagggaagagaagcagctcggcaaaggtattcagtgcattgtcatggagttggtcttcaaagtctcttcagttgggcaaagatgctacaacaagcgggactgttgaaccctgtaggcctggagctcactgcagcacacttgagaagctatacacagctgagaagaaactttaccagctagtcagagtaagagctagctgatctaactctttcggtgttagattatcaagttcaacaatgaaatactaagttttattctctgaccagaacaaagagattgccaaagtggagcatgagaggaagtctgcattactgcaaaagcaagatggggaaacctatgatttgagcaaaatggagaaagcacgcttgtctttggagagtttggaaaccgagatacagcgtctagaagattccataactacaacacgctcatgtttgcttaacttgatcaatgatgagctgtatccgcactagttgctttaacttcagggtaaactcacaaccactcttatgctgaccatctcattgaaaagcatttttttta

SEQ ID NO: 7574 - DNA, 921 bp, Arabidopsis thaliana
aagaatttaggtcaaagatcatgtttgttgaatagccaagtaacattgtttgttttctctgatattatagactcaaatggtttagttatcttgcctctgatcttattaattcctttcaggaagaggctcttccagatgataaatgatctcccaaccattttcgaggttgtaactggcaatgcaaagcaatccaaggatcaatctgctaaccacaacagtagcagaagcaaatctagtggtggcaaggtagaagcttctgttttctcttttttttcgccctctcagtccatgtatctgtgttgggttcttatctctacttactcctttgttttctaatgcagcctcgtcattctgaatctcacactaaggcttcaaagatgtcccctccaccaagaaaagaagatgagagcggagatgaggatgaagatgacgagcaaggtgctgtttgtggtgcgtgtggcgacaactatggaggagatgagttctggatatgttgtgatgcttgcgagaaatggttccatgggaaatgcgtgaagatcacaccagcaaaggctgagcatatcaaacattacaaatgcccaagttgcactaccagcaagaaaatgaaagcctgaaagtgataataacattagagcctgtgaaagaggaaaacgttttcacagtttaagaagacagtacaagagtttagctgtgggaagaagaagaaacaaaaggcttctgattgcgtagttttaatgggattgagacagcttacagttagtaatgtctctttctcttttcttttctttttttttgctgttaatgttaaaatgttatgactaatttgtcttaagtttctgagaaaattctgtcttttaagcactctctagtctatgtcaagtggtttcttcttctcggtatctcacttgctttaaaagtttt

SEQ ID NO: 7575 - DNA, 492 bp, Arabidopsis thaliana columbia
ctctccatctcgtttagcctctcgcttgtcctcagcttcgcaatctcccgggacacattaggcgccaactcggaccccttctggaacatctggaacatagtataacaaaccaaacatttctttttcaacaagtaaaatcaagagtaaagcaactgatgatgcagaagaaggatacatacgaagccaaaaccattggtggtagattgtgtcttgaccatgagaaaatgtccaggattctcgccaaggaggattttcaggtatggcaactcactaacaatatatgagacacttttattcatcaaagcttgagcataatcttctgaagtattgagacccaataatctcattgctctgaggctggaattggtgagggccgcatttgcgatgagggatccgagaggtgacccacataatcttcattggcgttgaatcgtatttgttgcacgtcatcattgatgtcaatgttgcagtgtacattgtaccaatatgagc

SEQ ID NO: 7576 - DNA, 618 bp, Arabidopsis thaliana columbia
cgttagcgttcatgagaagttcttctagctgacgcttctgcatgcgcagttcgcgggtttcggtcattgctttcatagtcaccttctcatttgctgctaacgtagaagacatctgctcagagattctcttgaactcgtcctgtattttgccggctacacttgcgtttttccacctcgtcttcctcagggcttcttcggcttcaatagctctttgctcttgctccactttagcacgtgtcacagcttcaatatctccctcaaagatctgagcttgtttctctaattcttcttccattcccttgatctgcgtttcaagttctttaatgcggtacagagactcagagcactccttgtattgcttcttgagtttagcttctagactctctacatgattttcaagctcattcacgtttacaagagaagatgaacattcatattgcatcttcaactgttcttgcacttggctttgctctagcttgtatgagatatcgtgattttcctgctaagtatctcataatccagagaaagctgctccacctgtatctcaagatcctctttgtctcgtttatagatctctatctcattgtagagactagtgatcttcgctccaggacatgt

SEQ ID NO: 7577 - DNA, 586 bp, Arabidopsis thaliana columbia
tctgggttttgtcttaatcagggtatagaagcagaaagtcttaccaaacagaaactggactcgaagatacttcaggtttgaatcttgtttaacttagttcgtaatttgttctgttcttctgatttcttgcactaatcaagattttgatttttcattaggatgagattgtgaagaaagtcaacgaaaacccaaacgctggatggaaagctgctataaatgatcgattttcaaacgccactgtaaaaacctttaaatctctatatgagcaacaacaatctaatgatgatgattaatcattttgttcttaaaaacttgtgtgtatgttacaggttgcagagtttaagcgtcttctcggtgttaaaccaacaccaaagaagcatttcttaggtgttcctattgtgagccatgatccatctttgaagctacctaaagcttttgatgctagaactgcttggccacagtgcactagtattggaacatcttaggtttggttttatgcttttagcttttcctcacaattttagtgtcaattgcatttcgttataactcttggtttttgtgtgtgtgtgttgactgtctatgacag

SEQ ID NO: 7578 - DNA, 469 bp, Arabidopsis thaliana columbia
ctcatcccccgaaagctgttgaacgatatctgattggctcggcagacgccccatgctcattttatcatcagttatgtatttcgtctgcggtttgataatgttgtggtctcccaatgtctatgttctgtgctttgctaggcttcttaatgggtttggtgccgggctcgcggttacacttgtccctgtttacatttctgaaaccgctcctccggagatcagaggacagttaaatactctccctcagtttcttggctctggtggaatgtttttgtcatactgtatggttttcactatgtccctgagtgactcccctagctggagagccatgctcggtgtcctctcgatcccttctcttctttatttgtttctcacggtgttttatttgcccgagtctcctcgttggctggttagtaaaggaagaatggacgaggctaagcgagttcttcaacagttatgtggcagaagagat

SEQ ID NO: 7579 - DNA, 342 bp, Arabidopsis thaliana
tttaattacagagaaagtaggagccatgaaattagaaccagtgcaatcttgtctaatggcccattcatcctcaatcttcattctgaccactacatctacaactccttggctctgagggaaggtggtagtgatagaatctgctatgtttgaactccctcagaggtttgaagctatattttgacccaaatgatcgttatgcaaaccacaacactgtcttctttgatcttactatgaagaagtctgcaaatcttgaggtttaaagctatattataagcaagctatgcagagatgaagcaaagaggaaaagagttttccggtgcggtggaagctgtattggcatgt

SEQ ID NO: 7580 - DNA, 401 bp, Arabidopsis thaliana columbia
ggcgaattttgatatcttcattaaaaaattggcaaagcagacttcagagttctctcagtataatcttcacctaaatctcatttcaaaggaacaaacaaaaagaaaacacctaaatcgatctgtgaagtcaaaacactttccagtttcagattctgattatggcaacaccggagactcgtggcgttgattccgatttagagacagcggagaagataatactccggtgggattcaacaacatctgaagaagctaaagagaatctgattttccaaagcggtggtgatcgagaagaagtagatcggtacttgaaagctgtagatgaagttcaaagacacatctcttcaatctcaatctccgatgaaggtctaagcaacgattcaaatcgccatggctagactcga

SEQ ID NO: 7581 - DNA, 183 bp, Arabidopsis thaliana columbia
cctctagtctcatagtctccacctccttctctctcttgctcgcctccaggtccatctccttgaatatcatcccgtatttcaagctccgttcctccaagtaactctcaagaactgataagctcacgtccagcgaccttatctgctgcaccagtatcttcaagacagtgatcccccagaatctgc

SEQ ID NO: 7582 - DNA, 445 bp, Arabidopsis thaliana columbia
tctttggctgaatatgttttttgtacttgatctcgttgatcatgtgaaaatgtttcaaagttttgtgtttgagacaaatttcatgattacttgatgctctgtggtataaatactcatacatggtcttgtagggcgttgtcttggtttgcggtgggttgttactactattgtatcaaaaagtatgctgaagctcggcggtactttaggtaactatgctgtggcattatgctgtcttgatcaaatctagtaggtaggtgcatatgtgtctgacctggagcttcatttcttttaatatggtcttgcagcaaagctacgggtattgatggctcattctcactagctcggataggttatggtaattcctttgccgcccaagaggagggtgaccaagccatgtctgcctatcgcactgccgctagactatttccaggggaatcaagttact

SEQ ID NO: 7583 - DNA, 544 bp, Arabidopsis thaliana columbia
gtataagggtcaatcttcgcaaaatcccaaccccgaccaggtatccacagatctttggctaccactgtgtcgcaatctgtaggtctctcaccattgtcaagctctaacaacggtttacccgatacccacctatcagtccaaaaccttatttgttgaccgtcaccaggaatccaaccagctccatgcgataccacatctcttagaccaattgcaatacttctccacgtgctagaccaactccctttaggcatcaaccaacgtgaatccctagtttcagcagcgtggtatttcttctgcaaaactaaggtccagaggctacttcttctcttggagcaacctccaacccactttagagataagtgctctattcatggtcttagtcgctctgactcctaaacctccatctttctttggtgaacacacttttgaccactttaccaagtgctgccttttcttctctgctgtactccccataagaaggtccgggatagttggtcaagtcgcatcagaatagattgcggcaacagaattgtactcatagagt

SEQ ID NO: 7584 - DNA, 582 bp, Arabidopsis thaliana columbia
  unsure (1)..(582): unsure at all n locations
tagatgtnnnnnnnnnnnnnnnnnnnnnnnctaaagggtgctggagtagtgtcttgctattattcacttgtatcaggtcaggaatatcttaaaacatctgtggcagaatgagcacgagttttgctccttcattggtgatctttggcagagtgggtctgaaaaaattgactactctatgttttttttggagagtgttcttgtgccccctactaaatttagacctccaacaacaggaggtgatagtgtaagtaattccctacaaattataatgttttgatgcttctatatcctctctaatttttggagttacttttaattttgtaacttttggcattacctctgtgcgtcactttctgtccatgttctctcgatcttccttttccagttttatatctcctatactaacagatggttgttcccattaactcatgtatgatcataattctcttacgattttgtttctgtcaggttatggaacatcctcaaaccgtaggactaaataaggtcatagaatccaataatatactcgggaatgcctgtactaacaaattagatcagtcgaaggtaattttgagatggagg

SEQ ID NO: 7585 - DNA, 551 bp, Arabidopsis thaliana columbia
tctagtaacggcctccactaaagtcgtagcacctgaatttaaccgccgtacaaacgccggaaaagaagaagagaaagcgtttctgatggaatgcgcaacgacaggaaaaacggttatcactgcggaagaaggccggaaaattgaactcatgtatcaaagcgttatggctttgccgctggggccaaaggctttgttgaaagcgccggacacgctgaatcatcaatttactgggaagatcctgaaacaggaattttgtgtcggtgccgtccggacaaaattatccctgaatttcactggatcatggacgtgaaaactacggcggatattcaacgattcaaaaccgcttattacgactaccgctatcacgttcaggatgcattctacagtgacggttatgaagcacagtttggagtgcagccaactttcgtttttctggttgccagcacaactattgaatgcggacgttatccggttgaaattttcatgatgggcgaagaagcaaaactggcaggtcaacaggaatatcacgcaatctgcgaccctgtctgact

SEQ ID NO: 7586 - DNA, 569 bp, Arabidopsis thaliana columbia
tcgaggaaagcgaagaagaaagctattcaacagtctcctgaagcattgctgaaacaaaagctagatatgtgctctaagaaaggtgatgtcttggaagctcttcgcttgtatgatgaggcaagacgcaatggcgtgcagcttagccagtaccattataatgtgttgctttatgtatgctcgttggctgaggcagcaacagagtcgtctccaaatccagggcttagtaggggttttgatatttttaagcagatgattgttgataaagttgttcccaatgaagctacatttacaaacggtgctagactcgcagttgcaaaggatgacccggaaatggctttcgatatggtgaaacagatgaaagcctttggtattcaaccaaggttgagatcctatggacctgccctttttggtttctgtaggaaaggtgatgcagacaaagcttatgaagtcgatgcgcatatggttgaatcagaggtagccctgaagaacctgagcttgctgctcttttgaaagttagtatggatacaaagaccgcagacaaggtctataagacgttgcagcgattgaga

SEQ ID NO: 7587 - DNA, 528 bp, Arabidopsis thaliana columbia
atcctcaatagtctcacgaattgtctccacctataaatccacaattacacagaaaaagaaaacctaaatcccaaatcaagtcttctcagaaacaattcaaccgagattcgagagaatatcatagcttacatcgacagagttagggtaaaacagaatctgagcacgattattcagagcatcgatgacagcatcgtgaattccagggagacgcttgatagccttttcaacagatccagcgcaacgagagcaagtcattcctaacacttgaaaaaccgccctggaaatcggatcatcgatctcaaaagccgccgtctccgacgatgatcctccgccgccgtcgcgagacctggtaaggtgcttccgcaccagagggtaacgctcgctgaatctctctttccttatgcatgtaagcagacaaaagcttcgtcgccatgtaatcgatcgtattgtgcgcgaatattgttcttctcgtatcgaatttgagtttttaaaaggttttaggtttatgggaaatgatgagactttttg

SEQ ID NO: 7588 - DNA, 174 bp, Arabidopsis thaliana columbia
cgatccgtccaaccattccggcgggtttgcgccggggaaccaaactagtctgtctccatcgtcttggacctgccttgatttctttggcggtggagccggtttcttttttccgaaactgaacccgaaccgggcttggaccctaccggttccaggtctaggatcttgaatccggat

SEQ ID NO: 7589 - DNA, 487 bp, Arabidopsis thaliana columbia
gaaaatgggcggctgagattcgagatccacgaaaaggtgttagagtttggcttggtacgttcaacacggcggaggaagctgccatggcttatgatgttgcggccaagcagatccgtggtgataaagccaagctcaacttcccagatctgcaccatcctcctcctcctaattatactcctccgccgtcatcgccacgatcaaccgatcagcctccgcgaagaaggtctgcgttgtctctcagagtgagagcgagttaagtcagccgagtttcccggtggagtgtataggatttggaaatggggacgagtttcagaacctgagttacggatttgagccggattatgatctgaaacagcagatatcgagcttggaatcgttccttgagctggacggtaacacggcggacaacccgagtcagcttgatgagtccgtttccgaggtggatatgtggatgcttgatgatgtcattgcgtcgtatgagtaaaag

SEQ ID NO: 7590 - DNA, 526 bp, Arabidopsis thaliana columbia
aagaattcgggctctgagccttgccgtatcatctaacaaacatgcctcgtagatactcataacctcggcttcgctacggccaccggtggtggagacgccatgtttctcgtcgtaggagatgattgacatgtccacggctgatgaaacggcgaccatcgctagaaaaagaatcgccatggttggcttaaggaaccccatttcttcttcagtgttttcttggagaagaagaagagaaaatgatgaagaagacgattgtatgatggacaagagatggtggtggggtatatataaaagccaaatgagataagtgtaataattgttagtttcctattttaatgttttcgttcgtcactctttttaattttctaaaataatggtgacttgttccgaatttttttattagaaagttcaatttcggaaaggaaaaaatccgtatgtctagaagaaaaaaagataggaaaacatcaaattatttttttgatacgatagagaaacaataaaagttatatgtatcaacaagttgaac

SEQ ID NO: 7591 - DNA, 424 bp, Arabidopsis thaliana columbia
agaggatcacatgatcttaacaagatcacagtcacagagacgatcaatccagatttgaagttggtacgtgaggataggcttgacactgatctttccgtgatgaatgaggagatgctaaaaaagcatgttggggattcatcaagtgaaagtgccgtggccgctttggagtagtgagtaatggtttggctgctgatcctgagatctgaaaatttcagtcagagttcacccatagacgaaaaaactttagatatggaagccagttcccctattactgactcttctttgatatggaattttccatttaactttggaagtggagtgaatcgaagtctgtaatcctgaaaatgcagttgagccactcagaatagtagatggcaatggcagaataggtggtgaagttgcttctgcatcaggggggtgattt

SEQ ID NO: 7592 - DNA, 537 bp, Arabidopsis thaliana columbia
gtgggtgatgttttccgtgctccatcaaatgcctcgctattgtgtgtcatggttggtgacggagttcagattcttggcatggctgttgttaccattttgtttgctgctctagggttcatgtcaccggcttcacgtggaacacttattactggtatgctcttcttctacatgattcttggcattgcagctggttatgtttctgttcgtctttggaggacaattggttgtggcgaacaccgtggatggatgtctgtcgcatggaaagctgcttgctttttcccgggtattgcgtttctgatccttacaacgctgaacttccttctatggggtagccatagcactggagccattcctttctctctatttgtcatcctcctcctcctgtggttttgcatctcggttcctctaactcttatcggtggttactttggagccaaggctcctcacattgaattcccagttcgaacaaaccaaattcccccgggaaatccccgctcagaaatacccatcctggcttctggttcttggcgctggaac

SEQ ID NO: 7593 - DNA, 502 bp, Arabidopsis thaliana columbia
tttcttttgacatttcaggaaatgctggagcagctgttgtcaaggctgacacaaagccaaaggcaaacctgccgaagtgaagcctgcagaagagaagcctgaatcagacgaggaagatgagtctgatgatgaagatgagtctgaagaggatgatgactctgagaaaggagtgagtttttgtagctgtttatgatatctgtttttctatctagagtactcatatatacagtcaggagaagatgagtagttggttgataaattatatggtgatgtttttttgtagatggatgttgatgaagatgactcagatgatgacgaggaggaggattctgaggatgaagaagaggaggagactcctaagaaggtagatacattgtctatcaagcagttctttgtatactttactttttacataatttaattctccttctgaccttaattgtatcatatgatttgtgttaaagcctgagccaatcaacaagaagaggccaaatgaatctgt

SEQ ID NO: 7594 - DNA, 462 bp, Arabidopsis thaliana
ctaaagggccaatgcgcaggcgtttgccacgtgaaaaaagaagccgacatgaaagtgccacgccgtcacgtagagctgtacgataccatcatgggttgtcttggctatacttcaccggatggtggaattaacgaaaacaacaactggtgtcacatcccgcaggcaaaagaggcagcggctaactaagcggcctgctgactttctcgccgatcaaaaggcattttgctattaagggattgacgagggcgtatctgcgcagtaagatgcgccccgcattcggtgattggcgcacgtggtagcgcacttcgttcgggacgaaggggtcggaggttcgaatcctctatcaccgaccaaattcgaaaagcctgctcaacgagcaggcttttttgcatctgcagctcatgaggatgagaacctccgggggcagggaggttcgactcgacgtaggcctgataagacgcg

SEQ ID NO: 7595 - DNA, 486 bp, Arabidopsis thaliana columbia
ggatccccacgaggatatgggcacatatgcttctggactattcttggtgtaatcaaaattcaaggtctccttgacctcaaatggtttatccgctatacggttaatcacataaccaccaatcataagcgacgaaaccaacaagccaaacaacacaatgcctacataaacagcccaaaacataccccaaccaaacttgcacacaatactcaacatttgttttgtatcttttaacctaaaaggattcatataaccaaagatcatatcacttattcctgctactcttgccattaaaaagcgtctgccaaacctaatcgtgctaaagggatcgaaaaagaagagaaaacagttacggagaagccatggaggaaatgtgagtaagcttgtcatgaaactgacttgaaattcgattgctttgatcactagcccaaccaaaaacccaaggagagaccactcagtggaattaggtggctcccgaactgtggtacg

SEQ ID NO: 7596 - DNA, 564 bp, Arabidopsis thaliana columbia
caagaatactttagtgaattcttatctgtgacttttctgtcttttcttttgcagatatctaagcgacggtcttgccacctcgaaaagtgatatttacgcctttggtgttgttcttttcgaaattatatccggaagagaagctgttataagaacggaggcgattggaactaagaatccagaaagacgtccattggcatctattgtaagttcttggagtttgtttataaagattgaaccattacacttctttctttgatgcaacattcattcgcaaagcccttttttgttgttcttgcagatgttagcagtgctaaagaactcaccagactctatgaacatgtcgagtttgaaggagtttgttgacccaacatgatggatttatacccgcatgactgtttgttcaaggtaaactaagaaacaaatgcttaattagtagttggaaaaatgtagtaaccatatgatttatttcattgtaaatgaattttgtggacagattgctacgttggcaaagcaatgtgtggatgatgatccgattctaagaccaaacatgaagcaagtggttat

SEQ ID NO: 7597 - DNA, 611 bp, Arabidopsis thaliana columbia
cagcagtaatagcggctgttcgactttaccagtctatgtggcgaaatttcgttggtcgaaggaagcagcagtaatagcggcagttcatgtccatttccaaagatagtatgttcatgtctataaccttcttagttcgttgcaaatcagtagtttattacatgttaaaaatcatttggttcatctgtcatattggataaagttacaaattttagagaattccgctattccaccatttcgctatattattaatgggaatcatttgccacaaaatgggagaagtaactctaaaaaccaagatctcgaacgataagataaagaagcaaaaacctagattgacaagaaaacaaacatccttccaaaaacctcaaggtacttcatgagttgtcgataaaaacataagtgatagataaaaccaacaagcagatagcagagagcaacgacagcacaagtgatgagattactagtaacgaccaataccccaaactctaatgactccatcggtgtaaccactgaagagggtgcttccatcagcgctccagttaaggcttgtgcagtaaataacctgacccaatcaacaaacaaattgaattcagtcactttccatggttatt

SEQ ID NO: 7598 - DNA, 534 bp, Arabidopsis thaliana
cctgaagatttttttaaagacacatattacaagtatgggttcaatccggaggtcggctcggttggaatgccagttgcagagacgataagagcgacaatgcctccagaaggttggacgattcctctgttcaaaaagggtttggacgggtttattaaagaagtgccaaatcgaatgtgggattatcacaagtacattccatattctaatcctggaaaagtgcatgaccagattctgatgtacggtactccagagaatctcgatgacttctgcttgaaggtaaatttgggatcttaaccgttttagcctttactggtgttgtcttaccctggtgcataaatgttacttttccccttaacttaataatgcaatgtctatgttcgattaataaaagaaacttgagatcataagtgatatattatgacttggtttttcctctgtaacaggctcaactggtaaactacattcagtacagagctctattcgagggttggagttcgcaaatgtggacgaagtacacgggtgtcttgatctgga

SEQ ID NO: 7599 - DNA, 589 bp, Arabidopsis thaliana columbia
ttttccgttctggcagaatacagaggataaaatgaggaggatctggaaattttaacttcatcgttgcaatcattttttctaccctttcaacaggacctgcttttttgtactgtggatcctcttcaactagtgcaaaaggtcgatcaatttcctgcaaattaacaaaccatattcagactctgtcaataaccatagaacaacactacaaaccatataagaaaattgagacagtatctacaaaacctacaatgcctttcctcatgccacagcttataagctcacgggaaatgtgactactgtcgcatggaaaagaaaagttgacgatagcccagcttttaatagctcttggttctagaagcatctgtaaagcaagaaacaaagggtaaaaataaaagggaaatagtgatgcccggaaatctttgcagacaattacattgttgttaaagttccacgtccgttgcaaggttgaaaatcttcattcttgccaaacttcagctgtatattacaaatgggtcaatatgggactataatttccatggtagatcatatctttctatctgcaacaaaacataaacaggtttacattggg

SEQ ID NO: 7600 - DNA, 550 bp, Arabidopsis thaliana
cggtttctataaacaggttttaagtaacccattttttaatacttaaaaccttattttcattctgcaactactttaaatgagaacatgatgatatattatttaatctaatgagttatgtctagagacttgcccttgcctatttaagcattcatcataatgttggcgaagatgggccagcactcaacttctctttctttcttcttcattgtctctttcctctcttcacgttttcagtttctgtctaaagaacacaaacccaagaagaagtcagagaagagagaaaaaagttccatttgtagtttcatatcaaaacaaatcatatatactcttcttaaatttgtcttactgtaatgtgggcattgctcatttgggtatctttgcttctcataagtatcacacattgggtttatagttggagaaatcctaaatgcagagggaaacttccacctggttccatgggtttcctttactcggcgagagtaatcaattcttcaagccaaacaaaacttcagacatccctcctatttatcaaagagagagttaagaagta

SEQ ID NO: 7601 - DNA, 440 bp, Arabidopsis thaliana columbia
tctagttaacttgagagaagatgatgtctctggcgatgaccaaggaaacaagtttgctcttgcgctttttgctggccctcccgctaataacggaaaatgggaagctttctcttctgataacaacgtgacatcggcttggcagaatccagcagcagagcttgggaaggcggattgggaactagcattggtcgagacatctagtaatctagagcatcagaaagccgcaatgggtggtggtttagacccattgttactcaacggaatgtacgatcaaggagcagttagacaacacgtgagcacctcagagttaactggtggaagtgcaagcagcgttgcactccctttaccgggtaaagtcaacagccatatactagcactccctgcaccagatggaaccgttcagacagtgaaccaagacccgttcgctgcttcctgaccat

SEQ ID NO: 7602 - DNA, 541 bp, Arabidopsis thaliana columbia
gtttcgttctttaagtatgcatagtactttatatttaccgttgattggatcatatcccaaaaatcccgttagtggtctgccttccttgctatcaagtttaggtaacgtgaagaagcttttcgtgatagggtttctgataaacatgacatttgtagaagtttccaagtaaatcaagccgtgaacggattcacaacgttgaagcttaccattattggggattgtatattgaaaattctccacgttaggacaagtcttcttctggtgtactggagaagcaaaaaaaaacagcttgtcgtgtttttggaagattagcagaacacaaggacgcgatgacaaggaccgtgtcacgaccgagctggtgaaatctggagtggtgatgattgaagaccagagcttagaaacggacctaaatctcacaatcgattttgctggcaggcttgagactatctccacgattagatctagaggaatatgctctctttgagatctattattatcatctgaaaactgtgttattctctggatttttcgcatctttgat

SEQ ID NO: 7603 - DNA, 599 bp, Arabidopsis thaliana columbia
cagtttaccatcagaattcgagctaccaagctgaccatgtgaagtccctcccatagtaaaaacatgtcctgaggttgtgagcgcaactgtgaatgtatgaccacacgcgatttggttaaagttgtagtcaattagtgaagatacacaagttggaagaagataagtctctttatttccatgtcctagcctgtttttatcaccatcgccccaagtaaacaactttctagatgaggtactagtaccggtctgattcataacttcaactatagctaccgtatgccacacgccacaagctactttcaaggttttaagaccactcaacattttcacttctttagggtatgaaacactctctctatctccatgtccaagaacaccaaacgctccatcaccaaaagtgaatagttttccattagcagtcgcaagcgcggaatgccacgtgccacacgcaacagacaagacttgaagtccttccacaggaccagagactcttttcggtaccaatgactaagatcacttccatgtcccaaaagtccaacattatggattccactccccaagtaacaaatctccggacgtagatcagcacaagtatgata

SEQ ID NO: 7604 - DNA, 492 bp, Arabidopsis thaliana columbia
gccggccaagggacaatggacagtgttttattgagatatgtcttgtcttcctgcagaacatgaaggctcatgaaaaccggaaacaactcttttccacaaaaaatgcagtagatagtccgcctcagaataatgcaaaatctgtacctgagcctcctccttggtcaagttcatcaaatcctttcgggaatttacaacaaccactgtgagttttgtttaagaactacttcctatgtaatagttgttcttatctaattaggttttgtctcctgtaaccgatcagattacctccattacatactggagctccgccaggtagccagctcaggtatgtcctaattcgcattacttacgactcttgattgagtttgttcaccggtacgcttgacggtcaaaatgatgtatacaacatgatgttttgtttatgtcatgctacaacagacgcagatcagcgatcgagaatgcacctcacagcaaatggagatgccttgttgc

SEQ ID NO: 7605 - DNA, 411 bp, Arabidopsis thaliana columbia
  unsure (1)..(411): unsure at all n locations
nnnnnnnnnnnnnnnnnnnctaaagcggtggcgttaaccaagccgcgcgcttgccagctatattttttgccggtatcgatatcttccgcttccacaatccacaggccgttttcgcggcgagcagaggtggcgcgagtccgagtaagcacttcgccgcctttacgcaccaccatctgggcgttggcgagtaccagacgggcgtcgtctacccaacagtcagaatattcgaatccgcgcttaatttccggttttaacagtgaatttgcgccaaaacgcaaaccagttgatcccggcaagctggtgcgtttacccagatgatcgtacatatacagaccaatgcgaatcatccacgtcgggcgcagatgcggatgatgtggcaggcgaaaacgcatcgtgaaggcgatatgcggg

SEQ ID NO: 7606 - DNA, 550 bp, Arabidopsis thaliana columbia
tgctgcttttcaccgacatacacaactcttgttttccgaattacttagctttgattgagaattgagctcttgactagattaggtttgggttttgatattggaatcaagatttttgcttgtttttttcagctggttagagattaagaaaaatgatctgttgaaactatagaattatccaggcttgttcttaggtgttaagctgcatctacatcagagtccgatgtcgacatctacaaatctgaagctaaaaaatttctttcttcttttcagagtctgatggcgattacaagctcatcaaatctctgtgttctaaaattagtagtcctcctgaggctattccgggctggagatggtaaacgattccgctattgctcatcattccaaagttttgcattgtttatcactccaaatcttgacctgaatccttctcctcaggtcatattatcaagcgtggagggatctgtcatcggaacaagccacagatctggataagatcaatgaactccatgcgtgccaacaccttttgctgatattcctgctatgcttggag

SEQ ID NO: 7607 - DNA, 518 bp, Arabidopsis thaliana columbia
gagatcacctacattttaacttcttggcaaaactagtttaaggtacagtgtaattaagagaagagatttcaaatgaaaaattagtataaacaagcatagaggcgtccatagatcatcacaattctcataacaaagtaaagtatcaaacaagaaaagaaaagtgagaaaaaagaaagcgagcgaaataatgtcacctactccagaatgggtcatggttggaggagaaggtcctgagagttacaagcagcattcttcgtatcaggtttatacataacaattgatttttaaattcttagctagaatatgaattcctaagatgtatttacaggcttctctttgattggggttttatagagagatttgctgaaacagcaaaggataaaataaacgcggtgatttcaacgaacctcagcctcaatttgatttcgaatcggttcagtgttgcggatttcggttgtgcaagtggacctaacacttttgtggcagtccaaaacataatagatgcggtagaagaaaag

SEQ ID NO: 7608 - DNA, 948 bp, Arabidopsis thaliana
  unsure (1)..(948): unsure at all n locations
ctcgattgtggcccccaaaattcttcaataagtttgaaaccaagggagagagatatcgtcactactactccagattgatcatgattggaggagaaggtcctgagagatataaccaacaatctttaattcgtatcaggtttatgttagatataaatgatttggtctcctagttagctaggttcttaattccgatgatctatgtatttagaattctcctctttatacagagagcattgctagaagtggtgaaggacaagatgaccaaggcgaactcagcgaacctcagcctcgatttcctttcgaaccggttcggtatagcagacttcgatttttgcgagtggacctaacacttttgtgtcagtccaaaacatacttggtagaagaaaaataccatagagagacggacaaaaccccgacatacgtacacatcgatttccatgttctcttcaacgactttagcatcaatgatttcaacactctctttcaaacactttctctagagagaagatactatagcgctggagttcctggttccttcttcgaccgtgttcttcctaaggaaagtttctaacataggagtcatgagttacacattccacttcacctcgaaaatacccaaagcgatcatggaccgcgactctcccttgtggaacaaagacatgcagtgcatcgcgttcaaccaagcggtaaagaatgcgtgtcttgatcaatactctatcgacaccaagaatatatggatgctagagctgaagagctcgtgcccggaggattgatgttgcttttaggattgtgtcttagagacgaagttaattaagatgtccgagaccctanaggaatcgtaatggagtttatcggagaactcttagtgatcttgtcaaacggtacataatttgaatttaaagatacttacaattctatataagtctactacattactttttttataga

SEQ ID NO: 7609 - DNA, 609 bp, Arabidopsis thaliana columbia
tctcaatttcttgagttgaagtatgagtaaaggcaataaagctaatctaacagcaacagtagaagatgcaataatcatccaccaaggcaatcctgtgaattcatgaaagccttcgaggaaatcaacgacggcgagaacaggtaaagaagaatcatcggtagggatgatttcttgagacccaattgggaattctggtccagaagagagtaatcggtggagaggagagaaacacgtcggagatggtgacggcgagggagagaagagaggaggagaatgggagatgaaggaggagggtttgaggtggtgggagaagaagagagaagataaacggtgacgagaggaggaggcgcgtaaacaactcctccacactgccattccagtttttttcttttgcctaaaacccagacagagacttcaacaagaggtttttgacttctgaagaactagtttgctttgattctgtaaggctgaaccaatcggttttggtctaaccaaaccgaagtttgttaaatgtacagaaattattataaaaataaaccaaaattacaaacaaaaaatcgatatttacccagtaaccgaaattacaaagaatattgactgacaaaattg

SEQ ID NO: 7610 - DNA, 564 bp, Arabidopsis thaliana columbia
atcactttcaattttggatcaaattacaaccagagataagtagatttatatacgcagatgatgcagtcatctgtttaacgacctccaggaattctgttccacgacaagtaggtaggatcaccgagtcgcctgcacaaaccccataccacaccaaatcaacacctatctacgtgaacatgagtaatacatttaaaaggccaaggataagctactaacctgggtttcacaagatacatgacggtaaatgcaagtgccaagacgaaacagattcccccaacggtgaggtaagcaatgccgaggaagtcgttctttccaccaagccaacttgttgttgacagaacaagcttcttcttcccactgaaactgtatgtgttgtagttgttctgcagagtcacttgtatgttctcacccttctccaagtcactctctatcttcccgtataattttctaaatgttggcaacgagcagtcctcatccacacgatcagatcctcttgatcactcaactgaaagagatagagagaaagggagactaagttaagcgttttgcaaaggatatgactgg

SEQ ID NO: 7611 - DNA, 199 bp, Arabidopsis thaliana columbia
taccgagctcgactactacattcggattgattctattcaattcccttacactccattacattccattccattcgggtagtttccattccattccattccattcctctccattccattgcactcgggttgattccattccattgcattccattccattccattcaaatccattccgttccattccattccattacattcg

SEQ ID NO: 7612 - DNA, 489 bp, Arabidopsis thaliana columbia
gcaatgccgccagtttggaaattctttacgcaaacttaaacctatactgtcttcccattcctttttaaactgactatgttctacaacaggttgcacctcaacatattcatcatccctatcagatatatccataccttcatccacacgttcatcacgagatacatttttagccacctaaatatcaacgacatccactatctgattttatcctcatctgaatgcagttccgcataattcttactaacaaaacttttgtcctctctagataaaggctcgggcaatttagacttagatatgacctccccaatcaaaacacttctacggttattttcacggacgctacaataaacttgaacatccttgtcattacagatattcatctcttcctctggtcccaacaacattgcattgtaactcatttgcaatttaaccttactctcatctaatccaagcttcatgtatatcctagcttctaatatggagagagta

SEQ ID NO: 7613 - DNA, 507 bp, Arabidopsis thaliana columbia
caggatttgaaatctgataatacccattttgatttcagctgagaaaccctctctccctcttttctccgatcagtttcccaaattgacttctcattcattgcgcggtaagatagacggcgctcatttttttaccgtttacttagttaccttttcaccgacgattgtaaaattatactcagtcaatgatagcttcattaaaggccccccatactgttctttcatattgggccaaatcaaatgttgggagtataacaaaaaatattttttttaaaacggtaatggttaattaacaacactgattgatttggtctctcttataaaccagaaataaccgattctagaatcgaaaacccgaacactgagtgaggtagatattggccggaattagagttgtctaccggcggcatcagcgacaaatggaatgtatggagttttgccgagtaaggagctgacgactccatacacaaaacacataaagctgaagacgaaacccccgtgtgccccaca

SEQ ID NO: 7614 - DNA, 412 bp, Arabidopsis thaliana columbia
cgctcttaccccagtctcctccataatctgttcgtatgatggtaggttttggaatatgcttctatctgtctgactcgaattgctgaagcatttgcaccgtatcccgagaaattagatgaattatgtaaccatggcctggtgacgcaagctgcgtctcttatttccacgagcaattcaggaggtgggcaagcatctcttagtgtgtcaacatacacggtaagcgtaaaatctttattgtgttttatttatccttatacacaagatgacattttcaccatattgtgcacaggggttaatccgattactttctacctgtgcgagcgggtcacctcttggattcaggacattacttcttcttggtattagtagcattcttaaggatattccggttgggtcctggggccccggcaaa

SEQ ID NO: 7615 - DNA, 532 bp, Arabidopsis thaliana
ttctcctcttttgcccaatccaccatgactcagagacacaatctatgtcattaccaaaacactcaagagtcaagttcagtaccacatagagagatctccgaatatgtgaaaaagcacaagagactaaccatgttatcaaaataatcatcacataagacatttttgcctcctctagagaattgaagagtcaagtatctgttcttcggatacaaaatcgttccaaaaagtttcatacgaccctaaagaaccacaattttcgaagattaagattcacagtactagtagcaatgcctcaacattgagaaacaccaattaggatctaacctgtgggaaattaaggtagaggacagggtttttggtagataatcgatcgagatcgccgatggtagcggcggagataggagcgagaagaccagggaaggagaagagaaagcgattcttgcgctgagatttgcggatgatgtcggtgccatggtgtttgagaacttgctttgaaggtttgagagaggaatgagatttcgccggagaatca

SEQ ID NO: 7616 - DNA, 382 bp, Arabidopsis thaliana columbia
tgggtgtatttatcttaaaaagatgggattaaatttcatgatttaaggagaagaatcttttgagagattcgaaaccgcgatacattccttgttcctccttttctatttacctttctacttttgccatcatcttcgtcgatctacttcccccaaagtctaaccctaaagcccccaaatttctcctgatcaaaaccttgttgtataaatcctgaatctctgaagaaacttcgaagatttgggtttctcaatttggttgagaaattcgcgatgaatcgcaatttttcaccagctgcgatgccaccgatttcatcaatgacaatagataattcattctctcctcctccatcttccggcgacttacctgaaaatccagatgcttggt

SEQ ID NO: 7617 - DNA, 557 bp, Arabidopsis thaliana columbia
tacaaaggtctattgagaatgttatagcctcttacattgttaaatgtcatttttttgggtggttcactctgttgcctgtcggtggcttagattctagtgactctttctatccgagcaaacttgtgatgtctttgtttgttgtcaggaatcaagatatcgtcagcgtcatcttgatatgattttgaacgtggaggttcgtcagatattcaggactagagctaaaatcatctcctatgtccgcagattcctcgacaacaaaaatttcttggaggtgttcaatttctcccaagaaaaatctttaccttcttttgatattgcctctggttcaagtgttctttcctgcatttgatatccttaaattttatttaggtcgagacacctatgatgaacatgattgctggtggagcagctgctagaccttttgtgacacatcacaatgatctagatatgaggctgtacatgcgaatcgcacctgaactctatctcaagcaacttattgttggtggcttggaacgtgtttacgagataggaaagcaattcagaaacgagggtataga

SEQ ID NO: 7618 - DNA, 569 bp, Arabidopsis thaliana columbia
  unsure (1)..(569): unsure at all n locations
tnnnnnnnnnnnnnnnnnnnnnnnctaaagtcaccatcacttttgccggtggactttcccggccgcagtaatttgcccggtaaagaagcgcccaaattcatgtgccgcttcaacaatggcgcgataaccggcgatgttcgccatcgagcttagtgcgtccagcgattgtgcgcgtgagatacgcggcacagagtccatcgccatcacggtcacgttacgttccgcaagtttttgcattaattccggattctgcgcaggccagataaaactcaccagcgttgtcccaggattcagtaacgcaatttcatcatctaacggcgcattgaccttcagaatgatctctgactgccagacgctattcccttctacaatttcagcgcccgcttgcacaaacgctttatcgtcaaaacttgccagttgacccgcgccgctctctaccgcgacggtaaaaccagtttcagcagctgttcactgtttttggcgttgctgcaacacgggtttcattggttaacgttctcttggtatgcaattcgcatgatatcccttccacggttttattgatgatggtt

SEQ ID NO: 7619 - DNA, 609 bp, Arabidopsis thaliana columbia
ccagctcctggtgtttagccatatcttctctaactctttcttccaacgatcgacggagttgcattggcaagagatgacaataaaccttttcttgaacctcgggaacaatgctttcaacactatatggcaagacttgggtcctggtttcagcaaaggaacccattgaggaaacctgcagaattcgaagagaacttcattgatgcagtcgaagaggagctcatgttcaacacaaagctgatttggatagaatggtatgttgctgatcaatgccggatatagaagctggtcagagatttctgttttcagatacagctcttcccagtttgagtctattgcctctaacaccgcttttacatacttaaacactgattctttgtgacgattcttttcttgcaattggttacacaaaggttgtatctttgcttcacctgagcaagtgttaagatgagtcaatgttagttcatgttaaaatctaactccagtaatattggacctttcttttcatacctcttgctggacttatgaatagtggttcaagacaaagtcatattcctcagttttagatatatagtgagatggtgagccacagaggggagagacagggtacga

SEQ ID NO: 7620 - DNA, 544 bp, Arabidopsis thaliana columbia
tcctctagtccagtgtgctcgtgtgctctaaaggctttgagcacagccgcgacaagtggcagagtgaccacacggtacaaagaaacagtttctacgttcctcgaagcatataacacacagtgtcgagtagtccacatcatccgacgagctaaacgacgccgtttctacatctcccttccccgttacctccaacgactcattgatcaacggcggcgtccaatcggtggtgacttcttcttctgccaccaatggtagcctctgtgtgtcatcctccatgtcacattcgctcaggaatttcaataccaaataagtaatcgtcattattgttcctgagaaacaataacaaaaacaaaaaaacaaacaaattagctctacattgaagataaatagtactccatatgttaattatataaatatgggagaaatatagtacccaaaactgtaatataaatcaccactctagctgagaaggatagcccaagtaccatcgaacgaactcatcctgcaaaatacaagttactcgcatatatatattaatccatgg

SEQ ID NO: 7621 - DNA, 540 bp, Arabidopsis thaliana columbia
gacaaacatgcatatatatgtatcaaaccgttaaatcaattttgtatttgcttaataaagaagatgtaaaaagaagtttaacatttatagtatttgaaaacttatatattagtattactatttccttatttttgtcaaagttattttactatatatttccttaacacatcaaaatagaaggtatacttatacgtaaatgaccttaaagatttgttaagtaatggtgcatcctcctggtcctccatagaaaattgcactagaccactcctcaccgacccctgtttttgtttcgactttataacattttgggctgtttgcgaataatcttaaatctttaactggtggacttctaattttttctatttcacgatctatcactttaaggccgttcacaaaagctgcctttttgaaaccttcttttgggaaatgtcgagtcccatgagtgggcttgtactctgtctcagtgcactgaaaacttctcctccccaaaacacacgacttgctccataagctaaaccttgaacatgaaacaatgatttt

SEQ ID NO: 7622 - DNA, 556 bp, Arabidopsis thaliana columbia
cttgggaaatctattttccccaacctcgtcaagttcccataagcgttatgctgatccattcgtatttggttatagcgatcatcacgaaatggctcagcataacccgatctggtgtttgtaacatgagaaccacctggtgtaccacgatctgcaatagaatggtcctccaccaccttctgagctgtcgatctgctaagaacaccgtatagatcagcaaactgtttcatcatcgccttgttctgctctgtcaccagcagctccaacctcgacatccgcgtttccacagattcctcaacctccacttccttgcctttgttatccctacattcaccttcctgcgaacgagtaaccaccatgattccaaggaaagagatggctctgatacctttaatagagaaaacccaacaaatcaactcagataactttcgattgaataacttgtaatcaaatgatcaacacgatgttcataaaataccaaatgatctcatgctagctctcgagatgagagaaactagctacaaagtttcacagaaaaaccttagaagattcaaaatga

SEQ ID NO: 7623 - DNA, 552 bp, Arabidopsis thaliana columbia
cgccccaataacccgttatcgcgtgccacacgtaaacatatttcaaaccgtgtttctccttagcaatcttgacaatgttcttaatcccaacgtttggatcatccttcttcttaaacttttcgttctccttgatccccgtcagtcgaaaaatcggtgactctttcttctcatctccggcctccaccgtggcatctctctcaactgattgccaaccgtcgtctatgataacaaacttcggcggcgtaccaccggcggcgagagacttaagaccagcttcgacgccttcctgagtcacttcttgataaaacgcgtcccaagtgcaccatccgaagtagtcaacgatccctggaagcttcttttcgtgacgttgacggaaactattcagatgcaacttaacggtgcgaatagcgtccgttattgtctgaaacggatctgtaccggcgtgaatatacagagagtgagtaaacgacgaccgtttagtgtccacgtcaccactctccaaacagagctcaacctcatcgttaacgtttccttggagacacgaacggaaag

SEQ ID NO: 7624 - DNA, 476 bp, Arabidopsis thaliana columbia
atcggtggccaagattagaaactggtccttgtcggttatctttcagtatgttacttccagttcagagactaaaccgaagtctttaaggcagtaatctccaaacgctcttgaaacagctaaaccgagtgatcctccattaggcatacccacccggtacactcccggttcaacgtctaggcagaacaatcgtccagccgattgtgttatccgttctgcttcctctgtgttaaccggaaattatcacataccaattgttaattcagtcatttcatctgagtaaaagtaactgtacaatatggagaggcatctagaactctaccgggaatgtcaggattaaagtctaccgagagctgaaccgggactaaaccgtttccatcatcagaagttgttgctattacagctcgtgagtcatccgcatctgctataacgagatgatcacgcgcagcaagacaaaatcaagctttatcacttagcat

SEQ ID NO: 7625 - DNA, 473 bp, Arabidopsis thaliana columbia
taacggccgccagtgtgctctaaagccctgagggcagcagttttaaggatcaacttgacaagagtggaactgtcattgacagagggcctttcctcctggatttcatctgcattttcttattttaaggaatgggtggtggtagttttatttgctgctgccatctgctgtggacttgtgttcatgctttggtttgtaagctcagaacccaacaaaaccgtgacaaggtcattattactcaggcacttgcagccattgaacaaggggcttcccctgaaatttggctatccatgcttaagacttaaatggcatttgagttctctcttattcggtcccagcgacgtaccaggtccattgcactgggatgagagatactcaacgctcattgatcagcacttgcactttgctgaggtttactagtcgtgtactggctggcctcttttatagagttcccctaggtcatttggcagttactg

SEQ ID NO: 7626 - DNA, 608 bp, Arabidopsis thaliana columbia
  unsure (1)..(608): unsure at all n locations
cttccattccaaaaaacgataagcaaattcatgacatactctcaccatatggacttaaaacgaagttgtcgaagaagatatagagacttacaagtaaagacccatctgcaaagccatatcagaaagtgtttgctgatctccacggctaaaattacgcttaattagcatctcttgttctcctcctgttttccattgctcaatcttgttccaccattcattctcatcaagtacttccatctgagataaattatgactacttcatcatctgattcgaaattatgtatcaatgtctaatcgttaaattgaagtaatgaactcagaatctacaagaacaatgtatcaattacctcagcttgttgctggcgcaaacgctcagctctccacacaggatcccaccatcgctgttccccccggccgccaccaccaccgccacgaccgccgccgccgcgtccaccacgacgaccggagaatgacctccgcctcgacgaccaccttgagaattaggaccgtgaggaggcatagcggcggtgtgaaagagaggacgaagcggagagagtttggaagaaaatggaaggagaaagcgacgggnngagaacaagagagggctg

SEQ ID NO: 7627 - DNA, 630 bp, Arabidopsis thaliana columbia
  unsure (1)..(630): unsure at all n locations
tagaagattcatttgtgactaatggttggtaaaaatttggtcttgcagaagatggttggagcatccagactgcacttggagagattgttggaaggcgaacagtaccgcaagtcttcattaacggaaaacatctcggaggatcagatggtatacttaacactccttttccttcaacaaaacgtctttgcttatgccaacatttgctgatcgatagatttatctttgtttctggttatagataccgtagatgcgtatgagagcggtgaactcgccaagcttcttggtgtttccgggaacaaagaagctgaactctaggttatatatagttggaagaattgataacactctctgtgatgcttaggtgtaagcaattcaatttccatttgtattgtgttctgcagcttgatcatgaccttgtgacagcttgatcttgccttttaaacgtatcttatcaaagaccacattctgagttatacaaattgggttgaggaatcaaatctggacatgctacaaataacttatctgaacaacacacaacctttaagtgcattgtactgtttgggggataatagagagtgctaagactagtggaaataaacaanatagatagtagctangattagtggaaat

SEQ ID NO: 7628 - DNA, 617 bp, Arabidopsis thaliana columbia
  unsure (1)..(617): unsure at all n locations
ctttgttacaatttgaatcagagagaaattaagaagcgaaaaacaaagaacgagaggaggcgagaggtatagaagaatattccttgtgatttgtgaagcaagccttttgtttttgttttgtgagtatccgatcttcctcttctttctcttggtcatagggtttagggtttcgttagtcatacgttaacaaataaattaatttcgattgttcactctttccacgcgctagagtcatcatggcaatgcttaagcgcacgattagcatcgtaagaatcggaagaggtctgagttatcgttcactttcttccgggaaccatgtcgacaaattaggaatggttaaggctctagaggcgatcaacgtaccctcaacacaagcggaggcattaaccggcgcaatcaccagtggctttgagtcggtgatggggaaggttaaagccgacatcgccaaatccgaggcaattcttcttttccaaactttcgttaattattagtactggtatctcactattactacaggaagtcaggaacatatgatggatcgtgtgtagagatctgtnttctagtatatcttgtgttgtgacttaattatcttagaacggttaaggtacttgtgtgat

SEQ ID NO: 7629 - DNA, 426 bp, Arabidopsis thaliana columbia
taggcatcatctccatccaccattctttggtccatcccttgaaagacgaaccaaggacactaagacccaacggaagattaccggcaagcttcgcaacttcaaatgctagttccttaaaatcatcaggtggagagtctttcccaaaagcagatcggcataacatcgtaagagcaagatgttcagatgggaactccacctcatatataaggtcaatctcatgagccttgagaagttgcctatcttgagtgatcacaattattctgcttccagatccaaaccattcagcttttcccaccaaggtcttaagatactctagactatccacatcatcaagaaggataagatctttctgatgctataacctttgcgccaccacaccaaaatgcgcgatctttatgtgcttttgacctaagatgtccgagagaa

SEQ ID NO: 7630 - DNA, 580 bp, Arabidopsis thaliana
ctttctcaatatattcggcaaaatcaaaagatatgataattgaattgcgactatatttcatggaattcatatttcgtaaataaataaaacttataaaacgaaaaaaagttaaattaaattcaccaagatacatcaacataataatttgtgttactcttttgatttaatcttaataaagttagttgatgaaagtatttgaccaataagcgaaagatgaacaaaaccctaaacaatagatgactcacggaaaccaacgccgagaattccgtcgaacacttgagctgcgttttaaagttctccaaatggcgccttttgcctactaaaaaacctttaccttcttcacagagatctaacctctccttttcccaatgttcggcactccgtcttcatcgccgtcattcggcactccgtcatccacacccgcctttggcacatcttctccggcgttcggtacaccgtcagctacgcctgcgttcggtacgccatcgaatccttccttctcctccggcggatttggctcttcactcttctcgtctcccttctcatctcaacagccacagcaacaacaacaacaacaaca

SEQ ID NO: 7631 - DNA, 520 bp, Arabidopsis thaliana columbia
tggtctcggacagtacctcgctgacgaatagactggcctctgaacgggcgacgcatgcccttcctcttgcctctcgaccacaatcgcggcgctaaccacctgagtggtagcggcgacgtagaccaagagggcttctccatcagcggggggcaccaagacaggcgcctttgtaaggagcgtcttcaggttcccgagggcttcctcggcctcaggggtccaagagaaacactcggtcttccttaagaggcggtacagaggcagacctctttcgtcgaggcgtgagatgaagcggctcagggcccgagcgggagtccctatgaccctctgtacgccttttaagtccttgatgggtcccatgctggtgatagctgcgatcttctccgggttggcttcgatgcctcgctcggagacgatgaaccccaggagcatgccccggggcaccccgaagacacacttcttaggattgagcttgactcctttcgccttgagacatcgggatgtcatttcaaggtcggagagg

SEQ ID NO: 7632 - DNA, 785 bp, Arabidopsis thaliana
tgcatatttgctgaacttttgaatggaaaaccaatcttgcctgggaaaactgaggtcaggatttcatcttatgattatcgtggtgtgtgttattacagtgttctttgatgatgtttccacttagcgttttagtcatatttttttctttccagaatgaacaattgaataagatttatgagctttgtggatcacctgatgaaagcaactggcctggagtttccaagatgccttggtataaccaaatgaaatcatctcggcccttaaagagacgcgtaagggagatctacagacagtaagtataaaccattatgtagttgcgactcttttatgcaacagttactttgatccaggagatctcatttggtccttttctcttctgctatagctttgatcgccatgcccttgaactacttgagaaaatgttggtacttgacccatctcaggtaccaaagaatttttaatacagagaattaagagccttggtctagacatttaagtcctttcattttcctgtctgttggtacagagaatatgcgcaaaggatgctcttgatgctgagtacttttggactgatccgctgccatgtgatccaaagaggtaatcaaattctcttaactttcttgttatgaaaacccatttggttcatcatacatcacaaatgacgatcaagaacaattagtgagtgattcagcttgtactgaaactgtgttatgtcacagtctaccgcatatgaatcacacatgagttcagacaaagaaaaacgggcacagatgcgtcataatgag

SEQ ID NO: 7633 - DNA, 620 bp, Arabidopsis thaliana columbia
tatgctcgctctattcagagctttcagtacattggaaactcctctcagacggttcattcacatgcttaccactctggtattaaccgtcctcccgtggaaactaaacctgtgactgaacacaagtcctttacaagaagagatggtcttctattgctttctagaaatggatatttcaatcgtagctttcatggttttcactcctcgggatttggttatggaagttcagaagttggtccttctctggggatgagatacatgagcctatccattcgtaatgctactacagttgcagctaagaaaccggaagaagaggataaaaaggttgatgagcttgctaagaacaggaaagaagcatctcctgaggaatgtgatcaagctgttgaaagtctgagcagtgttaaagcaaaggcgaaacgtaaacgtcttcaagaatccaaaaaggttgctcgatcgatagtacagagggcatgggcaattgttcttaagataggacctgctataaaagctgttgcctccatgaacaggtttggctttatctcacattttgcgttcttaatcgccaggctttatgcatggatttttatgtgtactgattttctgttttctacagggcggattgg

SEQ ID NO: 7634 - DNA, 484 bp, Arabidopsis thaliana columbia
tagatgctgtaccgtttcattaagaaatgcatatctatattccgtaccggtagacttgggaaccggaacctgtccattgtctataatcttgatgatctctaatttatccatatcgaccgttagataaagtccttcgataggtctcatgtagaaattgacagtgtcttgctttgagaaacattggatctttatgactcgtcgtccttcttcgtccggtccataccaaccggcgaacggcgtaatacaaatcaaaccggagaacggaatcccacgcgcctcgattgagcgattgaattccacgctctggtaaggaacctacacatgttgggagaattgatagtgtgaataactatacccgtatcctcagatttggtttgaatttaaataattaaactggttaactgagaatttgatttgaatttaaaccggactgacctgtgagactgcgatgatgtccttcatggtaagaatcgggtaccaaaag

SEQ ID NO: 7635 - DNA, 544 bp, Arabidopsis thaliana columbia
agccattgttgaagaaactagtctctctgtttcgaatcttcaaattcagattcaatatctatcaggaaaatttcgcatgggggtgaaagtagcttcttcgtctactttccttcaatggactactcagcctattattcatcagtcttcttcaccatctcaaaccctagcttcgggaaccataacatctccttcaaaacgacgtagcacagtacacgacggccggtttctatcatgtcgtttcgtgacacagagactaaaccgttcggctcttttcggaactccgtcgacgaagcttcatcgacccaagtcatgtgagctatggaaatcatcatcatcatcatctagaccgatcaaaactcagtcgtttcgaagagtttatagcgcaaacttagatccattctccgacgaagagttctcgaaaaaaatccaagagctaactctcagattcaatatcccacaccatgacgacgacgagaattcatcgagctgccatggaacgagatggttcatttgtcgagtattgaaatgaaagcaaacagtgttg

SEQ ID NO: 7636 - DNA, 520 bp, Arabidopsis thaliana columbia
atgacgacgtaaggaatgtgcttatgggcagcgggttcttctacatttagatcaatggactccacatagctgcagatcattgaataaataagattttctttcaactggttgcaagtttgtggagattaaaagtaatttgaaacacaagtttaaagaatggcaagaacacataacgagtgagaagattgaagcagagtacctcttcagctcaggccatggactattcaagcggagatcatcaagagaatgatcaggctttgtctcaatagcggtgtgttcctgacaggaaagagcgaacatgacatagcagttagcagacagaccatatgacaagtgacaaagcactctatccacaaaaatcttacctttacactgatacgaacaaacccagtaagtccataggagcgagccaaaaccaacatgacgtttgcttcccggcagattctatctaatttcaccattgaatcttctactagctacagatcacacatgacaaactaataaggcaaacgctctgtga

SEQ ID NO: 7637 - DNA, 617 bp, Arabidopsis thaliana
tttaaaaaaaaaaaatggtaaagctaaaactacatcaaaggacaaggaatgatattacaaggacacctcaagactccatcttcaggttgttttctgaggtggaattggaggagctgtgcttgaaccagtcctttgcgcagaagagagcttccaaggtcacatgtcgaagggagctcctgtaattatccatctttttcacctccgtgtcaaaaacagaatctggagagacagtgcaaaagggtacagacaaaacatcagctgccatcttggagagggttgggtatttggttcggttcaggctccaccagcctagaacctcaaaatcttgtgatcgcggtattagagattcctctaggtattggtcgagttccgatttcatctgttggtgactgcctacctccgagatgtaaagctcaaagtctgagaaaccatctccaatggtgatgaggggaaactcctgtgaagatgcttcaaggtggtggccttcctggagaaggacgtcaacgtggtgaccttcttgagagattgtaaatgtggcttcttcttgtggcattgcatgtgactgagaatcatgttgtgcttcttcttcatgtggcattgcatgtgattgaggatgt

SEQ ID NO: 7638 - DNA, 551 bp, Arabidopsis thaliana columbia
tcttaacatttcttcttgttgcataatcaatctgttacaaaaaaacagaacataatgaatgactcattgagtaaaataagagaacgtgagagccaagaaacaaacccttcatcggtaataatgtctcttttgatcttgatgttcttgactccaccatggcagagttcttctaacgtacactcaagctttttctccacagctggtggttttttcggcggtgtagactgcgaaaacactatcggcgttgtgcttctccggcttatactctttgcaattgatccagccgtatccctcgtgctcttactctttgaatatggcagagaggtcgatgtcgccgagctcgtagagcctctttcatccttatctctcttgctagcactcttcgaaatcgacgaaggagaagattgtttgacgccgtttatcggactattgcttgtaggagacgaaagtttctttacagatccgaataaatcacctaaggtttgatcttttcctctaggactcgtgaaaggtgacgtcatcggactggtgttgtttgagatgggacgtga

SEQ ID NO: 7639 - DNA, 526 bp, Arabidopsis thaliana
ttggaaaactctattagactatacacttggtaattagacacatttggtttgaaaatatttattaaaatatgcatatactaaacaacaaagcatgcatatgtacatatgtatatacacttttatatacgtcattgtgttcatatatatacattcgaagattcacggaaatcacaagaactaatctcttctctcttgtcccatattgcaccatctccttcagaaaaaaataaaaagagtttataactcatgatgacgtcatcccatcagagcaacaccaccggctttaaaccgcggcggatcaagacgacggcgaagccaccacgtcagatcaataacaaagaaccatctccggcgacgcagccggtgctcaagtgtccgagatgtgattcagtcaacaccaaattctgctactacaacaactacagcttgtctcagccacgtcactactgcaagaactgtcgtcgttactggacacgtggcggcgcctccgtaacgttccatcggtggcccactcgaacaagaacag

SEQ ID NO: 7640 - DNA, 586 bp, Arabidopsis thaliana
ctaattattaggtcggtcttatcaatagcgtctcatgattcaacggcctgttggtgtagaagacgacgatataacaagtttctcttgtaataaaatccactaattagagaaatagcgtttagtttgttttgtcgatgtcacacacaaacgcaactctataacgcaattgatggatagaaattagtttataaatacctgatggagcaatttgcatattatccaaattccagggactcaaacgttaaataaaacaattataaatcactgaaaggaagaagaagaatcaaattcaaccatcaattttgaaccattagagtgatcatcaaacaattcacgaaactcaaaacatctaaacaaaccgagtctaaaccaaacacttaaccggaaatttacaggaaaaccctaactggtgaatttggtaaccgccttcgtgccttcagaaaccgcatgtttagcgagttctccaggtcacacaagtctcacagcggtttgaatctccctcgatgtaatcgtcggcttcttattgtacctagcgagctttgacgattcctgagcaagtttctcgaagatgtcattgatgaaactg

SEQ ID NO: 7641 - DNA, 532 bp, Arabidopsis thaliana columbia
gacaaatgtttagtcctccatttttcaatcgtcaaagataagattccttataattcgtgtacataattgtttttttatatatacatagcatgtggtagatattttatttcgggattgatatttgtatatctctttatactgtgagtgtgaggtgacgtacttagttaaggctcactagtttctttaaattctatataatacgataacaattcctatgatcttcactctccaaagaaccaaaacaaaaaaaaagttgacatggaccaaaaaagctttttccggttgatttttctcatagtcacagctggtttcatcatctccttcacttccactaacttccctcacgcgccgacgaggcttcttgattgcaccgactcttcttcttcacctctttgcgcttcgagaaactttcttttcaacaaacaacaaccacgacctattcctaaacatgatcctaaaccaaataccaaaaaccatgatcacgtgtccgatacaccaaaccatcctctagacccactcacggtgtcggaga

SEQ ID NO: 7642 - DNA, 432 bp, Arabidopsis thaliana columbia
caactttgctgaatccaaatcaccacatttcccataagtagaaatccaagtattggcaactgtaacttgtacatctacacctaaacgtatcccaaccgcatgcatagcctccaaaagcttcaaacttttttcaaacgatgcagattgaatcaaggtcataacagtcacagaatcaggtgtaatctcgttgagtctcatttcacgaaatagagaaaacgccttatccgtgtgacccgactgacagaaaccagacagcattgcgttccaagtggtagcatctctctcaggcattctctcaaacaccttggcggcataatccacagaattacatttcacaaacatgtcaaccgtcgctgtcccaacgaacacatcagaccaaaacggagactttatcaaatgtgcatgaaccatctcacagcatgcagcatcagc

SEQ ID NO: 7643 - DNA, 331 bp, Arabidopsis thaliana columbia
  unsure (1)..(331): unsure at all n locations
tttgacatcctggaatcatataggttaattttgttggctagagagaaacttgtatatatatatatatatataaaccattgcatattattttacagatgacacaagatggggaaagttcgtcaagattcaggatcagacgatgacaattcaataaagaaatcttttactaaaggtccttaacaacccgcagnagacaatcttttgatagcttacgttgataaacatggtgatggaaactggaacgctgttcaaaacaactcgggcctttctcgttgtggtaaaagttgtcgccttcgttgggtaaatcatctgagagcagatttgaaaaaag

SEQ ID NO: 7644 - DNA, 580 bp, Arabidopsis thaliana columbia
tgaactagttcatccattgaagaatttttgtcaactcaagaaacctaacgtaagctttaagcaacagcaaactgatattgattcaaaagttctcctttgttgacattaaggtttattttcaggtcaaaacggagatagtggtggttgaaacggcggaggagaaaaggtaagacgatagtggaggaatcaaagaaacaaggagcaggcgttttggtgttagggcagagaaagagaacctcgaagtggcgcgtgatttggaaatggcgtacgaagggaggaatgggaggaggagtggtcgagtattgtattcataactccgattgtatggctattgccgtaaggaagaagagtaacaatggaggttacttgatcaccacgaaacgtcacaaagatttctggctcttggcttaatttttatttcaaacaaattcatcccaaaatctttttttttttttttttgtaatcgaaacgaatctttttaaagaattcatgttttatggattaattgataatctgtattcgttataagaccttttcttatatatgtaaagacttcatatttgtcaatgtttgttattgt

SEQ ID NO: 7645 - DNA, 797 bp, Arabidopsis thaliana
ccaacaactcatctaataaagacttgattcttctatctcgacaaaagattagagtttgccaaagctcatgggatagtggtgtatagtaaaataaaataaaatgtattgagttctcttggtttttaagtaaagaacatgtatgcaaatatgctcgtaaacgttttaaaaatagtgatgatcaagacttatcactaccgttgcaacaaacacgtgaaggttgaatcctctaattttgtacaaactttgacttttcgaatctaacaaaaaaagaaaaagttgactcttaacaacaaaaattgaatagtaaaaaagactatttatgaacataggaaaagtctaaaccgtgacacattagtcagtcacctaccatacaaattacatcactttaaataccaaattttttattcatttttgttctcttatttactttagtcctctcgaatcccataaagtccacaactctctccttgtagagagagagattttatggcggtggagctcatgactcggaattacatctccggcgtcggagctgatagcttcgccgttcaagaagcagctgcttcaggactcaaaagtatcgaaaatttcatcggtttaatgtctcgtgatagctttaactctgatcagccatcttcttcttccgcctccgcctccgcctccgccgccgcagatcttgaatcagctcgtaacacaacggcggacgcggctgtttcaaagtttaaaagagtcatatctctcttagatcgaactcgaaccggacaacgcccggtttagacgtgctccggttcatgtta

SEQ ID NO: 7646 - DNA, 625 bp, Arabidopsis thaliana columbia
aataacagggcaccattggagaaaaaccagtcgacagaggaagaaataaaatcttcatctggatgcaaatatatccaaggagaatacgattgaaacaaaacggtagtttgattatggcttggcatgctagacaagtcaaattttgtgtttttcaagcaaaacagaggagggggaggagggatgttcaatggctggcagctgaatgtccctgtgtgtacacctgttgcttctgttcctctgttggccggtctcaaactagacagagtcatttcttctgtcccccaaacccatgtatcggtttcactctgttccgtaagatcggatcgaacgcagcttatagattcttgacttaaagatggctttataggagaagtagtgacatatagaccaaccgcttgatatccattgggacataggggctgccaaaaaaaagcagcgcccttcttggttgatattcattgatgtagtgtttatgacttgaatgtagtcacgggtggcccaagctatttccagcacgtctcttgcagcaagaaccacccataaagcaggcggttgttgggttgccatagaaccaagagtggagaactgggaggaagatgatttggtggaagatgagagcccatgt

SEQ ID NO: 7647 - DNA, 541 bp, Arabidopsis thaliana columbia
gaataacacaatttatattagaaactttcttgaggtactagaaactacaacaacgacaacaaaaaagcgaaagagacctctagagccttgtctacagtaaagttggagccggtaaagctggatgtgttagtcttgtcaatcaataggcaatttggtaacgtatggtccggttctatgtgtacttctgatgaacatccgataatatcatctcctacgtcaaagtttaatggtgcatcatccaagttaagcccttcacatagatcttcttctccttcttcaagtttaagaaccatatcaggatatccctggaacatacacacaaataagaactgtatttttcatcaagaacttataaggaacacttttcactcctttaattattaccttagattccgtggaaaagaaagacaaattatcactgacattctgagtgtaactgatgttgtgtggtccatggaataagcggtatcgaacatggtattgttgagatcattcaaggggacagaaccaacgaacggactaagcaagccggagacaggag

SEQ ID NO: 7648 - DNA, 639 bp, Arabidopsis thaliana columbia
  unsure (1)..(639): unsure at all n locations
tttcaaagtctaatgaactcctttttcaaaccattcttaagaaagtttgttttggtgttctttgacgatatcttaatatacagtacttcaatggaagaacacaagaagcatttggaagctgtgtttgaggttatgagagtgcatcacttgtttgccaagatgagtaaatgcgcatttgcagttccaagagtggagtacttaggccatttcataagtggggagggaattgccacggatcctgctaagatcaaggcagttcaggattggccggttcctgttaatctcaagcagctttgtggttttttgggattgactggttattataggcggtttgtaaggaactatggaactattgcaagtcctctccatgcgttaactaaaacagattccttagtgtggactactgaagttcagcttgcttttcaaaaccttaaggacacatgtgcaacactccaggtgttagctctacctcaatttgataagcagttcgtagtagaaatggatgcgtgtggtcatggcattggtgcagtgttangcaagaaggacacccattggctttcatcagtaggcagttgaaagggaacaattgcatctgtccatttatgaaaagagtattggcagtgactttgtgtgaggagt

SEQ ID NO: 7649 - DNA, 505 bp, Arabidopsis thaliana columbia
ctgaaacaatccttttccttgttccaacaatctaaacttcctctaatctctcaaattcaattatcttcaagtaatcatcatgtttatatataatctcttcttctcttttgatttatccaactcaaggaacctcactaaactcaaatcttcctctcagtttctcccactcttcttcctcaaccttccgatttatcggattactctaaaatacccaaaatggaatctcatggaaaaacccatcagaaagagcacgataatgatctctctccgaaacccataacgttgtcaaagtattcgaaacgggtcgagttaaagactctgcttgatcggagcgaccgcggcgcaggattggctgggaaaagggttgtgattggtggttgggttaagtctgctagagctggttaagaaaaattctcctcctcctcctctgcctgtagttgccgcccttcgccgtcgagtggtggggatcaactcatacgacggcaacattaggtgcacggagata

SEQ ID NO: 7650 - DNA, 616 bp, Arabidopsis thaliana columbia
tagtccaaaggtagatcttcatagttctcaggctcatgttcttcattaggggttctccgaagcttcaatcttgcctcgccgtttccagaggaggctcgtggttgttgttgttgctgctgctcaggttgttttccggaagaatcgagagccatagatctaagaggagtttgattgcacattcaggtcaaagaaagcgatacgcattctagggtttagtttttttttgatgagtgaaaaaagaagatgatgatggtttgtttgagaggttagggtttcggctttttttttttatagaacctcctcaaagtaaaaaaaaaacgtggaccattttgatattgtttctttgtttgttcctaccatttttagcaacgctgatttttattttttttggtcattacatcagtaaaattaaaaaaccaaaattagtaaattagtaataagtctgtattttcatatttatttgattcatataaatagaaatagtgacgaatgattttgtacaaaatgatgcagtggaaatgaaatgtgacagagcacagaggcaatggttacaaaagagagagaagtgaatctagtgtttactaaaacatgcttagagtcttgagagaacagactt

SEQ ID NO: 7651 - DNA, 575 bp, Arabidopsis thaliana columbia
gacaagatggtctactgttggaagaccattaacttaggtttaaagagttggttccaccactttttcacaactgtaatgtctccattgtcctttataccaagcggtaacgttatatcagtaataagaactagaaacctgtgttgtagcacgggtgctagtctaggtattattttatatgatcagcaccacattacaccattctttgtaagccttaaattcagacatataggcaactaaacttcatagatcaaatatcataattggcactcaaattcaaagttagagcttcaccacaatgggacttctcacacgatgcttcttgtctgaccaaaccaattctccaaacacatagcccttagccacatttcccttacttttcacaaggatcactttaaacgtcttttgctctccaactttggtgaaattcaagctcgttggcttcaccgcgacataaacaccctgtgggttattcaccttgacggtatacatcgaaggtcgccaacgtttttaacagtccttgaaacggtgactttgcttgatgttaagtttggaactgtgatggaaggatagttgag

SEQ ID NO: 7652 - DNA, 589 bp, Arabidopsis thaliana columbia
cgttccatcttcggcattcattattcttttttcctagaaaattaacaggattagtttttttttcttacaagatttgcccattatacacagattattgaacagttgagttcggtttaagtcaatgaatctattattaattccaagtgggatatataatgttctttgaaggttcctttgtgcctatctcaaataaaagcattttccagactcaaccaacaaaaaagccttttcaatttctttttacagattgctttctgaatagctttgagatattgattttctcttcatcatactcagatggattcttcttttctctctggtttttgtgctgctgccataaccttcttcactcttttcggtacaatatatttcatgttttatagaaaaggcaaatcccatcaagaaaacaaaacaatagcttcttctttaatatctatttcatctactccatcttctttacctcgaaaacggaaacacgatgtcttccctagcttccacggggcagatgttcgcaaaacctttcttgctcacatcctaaaagagttcaaagggaaaggagtcgttcattcattgataatgatatcgagag

SEQ ID NO: 7653 - DNA, 496 bp, Arabidopsis thaliana columbia
cggatccgccatgactgctcgtaagagaactccttcagtgtccaattcggagaaactagctctacctgaacctgcatcttccccgacggttcagaagacctctgtttccggagaggatttccagctcgcgccgccgaaattgggcgtgattttcgtgatctcttcgcttctgtgttcgctttatctttaccttctctgtttccactacaatgttgacaatgagctcaagcgtccgatcctcattaacgctgggcttagcttggttggattctttgtcacactcaagttgattcctgtagctgctagatacgttctgaggcgtaatatgtttggttttgatatcaacaaaagaggcactcctcaaggagaagttagagtgtatgtttttccttcttagatttgtctttgtttagttctcagattagtgttcagagtttttctagaaatggatgtctcttagatttgatttattgtataggaggaaaactatgagatg

SEQ ID NO: 7654 - DNA, 508 bp, Arabidopsis thaliana columbia
tcattgtactaaacccttggagaagtatcctttaaccagaaatttacctcaacgttatctccatagaggttaagtttgtggttttcattgttgaaaacttgagcaggatattcatttctagcattacaggccatatcatcagccagcataagaatgatcctctcatctggtattccaagtctcttgactgtcctagaaacaccaagtaaagagaatatgaacgtaagaaccaaagagtgaagagaactacctcaatgaatggttaatcgaacatatacataaggaaaaaaacgagctttcacctatagagggacagagtattggccatgtgccggtagttaaacctgaaataatggtagccgcagcaataggttagtatgtaacttgatgaagctagatagacttttggcacctggaacaagtttctcaatcaagcataactctcccacacaaggtcctaagtaaccaagtaacaaaagatgaaacaacagttgactagagaaacaaa

SEQ ID NO: 7655 - DNA, 533 bp, Arabidopsis thaliana columbia
taagcgctcgccgattttgaccagagacccgtaagagagtttatcgaacacacctggcggcagaaccttggcgggaacacggttcacaaacgccggaatatgtaactcttcctcgccggagctctcatcgaactccgacggagtcaaacgttgtcgttccgggagatactgtagaacccctaagaaaccaaagttggaagtcatgaagatataggaaggaaggtttacctcacggccgatgtcgatcaaaccaacgcagaagaaatcaagaatcaagccggcgacatgactactaccacctccggaagatgatgatgatgagactaaatcttggatggtttttctgagacaaggtatgtgcttatggatgaaatcgaggatgtaagtctcggaggaagtgtcaagaagcttgatcggaggtggatcgtggatctccgggagactgatgattcggataccaggctcggaggctgttagcgacgaagagaagcgtcggcgtgaggagcgtaaggaagattcatggagaggattgt

SEQ ID NO: 7656 - DNA, 474 bp, Arabidopsis thaliana columbia
acctgctgtatccttcggacatcaatttcccaaaagaaggagaaaagtttcttatcgccgtcccagcccccagtacatagcgccttcacgactattgtataggttagtctacagataccagaccgatagacgtgtactgtgctacggatacgatcatgagccgcatcgatggcccatcataaggtcacatcttgaagtatagtggattacacatcaatcaccagtatccagaagatgtaatttggactagcatatgcactcaggcgccatgcatacaaaattccatcagtaaccgccgtctcatcatcccgtataagatcgctcaactctgaggagaatctctggtacatcgctggccattctttgttcagggtgcgtaatcctgccatccacgtgtgatattttgtaatataccacattctgaaaacaacaattagagctgagtgcagagatatccagcagtctgaagtatac

SEQ ID NO: 7657 - DNA, 627 bp, Arabidopsis thaliana
aaacccatcaggaacaagtccaggtaaagaagagacaaccggatcaaaccaagagtcgtaaatgctgatctccatctcattcatccatttcgcttcatgaaccgcacgcacaaacacctaaacaccaaattccacaacatattaagtttccaatcacacatttcaaactataaattttaataacgttggctttaaaattaccattcggtcactgaagacactcctttccatcaacctgagaggtttaaccccagaagcagactctttctcctgcatcagccgagtgacaaacacatagttctggaaagtataagcatacctctgaggctcagagtagaaagcatccaatatattgaaatggtcaggtccaacatcttgccacttatcaactggctcaggaacaatctcaacaaggtcttgtaactcaacagtctcattcgctatcctctgaagaaaagttgatttaccaacactgatgttcccttcaacacaaaacgtcaaacgtttcttcacatttagattaggttcagggccagaatccttaagctcatcatccacactctctttaataaacgttgttatactctccgcatggtttctatgtataatccaacagagatctaagat

SEQ ID NO: 7658 - DNA, 591 bp, Arabidopsis thaliana columbia
ctttccatcccagcattcgcttttatcgtcgagttggtagaattatcttgtcttttcattctttggattatcacccgtctttgggcggatcctatactccttatcgaggtttgcctcgatcaatgtcgccatttcaaccagttcttagacaatgttgaaggtactgaccgagcaatgggtccttaagttctacctatggcctcggagaaatcaacaaacttgcgctactttgtcctcgagttctcttcccacataacgtcttggtttgttgaattcctcttcggatttgcagaccgtacggcaaccctggacaagatccaagaagtaactctcaacaggttccatgcctcggatgggaagaacttcctgttgaactcgtcctcaaagccgttgaaggttttgatacgctcacctttgaatttatttactgtaagccactagttatgcgcatcaccttccaagaaatggacactgtacttcttgtaatccttcagggagagagtggccaaaagttccgtcaaaacgtgccctcactcgttccctcaatttgatttgactaccaagaagtcttcgtccaagttgtgagataag

SEQ ID NO: 7659 - DNA, 484 bp, Arabidopsis thaliana columbia
catatataatgagctgagtactgtttactagaataagagattataaatgagttgagtaattgtgctaattttggtgggatgaatgcataacagtggaagcactattatcggtattggttcaccagatcctccttaatttatatatgatgatgaagaatacaagaacgtgttcttgtctggtatgctcttcgtacaagtagtgtggtttctactcttctgaatcttgtacatgtaaggaactaattccaagtaaaattgttgcagaagcaaactttatgacgcgtgaggctaatgaatggtacaaagaacctgcttctgcaaatgctactacctcatccgccgaatctcgcatggatttccaatgagatgttacaacatgtaattttttgaaaggattgatttgagattcctacttgtgtttcgaatagtgagtgggtaactaaaggagaagatgctttaaatataaattaaaagttttttaaaa

SEQ ID NO: 7660 - DNA, 552 bp, Arabidopsis thaliana columbia
cacacaaatcataaaacacaaagacgataatccatcgatccacagaatagacgccacgtggtagataggattctcactaaaaagttctcaccttttaatctttctccacgccatttccacaagccataatcctcaaaaatctcaactttatctcccaaaacacaaaacaaaaaaaaatggcttccactgctctctcaagcgccatcgtcggaacttcattcatccgtcgttccccagctccaatcagtctccgttcccttccatcagccaacacacaatccctcttcggtctcaaatcaggcaccgctcgtggtggacgtgtcacagccatggctacatacaaggtcaagttcatcacaccagaaggtgagctagaggttgagtgtgacgacgacgtctacgttcttgatgctgctgaggaagctggaatcgatttgccttactcttgccgtgctggttcttgttcgagctgtgctggtaaagttgtgtctggatctgttgatcagtctgaccagagtttccttgatgatgaacagattggtgaagggtttg

SEQ ID NO: 7661 - DNA, 560 bp, Arabidopsis thaliana columbia
tgcaaatgttttaccaagaacactgaacacagacccaggacgtgtttaaccctattcaaacatacagtggcgaggctgatgggcgaggataagcaacaactgtactgccaacagcagtctgtacgagcaaaacctgcattcacttttttgctgacaacactgtcacttctcctacgcattcttctatctgttttatccatatttcctcctatagcagcatttaaagactgaatgtgttcgaggtgcgaaacaacctcgctcatgtttggtctcagcttaatctctgtggtgagacatctcagagacagagtagccactttacatgcttcttccatagagtactggtcctgaagacgattatcaatgactcggaatatctttcttttgtttacgaggtatggtttagcccactccacaaggttcctctctccagatgggcggttcttgtccactgctcgacgaccagacaacagctccagaaggacaaccccgaagctatagacatcactctttgttgttagatgacctaaggaaaatgtaaagtgatcattcatatgaag

SEQ ID NO: 7662 - DNA, 1143 bp, Arabidopsis thaliana
ttgttcatcaacgaattatctttagttgacctatttgtgataaatatttatatttattactttaattaaaattacaactatttatcagaatgagaaaaccccaacgacgaagagaaatggtccaaagaaaaataattttcatttttgtgtcccaaaatttacttttatgtacacaaatgacaatgaactgaaaaaacattcaaatgtcgtagtcaatgtccgccacattggactcagctgcaggcttaaccagacgaccttcctcgtcgtaaacatcaaaattctcgcaaggtcgaggaaatatcgaaccgaacactcgtcctttcacgaacgaacattggaatatatgtttcttcttgtacgttaacccaacggacatgtcccgaaacgtcacattccttaccggaatctgttcgcttccatggatccggaccggcactcgcactccttgtccgtggattcccgcgaaactgaatcccgaaagtatcgggtatgctttccgatcataattatcgtctgcatgctcgttgtaatccgttttgatcactatcccaacccgaacattgtctagtgttaggtttttgtaggttatgtttctgatgtaaccgcctcgtcctggagccgttttaattctgattccacggcgtgagttccagatcagaaggttctcgatcgtcacattagatattccaccagacatttcgcttccgattgatacaccagcactgtcaaaacatatagaacactttcattcttttgctttaaaagaaaacgttttcaaagttttgcggtgtaagatgagaaatgagaaaatactttacctgataacagagcgaacaacgagattacgaataagaatgtttgttgaaggtcgtccatatgcaatcccaaactgatccaatccactctttatcgcgatcgcatcatccccggtgctaatgtaacagtcctcaattaccatatcctcgcacgaatctgtttacggaaataaacaagatggttcaaaacgttttaaatgagtacagaataaccggaaaacagatataagcggtaaatgaacatacctggatcaattccatcagtgtttggtgctccggttacaggagccaagatggtgacattccttattgttacatttttgca

SEQ ID NO: 7663 - DNA, 509 bp, Arabidopsis thaliana columbia
ggtcgactatgcgagcaatcttctggtttgtggtcataagctcttgtgctgtcgctgcaccaacctgcattcagagatctgattttttcaaagccaatggtccttacgacataaacctccgagccatgctctcgtctcttccttctcgtgtcaaggataatgaaggcttctacaagactccgttcaagcccggtccaaacatagcacatggtctggggatgtgtagccgaggtactacaacacaggattgttcggattgtatcacgagtgtatctcataccttgctacacacatgtcctaatcaggcagaagctatagactggagttctggagactcgctttgtttggtacgctactcaaaccacttgattaatggatcgctcgacgaagacataatatgggcagagtatattgagtacaaatataacacatcgttcggccaaaccaacttgacggagtttaaatctacatggcaggctttgatggatcgtgtgataacaaagttgatg

SEQ ID NO: 7664 - DNA, 570 bp, Arabidopsis thaliana columbia
tttttttttttttttttcctgaaaattccatacctttataaaaaccaaggaaccttggaacagatacaaagtgcctcctataatgagatacacctacaacaacagaacaaacaaacccaaaaaaacaagagcacattatacatcaaatagaccaaaccacgtcgccataaaagagattccatgacgtcccagcttctgagctctagacagaaggtccaagtgagtccgaatgaagttctttatctccatcaccaaagaggcagcaggcctagcaatagcagcatgaagacgagcatttctttctctccaaatggtatacaaagaggcttgaaaggcaatcctaagaatcatagccacatttttgttttggcaaggattcttaagccatataactccatccgcaaacaaagtaggaagagagacatgggcccttgaggtgaaaaaattccacacctctgcagcaaaggagcactcaaagagtagatgctgtcttgactcatcctctaagctgcagagaagacaagcagacggaacattcaaaccccaactaagcaatctatctctagtatg

SEQ ID NO: 7665 - DNA, 467 bp, Arabidopsis thaliana columbia
gtctccgagacttttccataggtaatacaaaggtctcaacagtttttcctcagaaaaatagcaatcatgaataaaaagccaaaaaagaatcttaacataaaatagtgatttggtttcaatcccgaaatcaagaatcacatcacaggaagagataatatctaactaaagacttattgtacgccatcgttttacagaccggacaagagttcttcctcacaagccattgattcacacagtcgatatggaacctgtgcccacatcgtaattcccctacctcgtccttcgcctcatactcgtcctgtcaatagccaaaacatcaacattcttaaggaacaaatctgttttctacgagtgattacttgagcaatgaagccagaaatggacttacttgacagatgatgcactttctatcagcaactggttgtaacttgccgggcattgtttgactttccgaagacaacttttga

SEQ ID NO: 7666 - DNA, 550 bp, Arabidopsis thaliana columbia
agtggactctatcgcctgaattttatcactgagtaatttcatcgaacagttggcggacgtttgtctatacctgcgagcttggtgattgaagcggaaagcgaagatggccaagaatacatggcatagcctactgtgtctccttcagcatccacgtatagcaaaccggcgtttttcttacgcagctctgcatcgaaagtttgagcggagagattcgtgtttagggaacgttttcttctccagcttcacgatatcttccacaactttggcccaactggtcgaccctctaatcagctctaccacaactcctttgtccattgtacaaaagattcgattttgtggaatctctcgttggtttcgcagccggtgagagcgagtgagccaaggaaattgtgatttgatttttatgaaggtgcgtacgaccggcggggacgacttttagaaactatttgatattgtgatttgaccacaaatttaacttttgtgacaatttagtcccagaaacagaggaactgtatcagagaccacaccaaattataagacacatatttga

SEQ ID NO: 7667 - DNA, 509 bp, Arabidopsis thaliana
caatttgtggttcttggacaaacaacaaaacatcacaaaatcaaagaataatatttagggataaactatcgaaatagccaaaatcatatatagtttcgatataaataataattggtattacaggtataagatattaaaatccaaggttacaaaattattgatttataacaatataccgacgtcaagaagcatagcaagagagtccagatttggagtctctctttttctcttatcttccttctacttctgagttgagaaaattcgaccaagaacttctttttcctcacgtttctcagtcaacacactcagaaaattccgcgaattaattattcttgtctgaatcaagaatctcttgattcgatgcgatagtgattgttggtttgaacgagctaaacccgctggtttagccaatctaatatggctccagcgatgatttctcgttcgggttcaaaaagaagatcgtgcaacaaccctgtcgtagagcttgagtgatttgtctgacgaggcag

SEQ ID NO: 7668 - DNA, 531 bp, Arabidopsis thaliana
gaattaccttcttcaaagaatatatataccatagatctatttcttatgcatgcatacacgctttttataaaaggattcgagggtgaatattttcaaccggagaagatttcaaaggagacaagctcgtgtgttcgagaatacaaaagcattctaacatcaaaaagcactgaagatagtttggtatgtatatgtatatgttttgaacgaataatatatagtactgatcatttaacgttcatatatatactaattaattactgatttcttgcaggcgaatcttgcaagatgggaaccagggcatggacgtttcaggttacggcacccgtggaaaaagtacttgaaaattgcaggactcgttcgccaatgtgccgtccatttagaaatcctcaatggctacgttctttcaaacgataaggttcgtgtgaatcaactaaatcgccatttcgagggaataagtattgttacttgacgtgtgtatatttgatttttttttgttatttcgtgtgcctttaccattcataaataactttt

SEQ ID NO: 7669 - DNA, 479 bp, Arabidopsis thaliana columbia
acacgtgaaactttgaaataaaactaaaagctggtttacaagaaaactaatagggaaaccaaaaatatgaggttaggcgtcttctatatatatatcacaaacttgcaatgaaaaaaaaacgcaactaaggagaaaatgggtatgaagtctccaaatattgctgcatttatgttaccactgcttcttatacttttcacgctttcctctcagcttaaagtcgtggaatctacaggccgcaaacttggtaagtttctttacaacaaatacactatgtcttgccctatctctttctgttttcttgtgtatatcatttttaattagaaaatagaaagagtgtaggaaagatatatattcatccttgcatcaacaatttctaaaataaagttgtgaaaagaacgagctggaaatctatttttccaccaaagtaaattaaaaatctcccttattttagttttgaactttaatatggcagcgtgggg

SEQ ID NO: 7670 - DNA, 517 bp, Arabidopsis thaliana columbia
  unsure (1)..(517): unsure at all n locations
cgatctaacttttgatggcataaacagagtatgaattcaattcacaaaaagttttcaactttcagatatatggacaaaattggaaactaattttcaaagaaatcgaattggaaatgaaatagtgataaggaagtaagtttaacctgcggttcaagctctcaacttcttcatcggtgacttgaccaccaaacaccactttgctaatcccatccgatggctacaaacacattaaaccaaaattgaaacaaatactattaccagattgatcaaaatcaaagtgaaatttcatgaatttcgaaacggtgcaagtacctggtgggaacgaacggcggacggagaagcggaggaaggagaatccggcggtggaacttccgaccaagtaagtagatctgcggtcgatgtgtgtggctttctcaccggagtacttctctccatactctctcactcactagtcactagcaagcaaacaaatcgaagagaatgaganaaatacagagaggaagaagaagaagaagat

SEQ ID NO: 7671 - DNA, 569 bp, Arabidopsis thaliana columbia
atttacgtttctgatattcccgcgtttttcggttatgaaaatcagagttttgctataattaaaaaagaaaggttaaaaaaaaaaaaaaaacttaaaagctacctccttatctaagttaacaccgaaaattgaggattttattttggacaggaacaacaaatacagagttttatgtcttatggacaatgatgttgagagcttgtactattttgagtgataatgataataactaataagcaacatatgtggaaccaaacaggaaatcagaaggcttattgctttatgggtttggcttagtcgagccattggctataacttctcctcggcttttgttgatgtcttcaccagaaacattagcaggaacagatcttccactgctggaaacgaggttcttgatggttgacttcaggtcagtgtcctttagaagcgagtccaaagtcacgtgtacgcctatatgcacaaaaaacagtctaagttaaaactggtatagttcttagggttgtgtgttagttagtagtaaatacttacggtatctccagtagtgtttggggtttgttggatcattgatt

SEQ ID NO: 7672 - DNA, 924 bp, Arabidopsis thaliana
gacatcaagaatttcgcaggctcgattgtcataataatcgcctgaccgcaatgatgctcagaataaagcagccatttcgcggcttcgtagtgttccatatcaccatgataatcaaggtgatcgcggcttaagttggtaaagaccgacgccgcaaatttcaatgccgccacacggtgctgtaccagcccgtgggaggaaacttccattgcgcaaaacgtcgcgccctgatccaccagccccgccagctcatgctgaacatcgactgccgaaccggttgtattttctgtcgggatcactttccccagcaggccgttaccaacggtgcccattaccgcgctgatttcgccaagcagttggctccactgcgccaacagctgggtagtcgtggttttgccgttggtgcccgttacgcccacgagacgtaaattgtcagagggttcatggtaaaagcggcccgccagtgcagataaacgctcgttgagctggctgagatagatgaccggtacgccgtgcatttcacggatttcaccatcggtcgcctcatctttcgcctctgcaataatggcagccacaccttgcgctatcgcctgcgggatatatcgacgcccgtccgcctgatgacctactacagctacaaagagatcgcccgccgcagccacacggctgtcgagtgtcatctctcgcagtgctcgcgaaggtgcgtctggccccacggagcaagaaggtcgcgcaaattacgatctgccacctgtcccctcgccttgattaatcacaaattcatttttatcgcccgttgtcagcacatccggctcgatgttcatggtacgcaatacgccgcccatgatggcaccaaagaccggcgcggaaacggcgccgccgtagtatttacccgcctgcggatcgttgataacaacaaccagcgcg

SEQ ID NO: 7673 - DNA, 839 bp, Arabidopsis thaliana
tgcataaaaatccttatgatctaaaacaattttaatcaagcctctccaaacattgaaattgcgaacacttttgatgcacaaaaatccttatgatctaaaacaattttaatcaagcctctacaaacattgaaatcaccttgaaatgaaggaaaatttgaaatcaccttaaaatgaaggaaccatgaaggatttactctgtcatcagttaaaaacaaaaaatccactatacccccatgatcttcctaaagcccataaattaaatccaccggattttggccatggttagcgatggaaataggtgttgctgatcataaaaaattcttataacgtatgtacttattaaaaaaaaaatctattacaacatgtacaaacctaatctcaaaacgtacaacccgaaattctactaaccaacaatatttgcctcttctagtagccataatttataatatgaaagtctgagaatctttcaaaatatcacattgatgtcctataactgcaggactatttgggttatccataaagcaattacagaatacatgcttaattaagacaattgaatcatgtagtaacctttgcaacggagacgtacagagaaaatactatgcacataactaataccatctttcctagttgattcttattgtcgctcaatttagtcatcttagtatagaagattggctagttgacagtcacattaccgagcatcaaggaccgagacagtaatttggttcactgtccatgattcatcgtcgcgctgtttactcgacgaagaatcagtgtcaagaagacttctctccaggcaataaccgggcgctttaggttgaggaatagttgttgat

SEQ ID NO: 7674 - DNA, 589 bp, Arabidopsis thaliana
gtaagtcaagaaacatgtttttaccggatagttcgagcttggtagagtgaagatgcgatgtccaaagtaggaccatttggaacagggccagatacgccttttctcgagttactgtaatggagaatcgaagtcgttgtaaggactttccgcgtgaacctcgaggagatgacgatgtaatagtcttgaggagcttggttagccgtcacaagaacagagtaagactgtcctaaatgaatgtcaagtgaagtgtagatgttttgaacagtgtgagagccttctacttcaacgagcttcatcgtgtgtccttggattctgaagtttaatgaagtcgcgaccccaacgtttgatattctgaatctataggtcttaccgggttgaacggtgaaggtattgcctcccagccgcgaccattgatgagaactcatcaggattcggtagattccttccggcttctagtagacgtctcaaaaccttaaaataacaaaacaatgagattttgcaaaaccccaaaactttcgttccttttcttgcagttcaagtcagtggcattagggcaataaggagtgtcttacatagtgattggttttgt

SEQ ID NO: 7675 - DNA, 486 bp, Arabidopsis thaliana
ctgttacctgcattgaaacacgcactgaagcagatcaaaggagacaagagagagaaacatccgaagcacatacctcacgcagaagccaccctaccgactgatacatgggaccaaagctataagtcagcctatgagacgggagagaagaaagaagaggctggatgttcttgtactcactaaaactctccagcttctccacaaagccccaagtgattttgctctgcactgttgtgactgtaaaacttttgacaagttttgtgtttgctgagttagttacacgaaacccaaatactatatatggtgcgaaatgtagtttttgtaataaggttctacttttttgtaataatatgcatatcccttgatgagaaaaatactttgcataagccaaataacagaaaatatcaacaatttgattaaacattcattttcggtttggtttacgaattttcggtttggtttacttaattaaaaactgggaaacgaaat

SEQ ID NO: 7676 - DNA, 543 bp, Arabidopsis thaliana columbia
cgactctagcccaagaaatgaacttcaacatcaagtttcaattgtttcccatttcaaattttcaatctttgactgctgagcctgagatcagagaatagctgaggtatataagagtggtgaaagagagtgtttctacctgttgcaatccagatggctgaagtggatttgactcgtcctcgaatgcactccaaaactcctgctcgtttgatagccagattataaccgtctctgttaatctcgctagtagaatcttttgcagcttctctttaccaagcagaacatccccagcaattatggccaactgttgtagcttagaaaacaatgcctgcataagaacagacacagatgattctgtgtgctaaaacttataaactgggaactataaaactagatcaaagaagagggcgagacctgaaacggtaaagacggcagatgcaagtcatctggtgtttcggttaaataaatgagtgcgtctaatcgcgttagtcctccctagagtagatgaagctcaagacaaactgcagacagaagtagttctgagtt

SEQ ID NO: 7677 - DNA, 557 bp, Arabidopsis thaliana
ttagtctgagctttttctcaaatggtaattgataatgtatctatcagtcagcggcgttgaaggaagcaatagatgatcttgaatggcctggttcaagtgtacagatcagtcttcaaaaggaacccccttgtgtaatctttagaggagaaggacatggagacttgcaggtcttgtttctcacttgtttcttggtgatgtatattatcttaatgtgaaagaatcaaggaacatatttcgatctatcctctttgcagatagacttcatgtattatgccaacacagatcttctccttgcctttcattgtgataccgaagtctcttacgggtaacaatgaactcaattctttctctaccgtagctttatggttaaaacacacgctcctacgcttgatttaccaatcaagaatagtagccagatacatttgctaaacttctcattgttgattgtaggtacaaatacaagtttttgaaagcaacaacggcaaacataccgggaaacgtagtgagagaaaacaggggaagcaaactaacaataggaagaggaggaatgttgaaag

SEQ ID NO: 7678 - DNA, 412 bp, Arabidopsis thaliana columbia
ctttgctttggctctgttgaggaaccaatgcaatcctagtcttcttagaagcagatctattcccaaacagagaagcttcgaaatcgatatcatctcttctcactggtgatgagtcagtactccgaaaccccttgcattttagtttatgtcctgatttccaatctgacgtttggcatgccgcagagctagtaccaaagaacagaggcaaaaaaagaaccaaattcaaaaaacagatccaccaaaatcctaaaaatccaaactttcaaagcaagactattctgtaaaaaacattagaaactaacaatggaagcacgagctaaacaattggtccaattctatctccagctacatctaaatcaaatcccaaagccctaatcacataggcaaaaaggaaaagaatttacaaaacaga

SEQ ID NO: 7679 - DNA, 534 bp, Arabidopsis thaliana
tttccttccatagcttcaaattctcctcgacgctatgattcctacatttcgaatcaatcccatccatcctctctttctgcatctgctccctcggtgtgtcatcaacatatgccttaccctcacgcatcagtttttccgccatatccatcaattcaggaaaatagtccgaagtgtatgtcactttctcatacttgatccccaaggtcccaatatccttcacaagattatccacaaactcattgctttctttagcagggttagtatcatcaaaacgcacaatcacttccccttggtaacgctcagcgaaatacttgttcagcaacgcagccttagcatgtcctatgtgaagataaccacttggctctggagcaaaccggagtttaacctttccaatctccgcttccggcaagtccacttcaggcttacctttatcctgaccatctcctttcacagcttgttggctatctttagacttaggtgcagcaacaggcttccctgatcctttcttaacataagttgctagaaccttgttaa

SEQ ID NO: 7680 - DNA, 504 bp, Arabidopsis thaliana
ttctagcgtttatggactttctgccatgttttattaggctgtgaacaagagacgtctaatttttgtaagtagtgctggcaacagtggtccagctttgacaacagtcggagcaccgggtggaacaacgtccagtatcattggggttggtgcgtatgtttctcctgcaatggcagcaggtgcccattcagtggtggaacctcccagtgaggggcttgaatacacttggtattttcaccttttttaactttggaattattctacagctagttgtagctggcatgatatagttattgttatattgtaggtcaagccgggggccaacatctgatggagatcttggtgtctgcataagtgcacctggtggggctgttgctcctgttcctacatggacgcttcaaagacgcatgctcatgaatggaacatcaatggcatctccttctgcctgtggggcaattgcgttacttctaagtgctatgaaggtttcttcttcaacattacttttta

SEQ ID NO: 7681 - DNA, 607 bp, Arabidopsis thaliana
aaagcgttaaacaaaccacctttttttttatttattttttaaactgttacagaagaagatagagcagctgcttaaagaagatgatgggtggatgcttatacgggtaaacatttcctaggcacttcatctgccctatgaaattattgtttgtgaatctgctaggagctgctgttcatgttgattcttgtaatatcttccatgtttgaagctttcttacattttttgtagaggaaggacgcagaggatggtatggggagagaggtttctgttccctgcaaattctctaccagcaggttgtctcctccttcctagcttaagtaggaatttttggttctaagttgtagttgtctggtgccccattaaagcctgatttggtcttggtatatctacagcacgggtgagagacaaggtgatgaagcaccagcaccaccgctggtatgtatattaatattctttcacagtcctgcatgcctctctctttaccccacattgtcttgttatacttgtgcatcttttattgcagtcgcaactgcagctacaattcgagagacgaaatgctgaacccatgatgatcgaatacgggagattatggctgttgaaggagtaa

SEQ ID NO: 7682 - DNA, 510 bp, Arabidopsis thaliana columbia
gttcttgggatgaatagtactcatgatgcttgtatttataggagaaagaaaaattatgtgctagcttaatccaacaattctctgtgatgtcttacagtttgagtatttggtgagtcatttgtttgttggcaatggctgctttatccttgcagatgtatagcagtggtaacccgacaaacattgccaatccgataaaagatgcgagcgttcagattgatttaaaaacagttggtggaaagcttactttgtaccaaacgaccctatgcgagagaatctcaggggataacattgatctcgggctagatctcgggtctcaaagctttttgccaacatacaacaaaaatgacatccagctgacatgctgtcaagctgatgcaagtgttttatggcttgtccctgacacagttgtgaccagatttattcagtaccttgactgggacacagatatggacatcacctttacttgggttcctacagagactgcctaaaggcaaggagactgtgacatat

SEQ ID NO: 7683 - DNA, 577 bp, Arabidopsis thaliana columbia
ggcataatgttgagctgatgcttcaagaaagctgcattgataactccggtagcttaatcgtctactccaccgtcgacgttgactcaattcagcaggcgatgaacggtgaagattcttccaatattccgattttacccctcggattctccattgtccccgtgaatcctcccgaggggtatttccgtcaattcgcattctccgccgtcgtgtcttctcaccgtcgggattcaggtcttggcgagtaacgtcccaacagcgaaaccaaatctctccaccgtcaccaccatcaataaccatctctgcgccaccgttaatcagatcacttctgccctcagcaacaccattacgccggtgattgcatcttccgctgacgtgtccaatcaagaagtcagctagttgaccgaattacccctaaacctccttttgctttttctatctcagagtcagagcagtcccatgtcaggggcaaaatagtaaatggaaaagagggaggttcataggtaattcgtttatggcttttaggttgaggtttggtaaataacgtagcatctaaatggataagcccttttaggtattt

SEQ ID NO: 7684 - DNA, 1503 bp, Arabidopsis thaliana
catttctttgttttttttcttttctttataatttgaataaaattggtcactgtagaaatctgactctaatgtgtgcgtaagaagtgtgtaacgctcggcggtggagcttatgttacaatccgtacttcattattctgtctgtgataagaaataataataattgaatatgtagcctagttttatgcaaaagttttgaatgttttcaatttacaatccaactaaaaacggaacaacatctcaaacaatttacaataaaatcaaagatttatattctttatctcagattacgttttaatttcataaaaagtaacataagaaattatacctttttggattcaacactgtttcattttttggttaaaatattatcatcccatatcgtctcaattttccttgttagcacaaagaaataacatcaaaacctattttcatgaaataaaatgtgaatataaatataacaatagattaagtctattccccaaatttatcacgagaaaatgaacaatctcttcatattttcgattgttattggcttatgcattggcgtaagaatgcttttcacgagataggagaaagcaaagtcgtgttaagcaatcaattggaacacagcaaactcctcaaagttcattgtcgttccaaagacgacgatcttggggagcatattttgaaaattggccaagactacgagtttacttttggtgataacatttggcaaacgactagtttctcatgtcaaatggatcagggtcctaattttaagcatcacctagattttgtggcatatgagacttcgtggagcaaagctcttgaagcttcgtgtaagtggataggtagagaagatggaatctatttttctcaagatggagttcctccaccaaaaagtaccaagatggagttcctcccaccaaaaagtaccaatgggatgacctcattgaaaattagagttttatattatctttggttgatctgaagaattggtcctcatatgaaaattagggttttatattctttggtggatctttgtacctcttattatgaataaagttatcgataaaattttctttaataacaaacattccattgatatggatttctttgaaaggataagtagttatataaatacgtgaaagatataagaaatttgagggactaaagagcaaaaatatagatattttgaagaacaaacggtcgaagaacatctgaaactatcatcaatcggagaagaagaagaatggcactgacactgacaccaacaagttccgttcatcttctcagttccatatccgtcgcgcgtcctcggatcttcgccgctgattttaatcttcgatcgcggtggcgacgtcgtcggcctgttacgtcaatttctaacttccgtctcagacttccttcgaaaacttcgcttcactgtctctgttcttcgtcttccgcttcatctcctatgtcgctcgaagtctccagtcccaattctcaggtttaccctcttaattttcgagctagaaggtt

SEQ ID NO: 7685 - DNA, 605 bp, Arabidopsis thaliana columbia
  unsure (1)..(605): unsure at all n locations
cacatcaaattttcagacaataattcttatttatctaatatcaaccgttggattaaatgatcagatactgacgtgtccacgtatactgccacgtcacctataatttcccactcttttcctttttttgggaacttccttcattcacaaacgagttatcatttcgtagccaattaagtttcatcatcatatttaatcaccaaaaatataattcgcatcgtcgttctgttctcttgagtcactaatggaccaaagatcattagaagctgctgctaaatctggaaacatcgatctactatacgaactaatccatgaagatccatacgttcttgataaaaccgaccacgtgcccttcgttaatactcctctccatgtggcagccgtcaatggaaaaacagagtttgccatggaaatgatgaacttgaaaccatcttttgctcggaaacttaacgccgacggacttacaccgttacacctcgccagtggaacacgggtcacttcctggttagtacttgaagtagttaaggttgatcaagtcttgttcgtattaaagggagacatggtacgtacantcacttattttgttgaaccttaattatgttcttagt

SEQ ID NO: 7686 - DNA, 537 bp, Arabidopsis thaliana columbia
caaataatgaaatgaatacgtcaccaagcaattagtttttttatgcacgtgtagaagttaagaggtgaaatgaattttgatataccaggattaatgtgatagttactagagcgagtaatataagatgccacctaattgtatttaaactgccagtacatgcatccagagatatcacaaaatataaatgatactcaacagacctctttggcaattggcacagacagatcaaaaggaatcgggccaccaccaccctttccgctcagcagaggattaaaatatgcagttgtcaaagttatggatttttgatcaggatgtggcttgagctgaagaaaaagaaggccaaaaagcaagaaaactgctgggatgatgaattggaatgccactgttttgcggtctctgcaagcagatctcgctctttttatgaacaatgctttgcaatgccgccaaaacattgaccttgagataatggaacaaccacaacattgaatgctaataaatccaatgagagccaaactgcagcaacaattaatctgaaag

SEQ ID NO: 7687 - DNA, 602 bp, Arabidopsis thaliana columbia
cctcaccaatctacagctacttaagaagattcgggtgcattgcgtttgttcacactgacgatggaaagctcaatccgagagctaagaaaggaatactagtaggatatcctattggtgttaagggttacaagatttggttgttagaagagaagaagtgtgtggtgagcagaaatgtgatttttcaagaaaatgcatcttacaaggacatgatgcagagtaaagatgctgagaaagatgaaaacgaggcaccaccaagctcttatttggatttggatcttgatcatgaagaagttatcacctcaggtggagatgatccgattgtcgaagctcagtctccattcaatccaagtccggcaaccactcaaacctacagtgaaggagttaactcagaaactgatataattcagtcaccactgagttatcaactggtgagagatcgagatagaagaacaatcagagctccagtgaggtttgatgatgaagactatctcgctgaagctctctatactacagaagacagtggagaaatagaacctgcagattacagtgaagctaaaagaagcatgaattggaataagtggaacattgctatgaatgaagaa

SEQ ID NO: 7688 - DNA, 592 bp, Arabidopsis thaliana columbia
ccatgtcctgttgcacaagttttatgtcagatagccatcagtcaaaaataagttccaaggatataagatataacttacatgtgcttcctggatcttgattaaattgccacttgccttggcctctgacaactttcccttccagaccttgttaagtgttttgtattcatacctcctatctcgaaagctataattacaccaataaaaatttgaaaaaaaacaaaaaacagcaatgtggaaaagtaattaggacttggctaaagtttcaccattattacttgtatactccctcaaaagagattgcttcaaaaagactaaacgtccaaacagaaagtcaatcaagaataagattggtaataacaaaagccacacacctgcgcacagtgtccacatagaacgggttttctctcatgcatatcccagcctcgcgaacttcagtgattggcttgtcaagtactcggctatatgcctgccaaaagcagaatgacacttaccgttatacattgacactgtacggagaatattattatgaaagggagagagaagagtacattttgacagtatttttcagtcgttcctttaatttggattgttg

SEQ ID NO: 7689 - DNA, 592 bp, Arabidopsis thaliana columbia
  unsure (1)..(592): unsure at all n locations
tagtaacgagtgaggaaagtcgactctattaagaggagcatggccaagcagaatctttcttcactcgaatcttcatcagtgtccctcggaatgtgaagaagcacatccgttgtgtgtctctgttttgtcttcgcccaactgtagcctgtatcttcatcattctcctcttcattctcctcacgttcctcagaatctggagaacacttaaatctggtaaccatatgaaattttctaatagagaatctcgtaggttgtcctccgaaatgaaaccaaagctccttttctttcagtgtagtcaagatcctactaaatacacaatgtagcaattttccagacagagtaaactttcttgttgttgtcttcaaaactggtcccagatatgagtcttggatagaataattatatgagtcttggatagaataattaaccagtgcaaggtcaagcacactgtaggaagaaatctaacatataacaatgtagaccagaatcataacccactataaatatctaacacattctcaaatttacttccataaaagctcaaaggatactgaattttcgtaaaactgatcacaaagactanaatgagaac

SEQ ID NO: 7690 - DNA, 480 bp, Arabidopsis thaliana columbia
tgtttgatttctgggagtgtgactgattcggtgacgccgagaagatcgtagaaggataagtcttccgattgttttactggatcgtcgtgggttaatcgagattggatccgggtggaggagaatcgggttcgggttgggtaagagatagttgttgggattgaagttggttgaagagaggagattggttgttgtttgtagaagaatgggtggtgattggttgagagaattgatgagcttttgtaacatttcattgttttgaattttagggtttgtttattttggggatttgagttttgtggattttaatatgagaattggtaatgtgtaatgtgtagtttgggaatggggagagagggagggaggtagatgaaacagttgagagtaatatgtggattttgaagggtatttatgtcattttagtttaatggaaagttgtcatcgtttgcgactggaagctttttgacggcgcaagaagatatg

SEQ ID NO: 7691 - DNA, 498 bp, Arabidopsis thaliana columbia
tcaaataacaccacacaccaatgcaataaaatatcatttcctatagtttatcgctccctttataaacaaaatacaagcttgcaagacctattgttccttaattggttttaacaactggacttagatcttccttctcgaatcctttgccaacaatgtcaatcaactcctcttcctctctcacaccattaaccctaccattccttacctggtcgaccaaaggaccatacgaccagctacatatcacgtagtagatcacattgatgaagctcattatcgcgagtacccaatagtaatagttgtagtgacccttgttaatgttgtctgaaacccagctctctttaccatttctagaagttagttcagtagacgcattgaggaccacgcctgccaatagactagccacagccattcctaaaccgaagagagaagccgcgatgctagacatacttttaggaaactcggtgtagaaaaactcagtctgtcctattgcggtaagag

SEQ ID NO: 7692 - DNA, 556 bp, Arabidopsis thaliana columbia
cctgagcttcttttaccattctctggaggttctttagcattactttggttttgaattgcagataagaacggttatggtggcacccggtggagaagcattaggtggtgtagttggtgcattccgtcacatgattcaaactgaaggtttcttttccctatacaaaggtcttgtaccttcacttgttagtatggctccatcgggagctgtgttctacggtgtctatgatattttaaaatcagcttaccttcatacaccggaaggtaagaaacggcttgaacacatgaagcaagaaggtgaagaacttaatgctttcgatcaactcgagcttggtcccatgagaactttgttatatggagcaatcgcaggggcttgctcagaagcagcaacatatccgtttgaagttgtgagaaggcgtttacaaatgcagtcacatgctaaaaggttaagcgcagtggctacttgtgtgaagatcattgaacaaggaggtgtcctgctctatatgctggcttgattccagcttattgcaggtttgattccttaatactagtcataaatt

SEQ ID NO: 7693 - DNA, 495 bp, Arabidopsis thaliana columbia
tgaaactgacctatacagaaccttcactatatatctatgagcatgtaacacttctaatatagttcacttcaggcaaggtaattctgctgaagaattgagcaacaataactcacggagctactcggaaaaactctttatctatcattctttgctattgtcataataactaacaaggatgacacaaagttgaatgcagaagaaaccttcgagcagattatatgcttggacacatgatgatatcaaaagaagattgagaaaaacagaaacttttacctgttcttagcaatgtctaagaactcatcgggatatctacgacgaaactgctgttgccaattgaatctgccatagagcaacaaaatcaagaccaaaacgtgatcaaaatcaaaatgaaccagagagtaaaatcaaaatttcggtgctcaatgactcaaatcttattcattccgcaacataaaaaagcagtctttgaatcacacaactatacttttcccccat

SEQ ID NO: 7694 - DNA, 570 bp, Arabidopsis thaliana columbia
gcaaaacttctgaatcacttgcttcctaatagaagaaagaaaattgcagcttgattataacaagcctacaaaatcagccaactatgtaatgaaggcgtgataaagaatctctaccatatgtatatactgaaactgaatcgcaatatctgaagaactagctttctggccacgaacaagagcctgaaacttcacaattccccatatacatgaatatgtagcaatggcttgtcttctcaccaagtgaccacggataactgcctgcagcctgatgatacctttaagagttcgaaatgcactacgtgccttcagtagatgaataaaaaaacatcattaacactaccaactctattcacgtagatttatctttgttatggcaaagaataagtacctgatgagctctgaaggtagcttgaaccttaattgcagcttgttcaagctcgacttctcccaagtcattccttgactcgagattatccttggactcatcaccattgattggagaaacccattttgagcagtagaagcctggactggttgtaatgaaccaccggagatcaactgttaagtttg

SEQ ID NO: 7695 - DNA, 662 bp, Arabidopsis thaliana columbia
tccctcaataattcagtgagtgagagagaatcaagaaaatggtcacctgaaatgagaagggttttgaggccactggttcgtgagctttcggagctcagtatcttccggctccggtgacgccggaacgatcgtggaatcttgtaagaagaaatcgaaaatttccttccaatctctaacgttcttagtgtgttcttcgtcgtgataacccataggattcacttcgtctcttttcactttcctcttctcctccgtcgttagattgaaaaactcagcagctgtcttctctacacgatgccttaaagctgaaggcaagccatggttgatcacttgaaaaaatccccatctcttgcatgcctctgcaatctccttggcgatcgcagtcttgtcatgatgagtatcttcgagagaagagaggtcgatggtcgggatctcgtcggagaaaatgaaatcaccggagtttgtgaggtgagtgttgggtctgtgttctggagcttggataaaagcttcgtcgagttctcccatggcagttttggcagtgattcttgtggttattttttagagtaggctttggagatatcgatgattagtggtgcggttggtgttgctttataggataatgccacgtaagtagagtagaatttaatttctcctgaaataaaatg

SEQ ID NO: 7696 - DNA, 498 bp, Arabidopsis thaliana
cgccagtgtccagtgtgctctaaagtatcgatatgcttcggcaattgcgtgtgccgcagatggagatgaaatgccaataaaaaagcctgagttcgatgagggacgaactcaggctagtgttcagttttacagtaacacgccgcagcgagttgactgattagaactggtagactaagcccacagcaacgatatcatcggtagcgatgccgtttgcttcgtagaagtcatcgtcgttgtccagcaggttgattttgtaatcaacataggtggacatgtttttgttgaagtagtaggtcgcaccaatatcaacgtatttaaccagatctttattggtgtaacgtgggtcgccgttgccgtcatgagcccaaccgcctaaatccttacctttagattgcaggtaagcgatggacgggcgcaggcaagagtcgaactgatactgagcaacaacttcaaagttttgggtcttgttagcgatggctgatcttgattcaccattat

SEQ ID NO: 7697 - DNA, 596 bp, Arabidopsis thaliana
tatcagtgactgattcaatgcaatcattcctttttctcttcctcccagattctttagcattctcgaaatcatttttgaagtttttcagggtttgtgaaacttcacgacctgttagaattcttgcctttctcccatgttctatctttccgtcaaaccaagccttcttgtttctataactatgtgttggtgccaacccttttctatgacacataaacacatgctttctgctatatttcaaccacatactatttgtgccttttccacatagaggacaacccattttacctttaactttgcatccagcaaggtttccataggcgggaaagtcactgatggtccataaaagcattgcctttagagtgaatgtagtcttactgaaggcatcatatgttaactcacccttcttccacagatggttaagatcttcaataaggggttccaagtacacatcaatactatttccaggttgttgtggtccagggataagcaggctaagcattatgttctccttcttcatacataggtcaggcggcaaattgtagtttactaacagaacatgccagcaactatatctagtattcttcatgttgaatgga

SEQ ID NO: 7698 - DNA, 861 bp, Arabidopsis thaliana columbia
gctacatcaggtctcttagggtgagaaaaaatttgacctcgaattagcattgtcatcctgaaccactaaaggaatctcctcatgaaacaaaccagcaacatcgtggagagagttaggaaaagctaaagctgcatttgaagaagatgacatatccatggtcgtcggcggagaacttccgtatccgtctcttgagtagcagccaaaaattgtgatcgagtacaatacttaggaggtttgtgttccccgacctttttggtagcctggtccgcaactttttcacagaaactcttgtttgaagtctcttggaaaggcaataatgggatgcgtttttcttcaaatgtgaagctgtaagtgttgacaaagccatcatgcattctgcgtctatcatattgccatggactacccaaaaagatgacacgcatccatgggaatgacatcacaccaaagtatatccttgtaattttctccctatgaaaacaatacacggcatcacttagaaatacgcttatctgttttcgattgtaaccacgccaagcgatatggaactggatgcggttcaatagacaaggcgaatttataaacagtctcttctgaaatggcattggtacaactaccaaaatcgataacgaggcgaaaaacttttccacgtattgtgcaagtcgagcaaagaatgtccgtacgcagccaaggctcttcgagactattgggcatcaagaagcttctacgtgtaatcaacctgcatatccttttcctcatcctctacagcctcatcgtatatcgggtcatctctgatgaagagccctcatctcccttgatgaggacaattagattttctatgccctttttctccacatccaaaac

SEQ ID NO: 7699 - DNA, 587 bp, Arabidopsis thaliana columbia
cctctccatcatttgatgaagcgggaatataatgtgcagccttctctatggagcagaagatccttcaattgctggaatggtcctagacagtgcattttcaaacttatttgatctgatgatggaactagtggatgtctacaaaatccgacttccgaaattcacagtatgttctcctgctctctttaacctcaactggtattcgtcatagcaatatacacctgaaactggacactgagtttatataacacgaagaatgaaattaatttgattgaacctgctaataaaaatggaaatactaggaatgaggctcatatttccacatggctaaaagggtccatattagtctccttatccattacaatcaatggtagcgtattctagacattttcttatgcttgcaatgaaactttaactcctttttcaattaggttaaagtggctgtgcagtacatgcggcgtataattcagaaaaaggcgaagtttaatattatggatctcaattgtgttaaggtgttttataagcacctctccctattctttcttgtcatttactccaagtaaggtagtatgttaccattttagtgaagt

SEQ ID NO: 7700 - DNA, 535 bp, Arabidopsis thaliana
gtctagtaacctgcgtgctctaaagaatatgttgatgttggtgctacctactacttcaacaaaaacatgtccacctacgttgactacaaaatcaacctgctggacgacaaccagttcactcgtgacgctggcatcaacactgataacatcgtagctctgggtctggtttaccagttctaatctcgattgatatcgaacaaagggcctgcgggcattttttcattgttttcagcgtacaaactcagttttttggtgtactcttgcgaccgttcgcatgaggataatcacgtatggaaataagctttacccgcgtggcactgctggctgccgcgctcttctttgttggttgcgatcaaaaaccacaacccgccaaaacccacgctactgaagttaccgttcttgaaggcaaaactatgggtaccttctggcgtgccagcatcccgggcattgacgccaaacgcagcgccgaacttaaagaaaagattcagacccaactggacgccgacgatcagctgctttcgacctataaaaaaga

SEQ ID NO: 7701 - DNA, 528 bp, Arabidopsis thaliana columbia
aaaaaaaaaaaaaaaaaaatgttgtttaaggcttagatgaaatatttatggtaagtcaaattcatatcattttctaaagagaaaaccttaataatgtagctagctaggtccagtgtacacataagttgttccctgaattccttttaatgatttgatctcttttgtatttgtaaaattattttgagaatgtgatgttatataacatataccacataagatcaaattatttactttttcaacatgtacatataaaatgaagaggagcatgaggagtcatctggcgacgaaacaagaagtgtgtgagagcaaagcgttcgactagcatcttttttgtttggaatctcatacggtgtgaccaataatggtatttcttgaatgtttccatgtaacatttttttcagttatatcactgtaacagtgtaattcctactgcaggcgttatattcacaggctatccggtaatcggaagccaagaccgtataatgtcgtctggtgcgtgtctagacagtcatcagaacggattgatta

SEQ ID NO: 7702 - DNA, 999 bp, Arabidopsis thaliana
ttccaatatccaacacatacactacaaaagcataatacattccacaacacatacactacaatactcttatctaacaaaacttatatagccagctatcgtgaaatgaacaacacaattaaacaatctgaactacaaatttcacattaacatcactgaccatgaacatcaaagaatcccagttttcaaaatgaaacgaaactcaagccatagagagagagaacataccacaatcttctcattgagagtgtcccgttcctcaaaagtcttgtcaagagtaattttaccgagctcactacgcattgtagtctgagccaactgcataacagcatagatcggattctcaacgccataagaagccaacttaggatccacaatctgcaaaaaaatttcaagacaatgacatatcaacaaaagcaaacaggaaactgtatacaaaactggaatctgaaacgaagataataaccttaacgtagagaacaccatcgatgtggatgctaacgttatcctttgtaatcgcagtctgattaccaataggaatcgcttcttcctttagagaatgaacataagcgatacgatccacaaacggaacaaggaagtgaatccccgccggcaaagtcgtgtggaatttaccaaaccgctcaatcacacaagctttcctctccggcacgattcggattccccagttagacggcggattaatgtggtagctacaaaaaaataatttcagcgaagatccgtttaagcctaaccgatcaaatccataaggtttctactaaaaaaatctgaagtcaaatcgaaatttcaaaatgcgtttaacgaaaactaaaatacctgttgaaatcactgctgggagatgagaagctacgggcgccgaaaagttgttgcggaggagtaccggcggaggaggattggtggagaagcctggaagtgaaggattttgacggcgaaggtttattgatttggtagctacaaaacaaaacgaaatcaatcgtaagcttc

SEQ ID NO: 7703 - DNA, 568 bp, Arabidopsis thaliana columbia
ccctatagaccttttgaccaaacaaactagctcttgaggcaattgatcgaactgaactaaattaaattcatataatttgcagatggagggaaagggacgaggctacctcttaacatactacagtaattaatatctaactcataaagaaatgggtgaatgtagaagataaaactgacctattcgagcactgagttccagttcttccttttaatacatttgcaacagattgccagtctttctccccaaataactctactgcagtacgaagttggtcatcttcctctgcagtccattcttttttcaatatgcttggattcaagcttctctgatatcgagccaaacattgaaatggggtcctatttgtccctagtgacaccgcgatatcaacccagtctgtaagactcgtttgttcgatagttcggagtaggtttttgtctctgctgcagtcacggaccgtggttaatcaatggatcttccgagctcatccacctacaatgaggcacaggataagaaaatccactaatatatcaaaataagagagtgatggtatatgtacacccatagatga

SEQ ID NO: 7704 - DNA, 483 bp, Arabidopsis thaliana columbia
tcttatcaattatatttttcaaagaaacccaacatcactagctaaaacatcaaactgtaagttagattgaaatatatataagactaaagagtaatcacctgaacgatggcgatatggaggagatcacctcgaataccaattgctattgacgtggctgcgatcacggctggtccagtcaagaaccttacggccatcgcaaaccctgctactgattttccgcacgcaataatctttggttgcaatgccataaatagacctatatgtatcaataattagcaaaagagaaagcaccaaagactataactaaatatatatatgaagggaactataccaagactaaacatagccattccaagaccagcatcagataatatcgaaatcgatccacgcattatcgttggcatctttatattccacctgtcccataaaatgatcgacaagatcaagcgattgcctagatatattgttatgtgatatgattgt

SEQ ID NO: 7705 - DNA, 456 bp, Arabidopsis thaliana columbia
ccaacaagtagcttctatctttgcatcagccttttatggtatctttaacctcttctctggatttttcatccctagacccaaaattccaaagtggtgggtttggtattactggatctgccctgttgcttggaccatatacggtttgatcacttctcaatacggtgacgttgagactcccatcgctctccttggtggtgcacctggcctcactgttaaacagtacattaaagatcaatatggttttgaatcagactacatgggacctgtggccggagtactagttggcttcactgtcttttttgccttcatcttcgcattttgcatcaagactctcaacttccagtctagataaccactatacactctgttttcttgtgaaacatttcttgcaataaagctttgcttcctctttttttcttttcttctcttaatgtgagtgtatttttgttgtaatgt

SEQ ID NO: 7706 - DNA, 1111 bp, Arabidopsis thaliana
acaaaaaaaaaaaaacaagaggaaaatggattgggaaagaaaagaagatgaccttaacgtagagaacaccatcgatgtggatactaacgttgtctttagtaatcgcagtctgattcggaatcgggatagcttcttccttgagagaatgaacataagcaatacgatccacgaacggaatgaggaaatgaatccccgacggcaacgtcgtagcgtatttaccgaatcgctcaatcacaaacgccttcctctccggaactatccggattccccaattcgtcggcggcgtcaattgaaaactacaacgaacatccataaatcaatcctaaggttctctactctaatctaaaaccaaatgcttcaaaaacgaaatcgtaaggtgagaaacataaatgattcaaaaatcaatcctaaggttctctactctactctaatctaaaaccaaatcgtcaattgaaaactacaacgaacatccataaatcaatcctaaggttctctactctaatctaaaaccaaatgcttcaaaaacgaaatcgtaaggtgaaaaacctgttggaaggatagccggcggaagtgaactggcgaacggttgaagcggcggcggagaaaatcggaggtggagaggtaacggcagattgacggaggtacgaaacggacctcaaggcggagtaaccgacggagcttttacgaacgaggtggttcatcttcgtgggagaatcagaaaaatgatatgtgaagaaggaaaaaccccaaaacaaaacctcttataatgcgtagtcaatattcaggtactgtttcttcgccggatcacgaagatttcacgcaatatgcgtggagaggaggcaaatattttattgggctttagtggatagtttggtacctgctgttattattgggcttatctctagcccattcagacgcctgaaatatccatctgttattaatttattattcattgttttggttgttattttaaagagttttttttagttgaatccaaaattcattgtgaatcgagaaattgcaagaaaataatggctccgattggtaaccacttttgaggaaaacaatgaataggaaagtcgtgttcctttttgttcctcggtatttttta

SEQ ID NO: 7707 - DNA, 1014 bp, Arabidopsis thaliana
cgcaacaaacggaaacaataatttttaatctatactaaaaaaattattaaaaatatttccataactaccaaaaaatcttctttggccgccaaattccttcactgactaatttccgaccgcaacttatttctttaaccaatttcgttttcagattaggtaatacgtccaaaagtgacattttaacgactatatatattcaaaacttatctatcataaacaaacaaaaaaacaccaaaaaaaaatcagtattacgtcatgcttctctaaccaaatatcttgtatatatttctcaacaattttctttattacaaattcaaagaacgaaaaacaaaagatgacaaagaaatgtatgtattattggatcatttaagtagttttgtacctttctatagttatttaccttaacaaaataaaactccacaaaagcacaaacatagagaacccaaagatcatacaaattgtgtcttgagcttcttctctcctctctttattctctctccattgtatcttcattcgcacgtattcttcatacctgtctttagctcttctctcttcatcatctttacacgatctctttccatctaacaacccttgtaaaattaccaaactatccctacctttcatacattttccttctatgtcctctacttgtagcctcacgtccctcacgtgtatttctcctcccacttcctcatccacctctttccacgcttccgctgacccgcatgacacaaccgccgccacttccgccgcctccgccgtcactaccgttgaaaaccgtatttctaaatcccccgttagccagttccgccgcgccgacaccgcctttcgactagatatattcgccgctcgtttcttgatcggatcgattagtatccaattaagtttcatgctctcttccatatctttcacccacgcttcgtagtcctccaccggatatcgaatccgggttctggaccgactctttcgggtcgagtatatcgacccaaacggtgatgacaagaccatcctgat

SEQ ID NO: 7708 - DNA, 603 bp, Arabidopsis thaliana
tcaaatactgcaactgactgcagttagtcagtgcaccaagaaaatcaagatcaccagaagagtagtttcccagagagttattattaaggcctagcagtaatagattctgaagtcttccgaaactcaatggtatctttccagtaagatggttagacggaatatcaagttgtcgaagacttgagatattggaaagtgtctctggaatggtacccgtgaaactatttatccccatatatagtatttgaaggttagggagaagagaaccaaagtcaggtctaagggtgccagagaaactgttgccggtaatggacaggaatattagtgaagacaggttgtaaattggaggagggaaaaccccattaaacttgtttaatgctattcggaaaaagatcatctgtttcagtctggctatatcccagggatctctccttctatttggttatatataaaatcgagcatctggagtgatgtcaggtttccaatgaggcaggaaacttccctgttagattgtttctccaagagagagaaggacaagccttagacagcgaaccaactccaaaggcacgcattgttcaagatgatttgatgataaacaagtgttgc

SEQ ID NO: 7709 - DNA, 562 bp, Arabidopsis thaliana columbia
attctctctctatatacaagtaaagacatcctcgtatacacatattaacattctcatcaacatttctttcaagttctaacaaaagtttggttttttttttttctttcttattatcacttcttcactctctttctccatataatgaagggacgaatgttttgcgcttcgaagcatcgacagccatatgttcaagcatggaccacgttcacaaatcaaccaccaccgacgaagatgaacgaaacagcggccgagctatagaccgccacaacccgatcattaaagatggccgaagatcattcgctgacgacttcattaaactaccaacttccgcagaagacggagagatgagtaacaaaaagctagagatctataaaggcaggagaagcatcactggcaggagaagcacgggcggtggcggtggaggcggacagcggcgttgttgaagctgatcactaatgacattggcttagcaaggaagagtttcagctgtgttgcgaacccgcatgtgacttaatcaaaaccctgtgggttctacaaggtatcttttgggatcggacccgga

SEQ ID NO: 7710 - DNA, 612 bp, Arabidopsis thaliana columbia
gatcatacataatacacattttacagtacgttttatccacacatagttaccttttctctcaaggcagtaacttctccagcaaattcccaaagaagaaactggttttggcccatcctcctcctgttccggcttgaccttcttctttccattttctgctcggaactttattcttgaagtcaatcatcatactgtgtccaatctctccgcgtaacgcctcaatcgtcttcacatccactggattccctgaagcatctttcacatagaaaacgttgacggcttgttctcctactgttgtcacaccagctctcgacactgatagcccgtgctctctcagaatccttgtcacttccgacagtaatccaactctgtcctttgcgcagagctccaaactccaaccctataatcaaatttcagacaataacttaaggtattgttgcttctaacgcaagaaacatacaccaacaaaatgtgtttacttacctcgctgactcgtctatggattgcagcttccagacatttgacaactctctctttctctccttctgtgtcaagagtgcaaccgtctttgtgtctgatgaaatactcctgagaagcatgagaccgcttgatgaa

SEQ ID NO: 7711 - DNA, 386 bp, Arabidopsis thaliana columbia
tatccagttacagcaattgacataggatgctggaaagaatacaagataattgtgtttattgtatatttttaaaataaagccacaatataattaatcatctttaaaaaattgtttccgaaactattctatggaaaactgaattttttatatttttaaaaatgtaaaccaaaagatttgtgtggaattgcaaaattatataaatcaattaattcttttttttttctctacacatatctgtttttaatacataccttcgaagcctttgagacaacggcggacttttctagcacatccttcacagtgcatgtaaaccttaagaacaacctcttgcggcggaggaggcggtgctggagcctcaggcgccgccggagcagaatcttctttgg

SEQ ID NO: 7712 - DNA, 606 bp, Arabidopsis thaliana columbia
caatgatattttttcttttacaattgctaatatttagtatgcgtagaataatatcattttgttatgcaaaaacccaactatatatccactttttggcataatgaacttttacttgtaattaggcgaaaatgcaatcctgtgtttttacgttttttaatgcaattatgcaaattttcttaattggcaaatttcatgcataatcgcattagaaaacgtctaattatacgtgttatcaatgaaaagtgtgttaagtttatttttcttggatgttgttgtctaacttctattgcggtttattttttaggttccggtgagggttgatgggggtttattgtttgaactcttaggacaatcaatgggtgatccagtaatcggtgaggatgatgtaccgttgttttcgctcttggcaagcaaaaagctttttggtatctgtgatgcacataaaaggaaatgtatcaaagagcaatgttctcggtatcactgaagtagaggttagttcaaaaagtgtcaaaatactctacttgataagattctttatagatacttaaataacacaagcctacaatatggatactaactagcggtaaaaaaaatcctcataggagt

SEQ ID NO: 7713 - DNA, 496 bp, Arabidopsis thaliana columbia
tggttagtctagacttaacaatttctcgaacaaccatttcagatcatagagcctttcacagctcattatgtgtttgcactcggaatagctagattcctggcatgcgctcattggattatccaggtaaagatcctttcttaatccactaattaagctttcatgaataagctcaagagactaaatggtctgaagatgtaggtcgttgagactcgtggacattacctatggctactcggggctggttacttctggtttccggtggctctactagccgagatcgttcaaactttcatcctcgccgacttttgctactactatgtcaaaaggtaatcgttttacgcataaatgatcaacttcgttgtaacaatttggaggactagacaatgttattgacctgtttttatcacttctttcagtgttatggagggtcagcttgtactgaagatgccggtttaagatcatctagtataaaatgaccaataaattttgcttgttt

SEQ ID NO: 7714 - DNA, 493 bp, Arabidopsis thaliana
ctcgcaacctcaaactccactcggttcatcttcatcatcatcatcaatgcttcgtcgcccaccaaaacatgccattcctgcggcgttttatccgacgaagaagagacaatggagtcgttgccgcgtcttttgctgctgcgtctgcatcaccgtcgccattgtcattctcctccttatcctcaccgtctccgttttctttctttattacagcccgagactccccgtcgtacgtctctcctctttccgcgtcacatatttcaacttttccggtgggaaagccggcgacggtttatcgcagttgacggcggaggctacagcgaggcttgatttcagaaaccctaacgggaagttacgttactattacggtaacgttgacgtggcggtgagtgtaggagaagatgaattcgaaacgagtctcgggtcaaccgaaagtcaaaggatttgtggagaagccagggaatcggacggttgtgattgttccgataaaagtgaa

SEQ ID NO: 7715 - DNA, 603 bp, Arabidopsis thaliana columbia
tttcgattctgaatccattgtttacgaatctctcatctaaagctacattcttcgttaaatcgtttttaatcgactcgctcactcgtgagttgactcgtcagctgtttccataattgcttattgaatttttatacgatgatgtttcaatatggaagaaactagaggaatttctgatccagagaatgggagttcgagttacggcggtaaaccgccgaatccactctccttctcttcttcctccgccgctgctgccgtttacaggcaaaccttcgacggcgagcgatcgttggcgccgtgtaataagaggtcactggttcgacactcatctctcgtaagattcgtttctcttcaacttgatttgtggatcagttaggtttattttgtgtattgaatgatcaatttaagttgaggttttgtaattattgctctgcttttggatttgatcattattggtttcctaatgtgtataattaaggtagaaagtttctgtttttaatgtgtcattatgagatgtttgaggttttctgattgattttcattttggtaggtgaagacaatggtgtcagatatatctgttgagaatgagtttctatagagaagaca

SEQ ID NO: 7716 - DNA, 525 bp, Arabidopsis thaliana
  unsure (1)..(525): unsure at all n locations
caagtgcggatgcaccgagaactcgacggccaacggagtagaagctgtgtgggacccatgtccgtcgggatctcttggagacaagaagtctttgtttgctgtagcgttgaacgctccgtaatatctttcgtaccctttcacgtaatacctcgctccaataattttcctgtaatttagagaaaacatccattaagttataacttataaccggttcatggaataatcaatcattcatacaatggttaactacaacaataattattttgtgtcaaatccaaactactttaatttcttataatttattgagaaaaacatcatgacacaccgaaattagataagtatccaactttaatcaaatcgcaatattaaattcagtagatattacgaactttttgtgtccttataatgtatttagcatgaaacaaaaataacgaatatatgagcaattatttattaatgtgataattagtgttttatacgtttatatcattgaattctttatttatgtcttcanacatttgagat

SEQ ID NO: 7717 - DNA, 778 bp, Arabidopsis thaliana
tcatggaacttcttggaatgagtcttggtatcaaaagggagcattttagagaattttttgaagacaatgaatcgatatttagattaaattactatccaaaatgcaagcaaccagatcttgtactaggtacggggcctcactgcgacccaacctctctaactatacttcaacaagatcaagtcagtggtcttcaagtttttgtggacaaccagtggcaatcaatccctcctatacctcaagcattggtggtgaacattggcgacactttaatggtaactttttttttgtttttctttcgtttaagatccagcatggatgagcgcaatttgtttttttaaaacacgtttgaaaattggagtcccaaatttcccttaattttattttacaaaacattcttttgatatacatctggtagaccaccttcaaatagtttgagacatcgagacagatttaagaagtttgatcaatgcacctctcgtttgacaaaaaaaaagaagatcaatgcacctctctaagtagtatgtgagacttgagaactaataatatagaagacgcctaattttttaaaattcttcttgggggatttgaccataggctctaacgaatggaatatacaagagttgcttgcatcgggcggtggtgaacggcgagacgacaaggaagacacttgcattcttcctatgtccgaaagtggacaaagtggtgaagcaccaagtgaattagaaggtgagagagcgtatcccgattttacatggtctatgttcttgagttacaatga

SEQ ID NO: 7718 - DNA, 615 bp, Arabidopsis thaliana columbia
  unsure (1)..(615): unsure at all n locations
cgagtttctcaagtacctcgaccagttcggtaagaccaaagtccacgtggcggcttgtccttacttcggccatcagcaacctccgtctccttgctcatgccctctcaagcaagcttggggatctctcgatgctttgatcggacggttgagagctgcctacgaggagaacggtggacggccggattctaacccgttcgccgcacgtgcggttcggatttacttgagggaagtcagagagagtcaggcaaaggctcgtgggattccttacgagaaaaagaaacggaaacggccgccaactgtcaccaccgttagagttgacgtcgcttcttcgagacaaagtgacggagacccttgtaacgtcggtgctccatctgttgccgaggccgtaccgccttagatcgaattatatataatattatagttttcttgattaatgatatatatatacttatctctatgtatgtatggaactcacttcatcttttgttccttagtacctaattattaaattttgttccttttgagttgatctgaaactatgctaagacgctacaacggaggttttttgtntcctgtggactcggatgcataagtcttgaattttgaatcttatat

SEQ ID NO: 7719 - DNA, 597 bp, Arabidopsis thaliana
cgccagtgtgctgtaaagcagataggtcgtctgtcgctgacacctgcgctgggcgttctctattatgacgagaatttcagtgactattactatggcatttcagagagtgagtcccgtcgtagcggtctggcaagttattccgcgcaggatgcctgggtgccctatgtcagcctgacggcaaaatacccgataggagagcacgtcgtattgatggcgagcgcaggatacagcgagctgccggaagagattaccgacagcccgatgattgatcgtaatgagagttttacctttgtcaccggggtgagctggcgtttttaattcaccggtggatgtcggtgcggctggtgctccgtcgtaatgccacaaaggttgttgctctggattgctctgttcataccgggaacctggcgtctgaatcaggatcttatggctgaacaatcccttgccttcaaatgtcgtaaatggcgcatcggcgggcagcaacaggttatgcagtgactcgacgttgtcggcctgctccatgcaataaggtttaatgacgttggctatttccggcagatttttcagaaacatactggtttaacgccagcagcgtgg

SEQ ID NO: 7720 - DNA, 469 bp, Arabidopsis thaliana columbia
atcttgcgtagactgtgtccaaaccgcaacaaccgagatcgcctcaaattgtactcttaacaaaagagccgtcatatactacgacgagtgtatggttcgatactcaaatgtttccttctcctctgaattggaaatcgtaccaagcatcactatttactctcttcgctctgctccaaacccgactcggttcaatcaaacacttactgaaaaattcagcgaattgatattcaacgtatcttcgtcctctttggttccatatttcgtggaggatcaagaacgtgtgacacaatcagagggttcttatgatttagacacaatggttcagtgtagtcctgatcttgatatattcaactgcaccgtttgtcttcgagttgcgttctttagaatttcaacttgttgcggtttgccaagttacgccaagatctttactcctaaatgtcttttgaggtttcaaacctctgttttgtta

SEQ ID NO: 7721 - DNA, 508 bp, Arabidopsis thaliana columbia
gcatgaagaagacattcatcttctctgtattttgtgtttctcacattaactactttcatacacattaagaaccatcgattaagcttgtgtagatcactatttacctgaatcaagcccatgttcccgctggttcagcatttataacaagccatgagtccatggctcattcatatttagtgaccagtaagtgaaaatgctgatgaatttatagatcagttcaatgaagcagaacaaatttacttttaaagcatactctgcaactcatggagaattaggaggttttaaaaccgatccatatattggccggtctacattattataatatcaagtataaatgaaatcaaatttgaagaaaagaaaactctcatttggttgcttgttaggaatatgcttttagttgacgaagcgagtgttaactctaacttgtccagtctctttgactccaaagtttccaagttttaccatggaagctgcaaactctctgaagaaagctttttggtcttgagca

SEQ ID NO: 7722 - DNA, 815 bp, Arabidopsis thaliana
caaattcttcctaaaatttgctttgctagatatagaatcattacgagtttccactagtgtctacattcgaattctcgagactacatgtatgctagtaagtagtatattaaacaatgttaaaatagagagaaaatttgagattggctactttgaatttttgggattagtcaaaattaacttagtttattaattaagagttggtgcgaaccaaaataaaacaaatagagttaacgtaatccaattttcgactacactcaatcaaacaaagtaacaaaaccaaagtctcttgctctgcacaaaacaagtaacatgtttttcatttatttaacgttgtactgtataattactagacatgacaaagactaggcctaacaagacaaccagatccagggcctattctcttcaattttgggcccagccaataaatatagttttaaccaattagttaagaaactggatgatctgtgacctgtaatttcacttctaaaatatcaaataacacaaaacaaagaaaccgaaggttttagaaatagagaaactatcttatcttgcactaaagacaggtggtgcatcagctttaggttgtgctctgcgtgtgtatttcagaagtaacccttccatagatagtctaggaacatgaagatccctgcaaataacacaaaaacccaaatcaattcataaatggaataacacaacttcttatggaatctgtcaacacaagatttgttcaattaccttaggtaaggctctaagtctttccattcccattttgatctatgtttaaagagtactgaaaacctttcttctggagttga

SEQ ID NO: 7723 - DNA, 452 bp, Arabidopsis thaliana columbia
ccccccccgccccccacgcctctcttacccagcccccagattatctccccttgcctccttcaacctttgtcccacagaaactgacaactttagatacttgactgtaccacaatttcgattttcgtttttttcgtagaattttaatcttaattatggtcataatttttaatataatctgtattataataggtaatgatgagttttagttttgttgaaactttttaggattaaaaagttatgaaatgaattaattttaaatttttttaattgcaatctgaagtgtgaaattcggtgaaatcgagaaaagatttaatggatttctggtcgatgaatagtgtatgtagaacactggttatgttggattgaatgatgtggtctgtacgtacaaattggattcagtttagtcaaggggattttggtcagtttttggatgaatgggtaagaaatgaaag

SEQ ID NO: 7724 - DNA, 803 bp, Arabidopsis thaliana
gattcaggttgtcaatcaagaaccgtaatgtttgatctatagagccatgggattaatggatgctaaaagaataaaacactcgagaagaagagtacacgtaaaatcactcacacacaaagaatgagagatgggagaagaatactacaaagtgtttgttttttttaaatcggctcatatataaatttgggcgatactctactacccacattattcttttaaacaatgatataaatgtgtatggcctatgtagccgaactttttacatatctgacctgtatatatataataattatttatcaaagaaattagagaaagattcttccacttttgatggcttataaaagatgatgacccaaaacactcaaaatgcagcagcaactgctctctcaccacccatctcctcatttctcttttgcatttctttctttttttctgcattgcattcttttgaggggtttaattttctgcatagctttgtctaatctcttagagctcaataagagaaggtactataactgatctctccctctttcaagttttttttttgtttggtttatagaaaactataaccgccattatccgttagttttaaccgttttttgaaactagtgaatcctcataactttggtttctcactaaaaacagatggatgttccactggcagctttcaaatgttttgatgacgatggccggcttaaacgttcaggtaaaaaatttaaatccccttgttggttacttgacagtttcacctttgaaatgaatgatcacagagaaaactgcgattgttcagggacggtttggac

SEQ ID NO: 7725 - DNA, 535 bp, Arabidopsis thaliana columbia
aacaatagtttaccaactgctgaaaatctcgcattattggcgttaccgtagcttgatcaatagcttgcgagtgctctgcaatatcaagtgtctcattaaaatctccaaaagaagccacagtttatgggagaatcataatgatccctcaactctgaccataatgtttttcttccctccgcatagtttgatgcgtatacaaaggaacagaaaaattcatcctctcgagcttctagcttcaacaaacatgtcatcaattgaccacttttatagaaaggactaagccttacgttcttatgccatagaacacaaatacgacctcgtcgattatgctcatagtttgttagaaccgaccaatccttgaaaagcttacttacaagctgcgctaccttattctccttcactcttgtttctaccaaacaaccaaactgaaaattagtttccttaacccacttcttgacaacagaatgttttgaggatctgttaagtccacgcacattcgagaagaacaaggacatttaacgatttttggatttgt

SEQ ID NO: 7726 - DNA, 933 bp, Arabidopsis thaliana
aaaaaattaaatccccttgttggtacttgacagttacacctttgaaatgaatgatccaaagagaaaaactgcgattgtttcagggacggtttggaccgcgagtgcgcatatcataaccgccgtgattggatctggtgttctatcgcttgcgtgggctataggtcaactcggttggatcgcaggtcctacagtgatgttgttgttctcttttgtcacttactactcttccacgcttcttagcgactgctacagaaccggagatcctgtctctgggaagagaaactatacttacatggacgctgtccgatcaatcctaggtatcaactatcgtctctctgttttcctccgcatatgctttgattgctctgtttttgggttgtttctctctgttttgttctgttttactctgttttgtgttctgaaatgctctgtttctggcaggtggctttaggttcaagatttgtgggctgattcagtatttgaatctgtttggtatcacggtcgggtacacaatcgcagcatctataagtatgatgtgagtctttctttctcacaaactagtttattttggaacaccatataatgagataaaaggccttaaaaatttggttgtatcggatcgagtttcagggcgatcaagaggtccaactgtttccacgagagcggagggaaaaacccgtgtcacatgtcgagcaatccatacatgatcatgtttggtgtgaccgagatcttgctctctcagatcaaagattttgaccagatttggtggctctccattgtcgctgctatcatgtccttcacatactctgcaatcggtttagctctcggaatcattcaagtcgcgggtaaaagaaaattactttgtaagactcttcgcagtaatcaacaaagcagagggtttaactaactcctaatgtgttcagcaaatggagt

SEQ ID NO: 7727 - DNA, 507 bp, Arabidopsis thaliana columbia
tgtaccttttttgtgagatctcgtcgttcatgtattataatgcaatgcaagtggaaataatataagtaggtggaacacaaattctttttataatttattaaagaaaggaaattacacacattgactcaaagaacatgtttcgattgactagtcgaagttggaacatatgattttttgacgtaatcaacccctagaaaaatggaaataaaagctcagaggggatatttattcaactctaattagttttgtttgaaggacaaaacgtgatgacgtagtcagtagagtttaggcatgtaacggtgctattgttatcatcataggcgtagatatgagcgagtgggcaagctcgctcaaagttctgcgtgtacactgtcggcttgcagttttgctttgacttgaagtctcgggtgaacaagcctccggagtatcaaactccatgcacgtgctactacaggcgactagattttctctggcattttcatagatcttttggacagtctttttcag

SEQ ID NO: 7728 - DNA, 557 bp, Arabidopsis thaliana
tgacgctcaaattcaacttgacgagtttagtacaatttgcaagagaaagcgggactgtaccgttgatgttattgatatggagttggaggctacgcaggctggagaggttacctatgtccattggtatttctccttcaaggtggttggagtaaagcgcaaggactgttagtttcctgagcctggtgatgttattatcgatctttccggtaagctgattggctggcagaaagagttgctccagctcagaaagattgtagatttcacttggtattacaccagagaggttgttgaagcctgcttgtagaacagtaagcctcaaacatctgcctaattcttgggagatatggccgctaaaatcattataagaaaaatccagtttgctgagctgcggtgaactcctgcacatgaatgaagggattggacctgtgaagctgttgttgctaacattgaaactgattaaattgatagtgccctggaggtaaacagaactacggagaatttcgccttccagaagattgctcgacagatcaagggtctgaattgagaagaatctgttg

SEQ ID NO: 7729 - DNA, 568 bp, Arabidopsis thaliana columbia
ggatgctgcgttgtttcggttttctagttcctcgtacgttgcaaacatggttggattgtactccatcgcccacatcagctgcaaccataatccatctcacattattctcattacccaaacagcagataacgcaaaaaagaagaagataataaacacacagcaagatcttacggcttcataaacaatcacggcaagtaaaaccaggaaccaagaaaagaaatgcagaaagtttgtcattacctcccaaaggtacaaagcgtcaaggaaagagaattctctcctgaaaagtaccatcagcatccgaatagcaaatagatactccccaccatcgagatcctctgtcacattaacacgttttagcccaccacaagaagagtttttatgataggaaaacactcttacctagatgttgatggagacgaggatccactgtcttaatgacctgtgagagcaccccagttgagtctggaccccattgatgttgctgttgcctgaaattttctctctgaaattcacagaaaacaataaactgtgaatacaatggtctggtaatgacatgaaacatgag

SEQ ID NO: 7730 - DNA, 1167 bp, Arabidopsis thaliana
taaagagcattttattattgaatatagaggtttaactccggtaaaaaacaaagaagcattgaatgcagggaaaaataatatggccataaaaaacatcgaaagaaactcttttaatttaacatgtaaacgcatggttaatcctcatatcacgggtggagtgttaagaacatacataaatggagtcatgttttcccttttccatttatcaagttcctgttgccgttttagtccatctctaattgcatattttaatttttctgataaatggcattgagcatcgatttcatttaaaacaactgtacacactatccctgtcagtaaaattgctcctccgacaagaattactggaaagccaaagctaacacaggcaaaagaagccagacttccaatagcggttgcaacaccaccggctataactgctttggccacatccattgaaaaatcgccaagaaaattaaccagatctcgctctgaactcataataaattctatggttctgctgatttaaccgcagagaagttcgccacagcaatccgaaaccactggcatgtggagaataagctgcactggcgtctggacgtggtaatgaatgaagacgactgcaaaataagaagaggaaatgcagcagaattattttcagggatacggcacattgctattaatattttgacgaatgataaggtattcaaggcagggttaagacgtaagatgcgaaaagcagccatggacagaaactacctggcgtcagtccttacggggagcgggctttcgtaatcttgccctgggcattattgtcgtataaacgctttaccggacacatgacattcacaatgtgtgttaattttactgacatctttcaaaaggagcgtaatcatgccgcacatcgacattaaatgttttccgcgtgaactggacgaacaacaaaaagcagcacttgctgcagatattaccgacgttattattcgtcatctgaacagtaaagacagttcgataagcattgctctacagcagattcaaccagaatcttggcaagctatctgggatgccgaaatcgcgccccaaatggaggctttgataaagaaacctggttatagcatgaatgcttacccgccgtaacacgcttgccgctggtaacaaacgtccagcacctaaatgatgcacgtattg

SEQ ID NO: 7731 - DNA, 551 bp, Arabidopsis thaliana columbia
ttgaagatggctctgttaatgaggaggagagtggagcagaagaaaactctgaagttgtgtgtcaatttgatgaactagctgaggtgaaaccgagcacggatatagaatcaaatgacggtgaaagaaacttgaaagctctttttgaagatggcttagagttgaacattgaagaactgagagagtctgagatgagtcctgaagaaaagctcgaaaccgaaaagaagttggaagaaactgaatctgaagctatctacataaaccagcctgatgttgaattcgctgccatcaatgtgcaccagcacactagagagtgagatacttgttgctgaaagtggatcagaagaaagttttggagaaattggtgatcttcttcatcttgaagtagggtcttataatgatttagccaaaggtgatgctgaaagtggatcagaagaaggttttggagaaattgcagcagaaactagtgatgatcttcatcttaaagtaaggtcttctaataaggcgtataatgattccccaagttgatgatagtattgtccccacggtgctgg

SEQ ID NO: 7732 - DNA, 535 bp, Arabidopsis thaliana columbia
tagttttcttagatgtaaatagatataaaataaaagagttagaaagaaaaagtaaccataggatagagagcgagtataccttgtaatagctccacagggtctgctcaccctctttgtaagagagaggattgtcactagagaacgcaagcttgtgagtcgaaagatacataactcccaggacaggaccagcagatgtagacaagtagcaagcataggtcttgagaagtttttcatcaggaaggcaatcaaatgtttgcttgaagaccttctcgtatccaccctctgcaagtatttttgtcccctgagcaattcgtgaaacagcagcatctgctacacttgggcctgttttcactgaaaaagaaaggatagatatcaaaacgtatactctcaagtctcaattcatataaaatatcatccctccctccaaccatatgtatataatactaattcatcacacaagcggagaaataaagccaaaacaacctatactagagaagcttcaagagtcaaaggcaataaccagatacaaagaact

SEQ ID NO: 7733 - DNA, 608 bp, Arabidopsis thaliana columbia
caaatcaacaaactaaactaaaccggaattgataagaaacctagaaaaagaagaagcaaaaccggttatgtatgtaacgtactcacgagtggacgatatgtctatatatagaggtcaagactaagcttcactgacacaactactgtcttcgatctctctttcatatacaccatataaaacgaaccagttaattatgggtttaatttccgggaaggtgtgtgtgtttatctttgtattcgctctagtcgctgaattttcgttcggaaatgttgaggttaacgacgacaaacactttttccacaaacctcgtccatttttacacaaacctcgtccattcctccacaagcatggcatttacaagaaaggtttcggtaagggtttgggcggtggaggcggtctaggcggcggaggtggtctaggaggcggtggtggcctaggaggcggtggaggtttaggcggtggtggaggtttaggcggcggtggtggtctaggaggcggtcgagtttgggaggaggagggggtctaggaggcggtacggtttgggaggaggagggggctaggaggtggtggtggtggtggtttaggaggacgatgtggattgggtggtg

SEQ ID NO: 7734 - DNA, 538 bp, Arabidopsis thaliana columbia
tacaaaaatgtatcaagaaactaagcaattttatcatttatggctacttgctgtccaagaaagagacgaagcaagagaacatttgaaacaatcactcgtcgaactgtctagattacaggaatgtttcaacactattcttttgtccgaagaccaacaaataccccattattcttactcagaaaccacagacgaaacccccgatcatcaaaaactgtatagttacaataacttctccaacgagtctccttcgcgattctcgtccgcatcgtcgatcgatctcgtctctaactcaactgtctattcctcgccggagacctacgactctgattgttacagcctccggacgttgcagatgggttttgcatttgaggagaagaaagattttgagacccttgtgctggagaatataggactcggaagaatgttgccggagaacggtaagttccagcaagctatcattgaagctggatcgttggttgactcattgttcataaccggtcctgattccaaatggagaaatccccggttcaaatgttga

SEQ ID NO: 7735 - DNA, 638 bp, Arabidopsis thaliana columbia
cgactctagcacggtcccatccccttttgaaagacctttggacacagaaattgtgttggataaaattaatttatccttcctcaaaattaccagcattgtggcatatgcctaaaactcatcagatccatttaaattaagaccccaagtcctgaaagtaaacaaattacataacaacaaatccttaagaaaaagatgaattctccgaacataaccgaaagtatgataaaaaaaagatacttgaacagttaaacacaaatataatagtagatcctcgttcactgacacgaaacataaaataaagccaaaacctttggttcgttttattgaagtaatctcataaatgacaatgacttgtgaacgtgagccaacacaacaaaagaaaatagaaagcttataaagaaacttcggttccaccgaatacatatttttaaaaataatcaaaaaatgcaaaccatgttcataaaaagaacttattcgaaacgcactcacttattcgaaaagaacttattggatggagctctattttagaggtgtagtatgaaaaaataaagtttagctagtatgaaatttcacacaaaactagtatgtatataatatgtacacaaactatatatacaagtatgtatatgaactaatat

SEQ ID NO: 7736 - DNA, 478 bp, Arabidopsis thaliana
tcgactctagcacctttaaaagcctgatcatgttctcattgctgtccgattgataccttgtgagctctggatcaaacacatctgatggtgattgttgttcagtgatcgatgaaacccatctcggtaaatctactccttcttcgtgtaactgctgatgcgttggagatttccctgcaaatcaatacaaaaaccaatatatgaatcaacattttgaccaaaaatacggttttcaagatctctctgtttttgtgtgtgttgttgtacctgtgagtaattcaagaatgagaacaccgaagctgtaaacatcagccttttgggagattttacgagcatcggttacttcaggagctcggtaaccatcaatgcggttaggtgtagaagtagggctgatcataggtgcaagacagtagtcagagaccttagcttcaaaggattctgacaatagaatgttagatgatttaatgttgccatgagatgt

SEQ ID NO: 7737 - DNA, 580 bp, Arabidopsis thaliana
  unsure (1)..(580): unsure at all n locations
gtgatgattttaacaatgtcatggatgagatacgtcttcttaatccaaagctgagcaaatacttggaagatgtggatattcaattatggtctacggctcatttccaaggaaacaggtataacatcatcacaacgaaagttgctgaatcaatcaatggacttttaaaataagcaagagaggaccccatcgtagcttttctcaatcatgtacggcctactctaactccctggttttgtgagcgtcaactaaaagctgcaaaacttgtcacgaacttggaccatatgctaacggtgaattgagaaaatacgtgaagaggaaaacacacttgcagtgtggcccataaatctaaatcaattcaatgtgactgatggctcacaagatgcaatagttgacatgcagaaattgagttgttcatgtcgggtgtttgatataaagaggattccatgtatgcatgccattgtagtggctacgaagaaacacattccatagcacacgctcttggatcctttctagatattctgagtccatttatcaggttccagggattcttaatgatcccaaatacccncgaagttgaaaa

SEQ ID NO: 7738 - DNA, 591 bp, Arabidopsis thaliana columbia
ccatcataaatgcatatatatcctttgccctctccacttttcttttcctcatcataaaaaacattctcagagcaaatttcaagtttatttcattcaatttcgatccgagtaaccatggagtgtagatcattggatctgacgattatatctgcggaggatctcaaagacgttcaattgatcggtaaacaagacttgtacgccgtcgtttccatcaacggcgacgctaggacgaagcagaagacaaaggttgataaagattgcggcaccaaacctaaatggaagcatcaaatgaagctcaccgtcgatgacgcagcggcgcgtgacaatcgtcttactcttgttttcgagatcgtggcggatcgtcccatcgctggtgataaacctgtcggtgaggttagcgttccggtgaaggagcttttggatcagaataaaggtgacgaggagaaaacggttacttacgccgtgaggttgcctaacgggaaggcgaaaggatctctcaaattctcgttcaaatttggggaaaagtatacttatggatcttcgagtggtcccacgcgccggtcccttcggctatggatcataagactatgg

SEQ ID NO: 7739 - DNA, 509 bp, Arabidopsis thaliana
cgtttatgcatttacctgagccgatactaatcgaaaagatcttcccttctttataaagaaactctcgtaagccgttaactcgaacattctcgataaccgctaaccaaatatcttcaacggaaggtcggtttttgcagctgaaaccttgcttactatcatctcttcttgttccggctacaacatggttcgaaggatccgaatccgtcaatggagtatggttaaagctagcatcagcagaagaactatgcggaacaagtactgtttatcaggagctagctgtagcaatgcagcagtgagccaagttagtttatcgttcgatactctcaactgtttttctgattcagatagtgttttcaaagcttgtttcagcttctccatatcttctttagacactggaacaacggaaaagaaaaatcggttattacagttacaaatacttctcattttggatgatggaaatgtttgaaaagctcacgtggttgtcgccggaaaaactttcttttacattg

SEQ ID NO: 7740 - DNA, 489 bp, Arabidopsis thaliana columbia
tgccgtcctaggaataactccgacatcactcggtcttggcttggcgggccctcgagcgagtcgaataagctcgaatagtaatgtagcgattccgtgaaccgatcgagaaatacggtaccgttatggtttgcttcttgctcgaccacagtcattatatccggtcggattgatttgattgtcgataaaaacttatcgatggaaccgggatgagctaagaggcgatgaagctcgaagaccgagttaaccgccactgattctaaaccgggtctaatgtctagcatttccggtttaagatcagacaaattgtttaaagcaatgctcttgaattcgaaattgacaccaatagtactcgcaagctgaccaagtttccaaccaacttcttgaatatcggttaacgaataaccgatcccggttaaccgaaaatccggtggaccattaggacgtaaagcaagagcttgaatcaaagccggccattgtaaaccatggtta

SEQ ID NO: 7741 - DNA, 478 bp, Arabidopsis thaliana
  unsure (1)..(478): unsure at all n locations
nnnnnnnnnnnnnnnnnnnnnctaaagccgcgtcgcatgggagcggatcaggcggcgaaacacgatcgcccgtcgttgcggtacggcagggaatcgaacataccgtgcgtgccctgcgagcgcccgtcgcacggatcgctgacgaaggccgcgaacgggatcccgccattgcggtagatctccttcgccgccgcctgcatctgcatgccgatctcccaatgcccggtgtggtagcccagcgcgattgggcgtccgtctccggcgcggatgccgcctgagtgccgataatcagcacctctttgccggtgagcttgttggcgtcccagcccatcccggcgttctgcgtcatgccgaacaggttgccgctgggagattccatcagcatctgcggggtcagcggcagagccccttcgggtccgccggtgtggtgataccgcataaaacgcgtcgtgctgcggggtgaaaattttctcaatgg

SEQ ID NO: 7742 - DNA, 478 bp, Arabidopsis thaliana
ttcatttcttctcttcttattcagtaatgaaatagtgcatttactttgtttttctttctcttaaaaggttggaaacacacttccatagcaaagtacaagcaggtctccaatctggtgctaaatctcaatagaagaagatggtagaggttatattaatatcattttctagatctttcattttaagatactttcattggaactgggaatacatgtatactattttaggcccatgtatactggagcttaattgtttgtatgtttttttttcggataggtaaatatttgatttagttagattcagaatgtttaagtttttactttgtaggttaaatttgttctataaagcttatttccaactgtaaagacacatttcattttactaaatgtttctgatgaaaatcacataaccaaattttgatatcgaacgggatcaccagtttcggtggttttgatcggatcaacaatggtgaagagaatg

SEQ ID NO: 7743 - DNA, 372 bp, Arabidopsis thaliana
actctagaggagtgtgctctaaagccctgcgccccgccgtgggtgatcaccgcataaaacgcgtcgtcctgcggggtgaaaattttctcaatggtcatcgttatcgtccggctcagcaaagcttgagctgttgcagcagggttttcagctgcgccttgcgggctcgtccatcggcgaggcgggcggcacacgttgcgtggagacaggactaccgcagagcacgatcgcctctttaatcacgttcacaaacggcgtatccagctgatacatctgcggaatttgcagcaaggtctgatgatacccggccgctttcgccacggtcccgtcgcgccaggctttcagaagattcaccgacacctgcggggcaaagtt

SEQ ID NO: 7744 - DNA, 492 bp, Arabidopsis thaliana columbia
caaaaatcaaaaaaaaaactttttgttattgtaattagtgaaaattctcttcttgaaattaatatagatcttattgaaattattatttttatttaaacaacacaaagaaagaacacaagtattttcgaagataaattagtcttagcactgggagaaaaatgacttaaaacaaaagaaacataaaggcaaacaacaaaaagtcatcactttaataacaacacttacactgattaaacaaccaacatacatatacaaaatctatgtatctagatattattcccaaaatatacaacataaaatcaaacacattacccaaaaaagcaaaacaagataaaaataaacaacattaagattgtactgaaaatgacaatgctgttgaatctgcaccttcttacctcttttaggtgtaaatacatataagaagactatgaacgtacaactttgttctgcttcacacattccggtgactttaagtcctgacacttccatgat

SEQ ID NO: 7745 - DNA, 528 bp, Arabidopsis thaliana columbia
tagttagtttctaatattacccataaaacatttgtcttttaaatatatgattttatactcttgcattccatcttatagcactgtttacaaaatggaaatgagtgccaaaagatattaatagaactgactaccaaaaatgaaaatttaaatgcagaccatttgcctagaccagtagtacaaatttctatcttgcgtaaatcttgtcctgagtgatataaccaatgagctttcttcccaataacagtgtatcagacctgttggattatataaccccggattctggtattaaagcaagggacgctcaaaggaaagctcgcccaaaggttaaatttgcttttcgctgacttaatccttgtttttattgaaccactctcattaataaggcgtgacagatatttttcttgcaatgttcattcaggtcaagggaaagccaggtcaaagtccaggaccagtgtcagaagaaaatcagaaagatgatgaaattttgagtccggctcatctcactggggagagttccaagtgataaga

SEQ ID NO: 7746 - DNA, 662 bp, Arabidopsis thaliana
tgatagcgtgatgcaatcttctatattaagtgatatataagataatagcaaaccggcttaaagttactttacaagaggcgatggaaccgaatcagagcacctttgtgaaggggaggctcttactagagaacatatttttagcaacaaaactagtcaaggactaccacaagcaatcactctcatctcgtttagcaattaagcttgatatctctaaagcgtttgacatagagcaatggccgtttattgctgctaggctacgtgtgatgggttatccatagctctttatacactagataaatatatgcatctctacgtcctcgttttgtttttttctctagctcttgtggtataaggaaaggatgctctctttcaccgtacttctatgttatcatcaacaatgttttgtcgactatgttaaacagagcagctgttatgaaagagattggttctcacccgttttgcaaggagataaagcttacacatcttagttttgctgatgatattatggtcttcatggatggtactcttggttctctctgcaacatcatgatagtggttgatgagtatgccatatttcagtttttacatcaatgtgccaagtcacaatatctgatgcgggcgagggaagatgctttggaataggggcacatcagtagggtagt

SEQ ID NO: 7747 - DNA, 480 bp, Arabidopsis thaliana columbia
agtggtgatcttcacgaagagctcatgttgtctctgctacgccgttcaaatcctgttccgtgaccttagggttcaaccaaccatccacgagatcgacaacgacccggactgccgtgagatcgagaaggctcttctccggctcggctgttccacggcggttccagctgtctttgtcggaggcaagcttgttggctccaccaatgaagtcatgtcccttcaccttaatggctctattgtaccattgaacaaaccctatcaatccatccttaactagcaaaattaaaccaactcaatatataaaaactaaatataagctagtgagaataaacacagttacagctagagtgtgagctagctagatattcagtgagagcttcgtctgaattaatgtttatagtttgtatgttctattgtttagcttctctcgtgtttcagtttagttaatcacctggtgtatgttgatgtatgctctctgtttat

SEQ ID NO: 7748 - DNA, 580 bp, Arabidopsis thaliana columbia
tgacaaaacatcccaaatctgttcatccaaagaacacgcagaaaccatttagtagggaatccatttgtcagaagactgaaagctgtacaagttgtttaccccatcagtagctagaaccacaaactcgtcttctctgctgacttttctgcagaagacgtcaggaatgcagacaagtccatagtctttgaggcagaaatcaccaaaagcccttgacattgcgagccccgggcaatcatcatcaggcatccacactctatacacatcgggttcctcttccatagcaaacacccttcccttgcatgacactattctctctgcttgcgctgtttacagaaatcaaagcgaaaagttcttcaggagatttatttgtacgtcccaactcaacatttggtacttttcacagagttattacttattaggccctaagttaaaagacaaggataagatgctaacgttggacacagggattcagatcaaccgtgagttggacagctttgaaactgttcttgcttcgggtgccaagaacggctcgtgaatgtccaagttggcgatcccaaacagtcagcctgaaaatgtttga

SEQ ID NO: 7749 - DNA, 623 bp, Arabidopsis thaliana columbia
acaagtaagaactaaagaacacaaatctcaaatttgcttttccagtttctcaggtctagaaggaagagattcctgccagcagtctaaacttctcataggagacccaaaacacgaactgccacggtccaagccttgcccatgtcgggaagaaacctttccacaaagctcttattccttcaaacttaaccgtcttcaccaaacagtcgtaagaatttctgtacacagcattttcaccctggttcatcatcctcgtcttcaccacatcagctggacaactcaaacttgtcgaagcaagacccgacattatagaagcaagagtgtgcgcaaaaatgttatcctcagcaatcttcttatcgatgacaaagtgtttggcgtgatcatagcaagctagttctcccatattcactagaaatgctctctggatgtttggaagaacacctttccataacccttttactccttctgattgtaggattttggtaaaagcctcgattggtcccgagtacctcggtttcaggccttggctcacaatctaccatctgcttgcattctcactttgaccaaatcagctggactagcactacctgcatttctagtatggcacaataagaggattttagtgg

SEQ ID NO: 7750 - DNA, 593 bp, Arabidopsis thaliana columbia
ctacatgaaggaggtgcaaatctgagtctagaatcgtattttgaccaatgtgaaacacccatctagggacaatcttatcaataaatacaccaaaattcctcgggaacgtccatatcagcctactacgacctggactgaccggaatacatataaagatcatagacaatctccgctttgacaatgccgcctgtatacagaaccatactgttaggtaactaaaacatgtgactctaaacaagaaaatcttgatacaagttaaaatctatgaccttgtcagaagcagctggtgcgggatactcatgttcctgctctggtagagggtctgtggaagagcgatacacacatggtgcaataaaattagaataacccattcttgttttgaaaagaaccctttgttgtctagttttttaacgttgatttcgagtggtttcccccttctctgtcaatcttctctgcaagaagaatctgaaggttggtacaaggattaaaacaactatttgaaatacaaattatgtatttgccttttggtttaggatacgcatcagccataatgtgataaggacatgaccgggtcatgaggtttcaccaagaca

SEQ ID NO: 7751 - DNA, 579 bp, Arabidopsis thaliana columbia
tcaatatccattttgtaagagtttaggttagacaagtgactgcatttacatacatatatctatatatatacaaacattttttcttcttcattaatgctttattttagtctcaccttctccttctactttttatcatttccctttctcttcccattttagtcttcctataacttcttctcaatcctctctcatatcttttttcttagtttaaatttcaataaaatagaaaaaaacatatacaaatctacagagaagagaagctttattttaatcttgtgtgtgtgtgtgtgttttatataatttttattttttttcaaattaaaatctcttctttgcttttgatgtgggcatggctggtcttgatctaggcacagcttttcgttacgttaatcaccagcatccatcgtcccgatctccaccttcaccacaattcctcctccgatgacgtcactcccggagccgggatgggtcatttcacgtcgacgacgaagacaacaacaacaaccatcaaggtcttgacttagcctctggtggaggatcaggaagctctggaggaggaggaggtacggcgggggagga

SEQ ID NO: 7752 - DNA, 296 bp, Arabidopsis thaliana columbia
  unsure (1)..(296): unsure at all n locations
nnnnnnnnnnnnnnnnnnnnnnctaaagcgtttagtacttcgtcgagatcgctggtgaaatggatatgggaataaatgggagcctgttcttccggcttcgcatggcgacgaaaaatatgcgcgacatgccagctatccttgcggttaagtacatacggcagatggtaacgggtggtgcttttgccgaagccaataaaggcgcagttcatgaccatgatttcgtcctttttcaggtggttatttacaccttatcgcaaagccgacgtggttcctactggagtgcgcattacgaacac

SEQ ID NO: 7753 - DNA, 507 bp, Arabidopsis thaliana columbia
cttctcgtcgaggtcgagggcgtacatgccgaccagccaggccgcgacgtacgccagcgcacccatgttgatcggcagcacggtgccgatgacgaagagcgcgatcagcgagtagatcgaaacccattccggtcccatggttgtacttcccaagctccgggagcccagcgagtccggtgcctctgtgactccgatcaccgcactggttcagtggcctagccaataggtcaatgaaccatctgtcaataggatgggcgccatggatccgtcgacgcgcgaccccggctccctgtttccgggcaagctggtgcgcatccggctctacgagcaggtggccgagcagatcacgtcctggatcgctgacaacggcctcaagccgggggacacgactgcccgccgagcgcgagtcgcctgcccgactcggggtcagccgcgcaaccctgagccaggcgctggtcggctcgaggtgatcggcgtggtcgagtcgtcacggcgacggaacggtgg

SEQ ID NO: 7754 - DNA, 568 bp, Arabidopsis thaliana columbia
caccaatatggaaatgctaacgtctttcttatggcgttatcgcaccatcgctctacgaccagaccaggacaaggagatgcggctcatattaattgtcaacgcacgttctaagcttaaaaatccaccactacctcgaggatactacggaaatgcctttgcgttcccagtcgcaatcgcaacagctaatgaactaactaagaaaccgttagagtttgctctgagactaataaaagaggcgaaatcgagcgtgacggaggagtacatgcgatcacttgcggatctgatggtgataaagggaagaccaagcttctcgtcggacggagcttacttggtttcggatgtaagaattttcgcagatattgatttcggaatttgggggaaacagtttacggaggaattggtacagccggagttgaagaccttccgggggctagcttctacgtttcatttgagaagagaaatggtgagatagggatcgttgtaccggtttgtttgcagagaaggcgatgcagaggtttgtggaagagcttgaaggcgtgtttaatggtcaagttgtattcaatagagg

SEQ ID NO: 7755 - DNA, 501 bp, Arabidopsis thaliana columbia
  unsure (1)..(501): unsure at all n locations
nnnnnnnnnnnnnnnnnnnnnnctaaagtacatctaatatcggaattctctgctgttaaggtttgcttagacttacttgctccctaaaaagatgttaaaattgacaaatatcaattacggcttgagcagacctatgatcccggaaaagcgaattatacggcgcattcagtctggcggttgtgctatccattgccaggattgcagcatcagccagctttgcatcccgttcacactcaacgaacatgagcttgatcagcttgataatatcattgagcggaagaagcctattcagaaaggccagacgctgtttaaggctggtgatgaacttaaatcgctttatgccatccgctccggtacgattaaaagttataccatcactgagcaaggcgacgagcaaatcactggtttccatttagcaggcgacctggtgggatttgacgccatcggcagcggccatcacccgagcttcgcgcaggcgctggaaacctcgatggtatgtga

SEQ ID NO: 7756 - DNA, 555 bp, Arabidopsis thaliana columbia
gtgcaagaaatctatttaagaaacgcgtaagaaattctttctgacataaaagaagttgttgtaggtatgcaaatcagcagatgttgcggggagagttgaaagccaactgaaactagtgataaggccaatgtactcgagtcctccaatccatggtgcatcaatcgtggctgtaatcctccgtgacaagaatttgttcaacgaatggactctggaactgaaggccatggctgatcgtatcatcagcatgaggaaacagcttttcgaggcattacgtactcgaggtaagtaaggtcttattgatttgtataaggaatgtaaatggacatagctaatgaaatgaaattcaaaatcactgtgacaggcactcctggagactggagtcacatcataaagcagattggtatgtttaccttcacagggttaaacccagctcaagtctccttcatgactaaagagtaccacatctacatgacatctgacgggtaagcgcctgctctcttcttcatctattaattttcttgaattttgtctaacttagtgtgtgatgattgatat

SEQ ID NO: 7757 - DNA, 552 bp, Arabidopsis thaliana columbia
atgaccatttaaaatctgattcagttcattggtaacttttgagttcacagtgaaatatcgaaacaagaaccaaaatcacaaacagaaataccttgatgattctcacttccgctactcttctttttctttcttgatccaggtataggaacctcattgaaaaagctttaaaagctaggcttgtctataggagtccccatatgaaccgatctgtcagcttcgagtacatgaatcggcaacttgtgtggaatgaattttcggtaggtcttctctgtgtgttgcttaactagttcaacatcaatttaaaagtttggcaacctgtcagttctgagtagcatccttggctgatggtttctggcctatgattgatacttgctggtctcgaacattttcttgaatgatagtatctatcagcttaccttcactttttctttggaagaaacacttttgctgcttgaacttgagctgttaaaagctgaaaacatattgtgtccgtatctggaattctgaactatgtagatcctgtgactcaacagtttcattggagtacaaata

SEQ ID NO: 7758 - DNA, 848 bp, Arabidopsis thaliana
gatattttgctttccagcaccctgtcatgggattgatatgaacacgtacttggtatcgacatgaaagctcaaaaataaattcaatccgattcctttagtgatatcagaagttcattttaaatacgaacacgtatggcgaaacaccacgccgacattttctgctgctgccacgcgtcactttccaaatattgattcattaaactaatagttgatccatatccgaaaccggactataaaactatcttcaatgcgttaacgaatcttcatcgatcaaactcatcaaagtctaatatcacaaagaaagagtttttttaactagcttagctcaaagtgtttgcttaagacaagaagaacatggcgtcttaccagaaccgtccaggaggtcaggccactgacgagtacggaaacccgatccagcagcagtatgacgagtacggaaatccgatgggaggaggaggatacggaactggtggtggtggaggagctacaggtggccaaggatacggaacaggtggccaagggtacggatcaggtggccaagggtacggaaccggtggccaaggatacggaaccgggaccgggactgaaggctttggaactggcggaggagctaggtaccacggccaagagcaactccacaaggaaagtggtggtggcttgggaggaatgcttcaccgctccggatctggatccagctctagctcggtacgtatcaagtgtataaagaagatttatgatgttttagtttagtatgtgaagcgtaattcgaatgttatatgtataacaggaggatgatggacaaggagggaggaggaagaagggaatacaccaaagatcaaggagaagtt

SEQ ID NO: 7759 - DNA, 394 bp, Arabidopsis thaliana columbia
atctcttcttgcctcttcaatgctttaaagcactctacttctgttccaccaatctcagcctgcttcaatgtcgcctctatttgggtccacacggtctctgccctcctctgtcaaatgtacaaatccgttaaacattgacaccaaacaaaatatagtttcagaattaacatttaaggcaatgtggactatatgttacctcatgaccctttgtataagttttgtacttggccttcatgtgttctgccttcttctcatcctcctccatcttttttctcacattctccatctcctcctgaaaagctgcaactttgtccgcgttcccagcaacacttgagagctcgtaagcgcttcgagtggggaaatacatgagatcattcacgcatgtgttgtgagc

SEQ ID NO: 7760 - DNA, 628 bp, Arabidopsis thaliana
atctcaactcatgaatgtgaatcaacttatctgcccgattatgaagacttgggataatgagaaactcagaagacttctgccaagctatgaattggagattctctccataagacctagcagggttggagctagggaccgaattgcttggcttcccactaaattaggtgaatactcggacaaatctgggtatcacgcagtggttgatctacagaaacaagcacctcaatccttagatcctcctcttggttttgactggaataaagagatttggaataagcactggccctccaaaagtataaattttcctatggaaagctatgaaaaatgctttacctgttggcgaaaatctgaggatccgtgacattaaccctgatgctaactgccctcgttgtggtgaggatgaatcgtgcctacacatgttcttcatttgcccctttgctcttcaggtctgggaacaagcaccattcaagacgtcactctcagcttctcgaatcacaagcatgaagatgggtttggaagtatcttgattgcttgtcaatgtccgccaactggaatcgaacacggtctgctcttccagtggactttgtggaatttatggacctgtagaaacaaattgatttttgagtag

SEQ ID NO: 7761 - DNA, 999 bp, Arabidopsis thaliana
cttagttactgatccgtgatcagatgtttcttatgagagatgaggaagattggagatgacggcgagagacgtggaaagatggagaagacaagggtttaaggaattttgaaaccaatcgacgagagatcatcatcgtcgtcgccgatttcgatgcagagaagaagctctacgtaattaatttagggtttctattattgccaattgttttgggctcatctttcactttcggcccaatccatcaaattatagcttctagccaagtcaacggtttagatcaattttaaccggttctttggtttagactatcatcgatactaacaagattttggctcatgaccatttacattatcatcatcgctctatgagattactcgtatatcccaatgcatagaactcgatgtgcaacaagtggcttactctaaagtgaattgagcaatataatcggtacctacaagtgctcttaatccaagacaaaacaccaagttcccacaaagtttggagaaacacactctcttcctcatgcctattcaatataaaagccaaatgccaccaaattttttaaataaactcatcaagcgattcacaagtcacaacaatgtcttcttcacttacaatcttcttcttctcatttgcttccacattcctctacacttcatcaaattcattcaacatcactaacatcttaaacgagcacgatgatttctcaaatttcaaccagcttctctccgaaactcagctcgcttctaccatcaacaaacgtcaaaccataaccgtccttgtggtttccaacggtgcactctcctctctctctggccaaccaacctccgtcatcaagaaaatccttagccttcacattgtcttagattactacgaccagaagaaactcaagaatctgagcaagataacagtactcctcaccactcttttccaatctagcggtctagccagaggcaacaagggttcttgaacgcaaccgttatgcacaacggagacgtggcg

SEQ ID NO: 7762 - DNA, 750 bp, Arabidopsis thaliana columbia
ttgcggttaagcatctgttcgaagcagagttcaagctttgcaacgatgtctttgagagacttggtttgaatgtttggatggattgcttttcaaagattgctgctcaggccggtatgctcgcgttccttcagtttgggaaaactgtgactgatagcaagaaagatccaatcaagcttctgaagctgttagatatctttacgtcgttgaacaaactgagagcagatttcaaccgcctctttggtggagcagcctgtattgagatccaaaacttcacaagggatctcatcaaaaggataatcgatggtgcagcggaaatcttctgggagcttctggttcaggtagagattcagaaacaaaccccgcctcctagcgatggtggtgttcctagattagtcagttttgtaactgattactgcaataaacttattggagataagtacaagtcaacactaactcaggttctgctcatacataagagctggagatcagaaaggttccaagataatcagcttatggttgaggttttaagaataatcaaagccattgagcagaatctggatgtatggatgaaagcgtatccggatcaaagcgttgcgcatttcttcggtatgaataatcactggcatttatacaagaacttaaagggtacaaatattggggatcatttaggagattcgtggctgaaagaacatgatcagtacaaagagtattacgccactgtcttccttagagacagttggggtaagcttc

SEQ ID NO: 7763 - DNA, 544 bp, Arabidopsis thaliana
agaggatcaagtaaccagagaacaagcgacatttcgataccgaagattgtatggagagtgcttctatcaagtgtaaacccaaacaccgtgattcctgatctattgttctcaaagtaattcactacaaaacaaaaaatgtgaagatgaataaacataactaaagatgtgaaggtatgagatttagtgtggatgcagaggaatatattttacatacctagagcttgccgtttttggaatgatatggtgctataagcataagcaggaatgagattgttgttatcgaaatcatcttcttcgtctccataatcttcactatctgattctccattatcatcatctgttggatagtatccgtgtccgcttgctctatcaactaaccttggagtctctccatccacagtctcaaaggattctatcgtcgcacatacatgccacttggctgcaagacaagtcaccgcctgagccttgtgtgtgatctttgatgcacttcgtagtaaaatgagcagtgcagtgaccagcgtcattgaacatagctgagataatc

SEQ ID NO: 7764 - DNA, 586 bp, Arabidopsis thaliana columbia
tgatcctagctgtgcaatgattgtgagaaagaacgggaaaacatctttgcacactgcgggaaggtacgggcttcttcggatagtgaaagctctcatagagaaagacgcagcgattgttggtgttaaagataagaaaggtcagactgctcttcacatggctgttaaaggacgaagtttggaagtagtcgaagagattttgcaggctgattacacaatattgaatgagagagatcgaaaagggaacactgctttgcatattgctactcgaaaggcgcggccacaggtattactccactcctttcttagcttcttgtattgctagttagctttcaagaacaggggttgacacataaatgccttttgtgttttgtttattagataacgagcttattgctgacctttacggcgattgaagtgaatgcgattaacaaccagaaagaaactgctatggatttggcggataagctgcaatatagcgaatctgctttggagatcaatgaggctttggtagaagctggggctaagcatgggaggttcattggtcgagaagatgaggcgagacgattgaagcgagcagtgagtgata

SEQ ID NO: 7765 - DNA, 581 bp, Arabidopsis thaliana columbia
  unsure (1)..(581): unsure at all n locations
catggcctcttctttccatggacatttcaagattcttcaaccgaccaaaaccttgtgcactgatgctcatgatcttcactcccgagtaattacaatctttcaagaccagatcttccagtctaggtaacttctgcaaagcaggcacttgagttttcctcaagagttgttccgacaagtgtcagagactcaagactgggaaagttcacatccactaacccaattgttgtccttgattccgatgataacttgaagtttctcatttcaagctttaggacacggagatttttcggtttagagaaagaaacaaagtttaaaggaactcttctctggtctacccacttagagtgatcgtagatctccaagtcctgaagatttctgagtaactcatggttcagtttgctccagctgtaggaagagatagacctcaaggtctgaaggtttactcttcgcctattagacatcacccacaaattttccgatgacatgccttagtgatgtgagcttactaagatcggttgtgtactggaagggatcattgcctgacgcatctagtgtttgtagaacccgtanattggagatgg

SEQ ID NO: 7766 - DNA, 570 bp, Arabidopsis thaliana
tgaatgttcaagaacaaacatgaatatagttccttacaatcagaacagtgaggaagacccaaaaaaccttttcgcagaccttaatccatttcaaaataagggagctgacaagctgtatatgcccactaaatcaggtttgaataacgttgatgatttcacacagaaaataatctctggttggtagatcacctgcgccaatgatgtggaagaattacagttgcaatgaagccccaaagagaaaggagaatagttatatagaaaatcttctcccgaaactccaccgtgatcctcgttatggaaacactcaatcctcatatgctacctcaagctccaatggagctatttcctcaaatgtgcatggcagagacaatgtgacatttgtgtcaccggttgctgtaccatcatccttcacatccactgaaaatcgagtttagaccaagtatagtggaggatatgaacagaaacaccaacaatgaactagatcttcagcctcatactgctgctgtggtacatggacaacagaatgatgaacccacatccatgatcacagaaagtcacaagtgatgacat

SEQ ID NO: 7767 - DNA, 520 bp, Arabidopsis thaliana columbia
ttgaaaatatacaaattgttgtcactgagggcagtagggattggattcatatgctaaaaatgctgtgtaggaactctaaaggctatgatatggcaaagatattcaactcaaagtttacacatttatcgccggtatggtacgacctgaagaggtatattgtatacatttgttaatgagttctaagttcctgcaattatctcatggtttccacaaaatagtagtgacatttttggtttctgtttctggtagccaagggtctggattggttttggaagggagacataatgctgataagggatggattcaagagcttcggtcaagaggcaatgcactggtagtttaaccagcacacctatttttcttccttctctgaattggccagagatcggtacccggaaaatgctgatgtttaacttgtttttccttctttgattgtctggactttttccccttttatgtagatattacaagagttgtctagaacaatgcctggggagatgcttacaaaaaaaacgtagag

SEQ ID NO: 7768 - DNA, 570 bp, Arabidopsis thaliana columbia
ctgtgtccaggattatcttcgattttgaaaggaaagtcactagagtctatcgtctcttcatcctgaaatatataaccagaagaaccatgtagtctctcataagcttataaccaaaacaggttcatgcaatttgtgtgagctcagaatcaaaacaggttcatgatcaaattccgaaatgtatgaacttttactcaacaaattctgaaagaaatgcgatttaaggcatagaaagtctccagttagattcaaccatgagttcccactaaagcttatggcttccacagagtaagcaaactcacagattcagtccaattttcaacactgcttctacaattctctatcaaaaaccaagaaaaaaacaaatcccacagattcgtttatttcccaggaatcaagtgataaagatcagttattaccgcatcgtgatcatctgcttcgaaagaatccttgatctcagagtcaatcacttgtataagcgtctgatcggactttaacggctcagtggccgtcgaataaggaaagccacgagagacgaagggccgaagcagagatggcttgggacaagagacg

SEQ ID NO: 7769 - DNA, 614 bp, Arabidopsis thaliana
atttggataccttgatcatgagtaagaattttagctctttctgaaaactatcttctctaccggttaaaacaaaagaatcataatcatttcgtcttgcagatactaccaaactaataggttgtctgagaagagtgatgtctacagttttggtgttgtactgctagaaattattacaaacaaaccggtgatcgatcataaccgcgacatgcctcacatagcagaatgggtgaaacttatgcttactagaggagacattagcaatattatggatcctaaacttcaaggggtctatgactctggttctgcatggaaagctcttgaattagcaatgacatgtgtgaatccttcttccttgaaaagacccaacatgtcccatgttgttcatgagctgaaggagtgtctggtatctgaaaacaacaggacaagagacatagacacatcgagatccatggacattaacttaagctttggcacagatgtgaccccaaggcacgttagtcttttactctttactttgcagcattcataacaagcagatatgcgaacgaacttatcattatgttgatgaacgtcatgttcaaagatcaaattaaatgtttgcgtagtgtatgaga

SEQ ID NO: 7770 - DNA, 230 bp, Arabidopsis thaliana
cccatcaccacaaaataatgcgccatcatgacaccaattaccggaccaagcattccgccgataatatcgaggaaaagataaatgctgtcctgattttccattaatttccacgggcagatcagcaagctgataatactggcaatcagtacgccgtttttataggtcagttttgtcggtgcaatggcggcaatctgataaccggctggaataatattaccggtcgcgttagt

SEQ ID NO: 7771 - DNA, 632 bp, Arabidopsis thaliana
atattgataggagataatcatatcaaagttcaattttttggctgaaatcaagtaaaaagagagaactaatggcttaatacttctaccctcgagaaaaattgactgttgagtgaggcaaggttctgggtttagggttttaggttaaaccttaaaacccagacaatggaacactaagttgagacttattcttgtcacaccaagccgcatagatgactgaatcgtttccaattctagtaaaggcgaattttcatttgcagctaaaatttccaatttttttcaaatcaacgaaacgattacgatttcagaaacgcttaaagtgagaaaacgaagcttacagagcgagctcgcgtgcggctcgaggactgcttaatcggccgctcttatcaatcttcggcatcgggacatctttcacctcctccgcggaaatagtcggcgtacggagagcgcttctagtcggagagagaaatagccgtagtgaagacgatgacgaacgtttatttcccgttcgcagggaaaccaagttcgttggcaggagcgaatcaaccaatgtaaatcctatagaacggtgagaatctggtgaacattactggagaagtacagaggtttcgagagacgtagcaaagcgcgagaag

SEQ ID NO: 7772 - DNA, 535 bp, Arabidopsis thaliana columbia
  unsure (1)..(535): unsure at all n locations
acggtggcctgggaaaggcgcacctcgatggaggcggaaggatcgaaatcctcgcccggggcggtggtattggccagattgcgcaccagttcctcttggccggcgagatccgctgcggcaaagtcgaggcggcccggcaccttctgggaaggctttacgccctggtcggagcggaacggcgcactcnggtaatgagcttatcggcgtcctcgatgcggcgggcggccacctcatccttggtagcgccaccattggtatcggcaacggtaggccacggtgccacgacgatagactcgccgccggtcagtgccttccacagcacctcggtgacgaatggcatggtcgggtgcagcaggcgcagaacaacgtcgagcacgcgacccaacacgatctgggtattgcggccctgctcgcttacaccatcacgcgggatctgggtctttgcaatctccaagtaccagtcacacagctcgtcccaggtgaagtggtagagcagctcgtttgccttagcgaactggtaatcatccaggtatgc

SEQ ID NO: 7773 - DNA, 568 bp, Arabidopsis thaliana
ggatcccctatgatagagagacgaaactgtacattgcaactgatggaaggtctagactacgtccgcagctgcctcctggttactttgggaatgtgatattcactgcaacaccattggctgttgcaggggatttgttatctaagccaacatggtatgctgcaggacagattcatgatttcttggttcgtatggatgataactatctgaggtcagctcttgactacctggagatgcagcctgatctgtcagcccttgtccgcggtgcacatacctacaagtgcccaaatttgggaatcacaagctgggttagattacctatttatgatgcagactttggttggggtcgtcctatctttatgggacctggtggaattccatacgagggtttgtcttatgtgctaccaagtcctactaatgatggcagcttatccgttgccattgccctccaatctgaacacatgagactgtttgagaagtttttgtttgagatatgagagcgttaaccctcgttttccctcagtaaatttgggcaaatttgcttcttgtcatcacctgtgttttagagggt

SEQ ID NO: 7774 - DNA, 604 bp, Arabidopsis thaliana columbia
cggatccctcgaccaggacgatgaatggtcagtatggaacttgcaagaatcgaagccaactttaccggtttgtcacccggaacccacagctggtgtatcaacgagtatggagatctcacaaacggagcagccagcacagggagcttgtacaatccatttcaagatcaaactggcacagaggttggtgaaacgcattcttagaaaacgaaaatgtcatcacaatcctctaaaaactctctttttcttctgtcagccattgggagacctgggaacactagaggcagacaaaaacggagaggccttttattcgggaaagaaagagaaactcaaggttgcagaccttatcgggagagccgtcgtggtgtacaagaccgatgataataagtcaggccccggattgaccgccgcagtgattgctagaagcgcaggggttggagaaaactacaaaaaactttgttcttgtgatggtactgtcatatgggaagctacaaacagcgatttcgtggccagtaaggtttaataacaagtcacaaccatacattttataaacgttacgttttttagtgattgagacttgttttgtatcaaacttgaggttatattg

SEQ ID NO: 7775 - DNA, 481 bp, Arabidopsis thaliana columbia
ggataagatttttaagtttggtgtttgtggtttatgtctgatctttaatggacttttgtgtgattggtttctcaggcacaaagagtatttggtaatagatggactgagatagcaaaggtggtttcaggcaggtatagctcaagctcaaactctaaaggtgtaggtgaagtcatcagtataagaccagagtggttaaactaatgttctgttcgttatgtgttttgtagaactgataatgctgtgaagaacaggtttacaacactttgtaagaagagagccaagcatgaagctatgactaaagacagcaactcaaacaccaaaagcatgttgttcttagacagtatcagtacaccgcgaaaatccgagaatgaaactcctattgctaagaaattgaagtaagttttgtttcttttttgatcaaataaacttaagtttcccgagtgtgttcacttttcacaaatttcatgggggtttgttggtt

SEQ ID NO: 7776 - DNA, 553 bp, Arabidopsis thaliana columbia
  unsure (1)..(553): unsure at all n locations
tttaaacctaataatatcccacttataatcaccggtgactgatggaaaataataataatatctgaatcgattcttatatctatttaaatttataaagaagcaaaatatatttttttaaaaaaataaataaaaaataaatatatctacacatatatattaagaaattcataccactattattgttgtataattccccactcatacttctgcctcctcttcctgctttcttcgccgtcttcataacttcctcatcaaaatttgacgttctcggcgtcacgcctttagaagactgaagtgagtaaacatctccacctggaccaggtccagcgccgccgtagtcagtagtgtgaacgtgacgagggcttggagctttgcttgcgttaaacattgcgtagaaatctgtctgattaaagctagaagctctcggcgtcggctctcgtgacgattgaacggagtaaatctctacgccggtgagatttgaagctcgcggcgttatcatggaggatgtaagtcntccgccgtgagatttgttgaatgaagagatcattgatga

SEQ ID NO: 7777 - DNA, 513 bp, Arabidopsis thaliana columbia
ttattaatctctcataccatccatatagcctccgttgcttataacagtgtgttcttgggagagtttatgcagcctgactgggatatgttccattccgtgcaccctgctgcagagtatcatgcctctgctagggccatcagtggtgggcctctctatgtcaggtatcatcattcaactactagtatatctctctagttgaacttgcctgttgattgcaaacttacattgttacatgttgtttgtgttcttaatatatagtgattctcctggaaagcacaactttgagcttctaagaaagcttgtattgcctgatggatcgattcttcgtgctcgactccctggtagaccaactcgcgattgtttgttcgctgatcctgcccgtgatggtgtcaggtaagcaaatttggcttataaagataattcttcaaaactttttggtttctcattttcttaatatgctttgttttggtttcagcttgctaaagatatggaacatgaacaagtacactggag

SEQ ID NO: 7778 - DNA, 780 bp, Arabidopsis thaliana
cgtatctaatcaaatatctttctgttttgaaattcaatgtgatttattccaatgttgttgttgatgtcacaggtcatgaaattcgaggatctcaaggaacttggcaatgaacctgcagtcaaggtatttgtctataacttcttttccttctacaatctcttaaggtctcggtggagtaagtagcctcttaaaacagacatgaaaatgttaaggaagctctccactgtgcaagatatcctcgttgaagaggcatgattatatttataatgttcatggcgatgacacttggtctaatttataatcccttcaactaatgcaggccgcaggaaaatacagacaggagggtaaaacatatgttgttcaggatggagatatcattttcttcaagttcaatgtttccggtggtgggaagaaatgagatccatccgtctgtccacctatccgcggtgtcctctctggatcttgaagctctatccatttccgagaaaggaaccaagctgtattttccgtttttgagtggctttaccaaacaagtatttgtaactctttacattttgcagttagctaagacatgtctttgcctttagacagagcattaagcctgctgtatcgtttagaactctttcaataagtttttctctactatttggaaagaaccttgagtaattgtgcgtgagaatgagttgaagaaacccagcaaacaacttctggtgcacttattagcgaaggaaacaaatggaaagaatgattaaacgaataccttaaggaaattatatttgc

SEQ ID NO: 7779 - DNA, 530 bp, Arabidopsis thaliana columbia
atttgcaggattcatactttgacgatgaatctgctgaagtagtaatttcatccttgagactcggagatgaccaagggaggtgggtttatggaagattctcatatcggatttaaacaaggtcatcgaataatactgtttttgaaaaagaagacttgatccgttctcatttacttcctgcagtttgctcacaaattccgactggttcacattccaagatgacagattcagcaacccgacctctgacacgatgatcgaggacgtgaacatgaatgaaaccacaaatgctaatgatagcagcagcagtgatgatgaacttctggttgaagaagaagaagacgatgatctaacagagaaatcgaagaacatctctcccagcaatttatcaacatcagactcaacaagcatcaacatatcatcagagagcaacgatgaaccatctgacatgcaagtcactagctccagtctgaacccattcattgacgtaccaatgcttgatgtcaacccgaaccggttattcaaacagttcccaa

SEQ ID NO: 7780 - DNA, 586 bp, Arabidopsis thaliana columbia
cacactaatgactttaacaatcgagaccttgatcaggagttactccaagcatctcgcagaactctatgtattgcttaactttgttcttcgtatcatcgcgacgccagttaccacattcacggccatcaactctctttgtgatttctccaaatcctaagtacaaagcgggacgcacgtttctattccagaaccacattgcgaatttgaaagcaacttctggactacgagacaccagatctggatccttcagtagaggtagcccgaggtgcttgccggcaccgtaatactcgttccatgtgattgattgtagcaaaccacgaccatagtagttttccccggttcacaagggtacttcttgctctttgaacaatatctctcgttcgatatttcttctttgtaacaaaaacctttacgtaaaaataaaatgtattatctttaagcttccaaaaaaccaaaattgcatgcatccatgattttcaaatatcttacgcattaaaggtaaaaacgccaatgcaaattttttatttttggtttttaataatataatgaacttacttttagatccgtatgagacatgagccaatat

SEQ ID NO: 7781 - DNA, 479 bp, Arabidopsis thaliana columbia
cggtacaaatacatcatcccattaaaccggttattcgacccgctcctaaccgtttccggttttccaaacccgaaatccacctcgtaaacacgaaacctcggtgagcttcccaccgcaacacaattcactccggcgtctttgaattgataaatcttcggcgaattctcccactcgtcgttacgtgcgtcgatcacactcgcgtcgtgtgccgcgattgctttctggatcaccggagctccgaacattggtccgtgcgctgctagtagcccgccgctgttccggtgaagatcgcttgaatcaagtttccgaaatattcctccggcattggaggatcaacgcggcggcgacagtcggcgaagacggttagcatagctatgtcaccggtatgaggccacgcgctaaggtgacgtggcgccagatgtgtgatgtcagggattggaatgttgagaatggctttgaactgtccgatgggattactg

SEQ ID NO: 7782 - DNA, 557 bp, Arabidopsis thaliana columbia
ttcttctttgattcttttttccttcattttttaacgtatcttgagagatcgacgatgtcgtcgaagaaatccctagttcaaagtctcttcaacatttccaaaacctactccaggatttctggtcttacccgaatgcgtccgaccaaatccggcggcattcctcccgacgccggagattctggaatccgccgcagatttctccacaagagggcatttttctcgccggagatagttcctaaaggtggtaacttgatggagaaactcagggaattgactttgtccaataataatcgtattagactcgacgagatgttaccgccaccttcgccgaagaaatcatcaccggagtttttcccggcggtcacggtggaagacgtgaagaagctcatgagagcagcggaaatggagctggtgaaatcgaagctgagagagattggcaagaactgggttccttattcggagtttgttcgggtctgcggagaatacagttcggatcctgaacaaggtaaccgggtcgcgaatatgcttgacgaagctggaaacgtcatcgttttggg

SEQ ID NO: 7783 - DNA, 550 bp, Arabidopsis thaliana columbia
catcgaccgtattgctcgccaagtgagagaacaaacatcaacaaacacaatggttgacgttgtagatgagcaagtgcaacccaattcaatcacaacatgggatgactgcaaaaagaccttcttggcaaaattcttctccaactccaaaactgcaagactccggaatgagatatccgtattcacttagaagcaagttgaaacctttactgaagcttggaagcgcttcaaaggttatcaaaccaaatgccctaatcacggaattaagcaggcttctcatcttagcatactctacagaggagtacttcctaagataagtatgctgcttgatattgcttcaaatggtaacttcctcaacaaagacgttgaagaaggatgggagcttgttgaaaacttggcttagtcagatggcaattaccatgagaactatgatagaagcattcgcaccagctccgataatgatattcctttgatcaaactttaccttctcggtttttgattcacctcaccttgccttactacgcctccttttgcctttattatgatccgaaaa

SEQ ID NO: 7784 - DNA, 594 bp, Arabidopsis thaliana columbia
ccaaacacatcacatactgtctcttctccagtaaccgtcttctgcatttcaacttcttgacacatagaatcttcattactccttcgtctctttcttaaatcgaaccaagtttcttcactcccacgcaaaccacgagtctccgagtgctccttagttgaacaatagctaagggcacaatggttttcaaccatcccatcaacgacttcatcataagccttaaccgcctcttttcctgttctcaatccgattttgcggctgcttcttaatggatcggacgtatttgagttgttcatccggtagtagtttgggttgcaatccatttccatagcttttataactgtttcgagctgaaaatttgtgtgagctttttgagtacctctaattctaaccgcggctttatcgtaagccatagctgcttcctctgcagtttggaacgttccgagccaaaccctaacaccgtttctcgtcgaatccctgatttcggctgcaaatttccccacggacgcttccgtactccctgtattttcttgctttgcaagaacccgagaagacaaagaacatgaatcaatggtagggttggttaatggatcatga

SEQ ID NO: 7785 - DNA, 555 bp, Arabidopsis thaliana
gatgattcatgaactatctgttcaaaataaatccttggagtggacaaattcttcacttagcgaaaaaaaaatcaaaaatttgattgatagaaaaaagacaatcagaaatcaaatagaagaaatttcaaaagaaaaacaaaacttaacattctgtttgtcaaagtataggctgagcgagtccacattatactaaacaagaagagtagccaaaacatatagacttgatgattgcaaattcacaactttactttcatttattccttgaggtaataacagtggttgtggtaaaccacatagtcgagtaacatcacaaaaggaatattcaatcaaagtacaaaaaaaaaaaacatttagacaaaacacacaaacttctgtttcctacgcttcattccagagtgtgctactccatgttgactggtggagttgcctaaataaagacgattagtggaatcgatcagcaatatcgaaaagatctattagtgtctattgttgacgaccggtgtggctaaagagaaatcatttgttaccttgaataaaagatcatgagcaatagtg

SEQ ID NO: 7786 - DNA, 466 bp, Arabidopsis thaliana
aagaatgcttgtgattctgtgaagaattatggcttgacgaagatgacgactcagtaaagaagaccacgtcttcatcggaaacgactaaagcttgaattgatcttggaaaaggcggtggattcacttccaagacaccttcaagaatctgaacaacttgactcatcgctggcctatgactctcttcgtcttgtatgcaccaacacgccactttacaagctctcgtgacctcctctatgtccactgcatctccctctagtctagggtcaaccagtgagcgaatgtctccatctttggtgagtatggtcgcggcccaacttggaaagaatctgactttctcgttctctgattgctctgtgtttctcctcccggaaacaagctcaaataacatcatcccgtagctgtaaacatcggctttcgctgttatcgcaactcccgatatccattccggtgcaagatacctcttgtg

SEQ ID NO: 7787 - DNA, 796 bp, Arabidopsis thaliana
attgaggccattagtccacctccatgagcttccctgacaaatagatctcgtaaagagcagttaagaacacacaaacgattctcatagaagagaaacccgacttgtctaaaatagtgaccagaagcaaacttctcacaagctttataaacctcttaaaaatcatggtcagtttcataaagttcttttatttgttcaaaacccagaagcttaatattaagagtagagagtagggtatacctccgggataatgcatcggcaactacattatccttacttttttggtacttgatgacgtaggaaaatgttccaataaactcaacccacctcgcatgtccttgttaagtttctgctggcccttcaagtgttttagcgactcatgatcagtgtgaatgacgaattttttaggccataggtagtgttgccacctttggagagctcggaccaaggcgtacaactccttgtcataggttgggtagtttagcgtagctcctccaagtttctcactgaaaaaggcaataagcttttgatcttgcattagaacagctccaatacctatacctgatgcatcacactcaatctcaaacgttttaagaaactcagataatatcaaaacaggtgcattggttagtttatccttgagagactgaaacgcttcttcttgtgctttctcccacttgaatcctacatccttcttcataacctcggtgagtggtgcgacatatggtactaaagtccttgaaaaatcgcctataaaatccagcaaggccatggaaactccttacttctcccacagtct

SEQ ID NO: 7788 - DNA, 856 bp, Arabidopsis thaliana
tatatatgtcacaacacatttcaagaaccttttatcagtgcagaaattatataatatatgttgttttcatgaactgctttgttttgtgcttctcttttttactgtatttccaattatatattcttcaaactctcttccttctaaattcaccaaagcatagcatatctgatgagaataaatcaaaatcatataattagtatagttaaggacaatgcaccacacacatgaagattcaaagaaagtgtgagacttctaaactctcttttgctattgattttgcatgtcaaaacttcaacattctttctttttctttttacttcaccgttctcttttttgtttttacttcaccattctcttcttcgtatgtcttcttcagttttactgttatttataaatgcatcagtcgtctagggtaaaagttgagtcagtttcagaatatctcgaaaagcaaatacaaaatcttaaatttcttaaacaaattagattatacgatcaatcacaatgaataatataaatgtttaagggaagattaagaattcaaaatgtaacaatatagttacgatagaatgttgtaaaagattgtaaatctcttggtttaggcaattttttttatcaaccacacattaattaaaaagtaactccatgactggttaccgaattaggaggaatagtgtctacaaagataacttcagaaaataaaattgtaaatgagggagctaagcagtccgctctaacattacatgagcgggagataagagaaagcgagaaaaaggggaaagagcgcataacactctaagatcgtctagcagattggtgaaagcgggtcattcttcagttaactgcccatggagactag

SEQ ID NO: 7789 - DNA, 658 bp, Arabidopsis thaliana
gatagagaagtgcggcagtgtccgcacggaatccctcttcaccaatctctagctttcttcaattgggcaacttcacgagacgattacgaccacaaatcacctcatccttacaacgaaatgatcgatctttcaggaaaggttagacaattcgacttagcttggcatttgattgatctaatgaaatccagaaacgtagagatttcgattgaaaccttcacgattttgattagacgttatgttagagctggattagcttcagaggctgtacattgctttaatcgtatggaagattacggttgcgtacctgataaaatcgcgttttccatagttattagtaacctttctaggaagaggagagctagtgaagctcagtcgtttttcgatagtttgaaagatagattcgagcctgatgttatagtttacccaatttggttcgtggttggtgtagagctggtgaaatctctgaggcagagaaagtgttcaaggagatgaagttggctgggattgacctaatgtgtaacttacagtattgtgacgatgcgttgtgtagatgcgggaaatcagcagtcggatgatgtgtttcggatatgtagatcaggtgtgcgcgaatgcgatactttacacttgatgaggtcatgtgaacgagagacagagaggt

SEQ ID NO: 7790 - DNA, 921 bp, Arabidopsis thaliana
tgaaccttagatttggcttgcttacaagtattacatctcccacaaattctttcaacatcacgtttcatgtgcggccaatggaaatgttctttcatgacttccaacgtcttagcaatgccaaagtgtcccattagtccacctccatgaacttccctgacaaatagatctcgtagagagcagttaggaacacacaaacggttctcatagaagagaaacacgtcttgtctaaaatagtgaccgaaagcaaacttttcacaagctttataaacctcgtgaaaatcatggtcagtttcataaagttcttttatttgttcaaaacccataagcttaacattaagagtagagagtagggtgtacctccgggataatgcatcagcgactacattatccttatcttttttgtacttgatgacgtagggaaatgtctcaataaactcaaaccacctcgcatgtctcttgttaagtttctgttgtcccttcaagtgttttagcgattcatgatcagtgtgaatgacgaactccttagaccataggtagtgttgccacgtttggagagctcggaccaaggcgtacagctccttgtcataggttgggtattttagcgtagtcctccaagtttctcactgaaaaaggcaataggcttttgatcttgcattagaacagctccaatacctatacctgatgcatcacactcaatctcaaacgttttaagaaagtcaggcaatatcaaaacaggtgcattggttagtttatccttgagagactgaaatgcttcttcttgtgcttcctcctatttgaatcctacatcctttttgataacctcggtgagtggtgcggcaatggtactaaagtccttgacaaatctcctataaaatccagcaaggccatgaaaactccttacttctcccacagtctttggac

SEQ ID NO: 7791 - DNA, 635 bp, Arabidopsis thaliana
tattgtcgatcatattgaattcgtaatatataagaatatctcaacataatatcttaccataatattttcttagatattctatcgtaacctcattttcttaccgttttcttttcatttaattcaaatgccgatatttactcgcttgaaatcttttgtgtaattaagattaagcaacacacatatcttccgctcatatacaaaatttctgcatttattcgccgagatttattcagttccatttggaaaaaatccaattacagaaacaaatttaagactacagaatgattataatcaagcatattcaaaaatgaaaacgtttaatgctaaatatttagttcaatattctctacatattcgaattaaaaattgcctaaatcttttacaatattctatcataactatattgttatcatttgatttcttaatcttcccttaaaaatttatgttatttattgtgattgatcgtataatctaatttgtttaagaaatataagattttgtacttgctttccaatatattctgaaaccgattcaactttggaaagtggattaatgagctctctcttattgatataggttttaaagggaacaagtttacttggagaagaggaagggaagaaaggaatgttgtatgg

SEQ ID NO: 7792 - DNA, 530 bp, Arabidopsis thaliana
gctaacagaaaccttgcctgtccattattgccatacgtattacagaacatcagtaaacactaggcaactttcagtgtttcacacttgaacaatcaactacaaattcagagatgaaaggggttaaaaacactgacctgggatccatgttgatcacaaacaactaatcttggtaccagggaaacgatcacgaatgatcatctgcgcatcttcttgaggggcttccaagagttgggcaaatgccttgacaaataaagaggtcagacgagacatgtaaggctcatattcgagaaaatccaaggccaatgcaacttgcatattcattacctggtgttcaggctgattttgatacccaagttgcgccactgtgcaatggtcattccatggaaaacgacaacactaatgtaagaatccaacaggaggatacggtctgcaccaatggaagcaacatccaacaatgcaggttgaggtagtgagttaaacgaatatgttgttagagatggctgaatcataacagctgcgttcgaaatatt

SEQ ID NO: 7793 - DNA, 534 bp, Arabidopsis thaliana
atttgagtttgcactaaacccacaatgcgtttcctatcgtgctaccacagagacgatttccctggctttagaagccaacagctcggaggctattacgatactgtaccaggttttggaagacccttcttcatctcctgaggctatacggatcaaggagcaagcgattacaaacctttgtgatcgattgactgaagagaagagaggtgaggatctccggaaactgttgaccaagttgaggcctttcttttccttaatccccaaggcgaaaactgcgaaaatcgtcagaggaatcattgatgctgtggcaaagattcctggaacaactgatctccagatcactctctgcaaagagatggtcgaatggacccgcgctgagaagcgtactttcctcaggcagcgagtagaggctaggcttgcagctcttttgatggagaacaaggagtatgttgaagctttggcgttgttgagtactttggtaaaagaggttaggagattagatgataagcccttctggtcgacatagacttgctggag

SEQ ID NO: 7794 - DNA, 478 bp, Arabidopsis thaliana
acaaaaatgtgccatggacactaatacacaaagctttctttcactcgaaatcacacatcagaaacaatgtcgtacgggaaaccgatatgtatcatgaagtggagaagaggatttacctgaatttcaaacttgacaacattgggcgacttaacagctgcttcgttctctattatgctggactcgtctccaaagtagttgttatcgtgcatcgagttactgagcataccatctgcgctgctgttaggaacccatctgcacttcatgttgtagtgccctatcttcttccaacatacattcaaatcttgcagggctttcaggacttccgtcattatttcacggggatgacccgagactgtgcgatcaaattgttacaatattaatcacatatatatcaaaagctgaagtctttataccataaatacagaaaatatcaaaacgtgaagtccaagagcccattttctctcaacagggtattgag

SEQ ID NO: 7795 - DNA, 592 bp, Arabidopsis thaliana
ttcctgacattgctgaagtttatcacatcttagatcaagatgacagtcaaaggaaatttggtaacagcattgttccagctgcttttcaagtagggattgcagggtctcatcctggagtggtgaacgctgatgcatcctcgccttctgctggttctttgattgctgcttaccagtcttttaagaaagacaaaccaacatgttcctattgtggtttcactggacatgttgtggatagatgctacaagaagcatggctatcctcctgggtggaaacctagaaaacaacaagtcaatgcttctccgactcctcaatcgtcttctcctgcaatcacagcacaagtgtctgctactgttggatcaggtgataaacaggatggtggtctggatagtttgattgggaatctcagtaaagagcagttacaacacttcattgcttacttcagttctcatctcactactcagtttcctgcttcagttcctttaaatgaggcttctacttctggtatatctttctcaccatctacctatagttttattgggattttaactgttactcagagtgtacaaataagagacatggataatgatctggt

SEQ ID NO: 7796 - DNA, 858 bp, Arabidopsis thaliana
tagtctagaagagtgtgtgctctaaagcggagggtaaagtatcaggagattaatatcaataaaattactctcgttaacgtggcgagagtaattcccccagactttataagctaatttttttcgtgaaggttattgtcagatccaaaagcaaaaacccgccttgtgggcgggttcttaagaattagtggtgcccggactcggaatcgaaccaaggacacggggattttcaatcccctgctctaccgactgagctatccgggcaacggggcgcattaaacctgattcgcctcgtctcgtcaatcaaatttcttcaatttactgcagactgcacaatctatcatcactttgccgatattgcacgcattgtcaggcaaaccaggcggtccaggcggcggaaagcggcattgccagaaggagtgctggaagcatgttgaccaccgggaacattttaatgccacagatgcgtaatccggttgccagcagcaataaaccgcctacggcgctgaagtctgccatcatcgacggtgtggtcagcggtaaaatcagcgcggcacccacgccagcgttaactggatgatcagtaatgggatactaatcaccgataccgcaatacccagcgagcaggcgaagatcatcgccgtaaagaaatcaagaaatgacttggcgattaaaatactcggatcgccggtcatcccttcgttcatcgccccgaagatcccggtgccgctgcgcaaaacaggacaataatcgcgacataattctgaataaaagattcatgcgctggcttcttacgtgagtgacgaaacagattttgtgctttggcgactgctgtattgacacctttctccagcaaacaaa

SEQ ID NO: 7797 - DNA, 456 bp, Arabidopsis thaliana columbia
atgattactgaataatctgaccaaatcaaactattttcaaattactgatcggttatttatttcccactatcattaggtataagcattgactgtggaaccacgggttcctacgtggactcccacgatgtaacatgggtccggaataaaggcgttcgtcacaccggcgagtccattaatatcacggacgtcgtcaaaaaaccgattaataccctccggtactttccaacaggtcaaactaattgctacaccaacattccagcgacaaaaggccggaccaccctcgtgaggacgaaattttactacaaaaactatgacgagaattcatcgcatcatctttcgacgtggattacgatgggaaacaccgtcattctattgctatgacagttgactcgttgttcagcgccgagggaacattccattactctgaggtgatatttgcttcggcgaatgagaata

SEQ ID NO: 7798 - DNA, 898 bp, Arabidopsis thaliana
ttgactgaagtgattttgtttttcgtttaggatctagaaaccctaaaatttgattccattgtggtcattttaggagcaataaccctaattgtttgtcaagtttccataattttaattccattgtgttcattttaggagcaataaccctaaattgtttgtcaagtttccataattttgattccattgtgttcattttaggagcaataaccctaaattgtttgtcaagtttccataaattttgattccatagagttcagtttcaaagtttaaagctaatctttttttttttggtgtgcaatttgcagattttccagcaatgtactggaatcaacgcgattatgttctacgcgcctgttctgttcagcacattagggtttggtagtgacgcttcactttactcagcagtggtgaccggagcagtcaacgtcctctcaactttagtctcaatctactccgttgacaaagtcggtcgccgagttcttctcctagaagctggtgtccaaatgttcttctctcaagtcgtaatcgccattatccttggcgtcaaagtaacagacacttctacaaatctctccaaaggtttcgcaattctagtcgtggtaatgatctgcacatacgtcgctgctttcgcctggtcttggggaccgctcgggtggttaatccctagtgagacattccctctagagacacgttccgcgggacaaagtgtaacggtctgcgttaacttgctcttcacgttcattatcgctcaagctttcctctctatgctttgccatttcaagtttgggatattcatcttcttttctgcatgggttttgattatgtctgtctttgtgatgtcctacttccggagactaagaatattcctatcgaggagatgactgagagagtttggaag

SEQ ID NO: 7799 - DNA, 583 bp, Arabidopsis thaliana columbia
ttttgctgtattgcattccgtgcatcatccaattttgcggacaaagatttctcaattgctgcagaatttaaattgtcattaaatagtatcaaaagtagcatatgaaaaaaatttgaatatagcttacctaatctagcatataaagacacaatggaaccagtgtctgcttgtctatacatctccccaagatctgtaaccactggtgcaacagatgtgtgtacccttatacgtctctctccacaagaggcggtatatcttagttctgttaaggattactaaaagctaaatgatgtgttgtatgtttaaactcaagtatgtttaaaatatcaactattcaaggatacagcaaagccacttggaaatacacagtctgggatgttagcaaagtctcctcaagagatagctgcattgcatacgctttgtcacagtcaacagcaggaagagcaagcaggtcagtagaccttagcatgaagtcccatggtaggacgagaaacgaattcctgcatgcaaaaatatataagatcacaagtagcacaccaatgcattagcaaatattgacatagcaggtacaaaaacgaatata

SEQ ID NO: 7800 - DNA, 568 bp, Arabidopsis thaliana columbia
ccgctccgttgactctttcaagcaaggtcttcactgaactctccgatgctttaaagtacgagtcatgcaactcctcttctcctaaagccgtttacaatacaggacatgatgtcgtaaccctcaaggaaccaggaattcactacttcatcagctcaaatcatattcaatgcgtcaatggactggaactagacgtttttgtcgtccatgaaaagtcacatccgatccctccaccaccacgaagcaagacccatgaacggtcacgacccattagccattactccttcaccaccaccaccaagcaagacccatgaacggtcacgacccattactccttcaccaccaccaccaagcaagacccatgaaccgtcacgtccgaatactcctccaccaccaccaccaccgagcaagacccatgaaccctcacgtcgcattactccttcaccaccaccaccgagcaagatccttccttttggtaagatctacagagttggtgactacggaggatggagcgtttattacagttactactattacaagtggagtgagggtaacagtctcatgttgaaga

SEQ ID NO: 7801 - DNA, 581 bp, Arabidopsis thaliana
gttcgttcatacctcaagctgacgaccaaaagtgacaaggatagtgtcgggatcagcatggaaagaaagtggacctttccctgagttgacgcggaactcgcagttcttagccggaaggtgaaggctgagtgtataatgaagcatttcttcggtcctctctttgggcaaaggagggctttgctcagttacattttcatgattgtacctgtaaacgctaagcacagattctcctctttgtatcttcttatcatttggtcttcttgagttctctaccattatttgccctagtttcctcgctatatcttcaagtttatcagctacattctccatttcttggctgcaaccaaattaaagattcaagaaattggaaccaaattctcaatcactaattatttttttgcaaatgcaatgttcatcaaaaatttctaaaatgtaatcactagttcaaacgaaacttgtataaccaaaacgaatgttatagcctttttgtattgattcttcacaaattgttatttagctctagttagtacttcatctaccaaagatctctccataacacaatcaaccagagagtgacagaa

SEQ ID NO: 7802 - DNA, 674 bp, Arabidopsis thaliana columbia
tactaacgggctttgaaatggaccgaaataggcccaagaggggtttaaatgaagataaaccctaagctgaacaaaccttctttcctcatgtgcgtcggcttcgcttctggaagattctgaaaatcaccgatttcgatggcgactcggctcaaggagattgtgaagaagtacggaaaagtcgcgcttggagtccatttctcggtctccggcgtctcaattagtggattctacatcgcgatcaagaacaacgtcgatgtcgaatcgctcttggagaaataccaaatcccatggttctccagcaaggaaaaccctaaccctagcctcgatttaaagctggaagagcaaggttccgttacgagcgataacaagacgaaacagcttgcgaaatcggccggcggaccgtacgcgttggcggttttgtgcaataaggcgctttttccgatcagagttccgatcacgatggcgttgactctccaatcgctagattcctcaggcagaggaagatcctcaaaaccggccaatgactatttctctccacattttcacatttggggtcttgtctatgttttctcacatctgtattggttcatgcgtttttgtatgtcgtaattcgaatgtatgctcttaataggaagaaatgagatattgtgttagaggtattcagactatagtgt

SEQ ID NO: 7803 - DNA, 570 bp, Arabidopsis thaliana
agtcactaagggggaaatgcaaccaaagttgaagaatgtattcttggtggatggactcaaagcaaatctcataagtataagccaactgtgtgatgaagggcttgatgttacctttactagggttggatgcagggcattggataagcaggggtcagtcaagctggagggacaacgatctgcaaacaattgctacatgtggacatctaattccacttgtttgcgcccatctttggaaaatgatttcaaggtctggcatcagaaactaggacatttgaacttcaagacattgatcaaactagcaaatcatgagattgtcagaggaatgccaaagctgaattctgatagttcgtttgtgtgtggaccatgcaatagagggaaacaagtcaaagttaatcacaaagtggttcaggatattggaactacccatgccctagagctgattcatatggatttaatggggccaatcaatgttcagagccgagcagcgaagacgtatatctttgttatggttgatgactcacacgctacacgtgggttcgtttcttcaagaaaaacaaatgcatttgagag

SEQ ID NO: 7804 - DNA, 589 bp, Arabidopsis thaliana
ataattttagcaataaggaattgaaaatccaattaactaatgtagtaactaacaggtttttctgcgcaattgaaccggagatgagacctgcatggggtaaatccatgcatgaactcctcaaacctgacggagaacttataactcttatgtatccggtaattatttcatatttttgtcgtgagaatgttccatatacaaattcaatgatatataaatatatgaattaatactttgcctttctattaattagatgaccgaccacgagggtggagctccctacaaagtagctttgtcttcgtacgtagttaacccctcaatatgtcatatatatacaaaatcatttaagattattaatgactaattaaaatccataattgtactatactttcttaactaaatgtgtgtgtgtgtgtgttttcttttgagagtttagctacgaagatgtgttggttccggtagatttaaagcggtgtccgttgaggagaaccagactccattccactcgtaaggtctgtgcgagatgacatatatgttatacaaaatataagtcgatattttattttggtatataacatgcttgtgagttgtg

SEQ ID NO: 7805 - DNA, 542 bp, Arabidopsis thaliana
tacaaggtttcaagaacctgtttaatgtttgagatgttggctatatgttggagagtgcaacttacattgtcggtatcaacttcggatataacttctttgatgctagcttcatctcccattccatattctttcattgcactttccaactcatctctagttatgtgcctgttgtataaccaacatattaacattggtgcctcaaaatagttacacacatttgaatcttgattctcttgacacaagaaatgatcgatggagcgtgattcgtaaactgcaaatggaagaaacttacccgctgttgtctttatcaaagtgttggaatgctttgtcgatctaatttgtatctatgcattgtcgcagagataaatcgtagtagtcgattgttccattacaatccaggtcagcctgaaaagttatcatcacgtgtttcaagctttgtctttttcaaaaccttaactgtggaaagtgaagccaagatgctgaagatacttaacttcagtttcagagagtctagacccaagtctagttagcccagttttgag

SEQ ID NO: 7806 - DNA, 318 bp, Arabidopsis thaliana
cataagggtcctcgtcgtctgcacagttttcttaaaacaagcagcagctgcagggctctgtctcgcggagataggcgagaagatgactcgggatttctccaagggtgaagagagtttcagtctgttagagaccctctgcaccaaagcgaaacaagtgtctttggcaaaacaagcgaagacagtgactatagtcatgaaggaaatgaagtgaacacagagttacagtgtggaatgtttaagtttgacggtggagatacaccatgtgaagcggagatttcagaggtatttcatgtatctaaaccacctttggttccaaga

SEQ ID NO: 7807 - DNA, 482 bp, Arabidopsis thaliana
cgccagtgtgctctaaagccgctgggtaacgccaacaccttctgggtgtatgcggctctgagcgtactgtttatcctgctgacattgtggctggtaccggaaaccaaacacgtttcgctggaacatattgaacgtaatctgatgaaaggtcgtaaactgcgcgaaataggcgctcacgattaatctccccaagcttcctcccatcgcggaggaagccacctcttgcagtcatcttttcttcgctctatcctctgccgctatgaaaacatcccgtctccctatcgccatccaacaggccgttatgcgtcgcctgcgggaaaaactcgcccaggccaacctgaagctagggcgtaactacccggagccaaaactctcttacactcagcgcggaacctacgccggaaccgctggctggaaagctatgacattcgcctcaatcccgttttgctgttggaaaacagtgaagcttttattgaagaagt

SEQ ID NO: 7808 - DNA, 990 bp, Arabidopsis thaliana
atggctttctgaaatttagtatatagtgatgaacacaatactctgaatttatcttcatattgacatggtttcatttgcactgatagctttcacttttggctctctcaatgaacgcggctaatatatttttctaatacagtcctcaggttacaatagctaccgcaattatcttctgtcatcgattcttcattcgccagtcacatgctaggaatgacagaagggtgagtatatattctttgcacatggcgttgtgaatacttatatacatgggcctactgtttgttgttcgagccagtctgctgctatctttgtttgcatgtatttgaagcattaaatggctccttttccttgcgtccgcttatattcattgtctccatgtctctgccagtttcctttgtatatatatagagagagcatatcggctgatcgcattagatgaatatacactgacttctcgcgaatattcctgccatgaatattaagcgttctcttagtctatttggttaatgcatctagttctttgtccatatttatccttctagaaactagcgcagaacagtattaagattattactgagtcctttttccatgttgtcctccctcctcacccagacgattgctacagtctgcatgttccttgcgggaaaagtggaagaaactcctaggccgttaaaagatgttattgttgtctcctatgagataatacacaagaaggatcctactactgcacagattatcaagcaaaaggtctgaatattctaaactttctctaatccggtttcctgtttagtaataagcgaatttgcactgtttctcgcatattctattttactatgacataagttttctactaaacccaggattgcacttgtttgtgaacaatcctcctatgatcattgtccttgtcgttggatctctcatctgtgctggtcacgtctctattatttccttctttgtactgaacgtattcacttttgcaggaagtatatg

SEQ ID NO: 7809 - DNA, 988 bp, Arabidopsis thaliana columbia
tatgcacacctttgtttcagataatttttaacattgtggctttgtgatataggttgtggatgaaacctgagtacagatgctactggagggcgataggtccagacacaaaggtcgcagttgcatttgggctagtagccgggagaatatacggcacagatatgacagtacgagaagcgcttgacgggcgaggagaagcctataagacacttctaagagaggcaacaactgcattgctcaattcatacaactctctaggatttccttataattccgtcgctgtgatcacatataccaatctggctctcctcgggaattcggaacacgatgtcctcatgactgctattcgtttcatcaaggctaattccgggacctgcagattcacagtctgcaattgattgaatgtgttttcaatacttatatactctacactctttctttctcttttacattgttcttgggtccttttgtaatactataaaagtctatacctggattcattggagaatttatggactattattgtatccctatttatactcggcattaaacttagttgttacaaagcctaacgttctagcactgtgagcactaaatgttgttatgatataatgcatcaatgattggagagggacatgaacaaaagtagatatgcttcattcataagggagatcacaaggtcttagaaatagaagaaaaacaaaccactgagctattatatatcagacaaggaacgtgttatgttctggctatttcaagacacaaactttcctccaacaattggtctcttgctaccagacagatcctgttcaaaaccaaagcacatcaacgctcagcaaaatccattaagagggtttcaagaaaacgaaaatatcgaaatcagtaatcacagtaagatatagagatcagattgtgtacctttgcaactcactctaacatgttcttgtgactaatcgattcctaatactccagtgcgaaagggatggagtga

SEQ ID NO: 7810 - DNA, 550 bp, Arabidopsis thaliana columbia
aatgtgagctgtaatacatgagacaaatgggagaggatcaaaaaagatataaaataaataaaattaagaattgaaaaaaaaaaaaaaaaaaaagaagaacaaaaatttattagaaggctagaacaagtagagaccatgcgattgccgcagctcccaccatttgtatcacaacacttattctttgtgctccgctctgcagtaaaataattcgaaattttaagttctagaaactagaaagaatcaaatctaacaaaaaaattgtgatttcagacatttttaaattataacgaataacctaaactatagtcaaaagatgggactaatttacatttgtttttacttaagtgatatttttacatattacctaaattaatttaccatattgtttaggttaaatcatatattatttacctgatcgtcagcggcaggagagaaagcatcgcttggtccaggaccaggagcttctccgggcggacaggcgggcttaaaagcccgaagctggtccaggagccggagcggtcttatgcttctttgtctcttcttatgtttt

SEQ ID NO: 7811 - DNA, 632 bp, Arabidopsis thaliana columbia
tccttcacctggtcggcaattttattcacttggtcggcttgacttcttctaaagttggcattgcttcttcatcgggtcggcgagctagacaagttggacgagttgtgcagttaagcgatgaatcgacagctacacgacgagttagatgagctatagagtcaagggacgagccgacatttaaacgaggagatggacgagctgtggagtcaagggatgacctgacatgtatgcgaggagatagtttctcaggagatgtgaagagcttggagacgagctaagagacttaaggacgagttgagaagcttgaagacgagctcgatgtggtagttggacgaggtgttgtcagttgacgagcaagaactgtcgggttgacaatttaacagtcgacaagcaggaactgtaggattgatgagctcacagttgagagcaggaattctcgggttgacggctttcaaattgacgagcgtttgacgagcaggaacggatggataaacgagaagaaatgtcaaattgacgagatcagcgttgcgagcaggtatatcggattgatgagctaatagttgacgatagagaactttcggattgataagacggaactgtcagaatgatgaggtgatagttgacgacacata

SEQ ID NO: 7812 - DNA, 523 bp, Arabidopsis thaliana columbia
cctgaatcaaacaattataagtcgatcttgaaggtctgaacctaaaatccttgagcctccctaactcctcaagcgcaatactaaatgacccattcctgcaatgtttccttaccaacacattgagaaattcgccaaacacttccttatcatcatctctaatctgttgcaggaattcttcgggaactttttcgtcatcatcacgtacaataaggtcaaccaaagcgttatacacaggtgcagtatgcttataacctatctgcctacctgcccaaacgaagaaactgataacagcagatggtcttgctatcaaacgcaacacctcaatcactaaactctcactcaatttctctctaaattgcctaagaaacttctgggattttccccaaacacatcgtcgacaccagaaacagcatctgcaatggctctagcgtcaatagaggattgagtaataatgggcactacttgatgaacattaaagtttccatagtcgacaagagaatcgtgcaaaaaggagtactcttta

SEQ ID NO: 7813 - DNA, 558 bp, Arabidopsis thaliana
cctcaagagaagcaccggtttcgcgacgagggtgacggagggtgaggaagtcagggacgttctcaacgacgcaaggagcgatacggacgtagaacaaacgaacctccagccacgccgattgcgacaacgaaattgatgatgccggagacggcggcgatacggtggaggtattcatgtggtacgatttggttgtacccagaggatccagatgatgaaggtgatctttcgaaatcatcgagaacgattagattcaagaaaacctaaattcgcaaatctggatttgatgagaaaattgaaggatttgaggaacaagcagagaatgaatgagaggaggaatcgaacaggaacttttttgtttgtttgtttgtttgttgtgtttaggtttttgagggtttcagatattttcgaaggtaaaaaaaggtcaaaaaattataatttgattgaagacgaggtaattacggaggggtcaaagaagaagaaaccgacaggataaaatacccgtcctcacctgtgagattcgcacgtgtgacagttttttttggctttttcccacaaaca

SEQ ID NO: 7814 - DNA, 535 bp, Arabidopsis thaliana columbia
cgccagtgtgctctaaagcaatccagcgtaaatcatactgacgcgcccactgcaccagttccccccgcgtgcggcgagcaacgggcgaataagccgcgttccggcaaactccgagacttccgccatagccgaaagcccggcacgcacctgccgcgttttagcgccacgagaaaggtttcacattgatcgtcgagatgttgcgcggtgaccagcacttcaccgggcaacaaggtgcgggcaaatgcctgataacgtgcctgccgcgcctgggcctcaatgcccagtccttcttgcgcaagttgtacgcgttcgaccaccagcggcacctgccactgttggcagacgttttcgcaatgcgtaacccaggcatcggcattggcacttaaacggtgatgcacatgaatagcgcgcagacgacgaccctggattttccgtccgccactgcaccaactaatgcagcagaacggtggagtcaagcccgcgctaaaggcaccagaatctggcgtgaggtgagaagttgtctattgagcgtgag

SEQ ID NO: 7815 - DNA, 613 bp, Arabidopsis thaliana
tgaactgttattgttgaatgtctaattcttaaataagattctctggcaatatgtcttctgaaaatcttctgaatcttcaccgctgctgcctggcgtcgcatttcctcataaaggttgcatgccaatttgccttgcatgcaacaaaaacgtttgagaagctcaactccaaaaataatacaatccactaatatatttcacatctgcatggaaatatgaaacaacggaccataacaagccactaatttcatgtttacacacagaagcaagaaaattctgaatccaatatgctggacaactacaacaatagcaacataagagaagatcaaaattttgcaataaattacggaacaagatacctcggcagttagactgtaacacgatagcagctcctcgtagagcacggaattctttgcacgcaataaaagtacggctttgcctttgaattctcctagctgcatttccgagaacctcagctcttcttgcatccaactcagccatctgcccagccctaaggaatacttttgttttccctaactggaaatggcagcatgttggataaattagacatagttcctaaaacatcaaaggaaccattacataatgcaattacaaa

SEQ ID NO: 7816 - DNA, 823 bp, Arabidopsis thaliana
tccaacactaatctcttatgttcaacactatgatcagaggttactcgattagcgatgagccggatcgagcattttctgttgtcaaccaattgagagctaaaggtttgaccttggaccgattctcgtgtatcacgactcgtaaatcatgttctcgtgaattgtgtgtgtcaattggtgagggattgcatgggattgctttgagatctgggtttatggtttttactgatttgaggaatgctcttatacatttttactgtgtttgtggaaagattagtgatgctcggaaagtgttcgacgaaatgccgcagagtgttgatgctgttacgtttagtactttgatgaatgggtatcttcaggtttctaagaaagcgttggctttggatttgtttaggattatgagaaaaagtgaggtggtcgttaatgtcagtacgttgcttagctttctttcggctattagtgatctaggagatttgtctggagcagaatctgctcatgtgttatgcatcaagattggccttgatttagacttgcatttaatcacagctttgatagggatgtacggcaaaactgggggtatcagttcagcacgcaggatctttgattgcgccattcgaaaggatgttgttacatggaactgtatgatagaccaatatgccaaaacgggtctccttgaagagtgtgtatggctactgaggcagatgaagtatgaaaaaatgaaaccgaattcatctacatttgttgggctgttgtcttcctgtgcgtacagtgaagcagcattcgtaggacgtactgttgctgatctattggaagaggaaagaatagc

SEQ ID NO: 7817 - DNA, 471 bp, Arabidopsis thaliana columbia
aatcaccagccaaccacagaacaaaacttggaacatgaaccgaaatcgtttacctttttatctatctttctgtctgttaagtcagcatcaacatagaacccagcatctttaatttgcttttgaacctgttgtgtcaaaagaaaaaccagagattagacactgcaaataagtcgataagaaccacatgtgctcagtaaaagagtacagcaacagccacaaaagtaaccttttctgcatattgctgagatttctctgatataggacaaactatggcctgtcgcggactaatccagaagggccattttcctttgtaatgctccaacaatatggcaaacatacgttccacagatcccaacacggctctatgtatcattacaggtctactctttttcgcttcatcctcagctgcgtattccaagttgaagcgaatcggaagttgaaaatcaagctgaattgaggccaccagaaaca

SEQ ID NO: 7818 - DNA, 1636 bp, Arabidopsis thaliana columbia
agaggatccccagagaagtcagtaccttcggcaactatttctgatttgcttgcccctaaatgaacgtgcatatctcccactggctctgaagatggcggtaattgaacttgaggttctgttgaacattcggcagagacatcaactaactcagatccagcagtttcaacgtgactttgatccttatcctcaatattcttttgcacagctgaaatagacagtgagggctcaatatcagctaattggtgtaaagacacatcaggatttttgaattcttcagtatccatttgatcaaccaaaatggatggcccgggctggatatcagctaattggtgtaaagacacatcagcactctcggtaccaggttctttggatttttcagtatccatttgatcaaccaaaatggatggcccgggctggatatcagctaattggtgtaaagacacatcagcactctcggtaccaggttctttggattcttcaatatccatttgatcaaccaaattggatggctcggcctggatatcagctaattggtgtaaagacacatcagcactctcgataccaggttctttggattcttcaatatccttttgatcaaccaaaatggattgcgggggctggatatcagctgatctattttccagtatagcagagctgatctctacttgagattccacagaccctatgcaaacttgatctcttgaatccctttgttcaactacttctgacggttcacagtgtgataagctatttctgttctcatcctcaggctgggtagaagatgaaggctgacatgtcttacctgaagttatgccaatatcaatagaggtattgttctgcatggtatccattttctcacagttgccatcgtctggttgtcctggtacatcgtcgggcaaaatacttggagattgaatttcctcagactgggaaacaacaacgtctggcactactccatgaggtgatgcaggtacatccacaatctcttgcaaattttcaggcactatcccaccaactgggggaatgtcagtttgatcctgagacactttcaaatcatgtgatacatctgggacctgctcagatgaaatattcgttttttcgtcattagacatgctttctagttgtcctgccacatcgtccggtaagatacttggagacagatgtccctcagactggaaaatcacaatgtttggcgctgctccgtgaggtgatgcaggtacatccacattctcttgtacgtgttcagggtctatcccaccaactaggggaatgtctgtttgatcctgtgatacatttaaatcatgtgatgcatccgggacctgcacagatgaaatattcattttgacgccatcagacatattttctgatacctcatttcccctatcaataccacctgaatctgtacgagcatgtgtctctgattcaaaccccttctgttccatcacttccattgttggacaggaaacaagagactctccatgtaaatcatctcctttactgtcttttgtgttccaaaaggcgcatggagaacagcatcatcactgggcatatgggattgaagacttttctctttctcctcactctcaactgaacaacccactagaagtttggcatcatcgatatcgtccatatgtgt

SEQ ID NO: 7819 - DNA, 573 bp, Arabidopsis thaliana columbia
  unsure (1)..(573): unsure at all n locations
tnnnnnnnnnnnnnnnnnnnnnnnttaaagcgaaaaagagattgatgatctggcagatcgtcccggtgctggctttgcggtgagcgaagagaacaaacgcgttctgcatgaagtgtgcccgtggtggcgcggtcagaccgtacaggatcgctgctacggcatgtttaccgatgagcaaaaaggtctgctggcgaccggaatcattaaagcggaaggcaatatgacctccggcgatgcgcacctggcggtgaatttcccgctgctgctggaaaaagggcttgatggtctgcgcgaggaagtagcggaacgtcgctcgcgcatcaacctgacggtgctggaagatttacacggtgagcaattcctgaaagcgattgatatcgtgctggtggcagtcagtgaacacattgaacgtttcgctgccctggcgcgtgaaatggccgcgaccgaaacccgcgaaacgcgtcgcgatgaactgctggcgatggcagaaaactgcgatcttatcgccaccagccgccgcagactttctggcaggcgctgcaactgtgttacttcatccagttgattttgcag

SEQ ID NO: 7820 - DNA, 434 bp, Arabidopsis thaliana
ttcttctcttatcgattatttgtagtaggagtatacacaattcggtttagatggccacttaatgggtttaagaaatcaaatcatggcccatctaagttaggcccatcaaaagcgtttatattcgtcgagtatgcgtacatcaaagcaaaaagttgcgaactcttctcattgagtaaactaatggtgatattctctctgatattcaaaatttgctcgaagaaacgacgatggcagccgaaacgaaggttcaggtttcagatccagaggcagagtttcttaattcgaagcaggagactggatacgagtgggagcttttcaaggagaacgtccggccattgaagagaggtcgcaatgttggtattctcaaccacgctctcaaatctcactctgaccaccaattgagatagaatctcatcgagtaacgcaggtactga

SEQ ID NO: 7821 - DNA, 570 bp, Arabidopsis thaliana columbia
  unsure (1)..(570): unsure at all n locations
nnnnnnnnnnnnnnnnnnnnnctaaagcctcgtgaatatgcccaaagacgtgcagcgccggccgcccctcctcacagcacgatagaggtgctcacatcccacattctcgccgctcccgactacttggtctagaatcccctttggtggcccgtgagttaaaaggatatcgacgcctgggtaattagggaccggcaacttaggctttgaaccttccgcgccacaacggggcgggttataccggtcctcacttcgtgggtatgcgaacgccagtcgcaaaactcgggcgtatagggactcgcgtaaatggtgaactttgcgcctgtggagggcacagtgaatgtcctgacctcttcttccatgtaccggataccggcatttatggcggtggagtctgtgtatagggcttttatggctgagggggagttcagggatgatctaggaccctgtgatccttcagttgtagtcccaattcagggactctgggtagcgccgcagatgatccctcccctttgcatctctatacctatgccgcaaccacccacacgattatagtaccctcgtcaagagtga

SEQ ID NO: 7822 - DNA, 608 bp, Arabidopsis thaliana
actctatcccctcaacagtgctgcaatgatgggtcttatgttacatacaaaggcaaaaagtttaatagaaattgaaatgtattccgatgcagttgaagttcttgctatggcagaggttagttgttttttttgttgcaagtacgtttttgttgtggtaatggttctgcaatagcttcctgatgtttgtttgtttggttgttcgtaggaatcatttttgctctgtgatcccaagattctcgaggtcagctctctctcctgtttgcttgttttctgagtctctgcgatgctgaattaacctcatttgtatctttgacatggctgtactatattcttacagcttgttgacaacctccctatgatggaaatagacattgtctggtgttatttcttgctccgggacatcaaatgcctttcagatgctggtgttcgccttgtgagagcaaggaaaggactcgagcgtgctcatgggaaggatcttctcgtgtgaggcccttcaagcaggtcaaagtcagagatggctatgtgagttagttttaatatgttttttcttgtgttcagttgaggaacccagtaaatatgcttatagaggtataagattttgatttttt

SEQ ID NO: 7823 - DNA, 572 bp, Arabidopsis thaliana
gtcgatgagcggcgcaattatcgccattgaaacaaagtatacgaagagagctacgtcgattagcttccctaaagctcccatcttttctttcttccttctccgattgatgttttgcttcaaatctgagttctgagagtcgttgactggaaaaacctagaagaagaagaagatcaaattattggtttattcaaaccgaaataacaaaccggaaagaatacgccggttcaatcaagtggttaagttaaggtgtgatttcaatttttcaactgcgtttgagatttcaccaggagcaagagaaagatgagcgagacgagaccagtgccgaggagagagagtccatggggtttaccggaaggtcaccgtgagcccaaagctcaccgctgcaacgatcgtgttgaagacgttatccaggttctcaccatttccttccttgtgtcaatttaaaaagttccattttttttccttctgataaacctttggagagattctcttagataacagcagagattcagtgagatcaatttaggggttttcgagggttctgttacttttcataatgtggggaggatgat

SEQ ID NO: 7824 - DNA, 504 bp, Arabidopsis thaliana
ttgagaaagagagataaaatgattgattcatcacaaagcttacttgtcttttgtcaacatctgggtctttcagtcctttagataaaattggaatgataagaggaagcaccctttcaccaagcttcctaaccagctctccaagtgatcttcctgctacctacacagtataatagactcatacaactgccggttaaaatgtaaggaatgaaacaaaaaaagggtaggatacaaacctggcgcctctcagaagatggtgatgccaaagaagaaattaaggtactcatcaaaattggcattatttccttcaacgtctttggtgtatttgctacgatggttttccatacatgtagtgccgcctgcacagagcaggtattttaattttgaactcaaacttataagtacattcaagcaaactcatacataaagcattaacaacattacctgacgaacagacaaactaacatcagtccggaccatatataacgctgcaagaacttcattgcg

SEQ ID NO: 7825 - DNA, 629 bp, Arabidopsis thaliana
  unsure (1)..(629): unsure at all n locations
gattctttggctttgcttatactccaacgagaagtaagagcatacaaaaagtaatgatcgaaagcgaatgaaagacaaacgaagcaacacctctttactcattctttatattaatacctctcaggcttcttcacctgttaacactttttcttcacttgcctacagcacctgagctctcttaaaaatggaggaaacgacgaccttccatggactaggacacctcttcattacaatcttcttgtactgcttctcatcattcatcgtggctccggtgataacgacatcagcatggctgcgctatgtcccggaaaagacgagtgttctctcgccatttacctctccggctttcaacaagttgtacgtactatctacaaattaaaccctcttttacattatttgtgtttcaaaaaacagaaaataagcgactgtttttttgttctatgtgaaattcaacttattttcataactaaccgttcccatgtcagtagtttatctattttctaaattttaccaaattaccatgtaaaaaataatttcatgtnttttttttgaaaggatatagataatatttaatcaatggttattagatcacgggagtgggatcattgattatgatgcccatggtggga

SEQ ID NO: 7826 - DNA, 773 bp, Arabidopsis thaliana
aaatagttgaccctttatatcctctctgagcttttcaactcgcatatccgagcaactggtttggcatgaggtcaaaagatgttccaatgaaaccgatgtcttgatggtttccctagctccacacagaagttatgtgtcacaaagttgcaagtctcgcatttccatggattaccaagtatttctttttcacatatgtgacaatgttctttgccttcaagctcacacatatcaatcgatgtcaccacatgattatggttgatatcatgaacctgcaacatataccttacacgtttgagacaaaaggctggcttaaaatgatgttcatacttttcttccactgatagataattataaagccataccataactttgttggtttcatagtcttcttggtttgttgctcttttgacgtcttcaacacaagaatacagatccttcaagtacaatggtgatggctctttctgtagtttgtagatatagatcatcagcattgcatcattattaagaaacaaaaaaacacaaaaacgatattgattacctcgcgtagaatgcattcaatgtgaccaagaaaatcacattcttcgcacgaataaacatgatgtccggcatgaatcaatgtctcgcaaacgccacagtactccaaagaatcatcctcttcacgtactcttttacaaacaagtggatgaatgtgacaagatctcttagaaatggtcttggaaatccaaggcattcgaaatgaaactccaattcacattcgatgcagtggtagtaag

SEQ ID NO: 7827 - DNA, 586 bp, Arabidopsis thaliana
caacctaggaatttgttaaaatcactaaaacttgttccagctccccaaagaccaagcctgaccatataacccatgtttcgtggttctgatgccccagtagccgagcaataaataacacgtgcttgggggatcttatcctgcttttccagaattcattagttaaaagtcaactagatggcactaaccacaaattaagcatgttaaactagaatatacactatattatctgaaaccgagaaaaagtacaacccaaaaagacaagtcgaagtatataatctctcactcttcagagccaagagcaatattaaaagcaacactgataagaacattcagtttcaagtagccagacctgaatgtcaacaactgcctgtccgatgcgtgtcggctgactcccagcttcaggtaccaaatttttcgctttatggcactataaaaaaggaaaacaaattagtacctgcacaatgtactaaagattagaggttggccaaaattgataaaccagtgatcaacaacttcaacgacagggtatctcaaattgtcaatcacaaaaaaagggggatgatgattttacgcaaataatttaata

SEQ ID NO: 7828 - DNA, 552 bp, Arabidopsis thaliana
cataatcctatattactgcacttcaataagttaactcaacgttcactttaattcggatattgggtagattgtggggttagctagggcaatgatgaagcatgccaggaaagtggaaggattagttgatgctgtggacatagttggaacaggtggtgatggagcaaacacagtcaatatatcaactggatcttcaatacttgctgcagcttgtggtgcaaaagtagcaaaggtataacgaatgagaaaatccttaaaagaaacgatatatttaaattttgactatctgcattaatgctaaatgatcttcgtctggtcgtctaactaatggatacttattttgcagcaagggaatcgttcaagttcttctgcttgtggaagtgctgatgtactagaggcactaggagtggttctggacttgggaccagagggcattaaaagatgtgttgaagaaggggggatcggttttatgatgtcccaatgtatcaccagctatgaagatcgttggtcctgttcggaaaaagcttaaaattaaaactgtttttaccatattgg

SEQ ID NO: 7829 - DNA, 1730 bp, Arabidopsis thaliana
cctgatgataccctgctcttaaatcaatcttagaaaacaccacagaacctcccaattcatccattagatcttcaatcaacggaatgagaaatctgtctttaactgtcataccattcaactccgtgtagtcgacacacaaccgccaagtgccatcttttttcttgacgagaaccacaggcgaacgaaatggactagagctgacttgaatagtaccgcttttaatcatatcctgcacaatcttatcaatctcatccttctgatgcacaacataacggtaaggtctctgattcactggattagcaccctccaataacttaattttatggtcatgcttctccctgaatggtggtaagtctgttggctctgcaaacacatccggaaattcctccacaatgttttgcaccactgattcttccactacatcactggtcaacgcactaatagaaccaatttcctgctcttcatcactcacaatctcccgaacacacactatcgcaatctgaatctgatctgcctgcgtcttctgaagtttatgagctttaatatcacgcacagaaccagttataattccatgtaaccaaaccctctgattcttatagaaaaactgcatttccagcttcttaaactcccaagaaatacgtcccaatgtctccaaccactgcacacctaacaccatatcaaccccttgcaatggaatcaaaagaatgtctgattgaaaggtagtagactgcagcttccaagtaaaccctttaatctgtccatccacattcaatttcctaccatctgcaactgccactttagttaaccctgctgactccacatgacaacccaacttagcagccaccgttgagtcaatgaaattatgagtagatcccgaatcaatgagaatgaaaaggtctcgcttatcaactgttcctttcacccccattgtcttataaccagaaatgccagaaactgcgtttacagagatctgaggcattggtttttgttcatggtcatcatcactcaaaacttccacagcgtcctcaaactcttcatcaacatccatccgaaataattgagtcttcttatgtaccaaataatgctccggagtaaacttctcatcacaaaagtaacaaagtccctttgctcttctctcactcatctcttgttgagatagccgcttaggttgctggctaactggcttataagaactcttgttaccaaatgatcactcttctgctccacttccttaacaggtctgtatgaacctcctgatctagtacccttctgcgaccaagttgaagaaactgtcttcttaggatgagccctctcatagtacttgcccaaacgcaaacagtccctcaccgttttcggttcaaacattctcacatgcatttgtgtatcagttctcagccctgccaaatacacactcaccaagtactcttccgacaagttaagcctcaccttaatcaactcaaattgctgatgatactccacaattccatcagtctcctgaagtttctttaactctgccattggatcatcacaagcatcttcaaagcgatccttcagcaacttcacatactctggccaattaaaaaacacatctaacccaattccagactgaataaacgagtgatgccatgtagcagcatgactatcaaagtgtattgcaaccatcttaaccttcatctcttccggggtaaaatcacaccaaaaaattcttccacttaaacaacactcattga

SEQ ID NO: 7830 - DNA, 548 bp, Arabidopsis thaliana
cctggttatgtgatatatgagacatagatagacagttcagtagtaactaagtcctaactcctcaaatgaattcagtgacatacctctagcaatgcgctccactgcttcacaaggatcattgttcctaaagaatgcaggatacacttaacatatggctcaacataagtttcaaaaaaacacaacaaacagaagttgcaaaaactaaccaaccaaatgttctagcaaaatctgagccagtacctaagggaatcagctgcaaaataaaaaggatggactaagattgtatgttgtaactccacaagagatatacacaaaaacaagtcaaaaagtcaactcaagctactcacaccaagtgcagtcgatcgactagcttccccactgagataaccgacaggtttcccctcccaaaagaaaccattaacaacctgtagataaaaaaaaaaaggacagaatgagtggagctaagaatctccagagcgcagttctagcaaccaaaaatggcaattcctacgtcatgaagtgtccatcactccaaccgcaatgacagc

SEQ ID NO: 7831 - DNA, 555 bp, Arabidopsis thaliana
tggtaaaaaaaacatgcaatctctacctcattagttgttgcacgcaacctccagaatgcagaatgattctgcaggagaagaacagaacagagaattatgaatcaatgcatactaactttaaacagtcaccaactcgagcaccattgcagtggaaaacacacacagaaaaaaaggcaaatcttttcgtaaaggctcacaccttttttatagaatcatcatatgcaagagaggcagagagagaaagaagaggagcagaagaaacctgagaaacatcggagggaaaggagatcccattgggttgcggctgccatctttgagtagagattccagggagagatccgacccgcctgttcagagcacagatcttgacgcaaggtaccgacaatgacgccattgttgagacagtggacgatgaaaccgaggaagtaggaaggagagatatgagagtgttgaaatgcagtgtacttgctatatttttcttttctttattttttgtttggtaaagaaatctgatttcgatgcttacgaagaaaccaactcttttaactaacttca

SEQ ID NO: 7832 - DNA, 574 bp, Arabidopsis thaliana
gcagcaaatttcttaaacatcttacgtctctttctttcctctttcatttgcttcttcattaaaagtttctctcggtactccatttcatcgagatactgcttcttctgagatttactaagcgtagcatctgagctttagtcaaactcttaaacggaggaagctgatcatactctgattcttcgtctgaatctgatgattcttctaaatcatcttcatcttcttcatcaccatactgctgttcaggaagcttaggttgtggtcttgattgcagaagcgatgaaaggagaaatggtaatggcggacgttggaccgagctgcaaatggtctccctggaatattatcttgcaacttcaaaagagcatttgcttctgctagaatcttagatgcaaatgagagtagcaacaaatgtggcttccacacttggccattcggtaatactctctggcctgcccgattagtcctgcaagctgagtgattctcaactaaagaaacagggttcatgagcctcatatctccagctgcttggcgaatggcatgctggatgacatgagaacgttgtgtacaaacatatcat

SEQ ID NO: 7833 - DNA, 1879 bp, Arabidopsis thaliana
gtgggaaaattttccgttacatcccatctaatggatctcaaagtaccatcttgggactttgttggctcaagatatatccatctatggtaggattacaatttttcggctaccaatgtttctttcagttatgttagttgtttatctcaaagtgttgttctatttccaggttatagctggctcagccaatggctcattgaagctgtacgacatccaaaaagcgtcatccacggttactactagcagtcattccacttctggttctgtcacttttgatgagtttgaccaattaacgtcggttcatgctaattcgacggaccaactatttcttgctagcggatactcgaaggatgttgctttgtatgacattggtaggggaacacgcctacaggtttttgctaatatgcatcaagagcatattaacgtggtgaaattttcgaaccattccccgtttctttttgcgacttcttctttcgataaagatgttaagctttgggatttgagacaagagccatcccgaccatgctacaccgcttctagtacgaaaggaaatgtaatggtttgcttttctccagatgatcgttatcttctagcatcagccgtagacaacgaggtactctaatggaccatttagttttacttatgaagctttttgcatcagattagccttttggatatatttggcgttgttctattgatttttaacaacccattgaccattttcccaggtgaggcagcttttgacagtagatggaaggcttcatctgaactttgagatagtcccaagagtaagctcgatgaactatactcgatcatactacatgaatggtaatgactacatcataagtggaagctgcgatgagaatgtgatccgtgtttgttgtgctcaaactggaagacgacttagggatgtaactctagaggtagattgtttcttctaaactataaaacatggaaacaatcgtataatatataaccgtatgaatgtgactttacttatgtgatttggtttggctttgcagggaaacggctcggacttttccatgatgtatgttcagtctctacgcggtgaccccttcagggtaagttgacaaactttaccaatcaaatttccattgataagaaagttttatggcattttcaaaacttgtgtattgctaatctcttgcaggatttcaatatgagtgtattggctgcgtacgcacggtcaagctcactttctgaaatagtcaaggtagcgttattaaaaaaacagtgcttctgttgtatcagataaagttcccaattcttagtactgttgatgacaaaaatgttactgcaggtgaatttgttagcgtcaagagattctacagcagaagaatctcatggtctccgttcctacccttcaagtagcatgggaggctgatgataaaaccaaaagagaggcttcacaaaaaaaaacaagtgactcatgtattgttgtatttattgtactaatagaatacgatgaatattaaaaaatgaaaatgttatttttcggtgataaataaaaaaatagtttaggtcgaacgacgaattttgactatataagcaaaacttccgaggaaaaggataacacaaaacctctcgtcttctcaaatccactctcatacacagtcacaacaatggctctttcttctggaatcttctctactacttttctctgcgtcgatacgcggccgttgcgcagctcaatgttgtctccatcttcgctccgtttgtcccctaatcatccgactaacctgcgcatggttcgagctgtaacttccgcggcggcggcttcctccgacccgacaaccacgaccaagactcgggagccacgtggcatcatgaagcctcgtccagtgtcccgggcgatgcagga

SEQ ID NO: 7834 - DNA, 1415 bp, Arabidopsis thaliana
agacggtatgtctgccttgttttttcaacactactggtccactgttggaaatcaggttacatcagaggttaaaaagttttttgctgatggtattatgcctgctgagtggaattatacccacctttgtttaataccaaagactcaacacccaacagaaatggtggacttgcggccgatcagtctttgttcggtcctgtacaaaataatctcaaagattatggcaaagagacttcaaccatggctccctgagattgtttctgatactcaatctgcttttgtttctgaaagattgattactgataatattttggtggctcatgagttggttcacagtttgaaggttcacccgcgtatctcttcagagtttatggctgtaaaatcggatatgtctaaagcatatgaccgtgtggagtggagctatttgagatcccttttgctgtctttgggttttcatctgaaatgggttaactggatcatggtttgtgtttcatctgtcacttactctgttttgattaatgactgtccctttgggttgattatccttcaaagaggtttgagacagggtgacccattatctccatttctctttgttctttgcactgagggtctcactcatttgctcaataaggctcaatgggaaggagctctggaaggaattcagttttctgagaatggccctatggtgcatcacttgctctttgctgatgacagtcttttcttatgcaaagcttcaagagagcaaagtctggtcttacaaaagattttgaaggtgtatggtaatgcgacaggtcagactattaatttgaacaagtcttcaattacttttggtgaaaaggtagatgagcaattgaaaggtactatccggacttgtttgggaattttcactgagggtggggctgggacctatctggggcttccagaatgctttagtgggtcaaaggttgatatgttgcattacttgaaggatagattaaaagagaaactggatgtttggttcaccagatgcctttcacaggggggtaaagaggtattacttaaatctgttgctttagcgatgccggttttcgctatgtcgtgtttcaagcttcccattactacttgtgaaaatttggagagtgcaatggcatctttttggtgggattcttgtgatcattcaaggaagattcattggcaaagttgggaaaggctgtgtttaccaaaagatagtggtggtttggggtttcgtgatatccagtctttcaaccaggctcttctagcgaagcaagcgtggaggctgcttcatttcccggattgcctcctttctaggttgttgaaaagtagatattttgatgctactgattttctggatgccgctttgagtcagagaccttcctttggttggagaagcattctttttggcagagagcttttgtcta

SEQ ID NO: 7835 - DNA, 500 bp, Arabidopsis thaliana
taccgatgagtaggattgtcagagtcaaaagatgcaggtagagataaatctggcattggaactggaacagatgcaggttcacttctctcctcttccacattttcactatacccgttaggcatatctttaatctcagcagcaaatttcttcaacaacttacgtctctttctttcctctttcatctgtctcttcataaatagtttctcccgatactccatctcatcgagatattccttcttctgagatttgctaagcttagtcatctctgctttagtcaaccgcttaaagggaggaagctcatcatactctgattcttcctcagaatctgatgattcgtctaaatcatcttcatcgtcttcatcatcgtactgttgctcaggaagcttagcttgtggtcttgattgcagaagcgatgagaggagcaatggtagtgcggagccttggaccgagttgcaaattgtccccctggaatattatcttgtaatttcagaagagcattt

SEQ ID NO: 7836 - DNA, 531 bp, Arabidopsis thaliana
catacaaaccggctccatttatgactagttttctagtagagccccaaattgggtagatgctaacattttaaaggtaaactcttttgttcctctgactttaatctttttaaattttaactcaacacataaccttttggtggattttcgacagccggatattatcgcgccaggactgaatatattagccgcatggagcggggcggattcggcaagcaaagattcgatagaccgacgagttttagattataatctcgactcaggaacttctatgtcttgccctcatgttgctggtgcaattgcccttctcaaaagcatgcatcccacatggagtagtgctgctataagatctgccctcatgaccactggtaacaaaaactttcggttattgagttggttaaaataactaaaccaatggtcatcagatagttatatttcggtctcgcacagattatcactaaaccaatgaacctttgtgatcttgtagcttcgatgaccaacgaggacaatgaaccaatccaagactatgatggt

SEQ ID NO: 7837 - DNA, 524 bp, Arabidopsis thaliana
agtaacggccgccgtgctgtaaaggctactggcccatggtcacgcgaaacatgtgctgattatcggcggcggcgacggtgccatgctgcgtgaagtaacccgacataaaaacgttgagtcaatcacgatggtggaaatcgatgcgggtgtcgtatcgttctgccgtcagtatctacccaaccataacgccggtagctacgacgatccgcgctttaagctggtgatcgacgatggcgtcaatttcgttaatcaaaccagccagacctttgatgtcattatctccgactgcaccgatcctatcggtcccggcgaaagcttttcacttcggcattttatgaaggctgcaaacgttgcctgaatcctggcggtatcttcgtcgcacaaaacggcgtctgctttttacagcaggaagaagccatcgacagccatcgcaaactcagccattacttcagcgacgttggcttttatcaggcggcgatccgacctattacggcggtatcatgacttttgcatgggcgacagat

SEQ ID NO: 7838 - DNA, 489 bp, Arabidopsis thaliana columbia
tttctttcttccgtacattaaccactctgagacataacctctctctctcttcttttgttgtctttctgttctgttcttgagatctctctctctctctctctctagggttatttttttctgggttttttgtttttacagttactctgtgttgttgaggaggcgatgcccttatcctttgaaaggtttcaaggggagggggtgtttggtttatcttcttcttctttctattcagattctcagaaaatctggtccaatcaagacaaaaccgaagcaaaacaagaagatcttggttatgttgtcggtggttttttaccggagccgacgtctgttctcgacgctctaagaagtcctagtcctctcgcttcttattcttctaccgacaccacgctgtcttcctctcacaggggcggtggtaccactgtcacaacatcaacgtaaccgccggtgatgataacaataacaataaatgtagtcagatgggtttggatg

SEQ ID NO: 7839 - DNA, 555 bp, Arabidopsis thaliana
ggatagacaaacccaaatgaacaatacctgttcatctgttgcatttagttcaataaatagttcaaaagtggaattgacaacaaattcaggacgagcagaaggcctgtcaatcttgtttacgaccacgaccactgcatgtccaaactcaagagccttctttaaaacaaaccttgtctggggcattggtccctcaacagagtccacctaagaaattgaggagagaaaaattaaaatgagaaatacaggactaaacagttaattctaaaacattgagagaaagcaacatattaccacaagaagcactccatcaaccatgttcaagacacgctccacttcacccccaaagtcagaatggccaggagtatctataatatttactttagtgtttttgtaagtgatggaggtatttttgctaagaatagtgattctctttcacgctcaaggtcatttgagtccatgatcctctcttgcatgacttggttatctcggaaaacctgcaaagtaaggcatgggttaagaaaactttctcaagttgcccaatgccattatatgcgt

SEQ ID NO: 7840 - DNA, 475 bp, Arabidopsis thaliana
tctagtaacagattattacttgcttacaagattttcgcctcacgctcgttctcagggtgattaacccttaacgttcgtttcaaaatcaggctggtttgtgactgagcgcacccaggcccacttgtggtcacgcgtgtttacttggttcttagtctgtgccacctcctctaaggggatataagcatagttcccattgatcgggccagggacgaaccctgtgtaaccagccatgactccatggatagccgagtgggccaagagtgtacaatacaagttatccgtagcatttgcaggtacagctcttatcatgtaagtcggatcgatatacttgacagtgaagagctcgtctggatgctctcgctcccaccaggccttgagcacggacttaaaccagactcccacatccaagaaaactgcgttgccagattcatccctctcttgtttctgtgattcatttcttgggatcatctcttga

SEQ ID NO: 7841 - DNA, 442 bp, Arabidopsis thaliana
tagtatctagtaacgaccgccattgtaaaacaattactattcagaaaaaaattgttttcaatcaagttatgtatataacccaacttcagaaataactcaatcaataattcatatttggtgaaaataaaagtactatttctttttctttagagttaaaaaaaaaaaatgaatataaacagattccttttcccgaaacaatcaaaccaaacacaaatattttgcttaaagaacttacttctctcctctgtctctcaccggaaaaacaaaaagtcttctcttttataactacgtcagagaactgttatgtctccgacgaatgttcaagtaaccgattaccatctcaaccaatcaaaaacggatacaacaaatctctggtcaaccgacgacgatgcatcggtaatggaagctttcatcggcggcggctccgatcattcttctcttt

SEQ ID NO: 7842 - DNA, 333 bp, Arabidopsis thaliana
gcaaagattaaaagaaattttgctgagaataatactaaaaacggaaataggttccacaagccaccggaatattcccaagagaattaaagggaaaacccagggctggaaaatgtctcatctctcttcgtgtttgtggcgtcttctattgtataaaataatatgaatgaacatcgtttggttggttgtgcagatttcagactcgatagtgtttgccggagaaattctgacgaaactgcgacgtggcacgagcaacgttccatgaggtagaagaacgtcggtcagaggcggtgactcggaaagagagtgattggccgatgaggactggcgtttgat

SEQ ID NO: 7843 - DNA, 554 bp, Arabidopsis thaliana
ttctttttgcacattctcttcaccttctttctcggatatttctgaatcagaaaataaacgtttcaagaatagcctaagataaatgtataaaggttcattgaatgatgattcataccattttcaccactctcttcgccttcttcatgtctgctagactgtgggtattggatctcacagcaactaggtcccaaagcagtgacatggaacaccatgtctccttcatgtctaaagacaacaaagtcaccgattcgaagatcatgtgcctcaacgaactctttccaaccttccgtgagtctatgaccctccatctttacttcccatgttctctccgacgcatctgttctcaacgttacagtcttgccttcgtgttttcctcgatgtgctcagagaagtagttcacaggaattttctgcaacagagaaacagaaccatcatgagactatatgttatgttcagacagattgagagaaagaaagattgcgtacgaggttgctctggaatccgggaagaagaggctggaagaagtgttggttagtcggagacaagggtgatgc

SEQ ID NO: 7844 - DNA, 567 bp, Arabidopsis thaliana
gataagtaaactactttgagtttcaaacttctcctcaatgacattggaatggtttagaatatcagactcaaacctggaagaaactggctataaccggaatgaccactgctgagacgagcaagaacaccaaggagtggtgcattgttgtaagtagcaggctcagtctgctcatagttatctctcctgtcagcgaaattgtcgtaagcatcagggccaccgacaatagcaccagtgagaaggttcgggtcactgcctttacggctgaaccaagtggcatatccacctcggcaggtgacaaatgtacggtccaccttgacagagacgatggaagagcctctgtggtgaactctctgagggaaattgttaccataaccaaccatgtagctggtagctctcgggttatctccaagaatataatccacctgagatttagcaaaggaaagaagctgcgaaggtgcgacatttcccgcggcacatctcaagttgcttcgagaagaagttaggtaatctgagtaaaccgtggtcaagaaggaagcgccttgtgacaactgcatattgtccaacgtt

SEQ ID NO: 7845 - DNA, 1561 bp, Arabidopsis thaliana columbia
tccaactttcaagttccaacaaccttggtaacttgtaagcattttctccactttgaaatgagaacacaagagcgcaagtacatgggacacgtcacactttatttaagaccacatcaaatctcaaaagtcataagtttacattggaaaaaatcaatggttttatcttaaattaaattatatgatcatatattaatatgggtatatggttctcgcgtaatgtacattagaaacgttcttcactctagtaatttttaattagtactagcatttattcgttatcaaattttccaaatcaaaatccaaactattcaacgaacaatattgtacgatgaccaattctatcgtttgacaaagttgaaggtaggtttagctagaaaattctcttttggaagtaaacgtggtaaagaaaaacaaacgaagcaatgaagaataaaaagcaagaggaagtttgatgattgaaagatctttttgctgattgacaaaaaaagaaaaatctttttgccaacaatcaaggaaaagaaaacgtcaactactaagaatcataaaaatcaggaatagaagaagaatgaattattgaactccaagtggaaaagctcaatcacacagtgccataatgatcagtcgttgcatatgctttatgagacataaaggatctttgtcttttcatgaatcaagtagaaactagaaatgtagcataaccacaagaaaaatatccacattatttttccaaataatattatttacaaacatttcacaaaaaccctataattctttgtataaaacaacctatattgccttgaacaaaaaaaaaacccctataatttcgcaaaaacataatgaacaaagtaaaccaaaaagatgaacgtaaaaaaaggagctatgcctctctactacattaacaaaaagaaagaccattcttcaaatattctcgtttctcccaatttcgtcataaattaacttcttgatataatgttttagggttttgttgtttaccatccttagattttgcaaataaaaaaaaaaactaaaatttggctttctattgattcccctcaaatattatatgattgaatggatttgactaataaacaacggaaaaggaaataaaaagaaaaatgaattacctggaggaaacggcgcaatggtctaggaggccacgagaggcatgagaaggatgccacggagtttgtctccaagcgactttggcgtcactaccggcactgattttgcagcctgaaacgacaagctcaagacaccataactctatccccttttgccacagcacaaagcctcctacttctcctcctccactcttgatactccttgcctttaccattttgctgttcaagcttccttctcctgtgcaaaactctgatgctgtcatcctcacttttcccatcgcatacatgctctctaccgcgtttaacgctcgatcgcctcctaccgctgctatgtactgctttactatgtattgcgccatcgacatctcctgtaattttccaatacaaaaaaatcttatatatgatggcggatttaggaatcaagatattgctaatgtttt

SEQ ID NO: 7846 - DNA, 524 bp, Arabidopsis thaliana
attatatatatatatatatcagagcaagttcctcaacccaaccaaaaaaactaaaacctcaaaagctttttaacaattatcttctttttgtgtgtacttaatcttcttcgcttggaacttgctatggagaagaatacaaatacgaaccatacaagtgatgataataatgataaggttgtcgatatttaagcttcttcttaacaatagtgcgctaatgtttctacaagctagctaactagagttattttgtatttacgtctggcagaatcacactaacgaagagcaggagaagatcatcttaaaccctaattttgaggatggcctaaacaactggactggaagagcgtgcaagattgtcttacacgaatccatggacagtgggaagatcgtaccgctctcgggaaaagttttcgcagcagcaacgcagcgtaaagacacatggaatgggattcaacaagagatttcaggaagattcaggaggaagcgtgtgtatgaagtaacagcggtagttcgaatatttggca

SEQ ID NO: 7847 - DNA, 471 bp, Arabidopsis thaliana columbia
tttgccggtttcgagcttgaattattctcgtgtttctgattcttccggcgataattccggtcgatgggagaaagtgagatctaagagagaacttctgaagactcttggtgatgataatagtgatgtgcttccttctccgattccatggaggtcaagatcatcttcatcatcatcatcatcatcaaaggaggttgaatctctaccgtccgttaagaatctgactacagttgaatcacagccgttgatcaagaatctgacaccaccttctgctttctcttctccaagaaagtcgaatcctatacctaatctcgcatctgagttccatccatcgtcgacaccgcctcctccgcctgcgtgaccactgacggcgttttataactcctcgtcgagaaatagatcatcccggaatttacagggttgagaggagagaatcatcagttcacgaagacgaaatttgcaggaggtgagttc

SEQ ID NO: 7848 - DNA, 568 bp, Arabidopsis thaliana
tagtaacgaacgcgagtgagcgcaagatgatgattagttaatatggttcatattctgtgtgattcttcaggcagtgattgatgttgatgaggatgatacagtccaggaaaaggtgatactcactgacgctttcctatcatacatgtgaactctacgtaagtgatcatgtgatacgtgtagcacattgcacactatccctatcgtgtgatgtatagattgttgttcacaaggattctcctagagggacacattttagacgtgcaggcccgcgccaaaaggtacttcatctactccatgagtttcctttgctctgcagcttctgtatttgatgatgtaaaaactgctgatatatgattatatattgtgtttaggtgtacttcaagccatctgatgtgcgtgcctgtattgtcacttgtggtggcctatgccccgggcttaatacagttatcagggagatcagtgtgtggtcttcatgatatgtatggctgttacagaagtgattggtgtggatgtgagtcaatttctgtactacgatttatgcttttagagtgtattgctagggatgatg

SEQ ID NO: 7849 - DNA, 551 bp, Arabidopsis thaliana
  unsure (1)..(551): unsure at all n locations
nnnnnnnnnnnnnnnnnnnnnnnctaaaggcagcagcgcgtggcgtggcccgccgctgatcctcaagccgaaagtgctgctgtttgatgagccgttgagtaacctcgacgccaacctgcgtcgcagcatgcgcgacaagatccgcgagttgcaaaagcagtttgatatcacctcgctgtacgtcacccacgatcagagcgacgctttgcggtttctgatactgtgctggtgatgaacaagggacacatcatgcagatcggctcaccgcaggatctttaccgccagcccgcctcccgctttatggcgagctttatgggcgatgccaacctgttcccggcaaccttcagcgacggatacgttgatatctacggctatcatctgccgcgcccgctgcactttggtacacagggtgaagggatggtcggtgtgccccggaagcgatcacgctcagcgatcgcggcgaagagagccagcgctgcgtgatccgccatgtcgcctatatggggccgcagtatgaagtgacggtggaatggcacgggcaggagatatta

SEQ ID NO: 7850 - DNA, 451 bp, Arabidopsis thaliana columbia
cctctgcacagaaaagagtcttgtttagttgtgtgatacagatacaatagttcagtgtccatgcaatcattgcattttccgcaacgatgtaccaagaccaacacaattctacagctaaacacttcaggaataattatttcaacatgaatacagaaaaaaaaaaaattctaatcaaatttaaaaactaagatcccaagcgatcactcaatatctcaaatcgaagcatatatatatatataaaaatcagcatttcgagatcagaaatcagattcatattagaaacgatcagaactatgtaaggaagtgaagagtttactcgagtaacgaagggaaaagaagccgctttttgaggaggcgacggaggagagcatcagcaaggtgaggaggcagactctcaagactacgccgctgaagtcgccatcgttccaccgcatctccgctcttacaagct

SEQ ID NO: 7851 - DNA, 559 bp, Arabidopsis thaliana columbia
tgaagctaatcataagaagaaagtgaaaacaatggatggttattacaatcaaatgcaagatcattactctgcagctggtgaaaccgatggttcgcgttcaaaacgcgcacggaaaaccgcggttgctgctgtggtttccgcggtacttccggggcggacacaaccggtttagctgctccggttccgaccgcggatatcgctagcggttccgggtcaggaccgagtcataggaggttatgggttaaagaacgaaccacggactggtgggacagagtaagccggcctgattttccagaagacgagtttcggcgagagttccgtatgagcaaatcgacgtttaacctaatatgcgaggagctagatacgacggtgacgaagaaaaacacgatgttaagagacgcgattccagctccaaaacgcgtaggcgtttgcgtttggcgtttggcgacaggagctccgcttcgccacgtgtcggagcgtttcggtctgggaatctcaacttgccacaaactagtcatcgaagtctgccgcgcgatctacgacgttctcatgcccaagt

SEQ ID NO: 7852 - DNA, 911 bp, Arabidopsis thaliana columbia
ggtcgactcgatccccgggctgtttccagaagtcaaccttggtagatccatggtgatctgcacagtacacagacaaatccacaaaatgctcaaaaactcaattttttgtatacagtgattcaatttggaacctgacaacgccaatgatatacaaaatcttcacaaagttgtaacatttggttcatctaaaattcgtgaaaacacaaattagacataaaatgtgcgaaataagctatacgccaccaaaattgataccgaaaaaaatcgtaaatatcgaaaagagaaggaagagggagagagaatttaccagcggcgccggcgaggcaacgacgctgaccaatagaagcggctccagaggaaatacgagcagatgggatctgagctaagctcatggcacggcgagcgaaggacgccatcgatctcgacttttgatttagggttttcttgaggatctgagaggctccctaatgttttccaggagacgagattgattgatgaaggaagagagaatcaagtgaccataaagaaatgtcttttctgattctaaacgacgccgtattgtgtgcgttttgtttgggtaacacctaaaagcctccttctccgtcagaggcttttgttttgtggacttttgttcacactcttggcatttttcatctctctgtttctcaattctgtatgtactaagaaaacagatctttagttgtatttttgaattccacttccatgtttgagtatttcaacatcaacattatcaataggtaaaaaaaaaaagatcgatagaaataaaaaaaaaagccttaataatcgctagtgcttgagttttgttcatcatatgtagaacatggtcggctcaaacattattaagatccaatgcaaagagattcgaagtaaaacaccgaaaaagtcttttg

SEQ ID NO: 7853 - DNA, 838 bp, Arabidopsis thaliana
cacattttcaagaataatataatctaacgggttttaataagttggtttatgtaatttaaatcccacggttagtagtagtagttttgctggtgcttcctccaatgtgcatctcctcgctgcttgaagaggatgggtcaagcccgtactcgcttgtggcaccgtattcgctacttgccccgtaatcccgactttccaatgtcactttccgaaacttcctcatctcagcaccatatgtgcccatctcatagtctgagctgccttcacctccgcttgaactctgtttcggtttcacaccatcgtctaagtcatccagcgaggcatcaccctccaacgtcctaacaatctaggaacaatgcgaaaagaaaagatcaatatgggttccgtaagaaatatccaaaatcttgtgaactagacgatcaatgaataactaacacctacacttttcgtagtagtagtagtaaattatgtgtgacggttattattacctgactcatctttgggcggcgacgaccagaatgtcttacggctgcagcagcacaagccaccatgcgtgccatctcataaggctcgtattggtgctcaaggaatgggtcaaccaattccccatattctccatcttgcgctaccctcatgcacaatggtctcgcctgccaataaccatgtacctaaaacatgaaactgttttcttttgtttttggtatgagtttatataaatgaatgtattacatataactcacccaatcgactaaactgtcttccatgtcaccacttagatcaaccggtccgcgtccggttatgagctcaagaagcataactccaaaagagaaaacatctgatt

SEQ ID NO: 7854 - DNA, 971 bp, Arabidopsis thaliana
ctaaagctcgattacagccacaacgtgctgctggcaacgatgttgaacagttcgcgaaaaagaaaaccgagttaggcgatgaactgcgttcaggcaaactcgacgttttctacgatctctacaatctggcgcaaaagccgcgttttgagcgttaccagtacgctttgtcggtactggaaaagccgatggatttcaccggcaacgacacttataaccttgaccgcagcaaagcgccctggccgaaaaacgaggctgagttgaacgcgctgtgggacagtaaagtcaaattcgacgagttaagcctgaagctgacaggaaaaacggataaagaaattcgtgaaaccctgactcgccgctacaaatttgccattcgtcgtctggcgcaaaccaacagcgaagatgttttctcgctggcaatgacggcgtttgcgcgtgaaatcgacccgcataccaactatctttccccgcgtaataccgaacagttcaacactgaaatgagtttgtcgctggaaggtattggcgcagtgctgcaaatggatgatgactacaccgttatcaattcgatggtggcaggtggtccggcagcgaagagtaaagctatcagcgttggtgacaaaattgtcggtgttggtcaaacaggcaagccgatggttgacgtgattggctggcgtcttgatgatgtggttgccttaattaaagggccgaaggcatgtaaagttcgtctggaaattttacctgctggtaaagggaccaagacccgtactgtaacgttgacccgtgaacgtattcgtctcgaagaccgcgcggttaaaatgtcggtgaagaccgtcggtaaagagaaagtcggcgtgctggatattccgggcttctatgtgggtttgacagacgatgtcaaagtgcaactgcagaaactggacaaacagaatgtcagcagcgtcatcatcgaccatgcgtacaatggcggtggggcg

SEQ ID NO: 7855 - DNA, 853 bp, Arabidopsis thaliana
tctgtaaacatcacaaaaacgaattcgaatccgtactggataaaaatccccaatgcgttcactaaaactgtaaattttcgtcattatcacattaagaagcgattttattcactgaccttagattggttagcctctgaaaactcccatggaagatcgggtttgttatcaggagaatccagatgctataagtaatcaaaacaacaacaacaacaaaaatcaaattacaattaatttcggataaaattagacaaaattgaagcatagatcagatagaatatccaacactcacgtagtttaaggccgtcgataagctacgagtcacctgtagatagaaatgaccaaaacggagaatgagatcgggaaacgaccggagagaagctgagaggaagcaaggaattagagaatacctgagaggttggttgacggaaaacttgacggatctcgagaagacgcttcgcagcgagcctagccagcattttcgacaatttagaggacgagagacgcacacgaaggttttttttgatctgagagagaaggagaagcagagaaaccaaggagctagactcggtatctcactatcacctggcgcaggattgactatagcctctatgggcctgctaaaataagcctgactttaattcattattggtctattacttttggtttaggactgatacatacgagtagctttaaaggcccattttattaattaaaggcccatacatgtaatacttgaagcccgttggaatttgctgattcttataatttgcacatctcctcgcagctttttcatcatagtgcaatggcatgattctttgtttgtgtaccagaacccaagcaaataaaaagtgag

SEQ ID NO: 7856 - DNA, 921 bp, Arabidopsis thaliana
aagggagtaactgataagcaatgaaaagtaaattagaagttttgaaagaactagaagttttaaaagaattaaaagtttcaagagtatatttggcttaaccggattggtcatcctggtttaatgatgatgtgaaagtattgagaattatgtggacattaggtgaaaaaccagaagattctccttaatgatttatccaaatgttacttgctcagaaagcaatatgataatgtgatttttaccagtataagtaatttggactttatctattcgtaagtatatacaaggagatgattatgggttgatcactcactatatgacatttagatacctaatggttataaaagatgcatcgattcaatggacgcattgactcgattgttgaatcgacaagaaggtcatatttatccttgttataaacccgcaacatagagtttgcgagattactttcttgattaaagtacaagagtatttcagtgtttatttataatacccattattggataccgttgggataagtgtttacattttgccattcatgttcatacagaacatggtttagtaacattgatacgtatcaagccaatgaataattcatagttttccccattattattggttttgggtcagaaaccaaatagttttcatgtaaaaggtttgaatgtgaaaagtggtctagcagagcatgtagagatgaatcatcaaaggaggataagaatatatgttggatatgaatgataagtaagggatcttagaaggatttatatacagatcgttttgaagagtatcatattatatagtcagctattcaagataagggggagaatgtatagagctggtgacaaagataaatagaaatgaattatgaatgatctttggagtaaagaatgtatattaagacgtgaaaagataatttaattatag

SEQ ID NO: 7857 - DNA, 1783 bp, Arabidopsis thaliana
aacctatatagtatatatcaccacaaattaaggtggaatacttagtagcaacaaattcagttacgaaaaatgcattcttggtctacacatagtatacatggttcacaaaaaaaatctattgaagtagggatttatgtgtcttgcagacctttatccaacaaatgaatctataaagtagaaaaaagtgaatttgaataaaccttgacaactgaagcaaagttgtcatccaagatgatgatgtccgaactctccttagccacttctgttcctgctattcccatagcaagaccaatatctgcctgcaaatacactcaaaaaatttaacaccaatgagataatgatccgctcgctgagtaaaaacgtaggcaaaatacttggccaaaagaaactttcagttagatgtagctttcgacattatcagtttaaatttcagtaaattactatacctcgtgcaatgcaggagcatcatttgtcccatccccggtgacagcaacaacatgcccttgtcgtctcagagattgtaccagcagaagtttgtcattgggagatgatcggcccataaccttcacatgtggagtaacaacaaagtcaattttgatttaggctgttactactacatcatattacaataacagatgcatctgatgtttaaggagaatatctgtattgggtgaagcctgatgaaaggccaaacctccccatagaatgagactaagacattcatttacataccaacacattcacacttaataattaagaaagcagagttgagaacagtaccgatattttgtcactaatcttgtccctttctgcatcagtcatctcacggaatgattttccttcaatgagagtaggctcggagagatctgcatctgaacttagtattccacattccaaggcaatagcctggcagtttggacgttgtcaccagtaaccatacggacctgaacatcaacaaatatcatgaagtaatcatgcagcattaattagcaggctaaacaataaatttctgtcacttgtcttttctgtttttctgtaaaaaaaataaatcgaacaaaagaagtaccttgacaccagcattttgacacaacacaactgaatctttgactcctggtctacatggatcctgtgcacatttcaaacatttcgataaaaaaatataccaagaatattgcaggacatgacatgcgggttaatgtctgatctataagaaaaatgtgtctatagtggagtactatgcaatgtgaaacggtaaattgaaagtgatctcataagacgagagacacaataaaactaaagcaaaatgccaaaatgtacataaacgaacaaaccaaatcgatcctcacctttatgcccactatagctaataatataagatcatcctctgggagtacccactttgagagctcttcgcctgttgggaccttttcagcctcataggttctaaaggcgagtgcaacacatcgtaaggttcttccagccatatcattaatgccattcttgaataacgatgcctggtaaaatcaaagaaaatcgagtgagctgagggtaaaatcaaagaaaatcgagtgagctgagcatcatgacagcccaaaggctaatcacagattcgaacaaatacagctgagtttagaggttaataaattagacttttcacaaaccttgtcgtcagtcattggtgcacattaccatcctcatcgatgtagcttcggcatgatgcaggacaatttcagagctcgttccagtgacatgaactcacgacagcctgaaagaatatgggggg

SEQ ID NO: 7858 - DNA, 805 bp, Arabidopsis thaliana
tagagtgtgtaaaacaggaacaaaggcagagctcaagtatggaaagggttccctcacgggtttcctaagtgttgacaccgttacggttggtgggattagcatcacgtcacagaccttcatagagggcgttaagactccttacaaagagtttttcaagaaaatgccgtttgatggtatattgggactcaggttcacggacccgctcaatttcggtacatctgtttggcactctatggttttccaaggcaaaattgcaaaaaatgtgttctctatctggcttagacggttttctaactctggagaaatcaacggtggagaggtagtatttggaggaatcatcccagcgcatttctccggtgaccatacatacgttgacgtggaagggccaggaaacttcttcgcaatgtccaacatttgggtcggaggaaaaaacaccaacatttgctccagtggctgcaaagctattgttgactccggaagttcaaatattaatgttccaatggtaaataatacatctgttggtaaagatataaattgtcgcaaggcacttgttaactttctttattttactgtaatatttaggattccgctgacgagatccataggtatatcggagtagaaccaaactgcaataattttgagacgctgcctgatgtcacctttacgatcggcggaaaggccttcgtcctcacaccacgttgatgtaagtggaacgtacaattttctttcctccatttttactttccttatttattattatattggtctttttttcaaaacttattttctctgtttgtacctagta

SEQ ID NO: 7859 - DNA, 614 bp, Arabidopsis thaliana
ttttgtggcccttccacgtcaacgtatgtatggtcaccggagaaatgcgttgggatgattcttccaaatactacctccccaccgttgagacctccttctccagagttagagaaccgtctaagccatatagaaaacatattttttgcaatcttgccttggaaaaccatagagtgccaaacagatgtaccgaaatttaacgagtccgggaacctgagtcccaatataccatcaaacggtactttcgtgaaaaaaacttttttcaagagtctcaacgccctctatgaaggtctgtgacgtgatgctaatcccaccaaccgtaacggtgtcaacacttaagaaacccgttccatacttgagctctgcctttattcctattttacgcacatactagagaggttaacacactgaacgtataaatacagtctaaacagatatataattcaaattttgacacagagcaaaataaattcacaccaaaatatatttgtttcatgaccatacaaataatcatcataaaccatgaataaggattaatacttttttgtaaacagtgaaattggatgaaagataaagacaaccataaaatttagaatatatttgataaaaaactataa

SEQ ID NO: 7860 - DNA, 936 bp, Arabidopsis thaliana
aaaagtttgttctgttacgaaccatgtgtaaatattagacgttcgttaataatatcagtttgattataaaggaaaaagcataattggtaattaccgcaagttccttggtctttgatggggttaacggctcctttctgtctccaatcaaccgtctctggaacctccttgccgtttacagcggctgagtatttctggttgacattcttggccttagcgatgcggcgggcgggctcagttcttgccccgaggtacaacttgcggtactcatcgttagtgagatcggtaaatttggtgagaccaagcttgtaagtagcgttcttgttgttttcgttgtgtagatcgatgaatcttaagttgtctttgaaaatattgaatcttttgtcttggtcgttgatgataccgttgttgttgttgttagttttcccgtgttctgcggaccattgtaagtagatggacctcacttcttcatcggttctccacttgccgtccgatggaagttggagatggtcgttgatgatggactcatcaccggagctaatgacacgacgacatataagagaagtaaagagagaacttttgttgaaggagccatattgttatgtgttttgtatagttaggattacttgggatgatttgtttttctggagggatgagaaaactgtgggactatttataacaaaaaatttggtatttaatatttcaagttggtatacttttctattacaaataaatgggaatgatggacatgcaagatggtggacggttcgatggattttttaatccgaaatttgaatactttttatttcccattatttatctataacatcatcaaatttttcattaaagaacattatatattgcacaaaatactatataacgggagatatttatctgtgtttattagttttaaaactagataatatatgtcgagattat

SEQ ID NO: 7861 - DNA, 531 bp, Arabidopsis thaliana
tgctgtcttaatcgacgtccaaaacaaatggtctctgtcctcgatgtccaaagagcaaagcccgcaagtcgtttgtaattgcataccccaagaggcaagcctagttttagtgggtaggcggtcaagatttgttacccacatatggaaagcatgtttaggagttgcacctttaaaccacaccgtttttgcccagctaaccacatccgatcttggtctcagggctgcccaagttttcgcagaggaaaagccgttgcatagcttgtcttccaccacccaatcataaacatccaactccccggatagagtaggtagatcaatagaaaaactacccatgttttttccttgttaatagaacctagtgcgtcgcggttgtccttgtcaatgaaacctggtgtgttgttgttatcattgaaatctggtggttggggcatgtaaagtttaatgagagagccatttttaacaacaagttggcggaagatttgatatcatgagagagcacatgcaagacacaacaaagttggggtgttggtg

SEQ ID NO: 7862 - DNA, 694 bp, Arabidopsis thaliana columbia
gaaatatatgaaagatgatatataatacaaagacaatggactccatttccatatgtcagcagtaaattagatataaatcctttaacaaaaaaagtaatgaaaaaagactgtaatttttgacaaacaaaaaaagcagtaattactaattagatatgcatgttaaagatcacgttttcatgtgcataaagaccatttaagagtactagtgtttttatctatataaaagaaaaaggaaaatcaacgttgtgcctttaaccttgttctaactcctaattagtcttggtatagcaataccattaacaaaaggttataaaatcttcaggatctccattatttaaatctaattactttttcaagacacgataatatagtaaactttatctttcaaccccttgagagatttcatggtatgatgtctacttcgatcgtcttttgcatgattaacgatgtcgattttatatatttgttatttgattaatcttaaatatgaatacttgatgagtgttgatatgtgaatggttcagtcagagacgagtatggaaaaatacaagaatttatcagatttccttaagaaattcttcataccttcgtacgttctctcgcctgaagacgagcctgagggcaaatcagttgtacaactgcacctgagaacccaatcctcgtattcatcaactccaaaagcggaggtcaacta

SEQ ID NO: 7863 - DNA, 583 bp, Arabidopsis thaliana
attataacatctttattttgctgcttcattgcttcacgataggtcattcttgcatgtttccatccatatagcctatccacctggaggaatgtgaagatattatttctcatataagtgttgcaacagtggaaaaaatcccatcctcgcagaatgacaagcagtgtaccttattcaatgcaataatgaactctgtattcctcatcctcaaaagatttagagactctatggtttgcggctgtaaaccatgcgttatgtcaaccaccaaaatggcaaggtcacacaaacttgaacctcttgaccgcagattagtgaaggactcatggccaggtgtatcgataaccaatagaccaggcaccttaagttttgcatcggctttcagttccctggtcctctctcggatgtttttggcagggaaatatgttgcaccaatctgctgagttatacctccagcctcaccttcctgtacatttgttcctctgatacaatccaacagctttgtattaccactatcgacatgacccatgatacagcacatgatagaacggagtttttctccaccttctactataaattcatttggagc

SEQ ID NO: 7864 - DNA, 585 bp, Arabidopsis thaliana
tggcttgtacaactgcagcaaatctattcaacagctccatatcgacagcaacagattgacgggccaacttccggattatctttattcgatccgggagttggagcaactatcactctctggaaactacttatccggagagttaagcaagaacttgagcaatctctctggtctgaagtctctgttgatatcagagaaccggttttcggatgtaattccagatgtttttggtaacctcactcaattggaacacctcgacgtgagctccaacaagttctcgggaaggtttccgccaagtttatcccaatgctcgaagctgcgggttcttgatcttaggaacaactcgttatccggttctatcaatcttaacttcactggatttaccgatctttgcgtgcttgatctcgccagtaatcatttctctggacctcttcctgattcccttggccactgtcccaagatgaagatcttgagtttggcgaaaaacgagtttcgcggcaaaatccctgacaccttcaagaatctgcagtctctcttgttcctgtccttatcaacaacagctttgtggattttctgagacaatgaatg

SEQ ID NO: 7865 - DNA, 581 bp, Arabidopsis thaliana
aaattgcaaggtcacacaaacttgaacctcttgaccgcagattcgtgaaggactcgtggccaggtgtatcaataactaataaacctggcaccttgagttttgcatcggctttcagttccttggtcctctctcggatgttttcagctgggaaatatgttgcaccaatctgctgagtaatacctccagcctcgccttcctgtacatttgttcctctgatgcaatccaacagctttgtcttaccagtatcgacatgacccatgatgcagcaaatgggagagcggagattttcttcaccctcaatagattcacttggagctaagcctttacccttcttagaggcatcttttgctcgggtagcacgttttgtccgtgtagcatcttccacttcaggtgtagcttttacggcagctattagtggtttgcctgtacctgctggtttagctgttggtttttcagcttcaggttctgtgtagaaatgcaaaagattagacaaaaatcagacaatggatggaacactaggaagaacaaagaactaaattttcatactaacctgaatcatgcgcctttgatatagcaccttt

SEQ ID NO: 7866 - DNA, 773 bp, Arabidopsis thaliana
ggcaatccctttcgatattttcctgttttccttatcaaatttatgggttggaataagtaggttgatgtattgtcttttaattcgaagctcaattttcatacttattgctgtttagatcttcaaggttaatctagaattacagattagaccatatataaagtaaattcagcagattcttatttatgtaaattgtttgttagcaaccttatctccttcacatttctttaaaattctggtcagatgtttcttaagagcttagaatgaatcccaaagttctgtttttttattctggtagtgaatggatcaacaagaccatggacagtctggagctatgaactatggcacaaacccataccaaaccaacccgatgagcaccactgctgctactgtagcaggaggtgcggcacaaccaggccagctggcgttccaccagatccatcagcagcagcagcagcaacagctggcacagcagcttcaagcattttgggagaaccaattcaaagagattgagaagactaccgatttcaagaaccacagccttccccttgcgagaatcaagaaaatcatgaaagcggatgaagatgtccgtatgatctcggctgaggcgcctgtcgtgtttgcaagggcctgtgagatgttcatcctggagctgacactcaggtcgtggaaccacactgaggagaataagaggcggacgttgcagaagaacgatattgctgctgctgtgactagaaccgatatttttgatttccttgtggatattgtatcccggg

SEQ ID NO: 7867 - DNA, 955 bp, Arabidopsis thaliana
ttacaaagagcaaaaacctaatatagagtaatcttggcaaaaaaaactaaaacaagattacaatactgaaatgggtagtgattaaatcaaccaaagaagcatcaaatctctccaacgcttcctgtgtcgccgagccgttatggtattccgaatctctcgatcgatgaacgtcaatgtcttttaaaacgctacttgataatatttgcagctcctccttctacgatgtgtaaaccaaggatgtgtcccagaactacaagtctccccaacgcgatgagtttgctacaattagccgctctttcaccaacttcctcgattttttcagtaaacccttctactttcttctttatttcttgcatcgcaaatctcgtcgccatttcattttcttctctgtccacagcaaagttcacggtcttcagaatcgatgagatccttatgctcaggttttcaacttcgaattttatatttaccatcgttacattgtttgcttgcaccccaagttccattgttaaaaccaaacctctctgtctcttcacagctttctcatactctttccacatcttgttacaccacattcccacaacctcaatcggtgtggtcaatccagacgcaaccgcactcaataccggagtgccatcattgctgccgcaaccaccgataagacaaatacagtcacaaacgcagtggcgaaaaccacatttgacaatatcctccatgtctttatattcctcagtttcttaccaagctttactttcagcttacgcaactcgtccagaagcaaaacctgctcatcgtagacagacttgtactgagtcacgaactcgccatcaaaagggtctcccatggctttaaacttgttcatctcctccaaggttttcacatacttcttcttcttactctctccaagatccgtatccaccgtttctgtctcaaactgtttcaccgcgaatcgaatgat

SEQ ID NO: 7868 - DNA, 586 bp, Arabidopsis thaliana
cgttaacaccaatgtcataaacaagattcagggggaagagtgtattcggattctcccggcgttacgaactgggaagatgctatggagtgggaactaaacttggccaagtctatctagttattgggatccaatatctgcaatcagattgttgatgaagccggtcttgcaattcgacttaaaactattctgctggctcaaggctatattctgatggaagacgagtcaaagattgatactcatcttgctagatgtgaatctatcaggtttctgttgggatgtgcatgtgcagcacatttttatgtgcatcagatggtggtcaagaaaggaataatgagtagtgagcctcggagggattggtttgagaatcaaccaagagcattcgggagtccaggaaatccgtactcggctcatagattgaaaacaattgtctactgtttaaagcaacttccagaaacacactacgagcgtctgcctatgtttctggaagaaagaggttctgtgcgcagtgttcatgacaagatattgtttgtgttacagacaacaagggagtgttgttggtacactgtatggggacaatgtgctgtat

SEQ ID NO: 7869 - DNA, 564 bp, Arabidopsis thaliana
ccatagcactggtgttgaagagattccacactgtatttgttgttagccgacttgaatgattgtagtgaggaacaagaactgaaattgtttgcctcttgagatcatttgacctttcccccaacaacctgagccacgtaagccaaatagactaatcaaacacaaaactgaacaattgcataccgttttgattgcgaactcgaataaagcctgccagcttattgtacacaactgtaaactactgtacagaactcataacttcactcatctgatcagattcatcagatttatctggtagagacactagcgtttgatcttctgaatcagattcatcaaccaatgatgcagtgcaacatgattcctctggattccacatgtaacagttatttgcagcatgttgtccttccatcttcacaaatccttgtttgtcaacagctctacattttgtttgtgtaaaaatgacacttaaactatcatcacagagttgactgatattgatcagattcgctttgagtccatcgacatggtatacacctgttagatgaggcagtgcttgtcctgaagtgt

SEQ ID NO: 7870 - DNA, 1634 bp, Arabidopsis thaliana
gatgtcgtttcctaaaccttattaacattacattcttatcacacacaaaaaaacacatcataaattgatgaaatatatttggacaattaaaactacatgttacgggagcaatccaacaaaacatcacaaatggttaaggaagctactcgtaaaactcctttatagcccaatgggcgttatatggtgacaataaaaaaagaataggctaattgggccggccgaaactagaaaccttggaggagcagtttctggttatcggctccccacgtaaacctcggttcctcgtcgacgtctccgatcttcgtggtctaacgcaaaaacacacacattatatactttctcgagaaaattcttcaaaaccaaattgacaaaaatggaaaacaaaaaaaaagaggaaagtcaaatccacgattaagaagagtaactttgcacgcggcttcgtgatgagttcgtggagcaagagctttaccaggctcgtcaatggtgtttcgcttgtagcgaagagatctataatcagtcaccggagttacaaagagcgagaaatggagatctcgaaggtttaataacgtcttcagggaaaaaagctttggttgccgccaccgacttagtcggacttacctccgggaagttcgcgaactctcgattcgtcgatctaaggaaccttccgttgtttatttcgacgaaggagataataaggataacgtcgtcgcaacgcctgaggttagatctgttaacaccaaacctagcgagaaaatcgttgattcgaaagtcctgagaaatgaatttagcgatgaagttaagaattcaaatagagaaggtgagattaaggtttcaggcgttgaagcgggagagattattggagttagagctgttgaatcaggtacggtaacggaagcatcatctccgtcggaggtagtacctccggtgaagagacggagacctagagagaggaaggttccttcaactcctatggcaagagcttatgggtatctgaatcaatcacttgttgcttagttaggtttgataggatctttagcaattttaacaagttgaaattttgtgaaatgtgaaggttttttaatttaggagctgctcttgcttggggagctgttaaagaatctacgtataggatggtaaatgggacaccaatgacaccagacaatcagcctgcgttatcgtctttgatgtctaaggaaaatgctgaaagattggctcttggattgtgtgaaatgcgtggagctgctcttaaagttggccaaatgttgagtatacaggacgagagtctcgttcctgctccggtatataccaatcttgctcaactagtgttctctgtttggttggttttgacatgaagataggttcttttgtagatcttgaatgctctggaatatgtgcctcaaggtgctgatgtgatgccaaggagtcaacttaatccagttttggatgctgagttaggttccaattggcaatccaagttgactagttttgattatgatccgctagcggcagcgagtattggtcaggtactaactacttagttagtattttgattgaagaatgcatgtgatatgtcgtccttttgagtgtgttgaatccttttccttaattcttcgtaatgatgctttaggtgcaca

SEQ ID NO: 7871 - DNA, 513 bp, Arabidopsis thaliana
tggaggctgccaaggacggtgcgatactccgttgcatcatcaagagccgttccggagagaagagagagctttggcgtcggtgacatcggtgtggacacgggctttgtatcaagcatattgtgcttctttagtaagtcggttatatattttcgctgcattaggtgtaagccgcgtgaagttctagtggcctcgatccccaagaaataactgagaggccctagatcctttagagaaaaccgactggcaagtgaggcattgaaggcttgtacaagagcgttttctcctgcaatgattatgtcatcgacatatacaagaacatacatgaaggtattatgccgattatagataaatagagaggcatcggctagagaattgacaaaaccagcttgtaggagaaatcgtcgtagttcttgataccaagcccgaggagcttgtttgaggccgtataaagctttattgaggcggcaacatgacttggccgatcacgatctataaatcccgggggctgcgaaa

SEQ ID NO: 7872 - DNA, 545 bp, Arabidopsis thaliana
tcactatctctctcaattaaaaacttcttgtcttttaaaacaataaaacaaaattataaattgtaaatactctaattggatttcctaaaactgatatatatatataatacttacagtagaaggctggttaaatataatctactaaaataatggaatgagttatgatatatcgaaattttattatgaaatatctaacataaataaatttctatgttaacatctgggaaaagaatctgccccatgactcaatcaccacctaggatgattgcaagaaggcttttctagcaaagttcttctccaatgccagaactgcaagacctagaaatgagatttctggcttttcacagaagactggtgaaagcttctgtgaagcatgggagcgtttcaagggttacaccaaccaatgccctcatcatggcttcaagaaagcttctctgctcagcactctatacagaagagttctacacggatcagaatgcttctggataccgcagcaatgggaattccagaacaaagatgttgaagaaggttgggaattggttgag

SEQ ID NO: 7873 - DNA, 1165 bp, Arabidopsis thaliana
gcaaaaaaaaattacaatgcaaaaatatttgaaacccaaaccaaacaacattaagtactttgttcattacaaaatgcaagagaagttgaaacatacatagagtttaagttcagaaaagagttaagagatatgcaaccgaacttagtgacatagagttttaagttcaagaaagagttaagacatcacaacctatgaagcaaatggagatggagttgtagtacaaacttaattcgtacgtttaccaaatccccaaatcacattaggttataaacatttgggttgcaatggcaacacatatagcaacaaacaggttttcgtagatggatttaggaaactctttgaaacacaacaatggcaagcggatgtacggctcaaggcaggagcagtgatgagagtacatacaactgtccccacccacacttgttctggtcttctctacttctttctcttctctcttactattgtaaaggctaaaagcctaaacaatttagcaatggatttgagagtaaaatgctttttatcgttagtggtatttaatggaaatttgaataggcacccaaagtcttttaaaaggtgttgaaatcagacgatcgagttcaatgcttatgtaaacctaaagagataattactctctttgagatgaaacatgataattagtccttttttcccactttgctaatacttatgttttgtttaatataattatcaatagaagagagataataatttaagaattttcgtatattgatttatgtctcattttatttccaaaaacgtcttggaaaacgaaagtaaaagtaaagagtaattttgaccgtctatgctctctctatatatgtataagctacattcgttttctacattagaaccaactaaccaagttatacgatatagctatggggacacaaacaaacaaatatattttctttgatagattactgaaggttataaaagaacaaccagccgatgtacggctagaggcatgggacagtgataaggatgcagctatcatgcagccgacaaatatgagattccttgacaacgaattacgctctctcacccttggcgacctgtctgtccatgatcattgccagaagctcaagacactctccgatctcctcgccaacgttgactctcctgtctctgatcgtgtcgtagttacaca

SEQ ID NO: 7874 - DNA, 886 bp, Arabidopsis thaliana
cattaccacgtctccatccaaaccagaccacaaaataagcgagctccaagagatcacatctcgtctcgacatatttacaaatacagtgtgcgcatagtccagtatcgagcactttacatacatatctgttatagcattgccgagattcaagcccaagcaggagcatctcctgatacaccatccatggacgctcttcccgtgcttcaacgctccaagttgtccacaagccataagtaaactcaccatcaccactgaatccagcgcaaatccagaataccccatttctctgaacatggctaaacccaacatagcttctccttgctgaacatacccaccaaacatagctgtataaagaacagagtctctcacaggcatatcgtcgaacaacttacgtgcatgtaaaagtttccccatatctacatacattatcactaaagccgaactaacaaacaaacttgagctaaacccaagtttcaaacacagaacatgaatcaaatctccagatttcgcttccctagacgcagagcaagctcgtagaataagaggaagagtaaaatcatccggtctaacacaagactctcgccacatacgaagaaacaaatcaattgacttggaagcaaaacccgatctagagaactcaccgatgattatattccaagagaaaatgttgcgataaggcatgtgccagaagacagaaagcgaagtaggaaagagatggttcagcttggaataagcgaggacgagcttggagctgagcacaacgttggaatagagaaatgtacgaagaaggtgagcgtggagatagcgtagatgtttagcgtttggagaatgatgtagaagcgagaagagatcaggaggattctgtgtagttaatgataaagctcga

SEQ ID NO: 7875 - DNA, 937 bp, Arabidopsis thaliana
acatgacttggccgatcacgatctataaatcccggggctgcgaaacatacacctcttcgtttagagttccttgaagaaatgcattgttgatatcgacttgatgaatactccaatttcgcttaaccgccacctctagaacagtacgaatagtggttgactttatcaccggactaaacgtctccgaatagtcaatgccatactgttggttgaagcctcgagctacaagtcgcgccttataccttgcaatagagccatcaacgttatatttaagcgtgaaaatccacttacaagaaataacatgtttagcttcctccggtgacaccaaatcccatgtgtggtttttcatttgagcattgatctcctctgacattgcatttctccaatttggatctttgagagcttgtgctactgtcgtcggtattgtcggtttagaagacgtgagagatgtggtgaggttaaatttggttttaggttttgtgatttgatttttggctcgagtacgcatagggtggtcgttttgtggaggtggtggaagcggtggattttgtggtagtggtgacggagtaggtgagtgttggtgaacggacgtagttggcgaagtaggaggcgtggaattttgggattgatttgtattggttggatttgggcttttgcttagtgggcttgtgttttggtttgtaggtgtagtatgtgggctttgtgaagttgggccagaaacacttacttggcctgtggaggaaatattgtcgtcgttaatggcgtttgacgatgatgaagcggcggtcaatggcacatgctctgaaggtggagaggcaggagacgacggtgagtgcggcggagagtgaaagatcggacacaagggcaaggcagtaggaggagctatatgaggcggtcgttgtagaagcgggataacattggtggtggtcggttgagacat

SEQ ID NO: 7876 - DNA, 392 bp, Arabidopsis thaliana
tgcctcttcctcaaatggcagaagtggcttaagctttggatctatgagtttatctctcgcagaacccgctacttcaagatgtgtttcaacccatctcaccatgtccatctctgcaccaaacacggcgtcgttctgcattttaccagtcacaatctccatcaacactatccccatactgtaaacatcgctcttctcagtcgccttcaacgagtacgcatactctgcgaaaaaagaacggtatccaacacgttaggtttaatagtcgaatcgtagttaagaaacccgagaaagacatgtatgtaccgtacctggcgcgatgtagccataagagcatgcaaacatagtgtttgattctgtgttggtgtcataattcgcggttaggatctttgcga

SEQ ID NO: 7877 - DNA, 768 bp, Arabidopsis thaliana
tgtggtactttagggtaaatatgacttgtgtagaagtgttgaatcatcgatttacccaatccggtcaagattgaagacccatgtctctacaacaaagaaggatgggttgcaagtatactttttctatcaacgaaacatcagggctcaggatgcagaggggacctctctctgcactcgagacccttgtctttccactaaatgcagatcccggtgtaggttgcatctcgttcaattttccgggatagtttgtggttagaggccatatcgttcaattttccgggatacttggtggttagtggcaatcatcttccgcgcatatggttctcaatgcatcctatgaatatctagctcttagtttccaaccaattcctcaaatcgtggcatccccgacgtggtgtgatcgtgttgtgatctcgttgaatccgggggatcatacgatcaatcttgtcggttaaaggatataacactacaatgtgatgtgtaagcgacgcagatttcttctcacgttctcaagttcaataaattgaacgtaacgatgcgtgctaatggagaaccttaaaatcgcggaaacaaaactcgttagtgtcttgatatatgttcacctacttttatctactttcctgtaatgtatttatatgtgtgctactttgtttgtgttgttcttgcattataatttgctttgggattttaataaattagggaaacttctagaaaatgacaaagtatagctttcgattcatgtcgaagaaattttggtcaatggtaccc

SEQ ID NO: 7878 - DNA, 1198 bp, Arabidopsis thaliana
atcaccaaaaaactcatcagactcatcaaaggtgactgcttgcgtacagctcgagtgctgtagacaattatatcaatatcagcggacaagattcaaatttttctttgtaaaacaacaataagaaatgcgacgaaacctaattctctctgcgatatatggaactgcggtctggtacaatatgaacaaagcacgtctagctggtgtaggagagagtccataaggccctgcaacctatattatatcattctacatcagaaggtaaaatggttttgtagaagcacacttaaggaagattgtataaagtaacaaaaacctgtataatgtcacaatattcctctcctaaagtttgttgccctgaacctgtcgtaagaacatagtaaagcatctgtccaagtagcttcatctatccaaaaacaataaaaacaaataatcaaaaatctcatggaaactcagacaaatataatttagtgtatattacctccttctggtaagcaagagcgattcttgtacctaagagtgataaaaattagttattaattggacaataacgatgaagcaattaaagtagacagttgttgttgtttggtttggtgtcggaaaaattgtaccgaaaaggtgtcggaaggcatcgcggcaagcttcgtggatgaaagaagcgtattgatcgtctttctcagcagctctcataatctccggctgagctgctaacgggaatcgtctgattccgccgtgaaacccgctcgaaccgggttcatcctgacccggacccgaatccccattaagcctcatcgtttcttttttttcgtggatcgatgaacttgccgaatgatgttttttattcggcctttgatatttttttttaattcaaaggaaaaataaatatttgcaaatgtatcgatgccatttatatatgaggggggtaatattttattaattataatctttttaattatttttatgatcaaatatttgtctatattaagcagtattttgtaatagtcaatcgattcgggtgagctgattagttttttagaatacatgatgttaagtaaattatgttaaaaataaatccgagcaaagtgtttccataattaaattattaaaggagatattaaccttgacgaaaactttctctcttctctctcaaaaacttttgagagagagagtttgtttttttggtaaagtccgatcgtgatct

SEQ ID NO: 7879 - DNA, 672 bp, Arabidopsis thaliana
ctcattctccaccatctgtgaatcactcgcttcaccggccttgccccgtagtagggtcaaagccaagctgagcaaggagatccactgcctctttggtatactgaagtttgattttcttctgttccaagctattcttcacccgtctcatctgcacattacacaaatgtaataacatgaagctaatgtctttagaagaacaaagattctgaaaaaacaaagtgggtttaaaagggttagttacctgtaactctacgattttggagatttcgttagaatccagcggctggaaaactatgtactcgtcaattctgttcatgaactcaggcctgaaattttgtcttgctaactccacaacttgccgcttcattatctcataaactgcttctttgctgtcttcattgttgcggagggtctcaagtatgtggtgagatcctatattcgacgtcataattacaacacagtttttgaaacttacggtccttccttgagaatcagttattcttccatcgtctagcagttgtagcaagatattaaagacatcagggtgggctttctcgatctcatcaaacagaaccaccgagtaaggtctcctgcgaacaacttcagttaactgccacgttcttcataactgacatagccaggtggtgcacgacaagctgtgagactgagtgt

SEQ ID NO: 7880 - DNA, 645 bp, Arabidopsis thaliana
tcaatggttaagttgtttcccagacacttgcacgactcttgtcacgctaaactttgcgtgcctcgaaggagaaactaatctggttgctctagagaggcttgttgctaggtctccaaacctaaagagtctgaagctaaatcgtgcagtaccgttagatgcactcgcaaggttaatggcgtgtgcgccgcagatagttgacttaggagtagggtcttatgagaatgacccagattccgagtcttacttgaaactcatggctgtcataaagaaatgcacctcgttgaggagtttgtcgggttttctagaggctgctcctcactgtctctcagctttccacccaatatgtcataacctcacctccttgaatcttagttacgcagctgagattcatggtagccaccttattaagcttattcagcattgcaagaaacttcagcggttatgggtaagcgaatgtttcctaaagtgtatatatgaaccgagcagatagatttatacgtaatggcttcaatgttttcttgtagattttggatagtataggtgacaaagggcttgaagttgtagcttctacatgtaaagagttacaagagcttagggttttccatctgattactcggtggaggcacacagctgtgaccgaagaag

SEQ ID NO: 7881 - DNA, 816 bp, Arabidopsis thaliana
ctaaaaataattatgtcgaatggagcaaggaacagtgacatcgttggtggaagaaaacggaataatcaaaggtgttcaatacaaaaccaaagatggccaagagcttaagtcatttgctcctctcactattgtatgtgatggttgtttctccaacttgcgtcgatctctctgcaaacctaaggtgtgtaacatggttgttaggattagattttgtcatttgctctgtttctttgggacttaaattgatcaataacactctccgatcaggtggaggtgccatccaatttcgttggtctggtattggagaattgcgaactcccgtttccgaaccacgggcacgttgttcttggcgatccgtcacccattttattctatcctatcagcagctcggaagtccgttgcttggtagatgtaccaggttcaaaacttccttcagttgcaagtggtgaaatggctcaccatctcaaaacaatggttgcaccgcaggtaccacctcagatccgtgatgctttcatttctgcagtcgaaaaaggtaacataagaacaatgccgaacagaagcatgccagctgatccaattcatacacctggagctttgcttttaggtgatgcgttcaacatgcgccatcctcttactggaggtggtatgaccgttgcattgtctgatatagtcatcctccgtgatctattgaacccgctcgtcgacttaaccaacaaagagtccttatccaaatacatagaatcattctacacattgcggaaaccggttgcttcgactatcaatacactcgcaggcgctctttacaaagtcttttta

SEQ ID NO: 7882 - DNA, 1819 bp, Arabidopsis thaliana
gttctttattttcagcagcggttttggcagaccgctacatcactgaacgctttcttccagacaaagatacctaactcgcaccttctcgtgattctttacaagttgttcttctgtttaaagataaagtttctttgtttcagctattgatcttgttgatgaagctgctgcaaagttgagggtttcgaccaaaccaactgaacttgatgaaataaacaaagttgtgatcaaactggagatggagaagttttctttgcaaagggatactgataaagcttctaaagaacttctacagaaaatggataaagatttgaccatgctcaaggataagcagaaagaacttagtatgcaattggaggaagaaaagtctctcattaataaattacgttcatttaaagaagaggtaaattttcagactacttgttcttaggttttcttcattctcaaaacataacgtactcgtaaacatgttctatgttttacagattgataaatccgctgaacgtgaatgtggtctaagaggtactgctgatctaaagtatggaacacttatgtctctccaacgccagttagaacaagtggagaagaatctcaccagtcccgaagattctgatgactcaatactccaagaagaggtaagtgatgtccacatagcagagatagtaagcaagtggactggtattcctctatcaaatcttcagcaatcagagaaagctagtcatgttggaagacgtgctacacaagatagttgttggtcaagaaaaggctgtagaatcaatagcaaatgttatacgttgctcaaaggctggtctttcagatcctatccaatagctagttttctgttcatgggtccaacaggtgttgggaaaaccgagcttgccaacgctcttgctggataccttttcaacactgaaaatgctatagtgaggatcgatatgagtgagtacatggagaaaaactctgtctcacgactcgttggtgcacctcctggctgtgcggtttcgaagaaggtgggcagttaaccgaagctgttcgaagaagaccttactcagtggttctattcgacgagattgagaaagcgcaccctgatgtcttcaatattttttctacagatactaggtgatggaagagtaactgattcgcaaggaaggatagtaagttttagaaactgctttgtagtaatgacgtctaatataggatcgcaacctatacttgagactttccgcaacaataaagaaagcaaagaagcagtttatgggatgatgaatgaacaagctgtggagttagcaagacaaacttttaagccagagttcatgaacagaattgacgagtacatagttttccagctgttggatttatcagaattatccaaaatcgtggagtttcaggtagtaaccttatatacacatccactttaggttatcttcttttgtttttgtcatatgtaacatcatgattagaaatatttgatctaatcctattttatcttagttagttttcagaatctttatttttcaatcccttggttagtttgtgaaaatgtacttatattgtataggcttagggtatttggtttttcctttggtctagttttatttgtgtttggtagaaatgacttgttaccatttggtgcagatgaaacgagtgaagaatttgttggaacaaaagaaaataacacttgagtacacacaagaagcggtggatctccttgctcagcttgggtttgaccccaacaatggggcaaggccagtgagaagagtgattcaggaagtagtgaagaaggagatctccacaaaaaaattgaagggagaaatttcagagg

SEQ ID NO: 7883 - DNA, 550 bp, Arabidopsis thaliana
caccttgatctcatcagtcttgatggcagactcatcgggaacaaagtccatgcggcgttcacctcctcttcctgaagcttgagtgagattccacggactggtcccttctggatacgtttcatcaagtgggtggagaatccagcaatcttgttgcggagtctctttgaagggatgatggcaacctcttcaaggattttcttgttagtgtggaagtcaagagtcatgcgagagtagtacttctcgatgacttgacgagaagatttcttcacagtcttggttctaacacgccccatctttcagttacctgtgtgacttacctgctgaaaggggaaaaaccaaagaaattccatgtctttagttagggttcaaaatccgtgattcaattacatcatgaaattaaaaccatttatgtatcaagaaatgcacctaaagcatcgattgttataatcatagttcaaggaaacatatgaacagcaatgtcaaatagaaacaatagagatccataagcatatgacaaatgaagaaacaaccaagtgtatagttgatttgt

SEQ ID NO: 7884 - DNA, 857 bp, Arabidopsis thaliana
acgtgtttgacttcgtagcttctcacaaagacaggaactcgatatctctggtctgcaaatcatggcacaagatcgagaggtttagtaggaaggaagtgttcatcggaaactcgtacgcgattaacccggagaggttgatcaggaggtttccatgtctcaaatccttaactttaaaagggaagcctcattttgcagacttcaacttggttcctcatgaatggggaggtttcgtgcatccttggattgaagctttggctagaagccgtgtgggacttgaggagctgaggttgaagcggatggttgtaacagatgaaagcttggaccttctttcacgttcttttgcaaatttcaagtctttggttcttgttagctgtgaagggtttaccactgatggcttagcttccattgccgctaattgcaggtaaaggcctttcttttactggcgtttctctaggttttatgttgtttttaaaatgtgttgttgtctttcttattaggcatcttcgtgagctggacttgcaagagaatgagattgatgatcatagaggtcaatggctgaactgttttccagatagctgcactactcttatgtcgttgaatttcgcttgccttaaaggagagaccaatgttgctgctttagaaaggcttgttgctaggtcaccaaacctgaagagcttgaagttaaaccgtgcagtaccgcttgacgcactcgcaaggttaatgagttgtgcgccgcagctagtggacttaggagtagggtcttatgagaatgagccagatcctgaatcttttgcaaaactcatgactgccattaagaaatacacatcgttaaggagcttgtctggctttttagaggt

SEQ ID NO: 7885 - DNA, 675 bp, Arabidopsis thaliana
attgctacatttataactctacttgtaaaaattctgtcatcactaaggtcaacaaagaaacgaatacataatcgaccgagaaaaagacaagaagaaacagagtaaacagaagtcaaactatgctttgcatactcgttgaacatttgcctaatacaacagcttcactgaaccaaacagtatggtttttgcgtgttaatagtccttcataaaactccacaatcttcgctgatacaacaactcttacacttggtctcaatctgaaaagtgaaaccatctttctcttacagggtcactgaaatcaattggttcctgctccgatgtgaagcagctcctcggggattgcagctggatctaagtcccaacagttttcgggaaagccgctggttgcatctttaagaaaccaagacggcacttgatgtgaaaaccgcaacatttcacaccttggtatccacttcttactgtcctcccttgtgctcctgtgatacacggttttgtagccctctaatttaacaagaggggtaacgcacacaccatactgttcagtatactcatcaagaatctcgaccatttcatattggtgcctcacatcgtccggtgttgatccgtcccagttcagtgaccagttcttgtagacggcccaaatctcagtcagctgtggggaagattcgaacacaa

SEQ ID NO: 7886 - DNA, 448 bp, Arabidopsis thaliana
cgtagccccaacattggggcctgtattgacaagaaaaatgaaaattagcaagtaaaataaattaataatggtagagcatgaacaactaactcaagtatgtatacttacaatgtcatgctcggaagcaccgctaggattcttgttttcaatctggttacacatcctcttagcttggagacagcagaaagaatcgttgtcattcgagtttgtaaagatctttttggtcttggttgactatgaaagatctcagattttgcaattgtggctggaccaacacgtttatggagtaagaaagtgttacatgatattataactacttgtatcataatgcataatatgacatagaggatgaacgtgattttgatgcaagtattgaagaaagagccgaggcccaactctagaagatgaaacggcgggagacgatcgatgatggtcgattcaagaattt

SEQ ID NO: 7887 - DNA, 570 bp, Arabidopsis thaliana columbia
agagtgacgtcggagaatggtggcggagtaagggaagtgtggagcagagagcgacaacacgctccctccattatccattctctatctttcccttctctctagtatctcttctctctggttataacgaaacataatccttataacttttgaaattttaccaaattgcccttctcaaagtccaaataagtattaacccaactttcgagaaagtttcaggtgaatttcgatattttctcccccatgaatcaactcggatctgataagcaaaagatattgttactatcgaaagttttaactccaattttggttccacataactcaaaacccattaatacgaaagagtctcactctgagtttaagacataaaaacttgaatcaaaagaaacaataaactttccaagaacacacatgtctttcttatccctaactgtgaaaaaagagagccagtcgtttgccttgattggctgatgataacaaagccatctcagtatcttctgggtgcctgccaccaccgaaagcagcgattggtgccatagcttgttgtggctcgactgcagagatgccgggagt

SEQ ID NO: 7888 - DNA, 718 bp, Arabidopsis thaliana
ggatttggcttacttaagtatggtagttgtgttgttttagttcatgaagaccttgtaaccaaaagaacatcttcatgatattaaccaaatccaaagactgaacacaaaaatatcttcctctagacctaaagagttaatagaagcagcaggcaatatacacattttcattgtggaacaactctaccttgttcaaagttttaaaatggtttcgacctgtggaatgtttcactaacagtccttcataaaactccacaatcttcgctgatacaacaactctcccatgaatcaactcggatctgataagcaaaaagtattggtactatcaaatgtttgaactccaattttggttccacataacttaaaaaccattaatacgaaagagtctcacattgagtttaagacataatcagaagaaacaataaacaaccacacaagtctttcttgtccctaactgagaaaaaagagagccaatcgtccatcttagtatcttctgggtgccctgccgccgccgaaagcagggattggtgccatagcttgttgtgggtcgactgcagagatgccgagagtgtcagacattcctagagaagcaagcatctcaagagtctctttgtcgaccttgatctcatcagtcttgatagcagactcatcgggaacaaagtccatacggcgttcacgctcttcttcttgaagcttgaccatcgtttcactgttacaggcc

SEQ ID NO: 7889 - DNA, 297 bp, Arabidopsis thaliana
ctaataagttagcatgtacaaataatttaataaagataagttagtaaacacaagaatttataattgagtacttacaatgtcttcttcagaagcaccgctaggatttttattctcaatttggttaacgcatcctctcagctttgagactgcagaaagaattgacgtcattcgagtttgtaaagatctttttggtcttcgttgaagacgaaaaggatcggatttatgatactcagcttcaactcttgtccatagttgatctcctgattggtttattcctattattggattttgggaaac

SEQ ID NO: 7890 - DNA, 626 bp, Arabidopsis thaliana
ttcttcttgaagcttgagtgagattccacggactggtcccttctggatacgtttcatcaagtgggtggagaatccagcaatcttgttgcggagtctctttgatgggatgatggcaacctcttcaaggatcttcttgttagtgtgaaagtcaagagtcatgcgagagtagtacttctcaatgacttgacgagaagatttcttcacggtcttggttctaacacgccccatctttcagttacttacctgatgagaagagaaattccatgtcttattaaggattcaaaatcaagaaacaaccaagtatagatgatttatgtcttaaacttcaacattcaggttgaacactaaacaaacacaggaaccacatgtaaatgcaatgtcaaatattgtcaagagaattgaaaatgagtcaagtaatatacatcaacataacgctcaacttgaaagaggtctagtgttcttatcaaacaatataagccaaattttatacatacatttatattcagcctaaaagaatattaactcacgacacacttttggtgaatgaaacacaaaataagagaaattcagaaaacaacagaacctcttcacaagttggtataatatacaatgcctaatattaagac

SEQ ID NO: 7891 - DNA, 1015 bp, Arabidopsis thaliana
cgacttttgcttcagatgagtaaggctttcttttacctcagtttgtgatagtgttgtgtttcatctggttaaggtcttgttgtagcttggcgtcttcgtcatcatccgttttggtgaggaatttgtctacctgatctgcagcttgacgtccttctgagatagcccagacaaccaaagactggcctctccgacaatcacctgctgcgaaaacaccttccacggttgtggaaaaccggccatactcggccttaaagtttgacctgttgtcacattcgagacctagcttctcagcaagtgtctgtaaaaacaaaaacaagcaattggttttaaatcattgccacaagacccacaatatataagaagagggtacacaacgggaatcacttactggctcaggtccaaggaaacccatggccaagaaaacgaggtctgcttcaatgatttcctcagagccttcgatctccttgaactggaacctcccggtttcatccttctcgcaactcacacgcacaagttcaagccccttcacgtttccattgtcatctcctatgaacctcttcgttaagacctcataggtcctagggtcttttccgaatttggtggtagcttcttgatgtccgtagtcaatacggaatacacgaggccactgtattcacacggaagctcattaaaatcaacaatatccaaccttgctcacaactctttttaatccaatggatgcaaaaatcttgaagaagttgctaaaaggattgagtgtagaagatctgaaacaaacctgtggccaagggtttccaggagctcttgttgagggtggctgaggaagaagttctaggtttacaatgttggtacatccatggcggatagatgttccgatgcaatctgtgccggtatcacctccaccaataacaacaacctttttcccttttgcagaaatgtaattgccatcctcatgattgctgtcaagtaaacttttggtgtttgcatgaagaaactccatggcaaagtgaacaccggg

SEQ ID NO: 7892 - DNA, 1152 bp, Arabidopsis thaliana
  unsure (1)..(1152): unsure at all n locations
cagacggtttgtgagaacaacgtgtcgcgtttcgatccctggtggttctttggggaatgaatcaaaagcacctccaaggtttctgagggatagaaagattgttccagatgctgatccccccaatatggaagatatccacaagttgtatcgactttttgagcaaaggttgatatttccttcaccatctttttccagcagtgagcatacatgtgttgtatctaatggctttcctcttctcttttggcagctcgagactcaccatcttgactggagctggggttagcacagaatgtggaattccggattacagaaggtaattcatttgatcgattagtcttgtctgaagatgccttgcattctcgttttgatggtctcatgggttacatgtggttccatttgatgatttggtgcagtcccaatggagcatacagttctggtttcaaaccaattacccatcaggtgatctgaaggcaagatctatgaaatctttacagttcttaatgcaaaccttggatcattttactattgtataactgtattaatctattgtctacaacctccttcacaggagtttactcgatcaagccgagctcgtaggcggtattgggcgaggagttacgctggatggaggaggttcactgcagcacaaccaggaccagctcatactgctttagcatcactagaaaaagctggacgaataaattttatgatcacacaaaatggtgacaggtatatccttcagttcctcttccgtagatctctgttggatgtgaagaatgttgactctaagctctaagttgttaggttgcatcatcgtgctgggagcgatccacttgaattacatggcacagtatatactgttatgtgcttagagtgcggcttctcttttccccgagacttgtttcaggatcagctaaaagcaatcaatcctaaggccagtgtataccataacctgaataaactggattaatgtatcatctcgcaaagttacaacgtttttgttgtcaactgtagtgggctgaagctatagaaagtattgatcatggagatcaggatcagagaagagctttggcatgaaacaaaggcctgatggtgatatcgagattgacgacaagtnttgggaagagggtttcatataccagtatgtgagaa

SEQ ID NO: 7893 - DNA, 828 bp, Arabidopsis thaliana columbia
aatgatattgaatcccatagctaaagcattgagcttgtttttacccatctgcatctgaagctgtcgtctcactacttcgaaaggataagtggctacttcagtacaagcacctgctatagcaccgtacatgagagttctgatgggtcctaactcgagcctgtctagagcattgagttcttgtccctgctgcttcatgtctatcagtcttttccggccttctggtgtatgcagaaacgatgacttaaggatgtcgtaaacgccatagaaaactgcaccggacagagccatgcttgctatggacggcactagacccttgtagagggagaacaacccttctgtttggatcatataccgaaaagctcctccgattccccccaaggcttctccaccccgagccactagtttggttcgtatctgtgccagtagaagaacacatttcagtcaaattggttacacatgctcataattgtcctgtcgaacactaacagtagacttatgtcactctaaagcagagaactttgtcatatttgatctaaaatggtttaaggaatcaaaaacatacagtgtcgagtggcaagcagagcacagtagcagtaatcccagcagcggcaccagcaacgaatctttcaaagttggttgcttcttgattcccagcgattttaagcaattgctttctataggtatcataggcacaaaaattgacggctttgaaaggagcagttcgaagaacattgagcaaattacctttccagaatccagtcaagccctgtgtagttgcaattgacttagcaaccaccaacaagttcctctgttcacacgaactgtata

SEQ ID NO: 7894 - DNA, 766 bp, Arabidopsis thaliana
tccctcacaaaccctaattcatatccatatccaattccatgttttgtctgtcaactctctgttctacttctgaatcgtcgtttccttcatataaccaaaccaattctgttgatcatcttggcacattcattgttttgagaaggaacacaaaaagttctgatcttgtccctattcgcacatcaatggacgataatagatctactcatagctcaatgttcggtgacctatcaacagaagaggtcacaagtaagatcattctcacagcaatcattgttctattcatggcggttctgttcgtccttatcctccatctatacgccaaactctactggtggagaatagatcagctccaacagcaacagcaacaacaacagcaagagcaagagcaagaagaagaccaatcatccattgctccacctgtagtcactcgccgtcagcgacgtcgtttcatcttcgtcccaggccaagacgctctaagcaacactggactaacctcttttgaacttagttccttaccaattgtgtttttcagacaagatagttgcaaagatggtttggaatgctctatttgtttgtctgagcttgttaaaggagataaagctaggctgcttccaaagtgtaaccatagcttccatgttgagtgtattgacatgtggtttcagtctcactctacttgtccgatttgtagaaacactgttcttggtcctgagcaagctagctcaaagagagttgaacaagttccagacaatgcagaaaatgctggtac

SEQ ID NO: 7895 - DNA, 824 bp, Arabidopsis thaliana columbia
  unsure (1)..(824): unsure at all n locations
gcagtgcaaatgacagtgatctaatcattcacatgactacatgataagaaaagatcgaatctgaaacatcaagtgcagctactgatatggtaagcagaaggaatctaatgtcaaaggacatttactaatcttggatccaagaacacaacatagccacagacattattaatgtcaaggggcataatttagtactcaatcatttcttaatttcaacaatcaacagaacaaaagttcaagatattttaatacaagtgtaataaactataacagaaatcagcaaagactttctgtaaaaaccatgcaaggacataatcattgtaattcttcacacaaaatctaggctatcagtaagaatctatcagccacattatctctgagcgtatataccccaacaaaggatcctacagatcaaaattcagctaaacaagatccaaaatttacaaatttcgaaagtgaaatgatcgtcagaacacaagaaccaatcagcatttccataaaccaacatgttcgatgaaatcgagaagggaaaggagatgactcactaggaagcatacttaagtctctgtgaaaagaaagagattgagtctcctgagtcaaacccaattcatcagaggactttttgagctcgcggctaaaaggaatctcgccttcaatggcagtgacagctctctgagaagctgaagaagagcactcccagagacagaaacgacggcgtttatcagcgtcgaattcagcgagacccatgagaggagaacgatgatgagtcgtttggggacaacccaaatgggaaaacacctcagagccatagcanaggagggagattt

SEQ ID NO: 7896 - DNA, 555 bp, Arabidopsis thaliana
ttattttctttcaaactctgttccagaccattacttgtctctggctctagatctgccaccttagtttctactggtttggttacctcaactctattttctgcctttttccttgataaacaatctgtacttaaatgaccccatctatcacagctgttacatcttggaggtaaccatggataaacatattcgactactgtatctcctcctttttctgacttgaaagagaaacactttggtaatttcttcgtgaagtccacttctacaaatacttttgcctcctcaaaagttttgattgcttctgtatccgggtggagtttctttggcgttcccaatggacttgttatagcacttagcactttgcaagagaaatactttggtggcacattcttcactattacccaaagtggcatagttttaatctcttcttgatccatatcaactattggagtccatttcgatagcaccacaggaactccgcacaggttccacatacctcttcttagaactcgagctctagtacgttcatctttgattctgaacctcactgttgtgtgg

SEQ ID NO: 7897 - DNA, 524 bp, Arabidopsis thaliana
aaaatccttaagaaaaaatcatctaccaatcaaacaatttagaatagacaatcttggctagtgcatctcttcctagagctgcactatcaggatcaagcgactttgtaatgctttcatcacgagtcaccatgacccttttgcacaaggaatcttctaaagctttcccatcacacctgcaacagagagaaagtcgaggctccaattatggctgaccataaaactgtttatttgagaaaaaacagagtagtgaagcatttacatgaaaagttctgctgccacttttagatggaaccgtgatttttcgtccttaggttctgaagcttctgattcttcaccctttgcaaactcgatgttccctagatgaaggattgcagccactactcggaagattccatcctacagtagtagaattgtaagaagagttgttccaatgactcaacatgtaatataactagaaagtacctgctcttcagaattgatcccaacaacgtccatagctttccttgtagctaggtattccttgg

SEQ ID NO: 7898 - DNA, 837 bp, Arabidopsis thaliana columbia
aacgttttcctcggcagggtattcaagatgatatgctcctcccacatagccaactacatttatctctcgacaatgaacaaattccactccctcttgaatgtttccggcgatatcttgtagacttgaaaactgagagaaatatagaggacaaaagttctcctatgagcagggcaattaattcttgtctcagagatatgtatcattatgctcgtatttctggatcacatgttcttgagtgtgtgatgtgtgctgctttgtcttctgtaaagaaagagaagcttcaggaggctaatgatgtaggtggaatagaataaagttacatatcttcgtactcattatcttactgcagtattgttgattggctgctaccccatttgacttccctttttctattgggatctgaatccctcttctgctcatatgtttcaggttcttactttgtttccccgacttcgccctttagtagcctccatgggttgggatctattgccgggcaaaactgcaacccgtagaaaattgatgcggctactttggactagtgactcgcaagcacttcggctagaagaatcttctctttatggaaaccagacagatgaagtaactttttttttccttcacataaactactatttggatctattatttttagaagatgacagtgaaagtctaacaggacacaatgatctgggcagaaatcttgtgtggaacacctctgcgatacgttatgttatcagctggaacttgcatctttcgctgcttgtgtcaattctggtaaatcatggactccaaaggcatctttcttgatgcatggtaatgtgtcatccgcgcatgatgatg

SEQ ID NO: 7899 - DNA, 706 bp, Arabidopsis thaliana
cccttaggaagacgcttcgacgtcctcagtcttctacatgcatcatagtgaccgaaaccacaccatgtaataagtctcccacagttcagcgtcgttctgcgaactatcagccttctcgttgggaccatcaccatctcctctcggtcgaaaataaatttgcggtacgtagatatcccgtaaacactctaacttttttacagtgacgtaatgttgaatactatgttgataaattttttgtaatgttccatatattgcatacagaaagataaaagggtacgagagagagatttgttgaaggaaaaagtgagaaagatgctcaatgatgagcaaaagacttatcttgaccaattggagttcattgacgatctacaaaaactcggggtttcttatcattttgaagcggaaatcgacaacattttaacatcttcttataaaaaagatagaacaaacatccaggagagtgacctacatgccaccgcactcgagttccgacttttcaggcaacatggtttcaatgtttcagaaggttattatcttaacctaatataataattgtttatatatatatgttaaagttttctcatcaatgtggaaagataattgcttatatatatatgttaaagtcttgctgtctaaaaaatatctggtcttatatactagtgaattttgtattacagatgtattcgatgttttcatggaaaattgt

SEQ ID NO: 7900 - DNA, 513 bp, Arabidopsis thaliana
gtatcacagaataaaagaagagagaagtataattatttaggtagaaaattgaaattcacaaaattttacaagacactatggaccgctcttatacgctgtcgttacatcatatacgctgtgttttaaatcggcttgatgattatggatgttagatttgcacgttcaaatatttatttctttattggctaaaacgtcaaaatcaaaagtttttaaaactcttaataaaaatccacttccaactccacttctatatcccttctcccatgcgataactaggccataatagactcctcataattcagctagaggagctaaccatatgcctattctcaatgcaaaaccacccaaccacaagccatcattacccgtaagacaccacccgacgtggctggcccgggttgccgtgtgaagctccatccgtcgaaagcttgacccagctctcgcttggcttcttaacccaacacatatactcctccacgtcgagaccacctctcttaacccaacacatatact

SEQ ID NO: 7901 - DNA, 524 bp, Arabidopsis thaliana
ggatgcaatggactcctgaacttcaccacaaatttgaagtagccgtcgaaaaaatgggcagccttgagagtaattaattacactaattaatcttgcgtgaataagcaagttacttgattattatctgaccttttaattgcattttgcagaggcttttccaaagacgattctccaattatatgcaagaagaattgaatgtccaggggctcactagacacaacgtagccagtcatctccaggtaattttggatctttattctattttagggttttcttgtttcttagtggacaagaaaccagtaataagggctataacaatttaaaacgattccgatggcagaagtaccgtcaaagttccaaaaagacctgcactcctcaggagcctcaagaagattttgtctggggtaatgctgggccagatgtcactcttgcagtctctaaaacgctcctaagctcccatgctacaccatcgtatttgataaacaatcaagctgcgcctagaggatcatatttcatgaacaata

SEQ ID NO: 7902 - DNA, 598 bp, Arabidopsis thaliana
gaacattaatagagactggattttgtgtataaaggttcactcttttgttgtgtagaatcttttctgatgttgatttaggttctctttttatataggaacatttcaaggtcacgttattggagatcaagaagatcagcaattgctcaagctcatgactctttgctaagaaatgcattgaagggagagaagtatataaagctctatagcttccattatctcatcaatggttttgctgtgtttgttagctcacaacaggtaatcttgatcataacaatctctatgagcttatactatgttatgatatctttatgtcaaatttctttcattttctcttaggctgagactctttcaagaagaagggaagtagcaaacatagtgttggatttttctgttaggacggcaacaacttatacacctcaattcatgggtttaccaaaaggtgcatgggttaaagaaggtggatatgaaactgctggagaaggaattgttatcgggtttatcgacactggcattgatccgactcatcctagtttcaatggcactgacacttcccagcgtcagtatccgatccctaatcatttctcaggtgtttgtgaag

SEQ ID NO: 7903 - DNA, 552 bp, Arabidopsis thaliana
gccagtgtgctctaaagctttagacttcccgccatcggagataaccatagcagtcaacttcccgcccttgacgcagccagtgtccaaccccttagtgtactcctttaatgacaagcccgacttggaatcatgtccataaatgactgtcatgacaccatttttggactcgagggagagggtttgatgtttgttgaagagctacagggcgttacgttgatggtcatttgatttgataatgcaatgcagttgcgtaccttcgtccacttcacgcccttctctagtgatgagcttggcacgtgtgttggcaaatcgacagtcttcatattcataacgctgtagggatcctgcctgtcgagatcgacgcctgggataagcccggcgtgggcgacgacaacctgtcccatattcgtgatctgaccgacattcaggatgacggggcatgcgtcaagccattctgcttgctcggcggacaactgacgtgctagttcgcgggacttggcggactctggatgagcgatgtccatgagtcgtcagtgatattggactcgagca

SEQ ID NO: 7904 - DNA, 1068 bp, Arabidopsis thaliana
atccaaacaaatcgagcactgcaatgattcacttatcttaaccgttgggagattatccacaacttctttacgtgctggaagactcccgtgcctgattgaatcattatcagctagatgttcaagcaaatggtctaaactggatccaacaaagtaatctccaattgcagaaagagaagtattgttccggttttgattcaaactcgttgaaccctgaacaacagctgattgatttaacaggtctcgatccgagctctcatactcagaagcaatccctgcacgaataccctgaagcaactgcaatatagtagctgagcttctccgtctcctcctaaggatagactcaaactctctgtctaaatcaatctctctaccttgttgcctgtggcgatgacgacgatgatgatgtcgatcaatatcgacgctgtcatttccatcaacatcatcagatacattgacctcatcattatccacaccaaactctgtcctcctaaaccttctacgtctacgaggattactcatcattccaagcaagattggaccccatagagacaatgcacggtctgtaccaaaatcaatctcagggtcttgaacctcccttagactgctactgctgccgccattaatctcacggctcatttcctcgacaaacccgctttggcaaaaggggcatttgatctcggcaccaataactggattcaccatttgtgaacacatgtgacaccaatacctagctgacattgcctcttcctccttctttccttccccacccaaacctctcgtttctgaaacaaccagaagaacaacaaaaaaaaaaacatgaagaagcaaacctataaagtttcgacctttgtttcatcagatctaaataaagagaatggtattcccaaaagtttcactaaaaagaggataatatcatcttcaccaacatcattagctcaagtttcagacaacaaaacgcaagctttctatgcaaatgcgaataaacagatcaaccaaaatttgcctctataaagagataacaatagaaatcagggctaatccatgacaagaaaactctcaattctcatg

SEQ ID NO: 7905 - DNA, 799 bp, Arabidopsis thaliana
tttttataataaatttaaagaaacacagaagcaaagcagaactcaagttatataaaagcagagacagaacaagaagacccaaaaccgaagtctaatttgtgtacatggattttttttatttttttttcattcagaaaaaatctattttgctgagttttggggctgaaagtggattgaaaataaataaaataaattggatttaacgtacaaaatgttttattattctttaattataatcttttttatacccatttatcaaagaatctcaatggagatgacgtgtcacgtcaattgacaatgaaattattttgttatcttatatattatcaaaacttttcgtattttctatttcacatctgagagcttttttcgtttcttgtgagatcatctaaaaaatggcttcgactgtttcgctttctttactcagcggcggcagtggagctcttcaggcgcgttgcgcaagaaccgcgcatgttagcccacgagcggcgcattctaacaaacccgcgctttcttcgttctcgctgaccggcgcctctcgcaggaatctgttattttcgttgacggcagcgacggtagtgacgggacttcagcctgcatcaatggcggagaatattccgttatttggtataagaaagaaactgaagaaagcagaagaagaagcggtggagatcgtgaaagaaggctttgagacggcggagaaaggcgttgatgcggcggagaaaggattagaagcggcggagagaggtgtagagacggcagagaaggaaatcgtgacggcggttagctttaatggatt

SEQ ID NO: 7906 - DNA, 1252 bp, Arabidopsis thaliana
attctcaaaatgcttgatcacccgtttcttccaacgttatacgctcacttcacttcggataacttatcttgtttggtcatggaatgttgtccggggaggtgatttacatgtcttaaggcagaagcagcccggaaggtggtttcccgagccagcagctaggtaccttggttcttacgattagtggttaacttttttatgctttatgatttgtgatgttgtagttactaattgtttttgtcttataggttctatgtcgcggaggtgcttcttgcattggagtatttgcatatgctcggggtaatataccgagatttgaagcccgagaacattttggtacgtgatgatggacatatcatggtgacagattttgatctctctttgaggtgtaccgtgagcccaacgcttctaaactcatcatctccactccatgcggatgcaatgagactctcttcgggtagccgcactggatctaactgcatcgagccatcgtgtttccgccctaaactctcccgcggatcagggcccaagaaaaaaggcaaacaacaccgcatgatgatgaaaaaactcaagaaatctgacctaatcgcgcggttcaaatcattgccacagctcgtggcagaaccaacagatgcgagatcaaactcttttgttggaacacacgagtatctcgcgcccgagatcattaaaggagaaggtcacggtgctgcggttgactggtggacatttgggatctttctatatgagcttctttacgggaaaactccattcaaaggagctactaatgaggagactatagctaatgtggtgcttcagagcttgaagtttcctgataaccctaatgtgagtttccaagctaaggatcttataagaggtttgttggtcaaggaacctgagaaccggttagggacagagaaaggagcagcggagataaaacggcatgcgttcttcgaaggcttgaactgggcgttgatccggtgtgcgatcccgcctgagcttccggatttctatgactatggagttcctaatcaagaagggaaaagcaattacttagattgcaaggcagttggggaacatcttgagtttgagttattctagaggaagatgaagaagcttacgtattattacagcctttcatagaactcttgcttgtatcctaagttacagagtcactttttggtttattattatttgtttcatttttttaaagaagtattgttattttattttactttttgtcaactattgttatttg

SEQ ID NO: 7907 - DNA, 954 bp, Arabidopsis thaliana columbia
aagatgaacagatggactgctagatgctgtgaagaaacagagcagttttcatatctaataatctactgaagctcaaggttagagagcaatcaatctgtctttatatcatatatagaagaagaacaacagtcaaattttcaagggaaaaactcacatagcatgagaagggagattctggaatataatggaaaccattgcctcttcagccatttgatcagcgattgtaacagggcctgcagattatccaaatcagacacacaaacaaacgttggctaccaaacctacgattcttcttaattcggtacctaacaatcaaacttcaatcaccaatttctatcatcaatttacccttaaaaaaaacaactagaaaaacaatcgagacttactcatatcatctttatcaacaatgtcgaatttcttccggaaatactttctgataacctcgccggaagcgtcacgtaatgcatttcccacagcggcgaatcgatccagctcagtgtcgctaagttccgaaggagactcgttgcttatgttaggccgttttgagtttgaagccatagtcaggcaaaaccgacggcgggagacgggaacagcaattgcagaagaagaaagaaaggataagcggctgttactataagaagaagagatacgaagagaaggatttgcagaccgcaacgccggagactgtggcggaatcagatcgaaggacttagagaagaagtgcgactgagctaacattttgctatgagtgggaagttcacggaacagccagtcatcaacgacggaaaaggtttgaatagagagatcacgattatgcaatctcatccgttggatcaactttacatctctcaaacttggttcggttcggttcggtttgatattggaccgtataatgtaatcaactttgaattaccaacaacattttacacaatttcttttttttttttttttttt

SEQ ID NO: 7908 - DNA, 590 bp, Arabidopsis thaliana
atcatcagctagctcgatcccagaatagtataactcgattcgctttatcggtgtgttctcaacaatgtgaatcttgtcctttaagctacttacctgcaaaacattagtagcttgttaatcaagaaatctcaaaaactgtaataagatgggaggtgaacatgttgctagtattaccgtttcggttctgtctacttcgacggtgaactgttttgacgggaacttgacggtgacgtgaattttcctaacggcggcgtggataaaagacggtgcggtgaaaaggggagttacggtgaggtcgattctggtgccgtgagagatgattgggtaatcttcgatgtcaagaccgtcgatgagttcccaacaagagacaaagagagttatagaagatgttggtatctgaagaaactgtcctagacgtttcttgacctccaacacagattcttgttcgctgatttccattgtgaattcttgtgtgtatgaaacaattgtcactatcatattttcagagtaaaaaaatgtgttctgatatgcttatgttatggtgaaaaaggactatgattccacaatgcgtaatgtaaatatagacgcac

SEQ ID NO: 7909 - DNA, 440 bp, Arabidopsis thaliana
atctatcttcttcgggtccaatcgcagtgaagaagataacctcaaatagcttacaaggtgttcgagaatttatggcagagatcgagagtttaggaagattaggtcataagaacctcgtgaatcttcaaggatggtgcaaacacaagaacgagctcttgttaatttaccgatatatacccaacggaagtctcgactcgttgctgtaccaaacgccgagaagaaacggcatcgtgttgccgtgggacgtgcgtttcgagatcataaagggaatcgcgtcgggactgttgtaccttcatgaggaatgggaacagatcgtggttcatagagacgtgaaaccgagcaatgttcttattgatgaagatatgaacgctaaattaggcgattttggactcgcgaggctttatgaacgcggaacgttaacgcagaccacgaaaatcgtt

SEQ ID NO: 7910 - DNA, 789 bp, Arabidopsis thaliana
ggataaccttttgaccaaatatactaaacggtttttaagagagttggctcctgagatgcgaccacattccactatcaacaagttattccaggcaccaagaacaaaaagttttacattgggattctgatactatggcagtctgaaggatgatccaacaaaccctctagaaaaggaattgacttattgagaaattgaattacataaatgaaaactgttgaactctttacttacttgtcccttacggagaccatctgaggggcacttaagcgcttcttgaaggagctgaatcacataattagaggagtccgggtcaagcgtagagtctgcaagggcgtaagctttgaggaaaaacgcttcaaacgacctttggatggaaatggattcctccgctttggcaagggcttcctcgcggtggcctgtatcatacagtatccatccttcatacacaagtctctcatgctccgactttgaatggtttcgagccagccttagactacgcattgctgccttttgacaattgagcctgtcagtatacaaccagcacttgttaaaatcacttacagtctaaaacaacatgcaccacaagaaaaaaaattcattgagaagcggaaagagaggtttagattataccgtaggagaagaagagactgtctgaaccgtaaaagactcttccctggatcatttgcaagcatatgatgaacaactgctagagatccaatatcatccacagaagaccaacgatcatacagctgcatccagcaatcagcctggctccactgctgggctagc

SEQ ID NO: 7911 - DNA, 1519 bp, Arabidopsis thaliana
gttgcttaaaccttccagctcaagtttggtagtaagtaagcagacatttaatcccccaagaagcaattgaagaagacttttaattcttctgaattttctttccaaaaacccctttttagaaaattggttgcatcatagagattggttcatttattcccaccggagaagatcatcaaattcgtcttctcacctatatcgccgacgacattcttcacggttcgtttgatttctacctgttggttcttcgttttatctgaattcaatcggagatatatgtttttgagttcgaatttgataaaaaatcgaaacttttttgatttgaatcgcagttggaaaaaaacaaagcaaaaccctagaaatagtggctgatgaggtcgcgaggcgatgtctctgaagcagaaggtacgagatcagatgctggttcttcaagaagcgaagaagaaacgagtctgaaggagaaacactcaaattcgcgagctgggtctcaaagatctggaaaaagcttgagaaatgacgagcctaattacggatcagattcttcatctaagaacacaagcagcagcaacaaccctattgagtatacagagcatgaacgagctgagcttttaagaaggttagattctatcaaagatcatctacttcgcggtggtggtggtggtaataatgtagttgataaacctaaagaaccagatcagaatcagcctttccttagaccagttcatcttcatggtcatgctaatcataatcctggtccttcttattaccatcagtatccagaacctattcaataccctggaccggttcatggaatgtatcctcaagcttatcaagatccttatgggtaccaaagaagaccacctccagttcctaatccaaactggtatcctcctggtcattaccctaatcagatggctcgtcagtatcctggaggtcaatatgttgaacttggtcctgatatagttgagccacattcttactatccagctactcctggtaggtacggtgacctgcctccgtatagcccggtttcgtctcaccatcgtgaagagaaactcgctacacagtacagtgatatgcctccgtatagcccggtttcgtctcaccatcgtggcgagaaactcacgacaccgtatagtccacgtgttaataacggttcgagttttccttcttcgatgggcactccaggtcctcgaggtggttatgcaaggtggccgagtgaacatgattctgaaatgggcggtgcttttgctagtgggtatgttaagaaagctgtatcggatactggtgttcgacgttgtcatcctcttgctggtggtgctccttttatagcttgtcatagttgctttgagctgctttacttgcctaagaagaagcttttgtctcaggaaaggttacataagctgcagtgcggtgcttgttctgaagttattagtttcacaatcgttgataggaaactcgttttctcttctggtaatgaggaaacaaaaccggtctctctagaggctgaagatagaaacac

SEQ ID NO: 7912 - DNA, 898 bp, Arabidopsis thaliana
tgcatgcctgtgtaattgttagaccaggctcagtaagttggcttgttaaactaatgccagagaaggttttaaatcaggcccatcaaatccacatcttttttttttttgtgtgggcttcgtatcatgtaagacataattgggttaggccgggtcgggtcggatctagtctaactaataatgtaatatgataatttaaaattatctgcaaaaaacaaatttattttttcttcagtagtgaattaagttcttcttcttctgctagaaaccctaatttttggggactgtgcaattagtcgcactctcagattcggccctggagccagcgtcatcgatgaatccgaagaggacatcttatcgtcaatcatgaaaaatcattccgtggacctcggttttgactattatccaggtaataagaaacacagtctaaacattgatatcttgaaagtgaaattggaaattaaatatttgattattgcaggaaagatcgcagagaataatggggattgagatcagatatgaacttggcacttgttttaggcacaaatgtagttcgtaaagcttatcgctttctcttcatctccagaaaattctgcaatgggaactttggtggtaatgaaatcgataatggtttccctgatttggattgtggatttgacgaggactccaatatcagtgagctcagaagcatcgatcgagaagtgatctctgttcggagtaggtttttggagagtgccaatcatagtgcgtctcgtgttctcgtgacattgcagctagatgaatctggattcaattcaaagtcagttttagatgaattgaatgttagagtctcagggcttctagtgagggaggttcttgtagggatcttaaggaacttgagctatgataataaggcaagatg

SEQ ID NO: 7913 - DNA, 725 bp, Arabidopsis thaliana
ctgtgattagagatctatcagcactgttcttaccaccgttagaacatgagtgagactgattcctgtagcggagagagcgtcttggtttgatctggggagctgtaaaacgtcaccgaagctgtgattgtgattggtcctttgattccgctgtttctgatagcggcggtgattgattgtgctactttgtagacattggtgtctacaggtaagttacagctcaggaagtcccaccagaccgaaaccctaacggatcgggactcttcgtcttgctgaggacgtcgagagggagaatggctggatccggagacgaaattggagccggagtggttgtggtggagaatggagaggaatgaatgttagtgatgaaaagggtaattgttcgacggtgagattgggttgtggaggaagaagagaggcggaagagaagggatttggatggtaaagatccaaacttcatggtcggagagctatttttgctccgggaaatggagagactgagagggttttaggagtgaggaagacgaagtaaaggaaagcagagcttaaaccctagttattattttggaattgtcgataaccgaatggtatcccaattgaaccaaactaaaccgtactctcgctaaaccaaaaccaaatagcgtatggtttaatattctaattcaatgagtacagtaattagggatttcaatttttgtttgagagagagagagagagatggtgacgag

SEQ ID NO: 7914 - DNA, 953 bp, Arabidopsis thaliana
  unsure (1)..(953): unsure at all n locations
ctgcctctagactatccccgtactgataaattaaatatgagacttacttggatatattcatgcagtaacttaagagatatgttcaactacatgtagaaaatgtactagattattgaatatgactgaaatggaaatgttgactacaggatatgggaggctttcctagtggttcttgtggtttacacagcttgggtttcgcctttcgagtttgggttcttgagaaagccaaggccaccactatctatcaccgataacattgtgaacgcattcttcgccatcgatatcatcatgacattctttgttggttacctcgataaatcgacttacctcattgttgatgaccgtaaacagattgcatttaagtacttgcgttcttggttccttcttgatcttgtttcaaccattccctcagaggctgctatgagaatctcatctcagtcttatggattgtttaacatgcttcgtctttggcgtcttcgcagagtcggtgccttgtttgccaggttagaatcactaaacttttcttctttctttcattattttctttaatcttgacattctctgtttaacagactagagaaagaccgcaacttcaactacttttgggtccgatgcgcaaaactcgtttgtgtaagaacatcaaaatgttttgcttcttataatgttatctttattcaaactactacactctcgatgtagtaatagtgtagatactaaccaaccagagcatttttgcaggtcactctttttgcggttcattgtgctgcatgtttctattaccttatcgcagcgcgcaattctaaccccgcaaagacctggattggtgcaaatgtagcaaacttcctagaggaaagcttgtggatgagatatgtgacttccatgtattggtccacactactctaacactgttggttatggtgatctgcacctgtgacacnaaggagatgatattg

SEQ ID NO: 7915 - DNA, 868 bp, Arabidopsis thaliana
cggatgctggctttaaagcttgagctcttgattgagtttgctcggcgctactatgaatcatcagattgaatgaagaaagttgtgtactctgttcttgtctctttatggattcaaaccttttcttctcctttaacaaggttcataaaaaccaaaagagaacagttttgggagaccgaaaccatatcatctcacagacgggtaacatcaatcctcttcctctaaaccggttttcgtcttaaaacatattttgtcattaacaatgtttaatgggacacaaaacaaacaatgacaatttacaaaacaacaaaaccctaaatccccaaactcattatcaaatcgtgttgatcagattccactgtaatcaccacgagcaccgtcgttaccaccgccagaggtagagagcatcggtccataaggtgattccagatcgtcactcacaagatcatccgttcctcttaacgcagcgtgtaagatcaaaaccagaacaccaaatccaacggtggtgagagctctgagccaaactccggtggtaactagcgacccaatcgaaagaccaatgagaagcacagcgacgatgccgtcatcaatagtgaatccgaagatcgtgagtggctcctcgcgagcgaagtagaggaagaaccaagctaagccaacggctataaacgcgaggatggcgattggacgtgtgattagggttagacctaggaggatagagagaatgatactgtagttgatgcggaagtgagtcaggttctgagttacgcgagttgttgcatcggcgatggaggaagggaagctgaaggcggaaagatcgaggaaatcgcccatggacgagccgctccagtaattgactgagctgtttctttga

SEQ ID NO: 7916 - DNA, 954 bp, Arabidopsis thaliana columbia
acacatagtacacacacagaaaaaaaaaactcaccttgtattgatcaattcttcttctcaacttctgtttattaacttctttatctttaacatcaacagcttcttccttaccaagctcaaaatcatcaacaatttcaggagattcagcttgatctactattatatcatcttcaacagtactgaaaaaagtcaaaactgatttcaaattagattcgatttcgttagggttttaagaaattgaaattgagactgacccgatcattgtcatcttgagggagggcttaaaggagatcgaagagagtaaaagagaatcgtcagagagtttgtttccgatcttgggataaagaagcttttggcgtttaggtaaaacggtggtgagaaggcagatgcgacgttttagctcggcgactgagtcatcggcacagatacggacggtgtactcttttccattccacttaactgttagagttaattcttcctccgtaagaggagagaccgccgccgcagcactaggcgtcggagaagaggaagaggaagccattttaatttgttatgacatttggatgccggattggtgtagaaaaggtacttgtggtactgaaattttccccggtaaccttaaaaaaagattataaattaaccaagcaaatataagttgttttggagaaaaagtgtgattcttacattaaacagaaacttaaaggtaacataagttatattataacaaatgtaactactaataagtgagatgaaaagaaaaaaaattgtgtcttaacatttaatgataactgttggcaaaaagatcagattacccactaggagataatcgctgatcttatcattcccatttcttgagtatggaccttggtgtcactatccagtcaatgagtagctactgcgaatatcaccagtcaaactgtgagaagcagagtggtgaagtgcataatgtgaagt

SEQ ID NO: 7917 - DNA, 1211 bp, Arabidopsis thaliana
tacgtcgctggtggtttccgggaggtcataagagcgggagacgaacccgacttcttcacaagccttgcgtttgcttgcgacataaatttgcgatgcaggaaaaatgtatgtaacacaacggccagtcctggtgcccgcagtccggctgcaatacgcgcctgaactttttgagcaacttcagagcgcacctgctgcgcaatcgttttaccgtcaataatctttgctgccatcagagagaggattccatctgttacgtagatcgaaggggatgcgcctattttgtcagaagcggggcgcgctgtcaggtttcgtttcagatttatcgcgtgaagcgacctcttgcgaaggtgaggcgcaccgtcgctgagactgaaagcttcatttttcgtccatgatggcgttgtaaatctggaactgatttatttccttgtctaaggattaagataatttaagaaatacctgacaatataaaaagaattttcagcctggtaatttaccgcttcaggtctatatttgtgttgaatatattttgcgcggaagtattcatctaacggggctctctattttttagaatagagtgcatattttcaattaagacattcttagaggataaaaaggaatttactactatcagtgtcttaaataaagtaatcggttatatacggatgtggagtcgataaatgagattgaaggaatatatatgagattaagatttatttcgtctgcgctggctgccgcactattcgccgctacgggtagttatgctgccgttgtagatggcggtacaattcactttgaaggcgaactggtgaatgctgcctgttcagtgaatactgactcggcagaccaggttgtcacactcggtcaatatcgtaccgatattttcaatgctgttggtaatagctctggattaattccattcaccattcagttgaacgactgcgatcctgttgttgccgctaatgctgccgttgcattttctggtcaggctgatgcaatcaatgataatttattggccattgcatccagtaccaatacaacaacagcaacgggtgtcggtattgaaatacttgataatacatccgcaattctcaaacctgatgggaatagcttctcaaccaaccagaacttgatccccgggaccaacgttcttcatttttctgcacgttataaaggtcacggtacaagtgcatcagcagggcaagcaaatg

SEQ ID NO: 7918 - DNA, 424 bp, Arabidopsis thaliana
gatccccctgctctgaagttggctgatattggtgtggctatgggcatttccggcacagaggtactgtttctcttctctcatcttcaattccggatgatgatagctctatcagctttctaaagctctgggcattttgcaggtagcaaaggaggcatctgacatggttttggcagatgataatttcagcaccattgttgcagctgtaggtgaaggcaggtccatctataacaacatgaaggccttcatcaggtgagtcttctactatcacatatatatatatatccctattcgtattgatggcttgagttatacatactaagcctatatatatgactatgatgaataaaaggtacatgatctcttccaacatcggcgaggttgcatcgatatttttgacagctgctcttggaacccagaaggcatg

SEQ ID NO: 7919 - DNA, 1695 bp, Arabidopsis thaliana
cccaataagacttcaattcttgaatctcgtcgtcaacaaggtctgaacttttctttggctcccaaactttagactcagagcttaaaggggaagtcttggctccagcgatcatgcgctctgcatctctgattaaagtattgaattctttgttcatatctttttttagctcttgcaacattgatcgagcaacaggactcgtgttttctgggtaagtaactgataaatcttgttttgatttcttcacgcattgcttgtaatacgatactgacccaagctgtttggccaaattgtagaatcccattgcacaaagtcgtgataatatcacatcttgagaatagcattgtacagaagccaccaagtatgcgaaacccacgtctggattctctgttatgtcctctagtttcacgaacattgtaccttgtttgatatgaagaaaccatgagtccttgtctttcttgtggtcaaaaatcaaatcttcaagtatctccaaggccttgcagtgatttcctttaacgaattcttctctagatttcgtgatgagttttatgacctcaacatcttccaggaaagatggcttcatcatagtaacgactctcaagattcttgcgttttcttgctctccaaggtttcctttgcttcggagagaaatttgtcagaatgtagaaaacaacagcaacagtgagctggcttttctcacgtgagagccacgtgaaaagggttgatacaaaaaaaaaaccaattatgagcactgaggaattctgtcgaaccccttgtaagcaatatccgtttgggattttcacggagtagcaaaccaaaacaaatcccaaaaattgtgtgaatcttcgattttgggttaagacccaaatgtagaacgatcttcatgttggtgttacacaaaattcgtggaaatgtttggacttgaaaatcaacaatctcaatcttcttcgtcggatctctaataagtgttttgagttttactgttaaagaagacacattagctattctactgttattaagttctcgtttcaaacgccatgccgtttgttatatttaaaaacggcagcgcatcgctctatcccctactaaaccctgagcatttttaagttaaactcagaggtcctctgtcacaagccgcaagaagaagcagagcaatgtggaagctgacgcggcgactgcagccgcatatcaattcgacccgatggttagtccgaaatttccggaatggaggagctggagacgccaccggtctctatggcttcgatcatctaaaaacagctaaagggtttcagagattcgttgctgatgccattgaaaggtatgatttttatagaattagtctatgtgtgctttgtcaaagtagccattgaagttgatgggttggtagaactgttattagcttagtcattttcatgaattatgatgtggtttttagacttagtgctactgtgttgtgtagtgttgtgatgtaatttggttaattgaagaaatgattttggaaccattttcttaggtctggtgagttggtgagctacatatcaggaatgccttcgtctccagagattattaaagccatggatgagatttcagcactgtaagttcttgctgcatttatgttactataactctattagtgttcttgttatactagctcttattcgtggttgtagtgatgttttctgaatgcgaatttttgta

SEQ ID NO: 7920 - DNA, 861 bp, Arabidopsis thaliana
tttttttctgctcaagctcagttttcagcccggcgatatccttgccgtttacgacatctttatcccccacaaccacagtaaaattacgtagttgctggttgatagctgccggatcgttcagtcgggccgcgacaccttcatccggtacggttgtcgtggtaacaccactgaatgtggccagccagccaaagctttccagatgattcattccggaaaccagcgcctggtacccgccttgtgaaagccctgccagcgcgcggccatcggcatctttacggacattaaaacgcttgctaatcagcgggataatatcgttcatcagttcgcgatctgccgctttagcattcagcggataaaagactttacgtctttcctgaggcacgaaatcttcgggaataatgcccttcgcatcggtttctgtatccgggatcaccaccagcatcggtttaattttcccttcagcaagcaggttatccatgatttgcgggatacgcccctgatcgatagcggaacgtccggtatcaccaaagccgtgatagaaatagagcactggcaaaggctcgcccatgccggtgtatcctggcggggtccagacatacatctgacgttcagattgcaatgcgttggagtggtaagttatggcgatcaaatcaccatgcgcaacagaacgcgtatccagataactgcctggcaccagaatcatactggagttaacctggcgctgaggattagtcattgcggtgcctgtatcaatgctgcgtacaccatcaacattgaagaaatactcgtacaggttgcctttcaggataggtgtgcgcacgaccagactcctgcttcgtctttggtcatcgggtgaatatt

SEQ ID NO: 7921 - DNA, 1253 bp, Arabidopsis thaliana
aggttgccgaagaggatccccagatggaggttttaggaaggcttcgtcatactaatcttgtgagcttaaaggcttattactttgctagagaagagaagcttcttgtttatgattacatgcctaatggtagtctcttctggcttctccatggtacgtcgtcgtttttgtttcctttttcttactaattccggaaattattcactaattagttgacttaggtttatgtttccataagaggagaaattgtgaaaatggtaggagtaggaccaaaacatgtgattcatggtacatagtagggttaaattttttggacttagtgagaattagaaaccatactttatatgttagaaaaatggttggaaaatcattttcatggggcattattattactatatagataatgagaatttaagtctttggatagatattagcattggctacaagttggacaaataaagttatgatctgtctcatttaactcgctctttttgggatttttcccttttttgtttagtttctagtgtttgtctttacctaaccatttgtttattcatttcattcactgattttagtaactaataaagcgactaattacattttttgaggtaagtgggaaagtttgtgatattggtgtttgattgtgttttggacaggaaaccgtggaccgggtcggacatcctttggactggaccacgcgccttaagatcgcagcgggggcggcgcgtggcttagctttcatccacggttcgtgtaaaaccttgaagctcacgcacggtgatatcaaatccaccaatgtgctactagaccgatcaggcaacgctcgtgtttcggatttcgggctatctatcttcgcgccatcgcaaaccgttgcaaaatctaatggctaccgtgcaccggagctgattgatggccgaaaacacactcagaaatccgacgtttactcatttggagtgctccttttggagattctcactggaaaatgtcctaatatggtggagacgggtcactcgggtggtgcggtggatttaccaagatgggtccaatcagtggtgagagaggagtggacggctgaagtgtttgatttggagctgatgaggtataaggatatagaggaagaaatggtggggttgttgcagattgctatggcgtgtaccacagttgccgcggatcatcgtccgaagatgggtcatgtggtgaagttgatagaggatatacgtggtggtggctctgaggcctcgccgtgcaatgatggg

SEQ ID NO: 7922 - DNA, 561 bp, Arabidopsis thaliana
tgcaacaatggtgctgaaattatcatctgccaacaccaagtcagatgcctcctttgctacctgaaaaattccaagagctttagaaagctgatagagctataatcatcccgtcctttcagaagggagaagagaaacaactacctctgtcccggaaatgcccatagccacaccaatatcagccaacttcagggcaggagcatcattgactccatctccagtcatggcaaccacttctccatcttctttcagtaacctgacaatctcttgtttgtgttttggttcagcccttgagaacaggagccctcctgtctgtcttagatgattcttctgatctttaacatccataaattcttttcctgtcaagcttctcgaggagatatcttcatctgcttcaaatacgccaatttcacggcagattgcttccgctgtgctcttgttgtctccggtgataacatgacccgaatacctgctgttctgcagtctgcaatggcttgacgcacctctttccttggaggatcctcaatcattgaaaaggtagaggatgaataattattaatgagg

SEQ ID NO: 7923 - DNA, 688 bp, Arabidopsis thaliana
  unsure (1)..(688): unsure at all n locations
aacaatgttgaactccttagctcgcttgatcaacgtttcgcgtataagagctgagacctgtggacgttctgttaagagctcgtcagcgttgaactgagccaccaccgctttaaccacctcgtcccgatcgctggtaggaccttttcaccatagtcgagacctaagttttggtatatatacgagaggcgcgaaacctaacacgaacccacggaaaacagttatatattattttacatatatatcacaaaatcttattagtgaaattttttggatattcgcgggaacttacatcagggcgaaacataacacgaagtgtgaggttgaccatctgaagatccttagttccagagtcggtattgattttgtagggtttggtccgaatgtcgaagatatacggcttttgcacccacggaatcttacgatgtgtcccttctcctactggttcttctagaatcccttcgaatcggtggaacataacagctctctggccaccatcaacggtgaacattgttgatctcacagccgctatggcagctcctagacctagagctacatntgtgaactttgaccaagcatgattggctttgaatgtctcctgtatggattttaggttctttttatgttgtttaggggttctttccttgtcagataggtgagaagtagttagagacgcaggagatgaggttta

SEQ ID NO: 7924 - DNA, 660 bp, Arabidopsis thaliana
tttgtcgtcgtttgcaattagtagctaatatttaccacaaaaagttatgcaacaatgcatatgtttaggttatttctttacctttttattttttacaggaattccttactttcaaaagaactaacaataaatccaaatattcagattgtagaatttcacaagaaaaactagattgaaggaacaatttagattatataatgtgactggacttggcaatggaacaaataaaatgtttgaattcattttattcagtaaatataagaaccaacaatacaaaagtcaataaaatacataattcatctggtgcaacaacatcttcccgttttaggccctggaacacagtttccatcatcataccctttcgttatacagtcatggaagcattcaaaacgttcgtaataccctggactacatcgagcaaagcagtctcgccctacacatatatatcaaacaaaaaatcttataaaaacatgtaatacactactacttttttttcactagaaataaatatttcactaaaattcactaaaggattacaacggtggattacatatgtcgggaaaggaaataacccttccaaaaactaagccggcgagtgaataaaatttttggagacaaagacggagaaacaaagagaaaaacaccaagaacaaagtttga

SEQ ID NO: 7925 - DNA, 512 bp, Arabidopsis thaliana
taatttagaatcagaatgaaattttttatgttgtgttaaaagacagagacatgttttcaccttaatgtgaaggaagccgaaatcgtaaccatctgaccttcccggtttatgcccgtcctctgctggttcaaagacatttgggcagggattcaaaggagctgaaagcgcattcgctatagcaatcgctttcgatgtgagaagcgtccggtaatctccagtggctcccagagcttcaagaatatcaataccaagggacataccaagtccggctataatcttcgttggtgctaccatacacggccacaaaccatgcttctcgtgaaaaggaggaacctttatatacaaaacccataacagataagtagatggagcaaatagattcattaaaagcattcgtaagagacagtgaacacaaacctcgattcgaataccacagcctcttaaaagaacaagattagcaatattcttgccttgtgcagctctctttacattaaccgggtgggaacaagaat

SEQ ID NO: 7926 - DNA, 489 bp, Arabidopsis thaliana
ctacttaaaggtaaaaatttggggtaagaaaacttatgttcttctgagagttttctagcaaattccttccaaggatttcttgttctacacgttaatgtatttggattaaaatacaatgaaatagaatcactttggaaaatatatcattcttttccttattattgctactacaaaaataacttcattttcatctaaacttgacaagatcacatataaacagacacttcactctactactatctctttgttacaggcacaaaatctcgcctctttcattttttcaaatctttcaaataacttcaacaaacgtaaaaggaggaatactctgttcatcacagaagaaatcagaaggatcaacacttgtcttaactctcaccaatctctcaaaattattcttaaaatacttcactccccaactcttcccttcctcgtacttactcctcttaactccaacatacattcccaaatcaagatctctcagatttatat

SEQ ID NO: 7927 - DNA, 881 bp, Arabidopsis thaliana
caaacttgatataaattaattgattgcataactaaataaatcgattcaactcgatagagaagatcaattctaaactaattttagttgaattatataactcatgtcaacaatgtcttaggattcatggtactactcaagagttactgtagtgaatttcataagacactcagtgttacaactctgagaaaaatttgcatagaagtaagatcattgtgctactactattgaatatatgaattaaaattaatattgtagccacatttttcatgctaacagagaaaagaagagaagatcgaactttagtataagcaagtggtagattatataatgaaatttgacattacaagcaaaccatgcatataattttaagagctgcgggctgtttacaacttttatcaacagccacttcaacttgtctttcttacacttcccaataattaccacataactccccagcacagtaaaaagcttaatagaaaaatacatagtcaaagatgtgcaaatcgaaagtggagcttctttttgtctctaccatttcgaatgtttcggtatcatcaattcactttagaccctgaaattctttccgacaaaggtttgtccaaactgccagttcgaaggagcgatgttccatgaagtagaggttctacgatcgctggatgtaacacggaaggaaagtgactgaccaacgagaacagcattagactgccagttctgtccccagttcctagttaaactcatccaaccagtctttgaacctttcacactcgtcctcgcgatgtctcctgctccggccacgttcgtaatcagcaccaagttgaagtaacggtgaccgttgatcgtgaaccttatccctccactcttcctacatgccaccctataca

SEQ ID NO: 7928 - DNA, 567 bp, Arabidopsis thaliana
agaggatcacgattctgataagagcttaggattctgattgattgtattattagaatgtctctaatttgaatcttatccaattcgtgattgaatctatgcatgttggaatttatgtcggtgattgattggttttgagctatggattcgttgtcgttgattattgtttgtttgtgttgaacaaaacaggggttccatggacagagaacgagcataagaggttcttgattgggttgcagaaagtaggaaaaggagattggaaaggaatatcaagaaactttgtgaagagtaggactcctactcaagtagctagtcatgctcagaaatacttcctccgacgaaccaacctcaaccgtcgccgaagaagatctagcctttttgatatcactactgagacggtaaatctctactcttatcctaaatcattttatgttagctaaatcatatgtgaatgaaaaggtctagactttagcttagttgatagaacttaactttcttactttctttggtgttctctgctttctcaaagctctttcctttcttaggtttttagtatttcttctttagaac

SEQ ID NO: 7929 - DNA, 516 bp, Arabidopsis thaliana
gtgtgctctaaagctatcgtgctgatggacaacctatttttatggccgcgataggtagcacaccatttgagcgtggtgacgaagccgacaggtttttgatcgtcactgctgcggcagatcaaggtctggtagatattcatgaccgccgcccactggtactgtcgccagaagctgcgcgggaatggatgcggcaagagattagcggtaaagaagcctcagaaatcgcggccagtggctgtgttccagcaaaccagttctcctggcacccggtatcgcgcgcggtgggtaatgttaaaaaccagggcgcggagttaattcaacctgtttgataagcctggagattattgatcaacaatactgcgtcataagaaatctctattagacaaagatttcattacctgttggcatattgcaaaaataacaccaatacggaatcgtcatgttcacgattagaacagatgatctcacgcatccagcagtgcaagcattagtggcttaccatattccggcatgctg

SEQ ID NO: 7930 - DNA, 779 bp, Arabidopsis thaliana
ctcaaggtgggatactttttgctctctcttacattcaaattgtttagcattttctgaatgttactttttaaatttaagtacagccggatatagcagcaccaggttcaggtatactcgcagccgtaccaacagggggaggatacgatttcatgtcaggaacatcaatgtctacacctgtcgtgtcaggaatagtcgcacttcttagaaaaaaacgccccgactggtctcctgcagcgatccgatctgctctcgtcacaaccggtaaatatacataagttttattcacgcaaaaaacttgtttcttgctccacaagaaacacccgggaataactgttaaccattgcagcgttacaaaccgacccatcgggagagcctatcgcagccgaggttccccacgcaaactcgccgacccgtttgactatggaggcggccttgtaaacccggtgaaagtagcggacccaggacttgtttacgacatgggccacgatgaatatgttcattacttgtgctccgcaggctatgacaacacatccatctcaaaactacttggagaaatctacacttgccctaccccaattccatcaatgcttgatgtcaacatgccttccatcacaatcccatatcttagtgaagagatcacaataacaagaactgtgacgaatgttgggccggttggttcggtttacaaagctgtgatccaagcgcctcaaggtattaaccttcaggttagtcctgagactcttgaattcggttccaacactaacaagactacgttcacg

SEQ ID NO: 7931 - DNA, 517 bp, Arabidopsis thaliana columbia
taattattataatgttaaaaagtgggggtgacataattaaattcaggtgggaggaggaggcctcacaaaatggatcagcttattagacataatatcaattgctctggttttattcatggcattggcgtcaatctggtttgttactcataatcccgtaagcggccaaaaattagctaatgagactcagcaaaaactgcttaaattcccaagtccatggttaaataacctcacacataaggcaaagccgatgcgtcgctttgggcctaagcggatcattaaaggtccaaaccttgcatgcgttcaacatcctaagtctgagtttgtgcctgaaagtgagccaataagcattgatttgcatatagctcgacgcttatggttcaacgaagagcaagtggccgaggcgaaccaagctttgattggcgaactactcgacgcttgtggtatgttgagtgaaatgtatgtgagcgtcacgatctttaattataagcttaaataagtttgatagtgtttaaactag

SEQ ID NO: 7932 - DNA, 1008 bp, Arabidopsis thaliana
gtcaaaagtaataccatttaaattgactatcagtcaaaccagatgattcaatttcaaagtcaataccctgtctttctaaaatgctgaatttcattgaattgttccaagtaaacaacatatgatttcaactgattagaggtcataaagtgaacaagatagagacatagagaagaagaagcacgtggcgaagtggaggggatatggatcagattcggctaatgtcccgaccaaagacaaaggtagtgagccaattgatagcaacgtagaaacggtttctccagctgacgactcgagtcagataagcagacctccatatgaaccagctcagaaaacctgccattgatattcctttcccttcctgcacaagaaaactccctcctcgagtttagctatctactattattgtgttttgagggatttttaagtgaaagagaatgagagccttttcttttaaacataccttgctctcacggagatcaacgagagctttgtatctcccaatagtagccatacttccgagatgtttatacacaaatggttccccaagctccatttcctttgcgctattggcccgtcctcctccagcttttcccatcacgttaaacagattcgccaagtatttgccttctctctcagccaccttcattgatcaaagagacttgtatgttaagactccgagtatagaaaaaaagtaaatagattcttttacaacattagagacctgtgcaagtgcaggaagtgttgatttcctgtgctctcgagataaccgctacagtcaccaattgcaaacacgtcttgtacagaaggtacacgcatccactcatcaataccaatcctatcgaaacagagtgatccaagatcagaaaatgtttttttggagggattaaaacagaacaagctttctgttgtgacattggaactaacataccttccacctggatctttaggaaaatcaagagacctcacaaatgaagatggaccaacaccagttgaccagactaagggacc

SEQ ID NO: 7933 - DNA, 994 bp, Arabidopsis thaliana columbia
tactcttctctcccccaggcaaatgtcatatatagattcattagaattttaaaaaatcttaaggataaaaggcccttttttaaaaaaaacttatttttattaagagattttagatttatttcacgcgaaaaagatttgtttttggtttgatagaggcccaaatatatattcagaaaacatcttgctttagtgactaaactctaaaattttgagttatgaaatctggaaaaaaaaagtaattgtgaaattattatgttaatattaaaatcaattatgctgattataatttaattatcaattcatttaccacctaatctataagagaaagaaaaggtaaaaaaaaaagaaaagtaaaatggtaaaaagtaaagacacattcttttcgatatggttcgatctaagaaagaaatcaatgaactttgatgtctcttcacaaaatgcgataatgcatccattgactaactgtgaatgtccacacaaatcttcatcatgttatttattagagataagaaaatgttgaccatatgcaatttatacaatttaattgaaagaaaaaaaaatctatgacctaagagatttttttagaaacaccttttttgatataactttattttagcatataattaaagatgttgatgtcacatacatttcactcaacataccacaaagcttggttcggcctcggccacttgctcttcgttgaaccataagcgtcgacctatatgcaaatcaatgcttcttggctcactttcaggcacaaactcagacttaggatgttgaacgcatgcaaggattggaccttcaatgacccgcttaggccctttgcgacgtatcggttgggcctcatgtgtgaggttatttaccatggacttgggaatttaagcagtttttgatgagtccattagctaatttttggctgcttacgggattatgagtacaaaccagattgacgccaatgcacgaataaaacaaagcaattgatattatgctaata

SEQ ID NO: 7934 - DNA, 621 bp, Arabidopsis thaliana
ccattgatcacatatgcccctcgacatttcaaagccatcacgacctacataccatttaaatggtcatgttgataatgatgatcatgatcatgatcatggtagtgatgagattatggtaacaaaaatgatgatacctcctcaagcgacgcattgccacttctttcaccaattccgttgatagttacttcgacctgtcttgctcccgcacgtataccctatatatatatcatgtaaattcgttgttttatatgttcatatttttgtcacattgagaatctatattagtaaatatatatatgaaaatatatctaacacacacacacaaaaaaagagttagttccgtacggcgattgagttggcggttgcaagaccaaggtcgttgtgacaatgaacagcgacgacaacatcgtcaattccaggggtgtttgctttgagataagtcacgagttccccgtattcatgtggcatgttgatccctaccgtatcaccgatggtcaccaccgtaacaccggcttttatggcttctcctagaatcttgcataggaaatccttgtccgacctgaatcacactatattttaaaatcaaatatatatatatatataacattggcatcatccggg

SEQ ID NO: 7935 - DNA, 309 bp, Arabidopsis thaliana columbia
tagaggatcgaccgaggaggcaacaataatcgtcgaccactccacccacattctgaactgtgccaagtcaagctattgactcaatacaagcgcttagtgtgaggcaatccactggtttactttttctttccctttctattattttctttcgtgtttgatttaggtttcgccgtatgatctggatttgagtgccactggggacagtgttgtttaaatctgggggtggttcttactgttgatgcttctatgtttgattcttattatttttagtttttcagtttattgagtcatattgaacgccagggtggt

SEQ ID NO: 7936 - DNA, 550 bp, Arabidopsis thaliana columbia
cagtcgcagaggtaattaaacacaaaacataatcaccaatcattttatgaaatttatttgttctctttttgcctatatatcaaacttcgtctacgtcccatgacgatgccagctttccgacgacgaccacgccctcagatatatatcagttttcaagggaacgacctgcgaaaaggctttgtcagccatgtcgtgaaggccttaaaagacgcacgggtcaacgttttcgtagataacgatcatgatcaatgggaaaggagaggccctcatcatcatgatgaccaccttttcgtcaggaggatccacaactcgaaactcgctctcgtgatcttctctgaccaatacgcagagtcacaacagtgcttgaatgagctgacgacgatccatgagcgcgtggccgaagggaaactcatggtgatcccatcttctacaaagtgaacatcgaagaagttaacaatttggagggacgatttggtaaatgttttgatgaaatggtgaggacacaagggagacagaatcatcagttgacccatcacatcgttggatgtct

SEQ ID NO: 7937 - DNA, 338 bp, Arabidopsis thaliana
ggactaggaacgtggagacgttcttcctctgatcgccttgaagctgaataacctagagatagacagcacattgtatatcaatccctttgtttcactactcgaatggtaatatgccaagactatgaattcaataattaatccacatggacgcgaccatggtcgtttaagcacgtaccggtccaggtcctgagtcttgaaccacggttcggttgcagcaaaatccttcctggaggcccttagtaaccttggggaagcggaatccttcctcagccccctggacggtgtcaagcttttcctaccattccgctgcttggacacgattatgaacgtactccttg

SEQ ID NO: 7938 - DNA, 573 bp, Arabidopsis thaliana columbia
tgagctgagctttactataacccaacacaaactatagaagtaaaccgattaaatccttacggtataggaccatagtattaattaatacttaattggttccaaggccaatggaacctttcttaggtacttggcatcgtgttctgtagggatttaaatcttcagaatcttaatatgttcttgtttgtttatacaggactaattaacgcggatgcagaagatgcgagttgtagtagcacgcctagttggagaatcaagaagagtctaacatgtgtttgctttaaccgcaagagagcatatgaacgcatttgctctaacttgacaccattgcaggttaacacaaatagaaacaacagctccattaactcgtttttgtatgaaagcattcaattttctgagtctgattgtgtttttattttcataggaagaaagacttaaaaggttgaggaagagaatgaagaattactatgatgcatcacggcccgatcatcaggatgcattaagagcactgtggtcagcaacgtatcctgatgaaaagcttcaagatttgatctcagaccagtgggaaaatatggg

SEQ ID NO: 7939 - DNA, 595 bp, Arabidopsis thaliana columbia
atgcctcacgttcaaaggtaggctttacgataactcgagtgacattgacgcgggattctccagtacccgtaagcgtcgttgtccggtcaacggtggagatacgactctagcacctttagatcaagtgacaccaaactcgttcgacaataactattacagaaacttgatgcagaagaaaggacttttagaaagcgatcaagttttgttcggaaccggagcttctacagatagtatagtgacggagtacagcagaaatccatcacgatttgcgtctgatttctcagctgcaatgatcaaaatgggagatattcagacactcactggttcagatggacaaatccgaagaatctgcagtgccgttaattaaaagagttattacctacttgtcttcaacgagaaaagttcgaaccttgaaaattcatgttattatatttacgtgtataccccatttgattcatttttgtaattgtgtgtactaaaattcctgcagcgataattcgtttgttatttgaatatatggaataataaatattttggaatatataaggtaccaaggaaagtgttaataattaaatccatagcattttttattagt

SEQ ID NO: 7940 - DNA, 936 bp, Arabidopsis thaliana
ttaaccatttctcaactccttcagatgaagctgacaggagagaaatcaggccgcaagggtcagttggcagttgccactgaggttagctttcacaatgaccagtgatcaccctttgtatggttggctgaacctaatttaagttaattgacatctaccttcaggtttttcaagttgctccatctctttacatggttgaaatgcgaaaatcagggggtgacacattggaattccacaaggtatgcaagggttattaatgctgatcaggttgtatcaaacccgagcttgtcaaatggtcttccagtaactgatgtttgaatctttacctttttgcatcctttcttgctcttcttttagttttacaagaaccttaccacgggacttaaggacattgtttggaaaaccatcgacgaagagaaagaggaaggaaccgatggtggtaagtatctgccttgaatactctgttttttagataaagctcctagaaaaggagaaactaacgatacatgtaaacacaaatcctgttttgtttcttcatgtttcaggtggtactaatggtgccatggctaaccggacaattgcaaaacagtcgacataagctgtttacttttttctaatatagattttgttcgttataaattactatagtagtacggagtggttttgaagttaatacaaaaggaagcgtcaagaagtggagcagaagcagtttgaaactatattggggaatggggattattgatattttaatcatgtttgattccatggaatgttgtgaatagcatatgcgtgttgcgaggttcttggcttgaatcgattaaccggaaagtaaaagctttacagatttggttttgcaatttctatattgtcggacgctgagattcgatagatatttcagttcaaatgtactgaaaacaaactaacttctcagcagcctta

SEQ ID NO: 7941 - DNA, 529 bp, Arabidopsis thaliana columbia
taatattttaaaacaacgagaacaagaaccggtccagggggaaaaggcaggaagagaattaaacaactagactaagaaacttccttgaatcacaagaaaagtaaaaaccctcaaaaatctctgagggaaagcaacaaacgataaaagataaaagctggttcttgttctcattcttctccttcttcagttggaaggagggaagaaaatggctgatgaagtcctcgtggatcggaaggacttctccacctccggagccaccttaaacgctgcctgcaaaacctcaggggacaaagacttccacaccgatgtattcccggccaaatgtgtgaagatcggactacaaacacacaagaaaaaagtttcaaacatattagtttctttcaatttcaaacctcaaaaaggaaagtgcagagaaaagttcttactcaggagtggtgacaatggagaaccaagacatgccatcagcatcagcaatcttagaaaccacaaagaaccttggaacaatgaagagagaccagctttgatatgg

SEQ ID NO: 7942 - DNA, 892 bp, Arabidopsis thaliana columbia
ttgtacccttccaaaactctttaattccttatctaccctctcctcaccattatcctctgctcctcgcgttatcgtacacccgctacgcccgttcaacgccagcccttgatctttcaacaaaacaggcccacattctttaaacgacatcgtaccacacgatatcagctgcattaacacagccgaagctctcattcttccgctggataaactctcgaccgtccgatgatcggtgctgctttcgctaggacgcaatatcagccgtccatcggctttgatcagattctctaatgtctcgggacttgaatccgacggtggaggagatatctcgtctctgctcagctctgtactctgattctcataactcgccggacttttcacctcttctatttcctctttcgccggtcttctcctccgtcgtctatcgtcagtctgagtagaagcgtccgcagcgagtctttgagttgactcggcgcttgactcggttgctttgtacactttgtactcgctgagatcgatagagctccaagactggttcctccgtcgatttatcaccgccgggatatcatcgccggagtttttatctggatttaaagatcttgggtctctaaacgacgacgtttcgaggaggcttcttgggtttgagataagacaagaatcaagaacctcagagcctttgagaacatattcttgaccttgaacagggaagatgaaatcgtcctccgataaatcgtgccagacaaatccatttttgtagctcctgaacaataaaaaaatgtcaagagattttaaaaggaagaggctttatagagatccgacggtggaggagaatcgtttaccgtttcgaagaccaagagtagagacttgccatgcctttccctcttagatcattcaa

SEQ ID NO: 7943 - DNA, 599 bp, Arabidopsis thaliana columbia
ccatggatcaatcatctgaaagaagagccgacaaataaacacttttcagcatcaagaggcttaaaagattgtaaaagatggggtgtgaagaaatagactcacattgaagaatgttggcaagtaatgttcatcggcaatgcagttcttgtcggcctctattccaggctgaaatttatagaaacttaatgtcagaatcagaactcaaaaggaagagaacttaaaactgatccgagataaaaagatatgaaaaccaaaaatgttcagctgcaggataaacttactccacaatactcgcggaattttgagtagtaaagaccatcggccatcactataatcgcgtgttgtcgcttcattgtgaaccactggcaagaagaacagagaacaattacacaacaaaaggtgccaagaactcaagtttgttttattttatggcagtagcagcatactgattaaaagatgctcttagagattaaagcttgtctttacctgagcaccctttctaaaatcttccttggcgatttctggtaacatgtgttccatatgtctaccggttccatgtggacccggatcacaaaacttgagaaacagagagatagttg

SEQ ID NO: 7944 - DNA, 554 bp, Arabidopsis thaliana columbia
tgataatcttcagcgttcaggaatgcagggtaaagtctttatttcccatccctaaattgtagtttctaacctcttgttgttgtgcgtattcatcagaatattttaattgttatgttattttaccgtttcaggtgatggatatggcacaaacaactctgacccattcggatcgggaaatttgtatggtgctgtaacatctgttgggatgatgacaaatactcagaatgccaatacagcaagtttccaggctgtgtctagaactagctcttctttggtaagcaatccatggaattcaccttgcatgcagcaaagtgcaccagtgaaacatcaatctgagaataccgatttgtaatcatctttcgtaccttttttgcagtcacatcaacagcagcagtttcagcaacagcctaatcggtttcagcaacaacctaatcaatttcaccaacagcagcagcagtttcttcatcaacagcaattgaagcagcaaagccagcagcaacagagatttataagtcacgatgcttttgggcaaaataatgtggcttctgatatgg

SEQ ID NO: 7945 - DNA, 597 bp, Arabidopsis thaliana columbia
cttccaccacctgaacctgaacaaatcaacaaaattgaatcagatcctcgtaccaaaatttagcaagattgattgaactcatcaaatgagagaagagaaatgaggtttcacctccataaccagaaccagatgatcggactagtgcggagagagtaggaggtacaacttgaccagcttcttgaaggatcttgacaagctctctcgcaaacttagcattgtcatgtgtgaagaatgtaaaggccattcctttagctcctgcacgcccggttcgaccaatcctatggatgtaatcctccaatgtatttgggaaatcataattaaccacacatttaatgtccttcacatctgtaaaacaaaacaaaagaagaaagaaggaacacagttgagaagtaaatcatagactgagatgaaatgcaggaagaagaacagaaatttctttgtgtaaatgagtttggtgtttaaagcctagctaaggagaggatagagaacaagaaccccttatcctacaactgcagatctggaaagatcaagaaactaagagcaacacatttttcccaagtaaatgtgccacgttaacttgcagggataaggagtggg

SEQ ID NO: 7946 - DNA, 640 bp, Arabidopsis thaliana
ttagtaggcttcctgataatgaaaccatccttcacaagcttcctaatgttctgccctgtttcacataatccaataatgtattaagaataatatcaacaccactgttagacaaatgcatgaatctagatggctactctatgcttgtaaacagatagacaccatctgaaaacttaatttcttatagagaaattacaaaatccattcccatacagtttctacgaagcttaaggaataatcttactactacataaggcctcaacacttagaaatgcattcatacatatgactcagtacttaacctagttcagaaaatgatctatacgtttctaatcactccctaaaacagagtttctgtaaaacacaatctataaaacaaatagagataaagtgattggtgggagattaaaaattgaaagcttactggaattggccatagagatatcgcccgattcattggggtcgagccaaacttttcctttcccgcatttcattacggatgcggcgagccgttctggatcttcagcgacaccattgcttcacgccgtcttccatctcctctccgcctctctccgtttagggcttttttgttaaggcaaaaaaaaatgacctacttataaatcgaagacatatcaattcttta

SEQ ID NO: 7947 - DNA, 481 bp, Arabidopsis thaliana columbia
acttcgatcttcgaatccgaatagattcctccattttcctaatctcatcagctgtgtacttaacaactgaataacaaaaaaccaacagagctgcttcagatacgaattatcatgaatcagagagcaaaaatgaaaaggaaaataaaaagtaggaaccattatcgttattggaatagatgtggagagaagaagcatagagaaagcgaagaacaaagagagcaatgagaatgttgaaaaagcaaacaagtagagtgattcttttgaaagagagaactccggttccggcgatccctccggtccattctcctcctcccctcgccatctccctccgccgtcatcccaccatttctcaagatctcgcttccgattataattacagttttgctttaaatcgaacagttgaaagagagattcgatttcgtgttttagtgcttcttcttccggcggaaaaaggagatcgtgggagatagagagagagagc

SEQ ID NO: 7948 - DNA, 778 bp, Arabidopsis thaliana
ccatacatttaaaaagaagaagcagaatctcagtttccagattcttgaaatctcttttgcaaaggcatagaaccttgttggcctgcctcacctcctcccgaacccgtaattcccattttattccctaaccatcattacaccaaattaaaagtcattaccaccgtcaaaagccgaaaacgttgtttaacaggaagaggcgtgtattaccaatggtggagccaagtgactgtgtagagtcttgaacagattctgtagacttttgcgtcacttcttccgtcgtaccagcgatccaagaagtaacagctcctctcagcttctccgcaatccctccttcgcctttctccgcatatgcttcaccctgtttcgtagctgcttccgagctcggatccttaaaccctcctaaccttttctccacctcctccgattgtgtcactatccctctcttcggtggcgcagtttcgccaccgcctcctccaagatgaagcttctcagtgaccacttccgacaaagccttgtcttcctctcccggactcagtttctccgtaaggaattctttcgccgagacgcccctgtcttgtccttgctctgtcccggtcccggtgaatggtaacttcgtcattacactagctcctgtctctttaaccttctcgtaaactggagtcaccatacttgcgaccgtacttccgtatccaccagcggagctaggattttctgctccttccacacgattctcgtggccgccttccccggagtaacctaacttcgaagcgacggcgtt

SEQ ID NO: 7949 - DNA, 547 bp, Arabidopsis thaliana columbia
tggtgatcttgaggaagaagtctacatgaaactaccaccaggttttaaatgttcagaccccaaaaaggtctcaaacaagcacctcgctgttggttctccaaactatctacaactctccgtaacatgggtttcacacaaagctacgaagactactctttgctctctctcaagaccggtgatacaatcattcatattcttatttacgttgatgattttatagtcgcaggcaatgatctcaatgctatcaatcgattcaagagacaacttcaccaatgttttcacatgaaagatctcgggaagttgaagtacttcctcggtttggaagtttctcgtggtccggatggattttgtctctctcaacgcaaatatgcattggatattattaatgaggtgggactacttggttgtaagccttccgctgttccgattgaactcaatcataaactaggttctgcccaaggaccaaagtttgagagtcccgacggtaccgtcgtctcgtcggccggtttatctcctcaatgtccgcgaccggatttgacttatgctg

SEQ ID NO: 7950 - DNA, 369 bp, Arabidopsis thaliana columbia
tttgtggatggtaagcactagacattcgcaattccactccctgcaacttgaaaaactccttccaaaagtcgctagtgaacagaacatccctgtcactcacagatagaaggtaggacaaccatgatgcttgtacacattatccaagatagcctgagccactgtaagagcactgtaagggtgtgcgagacaacaaaatgtgcagccttactcaaacgatcaaccacaaccataatcactgactttcctccagaatttggcagtccctcaataaaatccatagacacatcacaccatatcttatcaggaattggcaatggctgaagcaacccgggataagccgcattatcactcttgcattgttgacaagta

SEQ ID NO: 7951 - DNA, 920 bp, Arabidopsis thaliana
gaagatgctcttctatcagcatcggctgaaattgcaagtctgagagaagaaaacttagttaaaaagtaaatgttctatcatgtaacagaagtatctttttttctttctcgtggacaaacacatgtttgtcccttaattgatattttgcaattgactgcaggtcccaaattgaagcaatgaatatccaaatgtccactttgaagaatgacctggagactgaacatgagaaatggcgtgttgctcagagaaattatgaaagacaggttggttaaagctctctatttcaagaaacattttgaccatcatgcatattcacgttgacgttggtttttattatatgatgctagaaactgactagattttattacccatcctgttgatccatttcatgaaactgttgttttctgaatactctattttactgcacctttgtcatatatccgaggatatcttcaaatattttctgaattgtgttttacattacattaaatcattgttaggtttttcataacttaaggtcttactgccatcagctaattctgttcttctctctttccatagatattacaactatcactctttttgtttcctacttctttttggagtgcaggttattctgctgtctgaaactattcaggagcttacgaaaacatcacaagccttagcagcccttcaagaggaggcatctgaactacgtaaattggctgatgcacggggaattgaaaatgtaacttctacttgtacacaactttttgtgattcaattcttcctacaattatagttgattcgtgaaacatcaatttctattttcttggtgtttacagtctgagcttaatgccaagtggagtgaagagaaattgatgctagagcagcaaaagaatctggctgagaaaaagtatcatgaacttaatgaacaggtg

SEQ ID NO: 7952 - DNA, 504 bp, Arabidopsis thaliana columbia
tgaatgcttcacgtcatctgcagcacacatctcacggatgctatgcattgagagctgaggagctccaacatcaaccgtccttatccccacactgcttgctaggattggaccaatggtcgatccgcaacccatatcattacgcaccacaaaatcctacaatattcatgtccacattcatttataatatgcaaataagtaagaacatttttttgaatctttctcaggcaaatcatacctgaacaggcagattatgcttctctgctatctctctgaatacaaaggaagttacggcattagtggcgtaacgttgatttgcattgtgtttgatgacaagtcctccgtgcatctttggctgatgattctcttcgtgtttgtcctaaaaagtgaaatcaaaatgcaatgaaagatggacatcaacttctgtgcatggaaatgaaaaaaatattgccagatgaaatgattccataaagtttggatgtaaagcatgtgccatgtcagcagaga

SEQ ID NO: 7953 - DNA, 1011 bp, Arabidopsis thaliana
caaaattgttttaaataaaattataagtttaaaaggtatggtttgacttgaactgtaccggaatttataccggaaatgtcgtaccgtcttccacacttcggagaaacgacagataagctctctctgttctcttgccacacttcccaatacatggatccattttgacgtcatctttatcactatctctctattatataaatctcttcgtacccttttaccgattcttcaccgtgatcgcttaatcagacctcaatttcgttgttaaagaacaaagctttaagcagccatggatccaaaccaacgtatcgcgagaatctctgctcatctcaatcctcctaatcttcataatcaggttcaaatttcgttgaattctctgattcttaaaccaatttggtgatcgaagtttgattcttttttttttgggttgatctgatttcgatgatttggatttagattgctgacgggtcaggtttgaatcgggtggcttgtcgggcaaaaggtggatcacccggattcaaagtggcgatacttggagcagctggtggaattggacaacctcttgcgatgttgatgaagatgaatcctttggtttcggttcttcatctctatgatgttgctaatgctcctggtgttactgctgataataagcctattgattactagtagacctgctaagtcctaaattctccggttttcgattccaaaattactactttagatgttttagagctaataaaattgatcaatagtgatgattgttgttgttgaaatagagaaatgagcttaaagatcatatacatgagcttaaaaactagtactttagatgttgtagagcactagtgatgattgttgttgttaagatcatatagagattgttgtgaatgtttttggaaaactttgttttaggttcgtggatttctcgggcagccgcagttagaggaagcacttacgggtatggagttagtgatcatacctgctggtgttcccgagaaccagggatgacgagggatg

SEQ ID NO: 7954 - DNA, 552 bp, Arabidopsis thaliana columbia
ataagtattagtttatgctactccacatcaggacccgcttttctttgactaccctattgtgtatctgcttgctttcaggtgtataatctccatagatctccatacttttgggataatccccacgattttgagcctgagaggtttttaagaacaaaggagagcaatggaattgaaggatgggctggctttgatccatctcgtagccccggggcactatatccgaatgaggtgaaatttccaaagcttgcaaatattttccttagcatgtgatcattttctcaaagaagaaatgaataatctttcctcttgtaacaaaagttgcctctgtttggtatttatgatgacaacagataatagcagactttgcattcttaccatttggtggaggaccaagaaaatgcattggagaccagtttgcactaatggaatcgaccgtcgcactagctatgttgtttcagaaattcgatgtggagctgcgtggaccgcagaatctgttgaactcgtgagcggcgaacgattcatgccaaaatgggatgtggtgcaactaaagag

SEQ ID NO: 7955 - DNA, 583 bp, Arabidopsis thaliana columbia
gattctcatcactaaacaactcaggcgcaccatgtgaccataaggatctgcgtaaccttgttggttcatatatggtggtggtggagcttcttgtccatacccttgaccgtaaccttggttcatatacgattcttgcacgtatccttggttcgaatacggttcttgtacatacgattgcgatgattgaccttgcatcatgtaatgttgttgaccgtatacttgtccttctgggtagtaatacatcggctgtggaggataaccgtaaccgttatactccgatttcttcacatccatagcaccaccgtctcctccacctccacctcctcctccaccgccgccaacagcaacttctttcttcttctcaccaccaccgtcgactttcttttctccaacatctttaatctctttcttttcaccagcaactttgtccttcttctcaccgccagctggagccgccgctgcagctgccactggtgctccgtcatcctttttggccggaacaacttccaccgtgcgtttaagcttctcgttaagataaggagtgagttgttcacgtcaatgatcccttaactataccaaatct

SEQ ID NO: 7956 - DNA, 599 bp, Arabidopsis thaliana columbia
tatgtaaagatgttgtatttgacacacgtagaagttacttacggaatgtgtttgagggagttaacgagtacacctccaaaacgtacaatggagtatgggctggctttaggcacacgcactttgagtcaccatggactgctctgtcatcctttgctgttgttttcgttattcttcttaccatgacgcaagccgcttatgcgattcgttcctactatcacgatacagagtgagatggaaactcagcttctccataggggcttccttcgggaaaatcacgtgaactacttgttctgttttatccgctacaaatgtcattcgcgctttaattagacccgcacatacgtgcaggatttcatatttttaaaaatatggtgtattaaatttatattcaatttagttttttctaaagtagtatttaatttatttatttttttggtttgtagtgaatgagatatatcataatagtatagatattagaaaattaattgttatattatgtgtttacataaacaatggtgcaaaaaaattgagtttgattagttataaaatttgaatagatttaatgttttatttacaccattttacagttgtaaagttaa

SEQ ID NO: 7957 - DNA, 528 bp, Arabidopsis thaliana columbia
agatatatagcaaagaactctcttacatcttcgtcagtgagaagtccccagtgagcgtcgagaatacgatgtaccttggggtcaaaaaatggctcaacgggataaacatctccctacatttaaaaagataagataacttttaaaaattagcaaactcggaaatccttcagtgcagccagggagaaaaacaaaaaagggcatgcttcaaatgttgattccaggcagccaccacatagagggaaaaaaacacaggcatctatagttctgtttaactttatcaaatagccaaacctactataatttatgcaaccaaattttttgaaaggaaagtgaggaacttcaagctgaagttaaacaatctaaggagcagagaagcacacacccctgctgatgtttccttttgagggacaatggctccttttttgctacttcgaagaacactaacaggcgcttgctccttgagatctggataggatgctgctgaaaatcgccaaaatggagcagttgcaccatcttttccttctcagt

SEQ ID NO: 7958 - DNA, 428 bp, Arabidopsis thaliana columbia
caagagtaaacagatctaggagcacacataagagcagctaatatagcatcagtagcgaaaacagtagctttgtcttccttagctaaacgcctaatcacaggatcatcactagtagtgactttgaagaagttcctgttcttgaaacgctcgagtctgcgttcgtttttcggcgttatgcgatcgaaaaggcggttgtagtactcaaggccaccacagagaagaagatcttctggttcttgaactgtgtacgtgagcttcgagaatgttgagaaagggatctgctcaagcatgttccactccggctgaatatcaacggatgatttgaaagcggcagttgcacggtgttggtgatggatgttgttacggttgttattgtagtgacgatcacgacgagctcgttccttctcagcatcacgcttcttagcttc

SEQ ID NO: 7959 - DNA, 515 bp, Arabidopsis thaliana columbia
agaaccactcaacatcttcatattcttcaaattcatcatcctcttcatggccatggctatgttgtaaccaaaaccctaaaaccttatctttcagagccaccatcactttcaccaaccctatccacgaccaagacgacgatgagctcgacctgctcgacccaccggagattacagattccgtagagaatgtgataaaagggctaagatcatcagagagactcatcttcgaaagcaaaggagaaaccaactctatacttgaagaagctacgagcaagcgagaagaagaggacgaagaagaaggcttcatgctcttctccttggaatcagacgacccttactctgatttcaagagatccatggaggagatggttgaggcacacgcgcttcaccacgactggaaaagcctcgagaagcttctccttcagttcttgaaagtcaacgccaagaccagccatcgatatatcttcgcggccttcgtcgatctcctcatgaacttagcactagacacgaaaaaa

SEQ ID NO: 7960 - DNA, 677 bp, Arabidopsis thaliana columbia
cgaatcagagtcgctttgggcaccacaagccatcttcgtcgcaacatgcaccaccggcgatctaaacgccgatgtcacaggaggaggctgaccacgacctacgttaccgatccccatcaggtccaaaaagtagacaggacgcgacatcgggatctgataacacgaagccgccgcctcctccgccgagactaagctcgagctgcgggggaacattcccagccgtcgctgaaggcacaactaacgtcggaggagaagcacagtcgagcgtgctgctctggctagggctacgcgcgaaaccggtagggaccttctggtcactcagctcgagaaaagttgggaaattggtcttagccttagcaccacgaaaatcacgcgccgccgtatcgtaagcacgcgccgcctcttcagccgtatcgaaagtgccaagccagacgcgggttttcttgcccggatctcggatctcggcggcataacggccccaaggacgcttcctaacgcctctgtaacgaatctccttggcattattgtgggtctggttagtagtagccgggtcgggtttcaaccgatcttggccattctcggatagatagattagagagagagtggtggtgtgatagataattgaagggagaagaggacacgagagagttgtttatatataggatgggagagagagt

SEQ ID NO: 7961 - DNA, 601 bp, Arabidopsis thaliana columbia
taagattatttataaaacgttaaaaagacgatacctgccggttaagtttatagtcagccattgcatgaatatattgcattttgttctcattcgtgactgaagtatccttcccaccgggtttgagttcaattatgctcatttttccacaaaactcttcagtgactgtgaaatccagacagagttccttcaaatcaccatcataatgctgcatataaacaaagtcttgatctcagaaaccctttcctgtgatacttattacaagattgaattttgacatatgaggcgacagatatatcacctgcaacggtttttaccttgacatacatgaggttcctgtagagctctggatcaagccctgatagttcatcaataaagctataacgccccaaaagcgtctggatgaaaacgtgtgaaaaagagtaatccagcagtattccctcatatagagcttttccaacaattcttccaagaaactcaatcatctgaatcccattctcaaggtgccgtgagatcggctaggaacaagaacctatctgaagtaggggtttcgagaatacccataccttttggaaaagaaaataatgcgcatccaataaataat

SEQ ID NO: 7962 - DNA, 408 bp, Arabidopsis thaliana columbia
taagtaatgctggtcttgtgcttatgaacagttcaaagagaacccttcaagaaagctggagaggaaccaaaggtcttacatgaccttgagaggctgcggagacctgcacctatatcaagacaggaaagtcaagatattgacttttcaatgttgatgcctcctcctcgaccacctccaccaccaccaccacctcctcctttggatgagaaggtcacggttatgccaatcatatcacccgaaagacccgttaagaaaacttcccctaaacgcttacccttaacttctgtgaagcactattctattgcttctcttcaacaatacacggaaagcttcgctcaggaaaatctcattggctcaggcatgctcggtagtgtttatagggcccggcttcccagatggaaaggtata

SEQ ID NO: 7963 - DNA, 576 bp, Arabidopsis thaliana
tgttaaaccaagcgagtttgagacaagttcggatgcaagcaacgtatggtatttagataatggagcaagcaaccatatgttaggaaatcgagcttttttcgaaaattgatgaatcaattacaaggaaagttcgttttggagatgactcgagaatcgacataaagggaaaaggctcagttctgttcattagcaaaaacaaggaaaagaaaattcttgctgatgtatacttcatacctgatctcaagagcaacatcataagccttggacaagctacagaatcagggtgtgaagttcgaatgaaagatgatttgctcattatgcatgacaaggatggaaagctgctagtaaaagcaaatcgatctaaaaatcgattgtataaagtactcatggagattgagcctcctaagtgtctacaagcaatggtccttagtaactcagcaaaatggcactcacggttaggccatattggagttgagaccttgaagacgatggtgaagaaggatcttgttatcggaatgcctcaaatggaagttgacaaagaaacatgtgcttcatgtttactcgggaaacaagtaa

SEQ ID NO: 7964 - DNA, 784 bp, Arabidopsis thaliana
cttcttctcatcttctcgcaacgtagattctggtgaatgatcctaatccgtttagctgtgggggagataagaagacatgtgtatcaacttgatcaacttgagcaagttgcagcagatattttcctcggccaaggtaaagatctgatgttgtcttcttctctactcgatcaatttctatatttgaagttcgtggattttgaaggatttgattggtttccatggtattagatctctgtgatggttgttgatctatcttaaaacttgatttatcttcagttctctcgatttcaaacttgtacttgtcctacttcaagtgatctaatcggaaacttattgttgctatgtttactgatcgtacagatctattgatctaaggattaagctatgttgtgattgagttgttagatttgaatttgaatttgaactgagcttgtttgtttgtgtgtgcagatctagagttttgagaatggcgatggtatcaggaagacgatctactctaaaccccgacgcacctctttttattccggcagctgtacgacaagtggaagatttctcaccggagtggtggcaattggtgacaacttcgacttggtaccctgattactggatcagtcagcagcagcaaggcagcggatggtttctatgacaacggagagaatgagaatggtggaggtcatatcgatgtagctgatcttcttccagaatcatttgattttgatgatatggaagatttctttgacactgatgctgctgagtttgatcaaggattcgatggaagaatgta

SEQ ID NO: 7965 - DNA, 730 bp, Arabidopsis thaliana
tgattgttacaccctagtcactacttagtttattgaagcaaagatgaagatattcaagacgtgaagaaaagaaacctggatgtattggaagaaaggaaggtaggatccaaaactctggaggcatggggttgcttcctgaccaatcaaagacaccaagtatctacaaacattcaaccaatatttaaacaatcttctgaatattattttgccgattgtaccaaaatttcatccggatatttaccgaaagccaagttttgccccaagaaggtatgtatgttgcaccaccatggtcaagaatccaatccctggcccgtttgcacgcgtttcctggtcctccatttggaccttctccaagtatgcgcatgcaaatgtagtttagtgtggtgcagaacatggtgctgtttccttctatgtgtaatccccacccaccatcttcattcttgaaataaacacatctcaaaagtaaaattgaaagaaaagagtttataaagtagcataagtggtaggttttgcgatctactaatgatatacctggtgacagtagatgtatctaaggacctctcgacgatggtcttgagtgaaaatctcatggagatgtccagtgacgtatagacagaaaacctgtattttacaaacaaacaaaaatatcggaaattggataatacctctgtgcacttgctgctgaaacttggatagaactatgtcatgcattttttcaaagattactttt

SEQ ID NO: 7966 - DNA, 737 bp, Arabidopsis thaliana
gactgcatgcataatgcatgacaatacacacaaactcctacatacgtagagagagggagatagagagactaaagagtcaaattgatagacagcgagaagctggaacaatacaaaacgtacgaaagattacacgcaaaagaaatttaaagaaggccatgcaaaaaccctagcttaattataacaacaacgacaataacagaaaacaacacttgttaattaaaaccctagataatcaacaaacctgataatcaaaagtaccacatatatatttgaattattacaaaagcctcgaaaaccacccttgatcatacgtacatttgttaaatcaaggggatgtttttagatcaagtgagaggagggcagacaaaaccagaaggaggattgatcccacaagtgataagagcttgaagtgcaagaggaatgaagatgtttaagttgagaagcttaagtcttatggttgtgcaaagacaaacggctgcttctagctcaagtaacccttgtaacactggacaacacacattctccaccggatttccaagtcctatatggatcaatcctcccaaaacatcaacacaggctccaagcttcaatgcattgatcggacacgttggttgtttgccgccgcctcctcctcctctaccggaaggtggaccatatggtggatagccggacgatggtggtgggactgtgaccggaggtgggttaatgattggagggagaagtcctggaggagttgt

SEQ ID NO: 7967 - DNA, 472 bp, Arabidopsis thaliana columbia
tcccccaccatgtaatgcatctttcagcttctgcaactccacatcacagttggagacaatcatgatatcatcaacatatactaggagggcaatgaaagatgtaccagattgtcgtgtgaaaagagtattatctgctggagactgctcaaaaccagctcttaagaccacagtggagaagcaatgataccactgacgagaagcttgcttcagtccatacaaggacttcttcaatctacacactgcattttcaggtaaagaagctccatttgcaggtgtgtagccctgaggaaggctcatgaagatttcttcatctagtgtaccatgcagaaaggcatttgtaacatccatctgagttagcttccaaccaaaactagatgccaatcctaacacaaatttcacactaccaagtttagcaacaggagaaaatgtgtcaatataatcaatcccttcttgttgtgtataccttttgcta

SEQ ID NO: 7968 - DNA, 497 bp, Arabidopsis thaliana columbia
cattcatcttctgagaatacagcttctgattcagtatctgaatgaatcttgagctcagtgtacccaacatcaggcaaatgattaaagctgacactcttcttgggtgtagatggtttcccggttctcacatcaccaaccaaaccaatcttgggctcattgtacccaacaggtggcaaatggttaagtgaagattcttgctttggttcagtatctgaaaacacagcctctgattcagtatctgaatgaatctttagctcagtgtacccaacatcaggcaaatgattgaagctgacacttttcttgggcgcagactgcttcccggttcttattttaccaagcaaaccaatcttgggtagaatttcccgttcagccacctgagtagcagcggtttgaggcgtcacaactgattacaacatgtacaatctgtaagcttagagcaatttggatatttgcttcgatcactcttggatccgaagtgagaatcttcacccagttta

SEQ ID NO: 7969 - DNA, 549 bp, Arabidopsis thaliana columbia
ccttttgattggcaagtgagaagaagaaggagagaattgggtaagtgaaagtgaaacctggaagcctttgtatttgataagttctttgattcgatcaacaacataaaggttaccatcttcgttgaaatatcctagatctccggtatgcacccaactttttttgtctattgtttctttagtagcctgagggttattgaggtaccctgaaagagaaccagtttacatgactttcaaatgcacatatatgatatacataggaacggatcattttcaaacctttcatcatgtttggtcctcgaacccagatttctccttgttgatttggaggctgagattttccagtttctacactcactatctgagcttcaacacctggagcaagcattccagctgaaccagagttccgtttcccgagtctcgggtcttccacagacacaattccacacgtttcagtcattccatatccctgaagcaatcatttaaacattcatccatgactacgagcctacaaagagaactgaaactacgcgaaacgttacacattacgag

SEQ ID NO: 7970 - DNA, 564 bp, Arabidopsis thaliana columbia
tttccggccaatattgaattattttatggcgaattccccgagtctctgaggaacaccgcgacttcattgacctcggtggtgattggaatctctttctatttgagcacagctctcattgatcttatccagaggaccacagcgtggttaccaaatgacattaaccacggaagagtggacaatgtttactggcttttagtcattggaggaatcttgaatttcggctacttccttgtgtgttcttgggtctacaaatatagaaacctcaaggataatgatcaagaacaagatccaaaagatggtacaatgtaaagacacaacatgtttctattctagttctctttacattaattctctcctgttagcttttgtgttttcgtatgttttaccacttcacatatggaactacatttagaaaataatactttcaaactgatgcaagagagacatcatctgattcttatcaaagttctaagtaagaattgaccttatcttaccctttccctcttatgcattttacggggtgtattgaaagtggaattttaagatatttgtgtacaatttata

SEQ ID NO: 7971 - DNA, 635 bp, Arabidopsis thaliana columbia
  unsure (1)..(635): unsure at all n locations
nnnnnnnnnnnnnnnnnnnnnnctaaagagcctgaacgacgcgggcacctcggtgagtaacttctggatgtcatacatggtcggcatgtgggcgttcagctttattcttcgcttctttgatttgcaacgcattctgaccgtactggctggtctggctgcgattctgatgtacgtctttaacaccggaacaccagcacatatggcgtggtcaattctcgctctgggcttcttctccagcgcgatctataccaccatcatcaccctgggttcacagcagaccaaagtaccgtcgccaaaactggttaactttgtcctgacctgcggaaccatcggtactatgttgacctttgtggttaccggcccgatcgttgaacatagcggtccgcaggcggcactgcttacagcaaacggtctgtacgctgtcgtctttgtgatgtgcttcctgttaggtttcgtcagccgtcaccgtcagcataacaccctgacctctcattaattgctcatgccggacggacntatcgtcgtccggccttttcctctctgtccccgctacgtgcatctatttctataaaccgctcattttgtctaatttttgcacaaacatgagatatcagacaattccgtgacttaagaaa

SEQ ID NO: 7972 - DNA, 1292 bp, Arabidopsis thaliana
catatataaaccattaagctacaaaattttggtccgatactacttatgatctgttccaaatctcgagcttactcataactcgaatattgataattaataccttaacgtacaagagcaggacagtaagacttctttaaacatatagtatacaatataattaagtatagaagtctatagattttcccttttaaataaagaaagatcatttaattcaccctaatgactctccttattaaagaaactcttcttcttcttccttgcttctcttcctcctcctcctccattgatactctaaaataaacttataaatagcatgcgtgaatgtcccgagaaaggtaaaactaaatcaacatatatacatctatttacgatctttttgattgataaatcaaatcggtggtggtgaaaatgattggaaacaacagggaaggatttggagagtactacgagaccgtcaagaagataaagaaagatccagccttcgagacaacgacggatcatgccgtgatgggaatcaggagacatgtggcggtgctccggggacaacgttgaacaccgtaacaccatgcgccgcttgtaagctcctccgccgtcgttgtgcggaggagtgtcctttctcgccttacttctcgccgcatgaacctcacaagttcgctgccgttcataaagtctttggtgcaagcaacgtctccaagatgcttctggtacacatattttctacattaatgaatatttattttcttttcttagttaaggtttcttaatttgattactcttttgatatcgtatttgattaatctgaatatatagttgaacggatctaccatttttgatatttgactctttccaaatatattcaaaacatatatttatcccatttgttatagtcgaggtggtttatctaactagtataggtagaaattcattatcctaagatgcacatacatactaagattgagtattggtaagttatttacttttcgtacataatatttgattgagctatatgtatattaacttatggaataagaaaatgttgtaggaagtgggagagagccaaagaggagacgcagcaaatagtttagtatacgaagcaaacctaagacttagagatccaatctacggttgcatgggagcaatctcagctcttcaacaccacattcagtctcttcaatccgaactcacgaccgtccgtacggaaatcctacgccacaaataccaagaagccaccaccatcacttctctccaaaacaacttcaacagcactacaacaacttcatcagtgagttgtg

SEQ ID NO: 7973 - DNA, 1115 bp, Arabidopsis thaliana
ccaacgtcatcgttttcgccgatcctagtcagctcgtttctttcatcacgtatgacgtcacgatgaccacctgattggttagttccgttactgttgttgtccatggaagatccggcgatgactagagcgttgaactctctgctcacggtggtgaaattctcaccggaagaagtagttccgtcgctaaaagcaatagacctcgacggagacaagtatcctcctcctgatcccctttgttgtggccgagtaagctctgtcgtcgtcgtcatcgcgtgaatatctctcacgactatctccgacgacggcgtctcatcccggcgatcggaagcatcggtcgtacttgtggtggagttctccggtgacctttcttgaccgtacaaagtcaacatcagaagagttgtagtagtagtagtagtggagtgttgtaattagctagtttaggtctgattataattaggtgatggaaggagaagaaacaaggtcaggaataaataatcaatgattaggttttaataattcgtgtaacgattaaaacgtttagtttacatgagaggcaaaattataacaagtgtaaagtcttttccatgaaagctacgttggtccagtaaatgtgccactacatttatgaagacgtgtgtctttcaagatatttagcaagacattgcttattttaattgcttgttttaatttttgaaactgtaacataaattcggtacaattttttttaatatttgagagcatcgtcagagatctttaattagaaaatactgatgaagatagaaaaatagatatatcgtagtgagggaagtgtcggcaaaataggaccgaccacgaaaaatggagatagtgcttttgacacgtgtcttgttatagcaaagattatctacgtggcattaagtgagtggtagtgtattcccgcgagaagaagctactcacgtcagcttcatgaatgtgctcggaaatcccactggacagacgccacgtactaaattgcatatcagattatattcgttttactaaattgctaattatattatttcttgtcattttctgattactccctaaattggtgttttgtttttcttaaaaaagggagagaggttgagttaaattta

SEQ ID NO: 7974 - DNA, 567 bp, Arabidopsis thaliana columbia
cagggttacgcaagctacttcagttgaagcttgtattctgtctggaacaactcatttcactggctaagcttgcctacgagtttgattgtccagtagatgaaactaataccaattctatctgtattgtcatgttgaagagttgccaaattagtatagcagcagttgttaaagattccaatgttcaggtatctgagacttgcctccttgtcatatgctagttcaactgttgattatcgagctcttaatagtataagttcaaatatctgtaggttcaagctactgtcttacaagtgctaaaaagcttggtacagcgatacaacaacccagaggagaaaagttttgtgatcttatttgtcggcgaacttattggagatattgtcagtctgatgcagagggcgcttctggttgttttctcatttcttccttccaaaatcactgaatttacatttttagaagaaaagagtaattttgacgtctttttagatgtaaaaactatgataactgacttcattcttattcttttggatagaaacctgtgaatacggaatcggtggtcatagctggtga

SEQ ID NO: 7975 - DNA, 580 bp, Arabidopsis thaliana columbia
cgtacatagtatggctcgacaatccaatggtggagataggtctcgtgtagaggaacgggtttgcccgcttcgtcaaccacttcagcatcgaaagctttgaggccgatatgacctcttgggaaatcgatgtcgaataagtaaggatttgcaactgatcctggattcatcacaagttttggtgagtaaaagacagcggatttgatcttttcctctgtccctaggaagccttggctcggcgatatgcttaatgagagcagaactaagcacaagatcatcgatctcctgtggtaacgagccatcatctcctgtttcatgatcatatataaaaggaaagagattgattcagctaatcaaattcataaacatggataagatatcacaaactctaaacctagctcaaactatgaacaatagaggataacacttgaaacctaattttaatcagaagattttagtacttgtgctgcttattcaaaattcctttgcccaaaaaaaaaaagtttgacttaccttttgaaagacgaacgtatccactatggaacaatctttcgtaatctcctttctagtttggtatttaaaa

SEQ ID NO: 7976 - DNA, 489 bp, Arabidopsis thaliana columbia
ttgatccgtgacagagtatcaatctacaaaaagaccttttaagttataatgataagaccttttatgttagttttttgttagttaagaaggagtaagcagtaacctttctacggtatgccatttccatggctcttgtccattcatattagattcagcaatcgcggttgaagctaccgctatctcaacaccactcgacaatgttcctttatacacagtgtaaccgtcaaatgtctctatgatgttgctgaaatcttcacacgctgtttcaagctcagaccgattgagctttggtacccctacattacgttctcagtttcagtgttaatgttcctaaagaaacagagtaaaaatggaaacaaagagaaataagattttttacctggtgcagaagctttctgcaattgtccactaagatcagttttccaaggacctatgctcttgacagctcttttccggcagaagaagataaccgctactataatcagtaaa

SEQ ID NO: 7977 - DNA, 615 bp, Arabidopsis thaliana columbia
agtaacgtccgccagtgatgcattgattacttgtttataggcagagaaagttttcaaccaagatttgttctttaagaagactgtcaagtatgttggagaaccaatgactcacttggaatctattgcttcttctgctgtgagcctctcttttgtgttacctatgtaacttaaaagctgacaagttgcctttcaagttttctaacttaatggcttaaattctgcttgatatcaggtacgggcagcaatcaaggttaaggcatccgtaattatatgcttcacctcgtctggcagagcagcaaggttcacaccattccttccaacttaaactgttcgtacatttaaattctaatgtagctgtctaataaatgttttatccatatcgtgaaaggttgattgccaaataccgtccaactatgcccgttctctctgttgtcattccccgacttacgacaaatcagctgaagtggagctttagcgacgctttgaggtaaactttcatcctgattgtgtgaattttgaaaaagaattgggattttctaatgccacttgtcaagattcaatgattatggttgtacttgcttatgactgcatatactatttggcaattgtcccatg

SEQ ID NO: 7978 - DNA, 554 bp, Arabidopsis thaliana
cccttcgatggccagtcaatatttttaagcattttcctgtctcacaatcaataatttttacagtgtggtcaccactacaagattaaaaatacaaaaaaaaactcattagcaaacaaaaaaaaaattccaacaaatacgactcatgatacttactgtgtagaagcaagagttcttccatctgaactaaaagctgctgcaatcgttgaccttggaggaggtacaagaggacagtatttagcagataaatgctgcaatgactctgcctcaaccctacatgtagggaatgcagtttacattcagatgcccgaaaggaggcagggatcacatcaaaaagagaagcgaagaagtgacgaacgaaaggtaccaagaaataagattaagtccctgctctctcacatggttcgctagtggttccacacgacgaatcagcatcacatcggctttcccccaccgttttcttggaacaaactttgtgtttggtgaaatttcctctggactagtaacttgaagacactcctacacctgaataatccactcaaaccatattatgagtg

SEQ ID NO: 7979 - DNA, 1159 bp, Arabidopsis thaliana
cccgttatctcagctacacagcatcaagctctcaagtgccataggctcataagtaacaatcatgcatcatgaaattttaatgttacaacaaagaatagaaataaaataacagaaaatccacttacatgacacctgttggctttaaccatcggtcacgagcactaatcacagaatcaaacatggactcccgcagaaggaagtatcccatccactccgagataattacatcaactgcccattaaattgaatatgtagatattagcgcaatgtcgagtagagtaaaaattatcaaaagaaacatgttcaactcaaccaaattgcaatgtctcaatcaatagccactaagttaaaccctgattactactcttttctaatcgcagtgaaagagaagaaaagggaaagtgaataatacctttctcaggcaatgaaatatcctcgacagatccttcaatgacttctacaatatggtcaaggttattggctttgacaagggcacgagcatgatcagccatcttagtagcttcaacggcataaaccttcctggcaccagcttgagctgaccaaattgcaagaattccactcccggtgcccacgtctaaaacagtcttcatcacattacagaaacaacaattcaaactattaataccacaagaaagacagagagaccaatgggtacaacttcgcaatagataatctttcatcgactacaaacaaatagaaagtcttccaacacttgttaagcttaaagatgtgaactttattataccttgccctcaaagtgatgtttgttctggaagacggcgttgaagtaagcatccatacggacacggtcggagagcatatccttctggtggtataggaaggagtaagtacagaagtactgagcgtagtcaacttctttgtcaactggagccgacggtcctcctccgccggttccggcagctcgtccacccattgcgccgccgttttgggagctcctcatctttgtttacacacttgttcttgcaaagtaatgcttctgactgcggcaaaaatcaaagctttgttccctttaattggaaagctgaagtgagagagctacagagttttcagacggcgacggacaaagttcggaaacttagggttccttttataaatcaatcaatcaaagtctttaagt

SEQ ID NO: 7980 - DNA, 1791 bp, Arabidopsis thaliana
ctatttctcagattatgctgactctttaccatcaagaaaggtcaccggacgccacaagtaatgatcgcgatgagacgccagagactgtggttagagaagtccacgcgctaactccagcgccggaggctaattcccggacgatgacggcgacgctacctccaccgcctgctttccgaggctatttttctcctccaaggtcagcgacgacgatgagcgaaggagagaacttcacaactataagcagagagttcaacgctctagtcatcgccggatcctccatggagaacaacgaactaatgactcgtgacgtcacgcagcgtgaagatgagagacaagacgagttgatgagaatccacgaggacacggatcatgaagaggaaacgaatcctttagcaatcgtgccggatcagtatcctggttcgggtttggatcctggaagtgataatgggccgggtcagagtcgggttgggtcgacggtgcaaagagttaagagggaagaggtggaagcgaagataacggcgtggcagacggcaaaactggctaagattaataacaggtttaagagggaagacgccgttattaacggttggtttaatgaacaagttaacaaggccaactcttggatgaagaaaattgaggtaatttttttttataattaaattccggtcccacgtacgatgattaatttagtaacatgcgtcagatttggatttgagctatgggattaagtattggggttagtaagctggttaatatagaattagaccatgtgatagtataattaagtggacttagttggcacttggcagtataaacattttttttgggtttatcgccatttggaatgtcaaacgtaatcttctcatctgaaaaattgtaaactatagtaggaatggtgtggtggcataatttgtctgtaattaggtgtgagatggttagttctctcacatttctagcttctaattaatgtttttagtcttttaaatagtagtatttatttaccatcgtgcatggcatcgtcatttccaattatacaaacattgttgaattacctttccaggattcataataattaatatagtgaaaaatattcagtataatgtaggttcattcaacaatcgtctaaatggtgatcattcatgacgggttcataatgtatacatagagatatgtatgtataagttaagctaacaatttgggatcgatgcatgcagaggaagctagaggagagaaaagcaaaagcgatggagaaaacgcaaaacaatgtggcgaaagcgcagaggaaagcggaggagagaagagcgacggcagaggcaaagagagggacagaggttgcaaaagtagttgaagttgctaatctcatgagagcccttggacgtcctcctgccaaacgctccttcttctctttctcctaatttttagttatatcaaaccattaaattaaacagtactcgttatatatctagttagtaaacaaaggggcagttttatagctcatgtacacataattgagagtgtagtactgttgtgtcatgtgtggttttgtacttttcttagttacacacaccatacaagaaaaaaagaagattataattcaacttaattttgatttttgaataatgcgtttgtataagaagtcaaataaaaaattcgtttctactttctaccatccatctctagtgctttgacaattcaaaatttcaatttaatttcaactttggctcggtgcaccctctcactgtgattcaaaagttatgacaaaagtgttgtgaattagtccataagagagaa

SEQ ID NO: 7981 - DNA, 581 bp, Arabidopsis thaliana columbia
aacagaatttcttgggaaacaagatatcacttcccttcaattctcatagcatcaagataagcctttcctttgagttcacgggaaaacaagccattcaagtagtctttagttttcaggcttctaaactttgcagcctcttgtctttgaacaaggcttctcgccggaccaatttctttatccattctcgtgttgtgaaatgtcgcaatggagagcctctctttctccaagttcaccattgcccggtgctcgatgcttcggtatgtcccgttcgttatgatctgcattacaaacggcccaacacccatcatcaaaatatttatgactagcgattagctgccataaagtctatcagggtttagcccgaccaaattcatcaaaacatctatatagtatggcttacctctaacacgtccccaacattgacaatgaaagcattttggagaggtttgacaaaaaacacttgccatttttcttgatttggagacgtcaacttcattcactgcaaaagtatggtgacccgactgcatcggaatgcggaattagcccgtaaccagattaggttgtggcacgggggatagtag

SEQ ID NO: 7982 - DNA, 615 bp, Arabidopsis thaliana columbia
gtaaatactctattttattttggtctgcttatttctgtcaaatcttctgacttttgttttatgttgtaacatggcagcgtatcatgcaaaatggtttaaaggaaaataagaagtgcacgttgatagacattatagacaagaatcaagtagttgctgaaggacgatgggcaacaaatgatccaaaaccagaaggttcactttgttcttttcggttctaatgcagttaaagtgtgggtagacattgtcaaagttagcgatgcagaagtttggaagaaatcagatgaaatagagattatggaagatgcccttaggacagttattgcttggcctgaggacaaagtgatcatggcatgaggtttggtttgtggaacttgttagttaaacttgttttcagactcttagttgcttttggatcttaatgagattattgtgttttgtgaaacttgttatctgagacttgacttgttttgtgattggtgttttggatttgaaagtattaatgcaatgtcgtggaattttataaaacatgtgtcatgaaaatacttgttatggcatttaaaacctgctacgaaataaattggttacaaaatgtaagatttacaaatgctatattag

SEQ ID NO: 7983 - DNA, 560 bp, Arabidopsis thaliana
cagtatgatcaccactacacaaaacaaaacaaaacacagtgagaatccaaaggcaaaaaaacaaagaataaaacatatgcactccatgacactcactgtgtagaagcaagagttcttccatcagtactaaaagccgcagcaatagttgaccttggaggagctccaagaggacaatattttgcagataaatgctgcaatgactctgcctcaacccttcataaagaatcaccaattacaatgagcttaaacaaggtcctatgcaaataaagagacaagaaacataaagtgtaccatgaggtaagactttgtcccgtctctttcatagactcgttgttggttccgcatgaagaatcagtataccatctactcttaccccatcgtttccttggcacaaacttagcctttggtgacatttccctctgaaccagcatgttaaatacactcctccccctaaacaacaaatttccaatttcaggtttagaaaactcaaagatccagtttccaaaaatggctgaagctaaccaaaattctcagtgatatccgtaacaagcttttatgat

SEQ ID NO: 7984 - DNA, 843 bp, Arabidopsis thaliana
ccttttatacacaccatctcgattactttagcaaacggcaaaaataagacataacataagttatgcactcacgtcacgactccatataatcattcatgataactgataaacataaaaactgaattcatattgcttttttctccaactcactcattacatacaaatacataaataaataagaaaaatttccataaatcagaagtaaaaagaatctcatacgcaaaataataaaattaaaaattgatacatcacacacaatccacaacgttaattcgcttcttctcttctataaaacccttcctcactcatcttcctcctcacaccaaaacattttcctaaaaaaaaaaaaaactcaaaactcaaaaccatctttgtgaaaaaaaaatggaaggaagacaatattaccctccgagagaaaacgttgaaggaaacagaaccaccatgggaggaggacctcactcaccgtggcattcaccggttccttatctctttggtggtttagcagcgatgcttggtctcatagcttttgctcttctaatcctcgcttgctcttactggcgtctctccggttatctagacggcgaggaaaaccagagcagagagagagatcttgaagtcggagatgtgaaacctgacaaaacggcggtgaagcctgtagctttgccggagaagttcttggtgattatggccggaaatgtcaaacctacttacttagcaacgccgtcggtaaaaacgtgtacttgtgacgatgatgacgatgaagatgatgacgtgtaggcgaagtgatcaggtggtgccgcggagtagtgaaagtaacggtgagactcattgctaaaaccagag

SEQ ID NO: 7985 - DNA, 515 bp, Arabidopsis thaliana
ctctagtaaccagtgtgctctaaagggtattggtcaggaagtgaaaggcttcaagatcggcgatcgcgtttctggcgaaggcatatcacctgtggtcattgccgcaactgtcgtggtggtcgtacccatttgtgccgcaacacgataggcgttggtgttaatcgcccgggctgctttgccgaatatctggtgatcccggcattcaacgccttcaaaatccccgacaatatttccgatgacttagccgcaatttttgatcccttcggtaacgccgtgcataccgcgctgtcgtttgatctggtgggcgaagatgtgctggtttctggtgcaggcccgattggtattatggcagcggcggtggcgaaacacgttggtgcacgcaatgtggtgatcactgatgttaacgaataccgccttgagctggcgcgtaaaatgggtatccccgtgcggttaaagtcgcaaagaaaatctcaatgacgtgatggcggagttaggcatgaccgaaggttttgatg

SEQ ID NO: 7986 - DNA, 489 bp, Arabidopsis thaliana
gattgatctgtgaatagcttatcactcgaactataatcaacaaggttcagaaactcatccccaatcgagaagccattgttgttaccactgtttttccctgaattaggcaacaaccatgaagccgcctctgcttcatcttcatcctcttcttcttgaccaagcacaagtctgttctctggatctgtcactgttgtctcacatgaatggttagtggccgtggaactgtaagagtactcagaaatgggcagaattggaactcgttgatggcgtctagcaagtgggtttgcggaatgaatctctgaatcacaggttgtgcatagagatgcagcatctgccttgcagaaaaaggcagccggggctcgctcacatgattgacagactcgaacacgttcatggcgggaagcaagacgattggcagcatgaacttgagcatcacaactggagcacaagtaggcagaatcagcccggcagtacacggtgcaggcggct

SEQ ID NO: 7987 - DNA, 982 bp, Arabidopsis thaliana
gactctagcgtatatcaatacgcaggagatgattgcggtgtaaaaatttgggataatgatcacagatgaattgaagccttttttcatcgaatttaaagttaataactgttttacactacctgtgcagctccaagaagggatagtgtagtccccacaacagagctcgtaagttatatggaaaagctacttccgggtacccatctaaagccttttagagacattttgaaaatgcctgctatgattttggatgagaaagagagggtgatgtcgaggtttatttctagcaatggactgattgaagatccatgtgacgttgagaaggaaagaacaatgattaatccttggacctcagaggagaaagaaatctttctgaatttgctagcaatgcatgggaaggatttcaagaagattgcttcatctcttacccaaaagacaactgcggactgtattgattactactacaaaaaccacaagtctgattgttttgggaaaataaagaagcagcgtgcttatggtaaggaagggaacacacctacatgttggctccacgaaaaaagtggaaacgtgagatgggggctgcctctcttgatattttagggatgtctccattatagcagcaaacgctggaaaggttgcatcaaccaggccgatctcttccaaaaagatcacccttagaggttgcagcagtgctaattcattgcagcacgatggaaataactctgaagggtgctcctacagttttgatttcccacgtaagagaactgctggtgcagatgttttagctgttggtcctttgtcaccagagcagattaaattcttgcttaaggacttctgtgagctctagagagaggtgtatggatcatctgaagtttaatcatgtcgtaaagaaacctcggatatctcatactctacataatgagaacagcaatactctacacaatgagaacagcaacgaagacgatgactgctgcactatataatc

SEQ ID NO: 7988 - DNA, 331 bp, Arabidopsis thaliana columbia
atgtcttacaccacatactaatacacaagaaactccataagcaacagtaactcgctctagaggaaaactccggccagtgagtacactaataccactacgaaaatgagtaaacttccatacgcgtctgaaatccgactccatgaagtacccccggaagtatagaaactagaacattcaaactcgaactatactcagagagacgtcacaatatacactaccaaaggctcaacgagtgaagagaactcacatagatgtcattcagagcatatctcctctgtagatcctagaggggagaagcgtggtgaacgtatgttagcttggtcatatcatg

SEQ ID NO: 7989 - DNA, 608 bp, Arabidopsis thaliana columbia
tcgtaatttaacagtgcctgttttgtgtgtacttataatagattcggcttagcaattccctctgcaacttctaattattgacattaatgtaacaagttagtgtcatctggtggtgattctacttagcgagctggtggtggctcactatttttctatttaacaaccatgcttctgtgtgagaactgacaagtgacatgcggcttgcattacttgctaagtttgacagagtagaggagtttcttgtccttcaaatactctacaattgactagttatactcttgtcttctgacaggcagttgatatgaaagttctaggctctcttagcagagacgattttgaagaaaattttgtggtgataatttccctcaatggatctcgtttccagcatttgaacaggtacttgtcatcatttctgtgagtcattggtttctcaataacatagcaaaagtttgaaactgcaaacattttgttctttctttcttatttttcaggtcaaatggctgaataaactactgagcaagatgtggcgttatattgcagaggtgagattctaatcttcttatgttgcagttttaggtgtttcttttcccttgtatagggttggaagt

SEQ ID NO: 7990 - DNA, 868 bp, Arabidopsis thaliana
ccaaataatatatctaaatcactttctgaactgaactttagatcccaaaatctagtatcacaaaaatggccattgcttctattgactttcggtaagcaaaaatagtcggaaagcaacaactagtacactcctcccttccccaataaaagagctaaattatgaacaccaaaaaaaaatcatcttctcaccaaaataccaaacttagtgatttcatttctcatacgatccatgtctacttgttactgcctaatacaatcaactcaaactctaatcatacacttcagaaaagttagataccctacgtctagtatcaccaagttggccatcgcttccattgacgtgcaggaagcaaaatcgaggaaaagcaacaactagtatacttctccttctctcataactgtactaaactacgaatacagacaacaataatcttctccaccaccaaactactaaactcatcgatttcatttctcatacaacaaatcaactcaaaccctaaccaaacatttctgagctacaacatacctttccttcaggatggaaacaaggatgaatgataccattcatatcgagatacaaataatcaaattcgaagccgttagggttaggtctggtgatatcaacaggaataaggtcaccacgacctccatcggtaggatcttcttcaacgacgtcactaattgacttcgggtatcggtcagcgagccatctgtagaacgccggtactcccatggcggattccgatcggcgattagagagagatccgagtggtctcgagcttgaaggttatctaaatattcttcctacttagttatactttagctgtcaccaaagttgttagacatgattgagcagaagaagcttctct

SEQ ID NO: 7991 - DNA, 527 bp, Arabidopsis thaliana columbia
cttcttgagtgttgtaaaggtttggctgagagagatatggattttgtttatgattgtacttctgatgagaatcagaaagttgagaatattgcttgggcttatggagattctgttcggggttactctttgtttggggatgtggttgttttcgatactagttatcggtcggtaccttatggattgctgcttggtgttttttttgggatagataataatggaaaggcgatgcttttgggatgtgttttgctgcaagatgagagttgtcgttctttcacatgggctttacaggtttgttgcatccgatttattgtaattgtcatgattggagtacatatatggtgtggttattctcactgtttaagttttattttggacagacttttgttcgtttcatgaggggacgacatcctcagacaattttgacggatatagatacaggacttaaagatgctattgggagggaaatgccaaatactaaccatgtggtatttatgtcgcacattgtctccaaattagctagctggttt

SEQ ID NO: 7992 - DNA, 530 bp, Arabidopsis thaliana columbia
catgtgtgggtgtagtaggtgtgattacctcgtagtaaagctcaataacatcacgtgagtattcgttgtttttatcccatggcagcggcgggcgggcctctgaaaacatgtttagagcgctaaggagggacataaagcgcattgaacagtctatagacgttatcgaaatgagatgcaagaataagaaacgaaaggaaactggcaaaaggatatcatatcaagatgagttgcaaacatgtctgtttcacaaaagtcctcaacaaagtcacttgtcatggcctcagcgtaaagaagcaggacaggccaatgaaggatgttgtttttatctaacattggcttcttcaaaccagtgagttctcggtacattgctttgccaatcttcactcctctgttctcgatcgcagagagacaagcctgtagtgaaaccaaggaaaactgagtcagctaaaatgctcaaagtgaaatgacttgtaatgtattaaagcttgatattcatgtaaatctaaccttggcttcaccaccgcctgtga

SEQ ID NO: 7993 - DNA, 543 bp, Arabidopsis thaliana columbia
  unsure (1)..(543): unsure at all n locations
tagtaaattaatcaaaacatctgcaaatggcttgtaaactttgggagcttgcaggagtgcggcaaatatctgaaccagttggttattgttaatcatgctctcaaaaagctctggcatgcataacgagaacatgtccattagatctcgaggttccataatagcaagaatttgggagaaaagattcagcatttccttttcctcatccttttctttgaagagagctaagcagtggacaccactctttaaaacaccagaagctttccacacctacttcaaggcagagattactaaggtttatagccatgcactattaatgactaaagtaaataatcttacaagcagtacctcatcttctctcattcctttaaaaccctgcggaagantgtattgtgaaacaagagcttgagggttcatcccctggccagcaggagaaaccgtcacaattaatatacttgcatgacaaaacaatagaacactgatacaagagacaatttaacacaaacctgaggtcgaggcaaatgtgcatgggtaatacccatatta

SEQ ID NO: 7994 - DNA, 416 bp, Arabidopsis thaliana columbia
aggtaccgagtcagaaggtggttacaaggtcatcagatctttgtgttctagaattagtagtcctactgaggctattccggtctggagatggtaaacgattaaataaaatatagaatttggtcgtcattccaaagctttgaattgtttaccactcaaaaccttaacctgaacccttctccatataggtcatatcatcaggatcttccatctgaacgcgccacagatccgaaagagattgatgaactctatgcgtgccaagagcttttgctgatattttcggatatgcttcgagaaacgccacgggaatctcaacagacgttgttgcttggtgaaagtattgacatgtctagtgtatttgaatgggaaagaggtttgtatatttgagaagacgactaaggtcctcgctggtgtctttg

SEQ ID NO: 7995 - DNA, 519 bp, Arabidopsis thaliana columbia
gaggaccccctggttatgaaacaacaatattagtgatcaaactccatatgaaaaaacaaagacagcatgttccattattaggttcagacatatgtctgcaacgtcaacaatacatatcaaactcctccatcaaccacttaggatcttcagattcaaagctagctaatgggttaactcgagtcacaggagtgcatttaagtggatgagccatggtcagcgtcatttctccagcctcttccacgttaaccttatctccatcgattatccagtcaaaacactgtaccattgttccaatggctactccagtgaagagatagcccaatttttctcctggacatgctcttcttccgctcccgaaaggaatgaagttcaaagctagctgttctctctcatcgtctttcccttttgaaggagacaccatgaacctctcgggctgaaacttgtctggatttcccatgaatctggatctatcatcatcgcataggtgtttattagcatcgttgtgttctgcggtatgta

SEQ ID NO: 7996 - DNA, 543 bp, Arabidopsis thaliana columbia
tcgctcactaagtgtgctctaaagagatactggccgcaaaggtagcggcaaagccaacagccgcgagcggtttccagatgcctttccagaatttcacggtttcgctgatttccgggttctccggcaagccatgatacagatttggcttgtcagcatggtgcagcacgtacatgacgtgtgtaccaccgacgcctgccggatcgtacagacccgcattgtcgtaaccgcgggttttcagctcagcaacgcgctcgctcgccagcgttttcatcgactctttcgtaccgaagtgaatcgcgcccgttgggcaggtcttcacgcaggctggttcttgcccaaccaccacgcggtcaacgcacagcgtaacatttgtagacgcggttgtcttccgggttgaggcgcggaatgtcgaacggacagcccgcaatgcaataaccgcagccaatgcactgctcggactggaagtcgacgataccgttggcatactgaataattgcacctgtccgcgggcacgctttcaggcagcctggatcggaacagtgc

SEQ ID NO: 7997 - DNA, 466 bp, Arabidopsis thaliana columbia
cgagtgaagtctatgactttaaagcctgagatgatttctacgagaacaactccaaagctatagacatcactcttgtccgagagctgaaaatcttggtgatattgaggatctaagtatcctggagtgccttgtggagccgtggagatatgagaggcttcgaaatcggtagacatgccgagcctagagagtccgaaatcagatatcttggagttgaattcgtggtcaaggaggatgttactagattttatgtctcggtggtagataggagggtttactgaagagtggagatgtgcgattgcgtttgcggtttgacacgcaatggcgagtcggagctgccaagaaagtggtggttggcctctctcgtgttgtaaatgctgataaagagttccgtttggcatgaactcatagactagaaacggttctccatctgcaaagcaacaacctaagagacgtactagatttgggt

SEQ ID NO: 7998 - DNA, 449 bp, Arabidopsis thaliana columbia
ggtgttttgcaggcaatcaaagcgggtgaagaagggaaaacgatcccagattacgattatcttccctatttctactctcgatttttcaaactatcgtgggaattctatggggaaaacgttggagaatctgtactgtttggagataatgacccgaaatccccaaagccaaagtttgggacgtattgggttaaagatgggaaagtagtaggagtgttcctagaaggaggtactcaagaggaacacaaggctattgctaaagtggcacgagcacaaccttccgttgagagtcttgacgtgttatccgaggaaggcctttctttcgccaccatgttctatagcacctctctttgagaacattgggcctgtttagtcacattgatgtaataatctcctttgtctttgatttcatatcgagcccctattgtatttcgaaaaataaattacatata

SEQ ID NO: 7999 - DNA, 825 bp, Arabidopsis thaliana
ttcatcaccatttcctcgatcttcgtttgattgttgttgcttaagaggagattcatgaatttataggtgtacttatttgggttcgtctctgttaggttcgtgagggaggggttgatctagttgttgttgttaggatttggatcgattcttttcatggaagggtgtctcttattgatacccgtacgagaagattattgtttagatttggattagagctaggttttttttgtttcaataggaaatgtctgttgctgatgttgctttaagcccgattcatagaggatcggcgtttgctgttggtggtttcggacaatcgacgacgacgcattactctgttaaatcggttttggtgttccttagtgtttctggttctacgatgcctatgctcatcttggagtctgattctattgctgaggttaaacttaggatccagacttgtaatggttttagggttagaagacagaaacttgttttcagtggtcgagagcttgccaggaatgcctcacgtgtgaaggactatggtgtgactggtggtagtgtgttgcatttggtgcttaagctctatgatcctttgcttgttactgtgattactacttgcggcaaggtctttcagtttcatgtggatcgtcgtagaaatgttgggtatttgaagaaacggatctctaaagagggtaaagggtttctgaggttgatgatcaagagatcttgtttaaaggagagaagcttgatgacaacagaatcattgatgggatttgtaaagatggaaactctgtaatccatttgctggttaagaaatcggtggaagaccggtgaaaagagaagaag

SEQ ID NO: 8000 - DNA, 564 bp, Arabidopsis thaliana columbia
ggtcataatcttcaccatagttaccatcactttgagctagattctctaccaaagacaaatcatcatcaatatcttagcccaagaagtttccattgcttgccgtgtccaacaacatgcgaaatttagggagaactcctttatacaaggtacttagtatagattctttagagaaaccatgatgagggcattgcattttgtatcccttgaacctttcccaagcttcacaaaaactttcattactcctttgagtgaagctagatatctcatttctcaaccttgccgttcttgttgtggagaagaactttgagaggaaggctcttttgcattggtcccaagaggtgatggagccttgaggtagattcttctcccaaatacgagctcgatctccaagagaaaacgggaagagtctaagtttgaatgcatcttccgagatcccattgattttcaccgtgctacacaacatatcaaattggtctagatgatccaaagggtcctccattgatagaccatgaaacttagagctttgaaccatgttgatgaggcttgatttaatctcaaagttgg

SEQ ID NO: 8001 - DNA, 757 bp, Arabidopsis thaliana
tgggttcgtttctgtttttcatgttggtgagttcgaattttgtggtggaggctcgtcctttgggtttaacgaaggctgaagagaacctcgtggctaagttcttcgatggtttgtcacttggggcgattaaggagtcgggtcctagctctggtggtgagggtcatcggttcgtggaccggactgagacgcttgaatatggtaagcattcaggtcccagcacgagtggacccggtcactaagttcccgaccgaaccagttaatgtggctgctttggtctagctccggaaattgattgctttgtttagttttttttcagattaattattcagatttttctttttatgcttagaacttgggaaaatcaagaattggaagaacctcatttgttctctgtaggaatattcttttgttaacttattgaaattcatttgataataatgtacaatgtaatatatattgtaattaatttattattctgattatgtgaatgaataactggatattcatgtttttaatgagtttcaataacaacatagttaagctccaaatccacaaagcaaaaagaagcgacttaactttaaccttcttctgagtgataatcacctaagcttacctctttaacagctacatccacttcaactttaaccaagaaatcgcgatttccgtggaaattgaagttaaccaattctttagatagtttctgaaggatgttgttccggatggagctgtggaaatttgcacactggcggccgttaca

SEQ ID NO: 8002 - DNA, 952 bp, Arabidopsis thaliana
acgggtttacgcatggtggcttcggcggccgcttgctcaatgaccttgctacttgcattttcactgccattgccaccgcaaatgctggatgatgcatggtgtttaggaactttgttagggtttctccagccgttggattcggtttccgggctttcttctcttacaagcactctctttccgttttgacgtgagctagatttctctagaagcgagggaggagatcccgaccgaaccgtcgtcctctcctcggacgacacttcgtcagaatgcggtcccaaatcgatgaactgtcttggaaccatttcaggcacttcatgtcggttctttacattgtcattgttctcggtcgtagcctgatgaaaaacaagggtataaaatctttaactaattatatgaaataaatgattaagacgtattagagtgttaattaattactaggtgatgatgatcttcttgttgcctcatgacagcaacaagttgcatctgcaaggaattgaagttgttggttgtttgacttagcatttgctttagtctttgattatcttcactcgccttctttagctcttcgcgaagttgtgcattcttcattttattaaaaaacaaaaaaatcatgtatcagacattaaatcattctagtaagaaagagtaaatctctctaacatgtccggatcttacggaccgatacgaacaacatataaaaatagaatgtctaagtctacgaaaacggtatatttttactaattcttaagaaataaaaaatttgtagagaaaatcagaaaatatctttttatgcttaattatgtgacaaaatgaagatgaacagtaaaaataatcaaaatttagcataaaaatatttttattttttttgtcatcagatattatttaaaattctgacgaatcagaaaagcggaaaattgtttacgtacgtaacagacgcacaaaaatatacact

SEQ ID NO: 8003 - DNA, 618 bp, Arabidopsis thaliana
ccaagaaatcaaagacgccatggctgctcttaaccaagaagtgatgcagattggtcagtctctatacaaccagcctggagctggaggtccaggtgcaggtccttccccgggaggcgaaggtgcttcatcaggagattcatcttcaagtaaaggaggagatggtgatgatgtgatcgatgctgacttcacagacagccaatgagaaaacaaactaggaaggctttggaattcatacatgggatgcgatgggagagacaaatgattttgtaggttggatttgagaacacaaatgaatttaagcaatgcttgtggacaacatttatttgtcgttagaaggaagcagtgtggttacagaggatgatgtttaatacataataatatgcaagccttctcttacacggtacttgcggatacacacaaaatgtacaaagtgggggcttttgaagcaatcctccgcaattatagtgactcaaaccttaaaatgcttttggtcattaactttgtactttttttggtaccaattatagcgactcaatcaatctgagactatccaacgcaattttagtaccaatgccaacgacgtatgctttatctacaaatcttatatgattttggaat

SEQ ID NO: 8004 - DNA, 1123 bp, Arabidopsis thaliana
ctagagacttccccacgaaggagaaagaaaaaacaaaaaaaagccgtaactaaaaaataatgtaataaaagaaaaacaaaacaaaatcgaccgataaaaagtccctaactaaaacttataaaaaaatgttattgcctattgtcaacgttgctcgttgtaacattactgttattgttgttcccattctgctgattgttcgaaccgttgataatcgaagttatggctgcagctagagccgcggcaaagttgggattggaggcgattgcggcagtagcggcgctaacactctcaccagcgtttagcggctgagacggcatatgtagacccgaaaacttagactgttggttgtagtacaaagcctgacccatcatatgaggcaaaaccgattggttcaactccaccaaaccagaccgttgagagaattgcatcagcgggttattggttggattgttcccgttgggtgactctgtgaggtctaatgtaatggttgggaatggtgcagaggctgagatagtagccatgcttgaggaacacggtaatatggttcgagccaagagatttgttgggttcattaaaccgtcttggttcgacatggtggagcctgagagaagcatgcttgcggctgctgttgtagttgaagccatgttcatagccgcaggaggtaatggatggttatggtttccttcgtaggttgttatgagaatggttctatcttccgcgcaacgttgcacctgttaggtcatcatgagtttgttacaatacattattttttttttctctaaattattacacttgattgatcaccttcaaacataattttagatgtgtgaattgtttaggtaacgtacttgcttgcgaacaggacatccaacagccattgtgcaacggtaataagctcgagggcacgggtttcctttcgccattttttgtccgtattttctccattgacatccatcgcttaactgtaaaacaatgtcattgatgttaatgaacctccaaaaacatttgtagagatcaatcttcatagaaattctagagaggaagattaattagtattaccatgggagcttcggatcgagcacgaaccgagacacgggtttacgcatggtggcttcggcggccg

SEQ ID NO: 8005 - DNA, 642 bp, Arabidopsis thaliana
ctcatggaccttgggccgtcgtctggagcagcagagcatggagccgaagtgtcatctgaagagaggacaacggttcgttcaggttctcctccttcgcttctagaaagttccaatccccgagagaacggaaagaggttgcttggaagagaagaaagctcagaggaatcagagtctaacgcctggggaaaccctaacaaagtccccaaacataatccatcctctagcaatagcaatggaaacagaaacggaaatgttattgatcagtcggccgcagaagccaccatgcggaaagcccgtgtctcagttcgtgcccgatctgaagctgccatggtaacctaaatccctctaatggtagctaggcataggcttatatttgatcataaattttaacggttatattttaatgttgttaacttgttctatagataagcgatggatgtcaatggagaaagtacggacaaaaaatggctaaaggaaacccgtgtccgcgggcttattatcgttgcacaatggccggtggatgtccagttcgcaagcaagtacgtatgcttttacattttacgtcggcatgattatataaaaatataattaagatctactatataatttgcgtttgaaacaaaggaagccgtaaccaatgag

SEQ ID NO: 8006 - DNA, 693 bp, Arabidopsis thaliana
ttttaatgtttttttgaaaactatactaatcaagaatccgtcatacaataccggtaattattctttacttttcattttattattgatactttaattacagttgataaaatgattttaaaaaatccaaaacaaaagttgataactgtgtatgactttttttctataataaagaatactctccatttgaaattgaatagagtgatacactactttcgtaatatgtatattttgtcttttaacattaatctaatagtcttcacaaaataaaaattataacaacgcatagaaaaaatgccgttttttttttttaactacagacggatcttccgaaaaaaaacaaatgtataacaaatgacgataaatactgtttacggtctgtcatgtaccagctcattagtcattacccccaacctgaccagaccatatgatcttcattttcacaagctcaacttaatttaatataatttgtttacctgtaattaacactatactataacgaccttgagtcttggtcgtcgtaattattataattattatctcccgaccacccgaagaaattgctgatcccatcggacgcggtcgttttatccttccgtcgccgccacagccatgagaaagcacatgcttagagaatctcctctagctcttcaagatctgcaaagaaatcatctggttggtgctgatgatcatgaa

SEQ ID NO: 8007 - DNA, 1087 bp, Arabidopsis thaliana
tttgttatagattggtttgaatcttcgaacaactggtaatacaaagagtgatgagtcaatgatcgatgatggagaatcttccgaaatggaagataagcgtgcgaaaaatgaggtaagtttagtttgattttacattagtaatatttaatagatgaataatttgaaccggtttgattaatatttcgattttcttttgtttatcacagttggtgaaattacaagatgagttgaagaaaatgacaatggataatcaaaagcttagagaattgcttacacaagttagcaacagttacacttcacttcagatgcatcttgtttcactaatgcagcaacagcaacaacagaacaataaggtaaataattattagattgatcaaccacaagtaaatggaatttaccctacatgaataggcaattaattttggtgaacctatatgattaggtaatagaagctgctgagaagcctgaggagacgatagtaccaaggcaatttattgatttaggccctacgagagcagtaggtgaggccgaggatgtgtcaaattcttcatccgaagatagaactcgttcggggggttcttctgcagccgagaggcgtagtaacgggaagagacttgggcgtgaagaaagccccgaaactgagtccaacaaaattcagaaggtgaattctactaccccgacgacatttgatcaaaccgctgaagctacgatgaggaaagcccgtgtctccgttcgtgcccgatcggaagctccgatggtaagttgatttattagatactaatacttataagactatataaaaaataaactatgtgctttagagattaattatctttgtactttatgtttctatagataagcgatggatgtcaatggagaaaatatggccagaagatggccaaagggaatccttgtccgcgggcatattaccgctgcacgatggccacgggctgtcccgttcgcaaacaagtaagatttaaaagatttaaccattggactaaaagattcttgttgtaaaaacattagagatttcaatgtatatatgtttgcgtgattggctaatacgttcggtccgaaatgatattta

SEQ ID NO: 8008 - DNA, 844 bp, Arabidopsis thaliana
gtcattcctttgataaccttttggcaaagaagttgtgttctactaaaatgaattcttatcaagtaccattctcttctggctccaggctggtgttcttgctggagatgtgagtgacattgtgcttcttgatgtgacaccgctttcgattggtttggagaccctaggtggtgttatgactaagattattccaaggaacaccacactgcctacttctaaatcagaagtcttttcaactgctgctgatggacagacaagtgttgagattaatgtgttgcagggtgagagggagtttgttagggataacaagtctcttggtagcttccgtctagatggtatcccccctgcaccacgtggagttccacaaatcgaagtcaaatttgacattgatgccaatggaattctatctgtcagtgctgttgacaagggcacaggaaagaagcaagacatcaccattactggcgcaagtacattgcccaaggatgaggtgcgttcactttaggaattaaaccgcattgcttcattaacaataacttgtttttgtcagtcccatctttgaggtttagtgattttctactgattatgaaagtggtagccataccataccataggttaactggtagcattctcgttgttgctatcacttaatggctgtagcaatctccatcatcataggagtggttatttttcgttagtattcataatcatggtaacaaaagttggtgtggatggatgttgcaggtagaccaaatggtccaggaggcagaaagatttgcaaaagatgacaaagagaagagagcacaatcgacacgaaaaactaagcagattcagtggtgtacagacagag

SEQ ID NO: 8009 - DNA, 2034 bp, Arabidopsis thaliana
aaggaagctgacaggaaaagaacccaatgtctcagtcaatcctgatgaagttgtagctttaggtgctgcagttcaggtgtgttcttgttgacctctaatcttcacacattgtagttgtaacagtaaattgacattctacttggatgagccgtatcactaaaatgctatttggcctctgattccaggccggtgttctatcaggagatgtgagtgacattgttcttcttgatgtgacgccgctatcgcttggtttggaaactcttggtggtgtcatgaccaagatcattccaagaaacaccacacttccaacttctaagtcagaagtcttctcaactgctgcagatggacagacaagcgttgagattaatgtgttacagggtgagagagagttcgtaagagataacaagtctattggtagcttccgtcttgatggtattccacctgcaccacgtggagttccacaaatcgaggtcaaattcgacattgatgccaatggaattctatctgtcagtgcttcggacaaaggtacaggaaagaagcaggacatcaccattactggtgctagtaccttaccaaaggatgaggtgtgtacagttatcaaacttggttcacttatgtcagatatgtaattttttttcttcttcatatcaatgattcatattggttgtatgatgttgcaggtagacacaatggtgcaagaagcagagaggtttgcaaaggaagacaaagaaaagagagatgcgattgacacaaagaaccaggctgactccgtcgtttaccagacagagaagcagcttaaagaacttggagagaaaattccaggtccagtgaaagaaaaggttgaggctaagctccaagagctgaaggagaagatagcaagcggatcaactcaagaaatcaaagacaccatggcagctcttaaccaagaagtgatgcagattggccagtctctgtacaaccaaccccaaccaggtggtgctgattctcctcctggaggtgaagcttcctcgtcgtctgacacatcatcctcagccaaaggtggagacaacggcggtgatgtgattgacgctgacttcacagacagcaattaatacgaattggattcatacaaggattatttatggggtttgtccatgattttgtaggaatgataatgtgatttgttggcagcaaatgaatggtaagagtcaaattttgtctttttaaacacatgattgaagcaatattctggagcacatattgtcgataaatgcagtgttgttacaaaacatgtacaataaaccaaacctcttgcagcctttcacagagaagtagagacgttctctgttagcatatcatgcaggcgcacattagatacctacaaagttgaactgtacaacaaacacataaccaaatatatacagatggttgcaatgtaatgcagcatagcatatcagaggcggagtccatggttcctaggactttgaggaacgctgcttgctcttccccagaacctgcggtcatcattgcacccgtacttgccattaccgccacctgagttatgtgtggttgtgtatgattggtcccaaccgatgcctctgggaatttctaacggtgttggtagtcgtggcctacacgttaagtagttagtaggaggctgcacgtatgcattgtggttgtggttgtggtagtggctgtgtggctgcagctggtgtgagatgttgggactgctatgcactctatgcattgggtaaagccggctcaattggtagttgttctgaaaactcgtttctggcggctcgtgactgtatccatcaggtgattctgatttgggagaggagcaagtagagacggtgaaggaaggtcgtgttttgatgggagcacgaagagcagtagcactcttggatgtgcgaagaatgccattgatggcttcaatgtagcgttgctctatggtttgtggctcgatggggcctaactgactctcaagaaccactgggtttgcaggaaacaagaaagttctgagcttgggtgtttcatgacggttatattcctcta

SEQ ID NO: 8010 - DNA, 543 bp, Arabidopsis thaliana columbia
atagttttgataaactgacaagcttatgtggaccactaggtttctgtttttatgttggtttctcaaatgagaaagattcccacgcactaaaaggtatatcacttgcgtaatatttttaggtgctgtttcgtgaattactacgtttattttgaaaaaatattgcgatattcattaactttttctgtttttttttttcttttgtgtaatcacaacaagtaattaagaatagagaattttcttctcttaattttctgaatatataaattttagtttttttaaaaattgtcataactttgatattccggtcataactcataatattagatttgaaatttcatttttcagaatgatagatggcacttttttcttaaagttcgtaattgtttaacactaataaggggtacggtgaaattttttgcatagagaaacaatacacacctgagataaccaatgtaaactagaagaagaatgcacaaagtgaaggctccggcgaggaaacaaacgtccgtagaacgaacctgggacggccgacacaaaacacga

SEQ ID NO: 8011 - DNA, 609 bp, Arabidopsis thaliana columbia
tattatctctagtagcagtacaagagaaagagcattagaaatggaacagttttttgctctgtttaccatttttctatcttttgctttccccgggagatgcagcgacgttttcagcagatctgatttccccgagggattcctcttcggagctggcacttctgcttatcaggtttggaatcaattcctaagctttttttttttttggaatttttgaaccaaatgtttgatctctgcaagtgggaaggagctgctgcggaagatggaaggaaacctagcgtgtgggacactctttgttactctcgtaagctttcattttaacataaactgttattagcatcagtatttgaacagatatatttagaaacagagattagttgttgcctttgaattatttatgcttctgatcaattttttcgtttctaacttttcaggtaacattggtaacggagatgtaacatgtgatgggtatcacaagtataaggttctttctcttttctgctttactctctccttgtgactactactacattatatagtttattcatcaagcctgacttcattgtgactttgtaggaagatgtgaagctgatggtagacactaacttagat

SEQ ID NO: 8012 - DNA, 552 bp, Arabidopsis thaliana columbia
cagaatcaaacccctgaagatgttcctgcgcttctctgttcaacctctttgcatattctctcgcattgtccacacccatcaccttcggatacgtcagctttccggtgatcaaatctttaccggcagttttcccaagctcctcggaagacttggtctcatcgagtacatcatccatcacctgaaacatcagtccaacgcacctcgcgtagctcttaagcctctcaatctcttcatcagacccacctcccattatagctcccacaacagccgcagcttcaaccaaaaccgcggttttatgaacatgcatcaactcaagatatctcaattcgtcgtcttcgttcttaaaactcatcctttctccggccaaatccgctgcttggcctgccacaagtcactctgtcccaacagctctcgccatctcctgaacagcccgaagaacctctctgaagtccccccaatgaggtcgatgccaatgtctgcttgacggccaaagacctgagcgcattagaggccagatggatgttttctcgcacaaactttatggttggtggg

SEQ ID NO: 8013 - DNA, 464 bp, Arabidopsis thaliana columbia
ttttctctacatatttaaacctgtaattacaaactatttttttttcttcatcaaccaacaatcccaccgaaaaataaagtggaatcgttgaagagtcttatctataaagactataccccatttccccccaatttcaacgtaatattttttccctgggatttatcttctaactaattcctaatttgatttaagaaacattaaaaaaaccaacaaaaagaaattaaataactaataagtaactaacatgctgcagaaggattagtgaaagggttatagaaacgaggctttgtgacgatggagaaatctcctttcgccgtttcttcatcaaccgccgtcgtatctcctccgacaccaccaccgccgagtctctcacaagaagggcacatagtcaaagtcgccgccggcatgtgcatgtaaaacggttgagacaattttaaagccttaaggtcttgaagctctttttg

SEQ ID NO: 8014 - DNA, 584 bp, Arabidopsis thaliana columbia
gtgtgtaattactcattgttcttaatcttagagtcgaggcatgaccaattgaaaggaggaatcgcatatggccctgttagtacgcccggggatatccatttgtatgcagcctcagtcatatgaattccgtccttattcacatacttcgaaggatcactacaatattcaactcctttactcccacattttatactaaaggtgaagttgtatggtcctcctaacccgcaacaagcgggcaaaggtctgtccatgagccctggtagcatatctagcttggttagtaactcaatgactaagcagcgtatatttaatgagggaacaaaaatgctaaccgaatttggatggttcttgcataaggcgcaacagagtattgtagtagtcaccatatatgatgttgacatgagggtaaagattcctaagtcttttgagttctgcttgaagctgctcgttgtggtatactgaaaagtcgttcagccatgtcaaacatcctgttagaggattgtattcttctttgtttggtgtttcgtataacgtcaaataggctacagagcatccaagtggaaaatttcgaggaactaggaatg

SEQ ID NO: 8015 - DNA, 618 bp, Arabidopsis thaliana columbia
tttccttgaggtgatataatgtaaaattggatagaagttaactcacatgtgatctagtagatatggtaccacaatgtcccacacacaaagctagctgaggtaaaaggacatcagaactgggtgaaggtcactggcgagttcttgacgtttcctggtggtggaacacagttcatccatggagctcttcattatatcgattttcttcagcaggtgaacactcatttcttgatttcagtatagtgttaaaactgcaacaagtaaaagatagaaattttatgcagaatataatggttccttttttctactatggcagtctttgaaaaacattgcgtggggtaaacgtactcgggtcatattggatgttggatgtggagtggcgagctttggcggtttcctctttgaaagagatgttatagcaatgtctcttgcaccaaaagatgaacacgaggctcaagtccagtttgctcttgaaagaaagattccagccatctcagcagttatgggctctaagcgactgccattcccgagcagagtgtttgatcttatccactgtgcacgttgtagagtccatggcataatgagggtggtatcttcttctggaacttaatcggatgctta

SEQ ID NO: 8016 - DNA, 459 bp, Arabidopsis thaliana columbia
gaatatattgtggaatggcagtagcaggaagattcatatgtgaagtagcaggaatagattacacaggaggttttaatgcttctttagatacaattatcgctggacttggttatgcttctccacctattatggctcttctcttcattcttgatgtaagttagtaggtgataatgaatgtctctttaaatggctatgaaggtttggggtttatgagaaagatttggttgtatattgtataggatgaagttgttaaattgtcgcctcatgctcgtgccattagagatgttgaagatgatgagcttcgaggtttctttcaaggaatgtcagcttggcaggtgaagaacctcaatacagaagcttattgattgaatctttgagacaaaatgttaaacctttgtcttgtgttgctttagtgtatcttaggagttactgcaagttcagttggagaagagctcttct

SEQ ID NO: 8017 - DNA, 510 bp, Arabidopsis thaliana columbia
caatgtgttattgttcttgatgcatacatgaaaagatgcaatttcattagatttaatatagcagtaaatcgaaaattcaatgttacaacaatggaaaaacaatttccttttcatggttcggatcaatctgttggtgtgatacagaaaatacaataagctattataggatttaattgaagaatcccatgaagaatcatcaagggtctagtatgagtgttacagattgtgtgttatggcatggtgctccaagtattctttgctgttcatttctgttaatctacacaataaacataaccgcttgatgagtaaccaatgaaactaatagattttagttgttaatcacagagtctgttattacattacctactgatggttctgtcttttgcgaaacctaattcgttatccacgcagagctcagtaacatcgttctttcttgatcttgatgatgttcttggacccatcgatttcgcctctgagattgttataatcttttccaaaagttcttgagga

SEQ ID NO: 8018 - DNA, 1235 bp, Arabidopsis thaliana
ttttcacgtcattagatcaatacacttggatttggggaggcaaaggcaagcagttctgtgctctgctccaacagtaacatgttctcttgaggcaatgtcacccatgcttcgattccttgtccgtctttagaatcgatcaacacggttacatagtctagattcggagaaacagatccagctacccaaaccggagatccccacccgaagcaagcatcataaagaggaatcttgcaccagctagttacagaatgcatgtcatgatcttcgcggttaaacttggaattaatgatttcaccaaacaatctccaacctatagtcattgatgacccttcctcatcttgaaccaaaccggataaatcctcggctcttttttgtagttccttaacagtttctacaatatccatcccggctttcccatccaagattaaggagttaaacaagaggttaccgatttggttttcagacaaaagggaaggtatcgtggtgcgcaagttagccggttggaacagagctttctcacgaattgtgtctgtcgatgcagtcacaacacatgtccatataagtgaagtcacgctctggacccgcgtgggtcgaggcacgacatcactagcgactttgttcctgagctcttcgattttagatgctacaaacacaaatctcttcgtgacacttgttctgttaactacttcccctggaattttaatggcttcatttgctgcggggtaaagttttgtggaacaaaagtcaggactggccaccaagtcgctctctcctctagctgtggctgcccaagcctgtaagaaaatcgagagagaggctgcatcggcgagcctatgggagatgcagagtcctatggccatgccaccacatcggaagtaggttgctttcacaagaagcaatggccatgtaggagcgggctcgtcatctacaggtagcaactgtttgagtgattcggtatccggggatctcagaaaaccagagagatcgcagttatcgacgcgtgcctccacaaagacggctccttcgtcggtactcttgatggtgacccattgactctaccggccaaagggtggaattttgtcaagatctcggacagggaagttttgagagtatgagacgtttgttcttgcgagatcaaatcatctttgggtgtagaaaagaaaggcaacggcgtaaaccggagcattagtatatcataatagagagttgaagagttgagagatcagttggagttg

SEQ ID NO: 8019 - DNA, 543 bp, Arabidopsis thaliana columbia
ctacttaacacatatatgcatgcacccttcttagaaaagtagcaaaacattgtgaatcatcggagagagtgggaaacatggagaaaaacaagagagctatcggatttttacttctggtcgtacttatcaatggagttatgatgacgagatcaaatgggtatgaaggagaagaagagtggggaggagcaggaggaggagagtggggaggagcagaaggaggaggagcatggggaggaggaggtggaggaggaggagcatggggaggagaaggagaaggaggaggagagtggggaggaggaggagaaggaggtggtggaggaagaagaggatggttcatgatgagagagtcgaggcaagtgatcaaatcagaaggtggagagatgagagttgtgttatcaccaagaggaaggatcattgagaagccaatgcacattgggtttctaacaatggaacctaagaccctctttgtccctcagtatctttactcaagccttctcatctttattcgtcaaggtatctctcgctctctctcaacatgtgtgt

SEQ ID NO: 8020 - DNA, 512 bp, Arabidopsis thaliana columbia
cacatggaccacctcgagcactttaagactcgtaattgattatatatccaggacctggattgcgacccaacaagaaccttctcttccatccatcaacaggactctgcgtcactaataatccatcagacaatataccaacacttcgattaggaccatgccctaaatccgacccatggacctttatcaccagtgaaggcattctttggatcaacaaaatgtgcgtcgaagctccaaatgttgttggacaaaaggtgaagctcggagttggtaccaagtgttctaagttgggacaaatctcagctacaaagatgcatttgtcgttcaagacaagtaatggtttgttgctatgtcttgacgtagacgaacgtgacaacagcgtcgtagctaaccgttgcaagtttttgaccatggatgcttcttgtgatccagcgagccaatggttcaaagttctttgaattctatgtctttattatggagaacatgtatttgacatttgtaacaagactccactg

SEQ ID NO: 8021 - DNA, 532 bp, Arabidopsis thaliana columbia
  unsure (1)..(532): unsure at all n locations
tacctccacaccaaatctttgacagttaaaagattaagcaacaatcaatgcgcatcaaaaaccatgcaatattgaccagaagaataattaaagatggttaccttggagattaagacattaatcccagcatgcttattgtcccaaccaaactcattaatggtatctccagccttaagaatgacctcgttcttcacaatgaattctctgtacgctcgtttcctcgaggctttgtgtagccatgccgctccccacagtaactcatcctgcaacaccaccatcagatcatgtcagtcaaaatcaacatttaccatccaacggctgatactaaaaataggtaataaagagtaactataatactttacctggtaaccgttgaaatcacagtaaaaaggacaaaccgcgtggtagagactgttactatacgcgccgcgatatctgttagcanacgcgaatacctgcgatcaacggtacaacatttttatttcagatccgtgaatttgatatatcttctctacgtcagtaaaaatattta

SEQ ID NO: 8022 - DNA, 507 bp, Arabidopsis thaliana columbia
gttagtgagagattggatttatcggggcttaaaaccaacaaggacctggttaacgttggtgagctttgcttcatagtcttcaacagtcaagccatcctctgttcctgagagtcggcctagttcagcttccaccataatgtttttggaacgggccaactctgttatggatttcgtgtaggataaattttctgtgaaggaaagatgagaaccatctaccatcactgaatctagtccctgcaagaaatcgatttggtatgaattttcaatataagaataagtaaaagatgacacagagattgcacataagtgatagagatctcaaacttactagctcaagagcttctaatagctcatgctttgtagttccatgatcaaagtgtacggatattggaacctgccacattgtgcgtattaatcagggggctcagagtcagacccatgtactgggtatttaggatcagctattaagttttgatttcaatgtctattccgaaaaaccacagatga

SEQ ID NO: 8023 - DNA, 634 bp, Arabidopsis thaliana columbia
gtgacaatttccctttgataatagccaatgccacgatttgcaaagagttgaatcgccttgaagaagagtttcatccaaaagacgtgatagaggaacaaatacagaacttagatcgtccaagatcaagagaagaagttctttgcttcttgaatgagcttggttggctatttcagaggaaatggacatccgatattcatggagaacccgacttttctcttcctcgcttcaaatttttgctcgtatgctctgttgaaagagattactgttctctcataagaaccgtcctggatatgatggtagagagaaatttgggaaaagacggtctgttgaacaaggagtccttagatatgctggctgatattcagctactgaatcgcgctatcaaaaggagaaacacaaaaatggctgaaactctgatccattattccgttaatccctctactagaaacttcatcttcttgcctagtatcgctggacctggcgatatacacctttgcatttggctgcttcacatctagttctgatgatatgattgatgcctgactaatgatcccaagaggtcaattctatatttagaaccacttcttgattatttttatttacattaaccaagtttcactttgttcagattgga

SEQ ID NO: 8024 - DNA, 1649 bp, Arabidopsis thaliana
atatatatttaataatgtatataaataaatagtgttgttaaagagtactaaatatctatgttatccatgtaggttagatatatatccaatatctttagactttagatacatagtgtaccattttttattttccgaaaattctatttggtgagataattttcaatttgtgataactaaaaatcattaaaaaaaaattaaaaaacaccaaagttaaataacttaataacaataaagagaaatgtatatagagatttgagtaaaaaccttttcccaaattttttgcttgtttcgctcctccagaaccttcattcattacattataaaatgaaaataattagtatcatccaaagcatttcatactttagatttaatcaagttgattttttctttctttgcattgagatcattccttcctaattattgtccactaaaatcaacatcaatttttcatgttcgagtttggttatttatttataacttgacaaattatcgttatttaattacttgaattaactatttatagtttttatgtattggtccaataataaattaactaaccttccgaatcatccgtactaccgccgccttggtctccaccgccgcctccactgtctggactggtattacttatcgagtacagctccaatccgttgatgaggggtggcaaaacggagtcatccgttgactgaaagactatctgggacgccgatgtggccactacatctctcaaaatgaattgagttgctttcccaaaaaccggtacgatgggacgcgaacccacttgagtgttgtccaagaaaacgttgaacgatcgtctctgggttcgacctagactttgaggctctgagaagtaaagaaccaagtatactggtactccggttaggggtagagtctggtctgagagtactaagccgactcctgataatgcctttgacataacaatctctggtggcttgttcgacgccccggtgatgtctattgatggggctgaggtcgttagatcggtcagtgtggagtcttgggatcctaacgctaaccataccctaccgtaggggtctaacgggtagctaaatatatatcaagaaaccaacaatatgaaaatatattaattacgcaataatatcacattgaaagaaagttgtcctttctaattgatacaattctataaatgcaaattgacgttatacaagcttttatatttgaattaataaatcttgtctagacgtataggttaaaactacatgcctaatgaaatattagcaatggattgcagataatttaaagctttaaagaaaattaaagtcaacgaaaagacatcatataaaacttttaatactatgattattagatgcatatattgattaaaaaattctagtaaaagctttgtgtatcagtataccttataagctctttggcaccgtatgcaattctgtcgtggagaatgagaccttcgttaggaccaagatcgtcgtacatgccagtgtccaaactataaacttcaatggacgatataaatgggttgtcggacggagacgtacgtaagagacagacgctgatattcttattctccggaacatatatcacctccgagaaatagaacgtttcttcatcatttagcaacgactcggtaattacaatagaggctcctc

SEQ ID NO: 8025 - DNA, 1131 bp, Arabidopsis thaliana
tgccttggacataacaatctctggcggcttgttagacgccccggtgatgtctatagatggggctgaggtcgatagatcggtcagtgcggtgttgtctccggacgctgacggagaccatagcctaccgaaaggatctaacggatagctaaaataagtttccaaaaaaccaagttaaccaacaatagaaaatttataattactaaacaaaattttgatatatgtacttgaaattatataaagagttaaatatatatatgaatcagtaaatgttatctatagcaaggatcgaaatcaaatgccaagaaaatcaatgtcaaggatgaaaaacatatgctattttatcaaaaaaaaagaaaacaatatggtaattgctaacgagaatgaaatttccctatttgaataccacgattatttgattcatatatggaaccccaaacattgcatgactaacttttttttttttttttgcatgactaactttgtgtgtaccttataagctttttggctccgtacgtaattctttgatagagaatgagaccttcttcaggaccaagatctttgtacatgccgtcatcgaagctgtaaacttcaatggaagatataaaagggttatcggacggagacgtacggagaaggcaaacgctgatattctcactcgccggagcaaaaatcacctcagagaaataaaatgtgtcctcgtcgtcgagtaacgactcagtaatatcaacagaatcacggtgtttcccgtcataaactatgtcgaaagatgtcgaaactatgtcaactttgtcatcgtagttctcgtagtagtacttcgtcctcacgagggttttcctgcattttgtcaccggaatgttggtgtagcagtttgtttgaccggttggaaagtaccggagagtattgatcggctttgtggtgacgtccgtaatattaatggactcgccggttgtgacgaagccattatctccgacccatgttacgttattggagtccacgtaggatcccgttgttccacagtcaatgcttatacctaacgataaaaaaaaaaaaaaatcagtaaattatatgaacaaagtttatggacaaagtcatcttttatcattcatgtgcaacgtaaaaatttatatacac

SEQ ID NO: 8026 - DNA, 835 bp, Arabidopsis thaliana
tatctctttgcaaataccttgtaacgaccttgtgtaggacttgatgagctagcctgacctgtttatataaaaaaggcataaaatgaatgagactctgtagctaacaaaaaatcttttcttcctctcagtggttgctacttacttgacccgtgaaaacaacaaggaggcgttgctccaactctgaaattagctgtggcgaggcgagtaaaggaacaacttgaagacgcatagggattcctggaaaacttgaagtgaatttgattcctggatataatccaccaatctgatcttgccagccacctcctgtacccatgagttgctccagaaccaagacaagtcttgcaatgttttcattgctttcatctccattagatatctggagaagtcctttcacaacagctgcagctagaatgctcgaggttcctagaccactgccacgaggaacattgggcccatgtctttattgctaaccctgtggagtcaacaaaattttcttggacaatgccggttaccaatagagcagatttaacaagcctgaatggatcattgacttcaaatggtgtcttaatgcttattggatcttcgatgtgtagctcgtttccagcgtcgtcttggattgagatcccatctgatttgttgtttcaatgattgtgccaattggaagtgaaccttctaaggttatagccatgttcaggacgtaacctgcacgctctaagctccatggaggtgtatcactccaacctcctacaaaatctacccgaactggtagttcaacttttgtccttcttggttgaaaaactcgatccggatgagaaatatgattctcagaatgaga

SEQ ID NO: 8027 - DNA, 506 bp, Arabidopsis thaliana columbia
caaccaaaaatatgtgacgatttagattttaaaaaacaactgatccatgagggcttcaaagatcacgaatagtggaaaacatattggccaaaaactcacaggtgggatgattctagacatgaagggaaagaagctgacgtaacccaagtgaggaaccaattttagctttggcttcccaaaagtcttccttacaagttgtcgagataattgaccattttcttgaattacctctttccatatcaacttaacctggggatcaattcaccgaacatttgggttaatgaaaagaccaagaatcatccgttcttcttcttctatatgacaaaaatttgacactcagacttgttgatttatgaagcttctctgactttgtctgtatgattgccaaagtcaaagtaagccccagagtcactatcatagtgcatctgctcagaaattatccatgaatgagaatagagaatggtgagaagaacaagaaaattaatgaagttaaagtgaagaaattg

SEQ ID NO: 8028 - DNA, 623 bp, Arabidopsis thaliana
gaaagagaaggcaagaaagaagaagaacacactctttttcatcacattgctcattgttctgtaaatacactgtctcagaatctgctgcaactaactacccgtagataacaaacatatacacatggaatgtttgtttaatctaaaagccttggttacagcttttccagacatctataatcattgcaacttttagaaaatcatctctttctctctctctccctctctctcaatagtgaatcaatcagacggttgatctgtattcaaaacttgatccaggttcttcagtggaagggaaagcctccaaaccggtaaccatggctgcaggaggaccacggcgacacctctgatgcatctcatcaacagcttcaggtggtcctgaaaagagtgcttccactgaaccatccctgcggttcctaacccatccctttatccccagctgctcagcgttctcaacagtccagtttctgtagcacactccctgtactcttccctttatcaccactctcacctgcaccaacatggcaacatcttcagtccatattctcagacaactatggtaccaagaagactgataataatctgattatcaaatggtgagttaaacttttgaatatttagtagat

SEQ ID NO: 8029 - DNA, 504 bp, Arabidopsis thaliana columbia
gattaatcaaaatatgtgcaaaaatagattcagtcagatggttgatctgtattaaaaacttgatcccggttcttcagtggaagggaaagcctctaaccatggctgcaggaggaccacggcggcacctctgatgcatctcatcaacagcttcaggtgatcctgaaaagagtgcttccattgaaccatccctgcggttcctgacccatccctataccccaagctgctcagcgttctcaacagtccagttcctgtaacacacttcttgtaatttttccctttattgccaccctcacctgcacccaactttgaatatttagtagacatctaaagccaatcagcatgttcatcacgcaaaggaacatttcgcttgaatagctgataaatggggataaagaagaacagaacgagcatgaagattccaacgaaacttagttgtagataaatatatcacatatgcagatgtacttcggttatagaattgcatctaactcaacctttttgatg

SEQ ID NO: 8030 - DNA, 588 bp, Arabidopsis thaliana columbia
tgctgaatgatccgtttccatttccatttaagttctgattagccatgcattgtagctgatcaaaatcacaaccacttaacccttggtcattgatcgaggcaccttcttggctattcactccaaacacattctgagggcaataaacttcatcatcacattgtacattacaaggattcatcatgtgcgagaaagaaggaatatttgcagccataggtttctgataaggaaaagatccaatctctccatctattcttcctctcaaatccacaagcaaacacttaagcctcgaaacctcagcttccaaggtagcctgattttgcaacctcttcaccagctgctgattcaccgccctaagccttgcaacctcatcctccaaagaagcagctttagccttcttcttctctctatactttctaaccgcttcccggtttcccaaaggtctcttttcacccttcttcccacaagactcagctgtatcatcagtagaaactttttcatcgctctcatccgggagaatcttggtgtggacatggaagcacgtgtgagtatgagtgtctctggtccagtggggtacaggtgtgagtgtgg

SEQ ID NO: 8031 - DNA, 537 bp, Arabidopsis thaliana columbia
  unsure (1)..(537): unsure at all n locations
nnnnnnnnnnnnnnnnnnnnctaaagctttagaatatctgcgacatcttcctcgggggcactattccctgttgagggggcgcatcgatatggccggccttccgcgtcaagggaacatcggcagcagtaagggtcaaatcgtatttgccagggaagatgaagctcattgggaaaccaggatcgaacggtacggccgcatcgatcttgtccatatcttctttggtcagctcgatctcaagagcttgcacgttggctttcaggtgctcgatcttcctctgcccgactatcgggaaaacgtatggtgtcttgtggagcagatatgcaagggcctgcgattgtcagttctcttcaggttaggatctagatactagttacacataccacagccgcgagagtggtatttctgctcttcgcgacttcatcaagggcatccgacacgcggatctcatcctccgtcatgtccccgtccgatcggcctccaccttttactccccgagctttggcagtcttgagctttcctgagcaagaggacccacgg

SEQ ID NO: 8032 - DNA, 1370 bp, Arabidopsis thaliana
cgattaaagtttggatcataattagaaaaacaccaaatgcaaataatatagtttgttttgtctaattgtcatcaaggcattattattgactctgaattgaaacttgatccaatatagccccaaagttccgttggactaaattcagagcaataaaaaggtcctctgaagaaaaaagttaaacattcgtgaaaagataagctccctgggcagaattctcaaagcctaaaagtgcaaaacaaaacaaccacagggatgctcaagagagaaagagacttgtacattctatcagttttttttagttcacacaccatttgggatatctcctcttgatctctagcctacattagcatcttcagttagggaagttaaaaacgacgacgaaacccaaccattcttcttcccatactccacgtagtcgttgaatttctcctttgcgtttgggatgtctaaagcaagatcttcaagtccgtctttgactcttgtgaaccctttggtcatctggtttgtggttatgagtccttcactgaaactctcctgcagaagatccagcatcatcttgtccttcttcttctccatacccatcaccagtgctttcttcaccacctcatggttgaagaaaggcatgcctagctcatggatgcatttgcatgcttctgataccagccctgagctttcgtattcctccaggagatttgatatcttgtcctttgcatcttccactgcccaaccgctcccacctccccagcatcttagaagcctctctcctgcatgtcgagcaaagatgagtgacctagccgttcttcacggtttcagttccgcttgagttagggcgtagtttgctactgatctcttccaggttaaaaggtgctaaaacatcatcgatcacagctctagctaagaacagagcaagttcgttggacgcatccagaatgtcaagagctgtatcttctgcagactccaggagcatgacgaaaccatctgcaacatcttctgtggtgaacatctcgatgtgaagagatgagagaagaacagatgccatttctttctcgtgattcttcctgtccaaagcaagtgttatcagcttctttagaaaaattgggttgtactcgggtgctcctaaatcctcaagactgcgtatgagttctggtatgtcatcagagttgaaatactcatgaatgatggtcacaatgtcttccttgaaccgctttagtttctcatcctcgttctgttgtcgtccacattcaccagagggataaccaaacgaagcatcaagccaaccacctgagacagcttttggcacaatcaaaccaaatttggttctagctgaaggaatgtcaagagcaagatcatcaaggctttctcttaatctt

SEQ ID NO: 8033 - DNA, 437 bp, Arabidopsis thaliana columbia
agttgaagttcaggagtctgctagaattcatgttgacatcgccaatgggaacaaagtttcaggaaatactgcggttggtggacttggtaatcgttatgcagatctgaaggatattcttgagacttggaggctgaggactccaaatgaatgggacaatatgacagtctggtacgatatgctacagtggaggaatgaaatgtataatgttgttattgatgcatttaaggactttgctacttcaaattctccacttcatcaccttggtttccgtgacaaagcatggaacgtcaataagcttgccaggatagctaggaaacaagggctttatgatgtttgtattcagattcttgaaaaaatgtatggacactcaacaatggaagtacaggtacatttcatcaaaatctttaattgcagcgctctacacaagagctgtatat

SEQ ID NO: 8034 - DNA, 542 bp, Arabidopsis thaliana columbia
cctctgtttttatttataggttctgcgtatattaccagagttaaatctttgttccttttaccttcttgctccttgtcatttgtcagagaggagaggtaacaaagaccgagtatggaagaactcagggggtgtaaatcattttgttggttccaaatctttttttaagaccccccctgacgttctaccaatcacccgggacgcagagggggcaatgatcgtgtacggtgggggagcatccgaggacggtgaaggtggaggggtggttctgaagaaagggccatggacggtggccgaggacgagacactggcggcttacgtacgggaatacggtgaagggaactggaattctgttcagaagaagacatggctggctaggtgtggcaagagctgccgcctccgctgggctaaccacttacgacctaatctcaggaaaggctccttcacccccgaggaagaacgtctcatcatacaactccactctcagctaggcaacaaatgggctcgcatggctgctcaggttaatgatcaacctacacttatat

SEQ ID NO: 8035 - DNA, 481 bp, Arabidopsis thaliana columbia
tccctagatctatgctcctggctcctgctacagttttaggcagtgaggaaaagtataatcacatcctttggaaaactgtccccgttaaaagatggttcactatgatgagaactagccaatcaaccatcatcattttattcctccttttgagttccataaccaaatataaatcaaaattagataaacaaaagaaaataagtgtatacctcaccagcagcatcaggctgcaaaagcactggaactggcaaaccaagggtaggagtaataactccagctctttcccgcgccttatgatccaagacctctagtttaaatataacgatctcaagcctgtatcaagtaattaagcatgattacgggtagcaggtttttgttttgaaacaagagataagttgagcactatctcaactcaatgttaggggaatatcggatataagtatagaacaattcttctttcagttccacttgatcacatagtttt

SEQ ID NO: 8036 - DNA, 540 bp, Arabidopsis thaliana columbia
ctttacgcctgaaagataataagctctaagaatacatatcttcccaaaaagaaaattaacgacacaaagatagacaatgttaagaactgagaacagaagaactggccataactcaagattatgcatattgagttacctgtactcataggactccatcgctggagtctgaagggagacgggatgttaagaacagacgaagctgaggtgctattgtgtctaaaaagtgggagatatgactttctaaagaatcttggcaaacaattgctgacacgtgatagtgcacagagaagcagaagcagtgacaagatcaagatagatataagggcagttgggtttatcttcatgctcagagtctcatagctcttcagtcccaatgtagaagatagagccttccccgattccagaagagctactccaagtgtccaagttatactcccagagccaattatgatttgcttagctgtaatatatggaccttctcgtaacagggagactatgtatggcgctctagagcagtactgttcaatgaagggttgtgga

SEQ ID NO: 8037 - DNA, 591 bp, Arabidopsis thaliana columbia
  unsure (1)..(591): unsure at all n locations
nnnnnnnnnnnnnnnnnnnnnnctaaagtggttcagcaaagtaacgcctacccggcgcaacttagccatcgcctgacggaatgtttcatctacctcattggcatggttgatgtgattcaccagcaagatttgcagcgtagaacgggcaaagcattcaaccagcgcctcggtgatacgtgccgggatcacaatcggcagacggctgtgaatccgcagacgttttatatgcgggatggcttccagttgtgtgagcaaccagtccagctcgtgatctttcgccatcagcggatcgccgccggagaaaatcatctcgtccagttccggatgcgcacgaacatactcaagtgcagtttgccagttacgcttgttgccctgattttcggcataggggaagtgacgacggaagcaatagcggcaatttaccgcgcacgcgcctttgaccagcaaaatgcgcccggttgtggtatttatgcaacaaaccagacactacgctgtgctgttcttccagtgggtcggtggagaatccgggcgcgatgacaaactcatcttgcgaggtaagtacctgacgcaaaagaggatcgtccggattgc

SEQ ID NO: 8038 - DNA, 614 bp, Arabidopsis thaliana columbia
tttgtaagttaagaaaatcacaaaaaatatcttcacgtggtttaaaataaaataaagaaccttcccctgcaaataagcggaagagaagaacaatgcaatccaatgcagatgcaattatcgtggagcaaatatcaaaggaaatgaaggcataagaagagtatataggttttagcagctaatatattgactaagtgaaactagtataacctacatcacctattatctgaataatagagtatgacgtatactagatagacctaaagctaatgacaactaaataatgtaatcacaacacaatatcaaattcatgtataaaaatagacacagcagaagcctgtcataatctataaacaaacacaacaatcaaacatacctcgccactgatgatttcattaactaattgtttagcatgttcaatctgttcggttatcccatcaatctgcaaagtccgttctggcgttgggtctccagggggcaaatgtaaaggaataacctgcagacaaataaccacggggatgaataaacattttaccagctggagacaaacagaacctaaacataattgacaagaacacatacgtgaattctagctccagtcttagcttgcatagatt

SEQ ID NO: 8039 - DNA, 431 bp, Arabidopsis thaliana columbia
cacttgaaaccttttattttcccattcgcttaaactttgattgagcaaagttttggatatgtcacatatgtggattttagctccaaaaccaggtaactcttctactatggcataactaaaacattccattaatatgaattccatgtaatcttgaccattcaggttgttatatcgaagcagaacataaacttaagagaatagagaagaactacgaacccgattccgctggctgcaccggtcacaagagcagtcataccttgaagactccataatcttttgtccatttttctagtgaccatataccagaaatgccacaaactatatataccatgaatatggatcagataagtgtggagtatgtttttgtatgtgtggtggaaatattatgtagccgtaagagagaacattacacaaatatctaagttagtggc

SEQ ID NO: 8040 - DNA, 568 bp, Arabidopsis thaliana columbia
ctggtttatttatttgctggaattggattcataattgaaactgtgataagagtaatccagtcttctttacttgctcggtagaggtctaatttatgattgggggttgtttgttgattaaaactagtgaaatctcctagctcactttttcttgatgagattataccgttgatggttagttacatataatgaatgaattctcagctattaacctattaaaattttatttcactgaaacagtgagactgtgaagtttggccatgtaaccttcttctggaatggcaaccgctctggatatttcaatgaaaagttagaagagtacgttgagattccaagtgatagtggaatatcattcaatgtccagccaaagatgaaagcactggaaattgccgagaaagcaagggatgctatccttagtggcaagtttgaccaggtaaggtgtattctcttatcacattgtatcacccattaaaacaattggcttctgagtttggtgcaatggatttcaggtgcgtgtaacctgccaaatggagatatggtggggcatactggtgatattgaagcactgttg

SEQ ID NO: 8041 - DNA, 625 bp, Arabidopsis thaliana columbia
tttcttgtgtttcttttgttcttacaactagagcatcagaggtatgttcgacgtttacctactaaccccgccacagcctatcaatggaatctttccctaaggaagagaacatgaaaatatccaaaaacccatcagaaaatgttttagttcattggtcgattagtggatcatccttttttttaggataagaacttactcgtgtcaaagtgtacatatctctcaacatgttggtggagagagcaaagagcggtttcccgctcaaaccacctgtttctgttgccacggggttgttgcttacagcatcaggccttgagactgttgtatttgatatgatctataggaccaacaaagacagtatcatcatcatcatcgaaagcttttatgatttgcaacataccatacgtacaatcgaaaaaagagactattctaacactttaatcgcttttactacactacgttaaacagactggaggcttcattgattgacactgatgtaacataagttagttcataagaggataacttaccagcccatccaagtgcagacaagagccacctacacaaaccaatacaatgttgtaagaccaattacttgaaactatagaatgtgtttagcttttttagt

SEQ ID NO: 8042 - DNA, 579 bp, Arabidopsis thaliana columbia
  unsure (1)..(579): unsure at all n locations
gtgcatgagaattactccaccaatattccatcatggcacttgtcagctttttaatagcgctcttaggaagtttaaaacatgacatggcatacattggtaaagccgtagctatcgacttcaataaaacttcctaagagaaacattcttagcataccatccaaacaactttgactataatctttcttgtataaaccctaaaagttgttgttttgatctactaagacattcaggtaaccctaaatattttcctctaccaccctctaaatcaatgcatgtctgaattttaattcagttcttgatgtcatctgctactttagaaccaaaactaatagcatattttctcttattaatctgttggccagacatctgttcatatttatcaaggcaaagaagaacctcatcacattgagtgattgacgcttgacagatgaacaaactatcatcagcaaagagtagatgattgatagctggtccagagggatgatgttgaataccaaaaattgtacctttctcgtgagcttgattanaaagatgaatcacagcttcagtggacagaacaaaaagaaaaggagatatagg

SEQ ID NO: 8043 - DNA, 584 bp, Arabidopsis thaliana columbia
tttacatcatttctaaattcctcgcaggccctcgggatgagactcttgagaaagattgagagacctgagtacaaggtgaagtaatcagtgatgcaatgtagacatataatttagttttttagagctacgctgggacttatttatgtttttatttgttgttggatgaaacagtacaccataggcatgatggggtatgctgaagaatacgagtcgatagttttggagctgacctataactacgacgtgactgagtacacaaagggcaatgcatatgcacaggtctgggattagacatgtctcagttgctttctgttagctttaaaccagtttctgtgttcattcctctgataatcaaatggttaaatataacaaacagattgcaataggcacagatgatgtgtacaaaagcggtgaagttattaagatagtcaaccaagagctaggaggaaagatcactagagaagccggacctcttcctggactcggcaccaagattgtctcattccttgatccagatggctggaaaacggttagtaatcgatacagatctaatgatttggtatccgttctagtgttgggatttg

SEQ ID NO: 8044 - DNA, 615 bp, Arabidopsis thaliana columbia
ctccaaactgagcttcccatagtaccaacgagttcgggctttccatggagtaacccaattcgaacccaaggacaccaaattctgaaagagaactgtacacaacaagcaaagcttagtagggaatctttacaatgagaattctggtatgcaagtaacaaactcgcgggatttctctcaaaatgtaagatcgcgttttggagaaatgaaaaagaatatagttgagcaatagagagtcgatctctatgtcagtttactgtgagctgtgaaaacaagctaggagcacaataattcctagaggggaaggatggaggtaaaagtacctgttgctaacagtaaacatctcaggatcctgattcatgatgagatgatctagaggacaatactcttctccagtttcctggtcatgaaggacagaatgacgatgactaaatgttcctcgttcgacatcctgaccactcaatcggacatgattgccttccacaactaaggtagcaaaagcaagagcttctgcaagggcccagtcaactccctctcctgattcaatcatttgggcacgttgttcataaactttcttcactgcccatgtgtggcttgaagttttctggaagagatgaa

SEQ ID NO: 8045 - DNA, 446 bp, Arabidopsis thaliana columbia
gtcgactcagaagaacccttctcttccgtggccgttgtaacaaggtccaatggaatcataccccttcgaatgcacaaagaagaacagatcggggaattatttcccctccaagttgctcttttgtaataagagtcaattctggcagcgaaaagatcctcacacttatatctgtccacatcccaaccgcaactagctgactgtaattaggattgtcaccgatagggtttatatcaagacaggaaacctcgtactccaaaagggcatgttgcacttccgtcaatttcccatctccaatttctagataaaccagatgcccacctccagtcgccaaaagaacctaacaagcacattaaagagtcactctacaaatgtttattctaaagcgtgttgtatgtctagacactccaaagttagattctcttccatgaaaaactataagatagcag

SEQ ID NO: 8046 - DNA, 627 bp, Arabidopsis thaliana columbia
  unsure (1)..(627): unsure at all n locations
nnnnnnnnnnnnnnnnnnnnnnctaaagggcttcaactgcacgctcccttcgctacgcgctggcaatcctgaccacttcgttggtgacaccttccgtctgggcacatgcgcatttaacgcatcagtatcctgcggcaaacgcgcaagtgacagctgcaccgcaggcaatcactttaaacttctcggaaggtgttgaaacaggattcagtggtgcaaaaatcacggggccaaaaaacgaaaatattaaaacattaccggcgaacggaaatgagcaggaccaaaagcaactgattgttccactggccgattcgctgaatgtgcggaacctacaccgttgactggcatgttgtttcggtggacgggcataaaacgaaaggacactacacctttagcgtgaaataaatcatgctggcgtttacctggatcgcgctgcgatttatccatttcacctcgctgatgctggtttttggcttcgcaatgtacggtgcctggctggccccttgacgattcgtcgcttgctggcgaacgttttctgcgtttaaacagcacgctgccgtctggagtttgatcagtgcactgcaatgctcgccagttcaggcgggttgatgggacgggatggacagatgt

SEQ ID NO: 8047 - DNA, 597 bp, Arabidopsis thaliana columbia
  unsure (1)..(597): unsure at all n locations
gaaatgtccacttcccatgcttgggctcttctctttcactgaactgtacacttctcctccccaaaacacggcactcgctccatcagctaaaccttgacgtgtgaacaatgattttggccagtatccaattggcttgttatttagcacaaaccaccaatctcttgtaacatgatcctgcttaaatcaaaagttgttaacataatcttgacttttcgatattagtttgaagaaagctaatgttgtatatttatatatatacctgatatatgctgacttctagttgatattgttgaccatcataaatggaaactggttgggcgagcattccaattgcatacttggtgctcacgtgtacaaacccaggacgtagtgtattgtagcaatgagtcttattatttccatccgcctatttaaatcaaagatagtagccataatatgaatgccacatttaagagtcaagactttaagaagttttgaaaaacttacagtccagtaagtgaacaagtgactttgattattctgatttagcctggataccctaaaaacatattttggaatgttagtccaaatttttgatttagaaaataagtanaaata

SEQ ID NO: 8048 - DNA, 545 bp, Arabidopsis thaliana columbia
catcatttccatcagaggttgctgacccttgagaagacagagacttgcttccacgcttatccttcaaagactttcttgctacatcaatattactcttaacaactggcaaaccagctgcatagctcgatttcccttcctcttttattctattcttcgtggaggatggcgttgaggtggtccgtgccacatccctcttcctttctaacagctcttttgcactttttaattttgcctcagcttttagcatagcttctctcacagcagctgaattagcatcaacctctacatcaaagaacgttggagaactactactatctacagatccttgtgatccagtggttttagaattagaagccgaacttctaaaatcactcttcaatataggagctgctctcgatggaggtggtattcagtaggatgagtcttcaaaccaatctcagaaacagtaacaaaaggttcactactgtaatacttgtcttcaaagacaaatctacttgtacctctaccaacagaagatggcccagtcaccttgttaagctttgttg

SEQ ID NO: 8049 - DNA, 584 bp, Arabidopsis thaliana columbia
ttcattccttcaaaacactaaagaaatttactcgacctctgaggaaaataaacacttcgccgcctctcaagttcaccatctccaagactcgatttcaacaagattactcgactgctgcggaagagaagtatttcaccgtcgcaatcgagtacgccgactcgtccttggtcgagtagcaccagttttaaccccatcgaaagcacattcatcccctctggaatctaagtaacttcgaagagtcactcgacagccgctacgccgccgcaatcgagttcaccatcttattcaccatcgagtagaatcagtttggccgtcgaaacctcaagaacactagaccagattcaagattccaaacgataattccggttgactgagagtttactcgatcgctggtgctctcatttagcagatccactcgacatcaccagttttactcgaccaccactctatgcaacttgattccaatcatgaaagaagagcttgtgaacacgtcagcttactcgagtactgggttaactcgaccagtttagtcctttttgttaattcttgagaacaattccggtttcatagtttcttttgagact

SEQ ID NO: 8050 - DNA, 1062 bp, Arabidopsis thaliana
gggtaccgagctcgtagactgtctcatctagcgaaataaataataagatgtaaaaccttaagtgagacatagcatgagtgtgtgcttttgaaattgcaggaaagcttgtaaccgttcatgggactgttgttaaagttagtactgtgaaaccccttgtcacacagatggcttttgactgtggaaagtgcaaaactggcataacccgggaatttactgatggaaagttttctcctccactaaaatgtgattcccatggatgcaagtccaaaacgtttactccaatccggtcctctgctcagacaattgattttcagaaaatcaggtgttctcctatttgcgtctcatcattttgtgtacttcatccttgttagttatgtatctgaccattgttaaccagctgtccaaatgcattttagggtacaggaattgcaaaagcctgaagaccacgaagaaggacgggtacccagaactgtagaatgtgagctgatggaagaccttgtggacatatgtatccctggtgatgtggtgacagttacagggattataggagtaattaataattacatggacattgggggaggtattgattttataacttttcatggagttctctccatccttgttgtgtccataatttgcaaacattaacatgcccaaacgcctgctatccttacccgtagaatagctggaaatttgtctcttaaagttctcttccatggtttttgggaatctcattgcaggaaagtaaaatagagcactgctaagttgtttgttttactcatattgacattttaccaaagatcaaggagctagaagcctcattactggtattaagccatactcaagcttaacaaacatttaaaatgctcctgtttcagggaaatcgaagacctagaatcaaggattttactatttgtttatagaggcagtttcagtgaaaaacaccaagcggcagtctgcatttgagaactcagaagactctagtagcagtgaagcagactgcagatgttggtgacttatattcattctctcagagagacttggaatttattgtgaagttca

SEQ ID NO: 8051 - DNA, 772 bp, Arabidopsis thaliana
tcaaagattcacctttcacaggtctccacgttttgtcctttggattataaacgactattggatgtccaagagtacactgaggatcaatcgtatacaacatatcatctatcacacattgcatagtacatggcactttccacagattccatattggatttgcattgacggttgcgtcccattcaccgtttctttttggttcgtaaatcaagcaacgtgagcccaaaatgtataacttgtcttccatcaccgcatgtgcaaaaaactgggaatccatactagttttagggtacggaccaggcaaagattcccaaatctgtttctttagatcaaacacttcaatccattcagcatccggttttctcatcctgaaacctccgattacgtaaatctttccgtcgaatactccggcggctgcatggtaacgaccccttttcattttcggaagcgagcgacatttgtgagttctgcagtcgatgagagtcatcaactgtaaacgtcttacatcgaggagtccaccgattacatacatctcttgaccgattgtgacgacagaacatccataaggcacaggtggaagtgattcgagtttgctcaaacgtaaagaagaaaccttgtttcgatggagaatgtaccagtttgggggatttgtgtcagggaatcggatggcggcgtaaagaaaggtttcggaaagaccgaggcgcgaaccggtttcgtagagttctgacgaagcgatgagattgaaaaagtaccttgagacggaagatagactagg

SEQ ID NO: 8052 - DNA, 511 bp, Arabidopsis thaliana columbia
agacttgagagactgaacaaccaaagagagtttctgataatcattggaccaacgcgtgctcttcacataagccaagtgctatcaacatgatccaagaaggtatgacaagaataatgttgatcatccattccttcaatatcaaatcttctgaggttagttgtggctttatcgtaatacaagacaaagagtggttccccgaaccaattgggtggtgcgaaaacaagttcttttgttccagtggtacctttgaaataagcattataattatcaacagattctgtccattgaggaatcttaatgatgtccttgtcgcactttctatcaacctcgttcctaacccatatttcaataactccattgaatttaaatttagagtcaaaggtgttcactaaggcaactttccctttgtagttcaccaatctccagtgataatcaatgtcgacttcctcaggcaatttaatgacagcaaacgcttcagaactcacgttgaacctcattaccataggtttgt

SEQ ID NO: 8053 - DNA, 421 bp, Arabidopsis thaliana columbia
aaatctctttattgtgtaaatcttatcttcaggaatagatccaagcaaatgggactctgtttttgagagctttgagcaagctgatccttctaccactcggacgtaagtgatcatgattaactgcacgcagtgaatgtttaagcaaaactttgccgttagttgaatcttatatctcactagtcttatttttcttcaggcacggaggaactggacttggactatgtattgtgcgaaacttggtgcgtcaagttttggaactttagaatagaattgttttatagaagcaattatatgatctgaaacctacattgtaactttacaagttaacaaaatgggtggagcaatcaaagtagtgcagtagaatggcttagggactcttatgtgactgtacttgattttgagtactcctgacactgtagat

SEQ ID NO: 8054 - DNA, 548 bp, Arabidopsis thaliana columbia
  unsure (1)..(548): unsure at all n locations
nnnnnnnnnnnnnnnnnnnnnnnctaaagattcagatcccgcgcattgccgtgcgcgatagctgcgtgccgggcggcttattgaagtattacctggctaccgtgccgagccgctctccctttcgctggtttatccgcagcgtcgggagctttcccggcgtgtaaacctgtttatgcagtggctggctggcgtaatgaaagagtacctggactgaccgactatactttttaagaatgaccacgacagaaggacaaaagagcggatgacgcaggaaaacgagatcaaacgtcccatccaggatctggagcacgagccgattaagccgttggataatagcgagaaaggcagcaaagttagccaggcgctggaaaccgtcaccaccactgccgaaaaagtccaacgccaaccggttatctgcgcactgattcgcgcgacagaacgctttaacgatcggctgggtaacagtttggtgcggctatcacctatttctcatttttgtcgatgatacaattttgatggtgtcgtttgccgcaggggctttgtgctgg

SEQ ID NO: 8055 - DNA, 993 bp, Arabidopsis thaliana
gcagtgtgtattagacaattagtggacttatagaggctaatttaagtaaccaaatttgggctttaataaggatccatactcttcggcttgaaagcccacattgtaaagttaaaacactatatcaggctctgttttcattatggctataaatacacgagtttttccagaaaccaaatcaggctctgttttcattatttctcgctgctgacttcacagacgacgatggctaatatctctgaaatttccggcgactctaatgacggcggagatccaaacaagaaaccagaagaacaagttttgagaagaagtagaagaatcgcgacaagaaacgagaatcaaaacaagaagcccaaggaggaagaagaaaaagataatcgctcggtatcttttccaattccaaacgagctcacggaagcttgcgtcgcactcatccggaaatgtgattaccctagtctatcttccgtctcaagttactttttcaatctcatcgcttcgtcagaactctacgaaaccggttcgcgcctcggtctttccgaaacctttctttacgccgccatcaaattccctgacacaaatcccgcaaactggtacattctccatcgaaacaaggtttcttctttacgtctgacggaagtcggttcacttccacctgtgccgtggggatgttctgtcgtcacagtcggtcaagagatgtatgtaattggtggactcctagacataagacgtttacagttgatgactctcatcgattgcagaactcacaaatgtcgctcgcttccgagtatgaaaagaggtcgttacaaagcagccgccggagttgtcgacggaaagatttacgtaatcggaggtttcaggatgagaaaaccggatgctgaatggattgaagtgtttgatctaaagacacagatttgggaatctttgcctggtccgtaccctagaactagtgcgggttcccagttttctgcacatgcggtgatggaagacaagttatac

SEQ ID NO: 8056 - DNA, 851 bp, Arabidopsis thaliana
ctgctctgtcttccattggaataggaagatccgacgttgtctctgtcctatctgctaatactccggaaatgtacgagctccagttttccgttccgatgtctggcgcgatccttaacaacatcaatacccgcctcgacgcgcgaaccgtctctgttcttctccgccattgcgagtctaagctgctcttcgtcgacttcttttactccgatctcgctgtcgaagcgatcacgatgttgctcaatccgccgattctcgtcctaatcgccaatgaggaggaggaagaaggaggagctgaagtaacggagcgttcaaaattctgttacttgtacagtgatctaatcactagagggaatccggattttaaatggatccgacccggaagtgaatgggacccgattgtggtcaattacacatcaggtacgacgtcgtctcctaaaggagtggttcattgccacaggggtatattcgtcatgacgcttgattccctaaccgattgggccgtaccgaaaaccccggtttacttatggaccttaccgatatttcacgccaacggttggacctatccatggggaatcgccgccgtcggaggaactaacgtctgtgtgcgtaaactccacgcgccgtcaatataccatctaatccgtgatcacggcgtgactcacatgtacggcgcaccaatagtgcttcagattctatcggcgagtcaagaatctgatcagcctcttaagagtccggtcaatttcttaaccgccggttcttctccgccagctacggtgcttctccgcgccgagtctctaggcacatctgactctgatctggatgtctccaagcttaaccgagccaataggtat

SEQ ID NO: 8057 - DNA, 355 bp, Arabidopsis thaliana columbia
gaagaacgtgaagctgcaaagaaagccgctgaagaagctcctcctgttatcaaagaaacacaaattttagttgaagataccaagaagattgaattgatgacggaggaactggagagtgtaaaggtacttgctgtcagtggctatcaacctgcaaatcagttccatctaaatttgagatttacattcattgttacatattagtctactaggcatcagtaatcatttgtgttttaacaggttactctagagaacgaaaaacaaagggctgatgatgcagtgaggaaattcgaagaagctcaagagtctctcgaagacgaacagacaaaactggaagagacagagaagaaaggtcagc

SEQ ID NO: 8058 - DNA, 1299 bp, Arabidopsis thaliana
tatgaccaaagactatagcgctacgtagtcaaacaagtttgtttatttacatctaacatgccaattggcttgagatctgtaatatttgtcaaccttatctccattgtcatcaccaaggtgtcctagataatcacgaaactcttttttcttttctcttatagataagtgtttttcaatttataaggagcagacattagaaaacaatacatttgaccactcaagatggagcaaatgaagccatgcgccgcaaactcgccgccgttgacgccgataggtttcttagagagagccgccaccgtttacggtgactgtacctccatcgtttatggcagcaacaccgtttacacgtggcgtgaaacaaacctccgttgtctccgcgtggcgtcttctctgtcttcaatcggaatcggcaggtctgacgtagtctctgttctctctcccaatactccggctatgtacgagctccagtttgctgttcccatgtccggcgcaatcctcaacaacatcaacacacgcctcgacgcacgcaccgtctctgttcttctccgtcactgtgaatctaagcttcttttcgtcgacgtcttctccgttgatctcgccgttgaagcggtctcgatgatgacgactgatccgccgattctcgtcgtcatcgccgataaagaagaggaaggaggagttgctgacgtggctgatctttcaaaattcagttacacttacgatgatcttatcgaaagaggtgatccgggttttaaatggatccgacccgaaagcgaatgggatccggttgtgcttaattacacttccggtacgacttcagctcctaaaggagtggtacactgccacagaggaattttcgtaatgtcagttgattcactaattgattgggccgtaccgaaaaatccggtttacttatggactctaccgatatatcactctaacggttggaccaatccatggggaatcgccgccgtcggaggaactaacgtctgtttgcgtaaatttgacgcgccgttaatctaccgtctgatccgtgatcacggcgtcacacacatgtgtggagctccggtggtgctcaacatgttatccgcgactcaggaatctcagcctcttaaccatcccgtcaacatcttaaccgccggttctccgcctccagctaccgtcctcctccgagccgaatcaattggtttcgttatcagtcacggttacggattaacggaaaccgccggtgtaatcgtctcgtgcgcgtggaagccaaaatggaatcatttaccggcaagcgatcgagcgagattgaaggca

SEQ ID NO: 8059 - DNA, 908 bp, Arabidopsis thaliana
tattataacacgtagacatgttgtcatcttatataagtcttaagcctgatattattatcgaacatattcatcatgtgacattcttctgaatcttcaaatatatacggctcgattaaccatgcataattttcagtcaactacaagtctacaacacttgtaaatcttcttaattcgttgctctcgtcttgttttgttaacaattgacaccgagcacactactactctggtagtctggttaattaagtatacctttttaaaaaaaaaaaatcggagtcattttcctgctccagaaattagatagatacaaaattagtaagagatgcaaaacttaaccacattatttcaaaaactgaattactaatttaccataacacagtttctatgtgatgtatacatattcatttacttatttccatttgtattatgaaccaaaaaaaacgaaacccgctcggtttaacatccattagacgcgaaggcgcatgttctcatcgtcgtcatcaacggcatcggcggctccagctgcaagatcaagtagtttctccatctgcactgtcatttccttgagcgtggttgaagccttgtcagtgtttttcccaaccaattcattcacgcgcctcatgctgtcactggaagccctgacgtcgtagttagccgtgtcgggggatgccttgagcttcacatttgcactcttgagatcagctgccacggccaagtaggccttgtggcactctgtaaatgcaaccttcaccgttggatctttcttcgcagtctcatctacgaaaatcgctgtcttctccgcgtgggatatggccaagttgatcacagcctccgacaatggaagctgtataagatttcattttttagcataaactacgataatgacatttcctagacggaagctcttacgg

SEQ ID NO: 8060 - DNA, 1194 bp, Arabidopsis thaliana
tctaccgatatttcacgctaacggtggagctatccatgggaatcgccgccgtcggagaactaacgtctgtttgcgtaaattcgacgcgccgttaatctaccgtttgatccgtgatcacggcgtcacacacatgtgtggagctccggtagtgctcaacatgttgtcggcgactaacgaatttcagccgttaaatcgtcctgtcaacatcttaaccgccggtcgtccgcctccagcagccgtactcctccgagcagaatcaattggattcgtgataagtcacggatacgggttaacggaaaccgccggattaaacgtgtcatgcgcgtggaagccacagtggaatcgtttaccggcgagcgatcgagcgaggttgaaagcacggcaaggagtgagaaccgtcggatttactgaaatcgacgtggtggatcctgaatcaggtaggagcgttgagagaaacggagaaaccgtcggagaaatagtgatgagaggaagctcgatcatgctcggttacttaaaagatccggtcggaacagagaaagctttaaagaacgggtggttttacaccggagatgttggtgtgattcattccgatggttatctagagattaaagatagatcgaaagatataattataacgggaggtgaaaatgtgagtagtgttgaggttgaaacggttttgtatacgaatccggcggtgaatgaagtggcggtggtggcgagacctgatgtgttttggggagagacgccgtgtgcgtttgttagtttgaaaagtgggttgactcaaagaccgacggaggtggaaatgatagagtattgtaggaagaagatgccgaaatatatggttcctaaaacggtgtcctttgtggatgagctgcctaaaacttcgacggggaaggttatgaagtttgtacttagagagattgcgaagaagatgggtacgacgaggttgagtcggatgtaaaattagaacttgcgaatttgatagaacaaaggcttaaagtgtacttttgatgtctaataaacaaattaaagtgtatgaaaatgactttcgtcatgagttacgtttttttcgttgccatgttgagtccgctcaagaactcggccagaaaaagctgaatgaccgtttccgtggttgaagcctagtttatatggtgcacccaacaatcagccttagcgatacatacaagtatgaga

SEQ ID NO: 8061 - DNA, 1159 bp, Arabidopsis thaliana
cttaatctttaaaacatctctttcatccatactcatctctgtcactttctctaccatcttctcgtgacagtcgggcatatcgttctgagtatccactagattctctcttccttcagattgctgactggcaacttcggaatcagacatcgaggaggattcgatgtttccattgtttgaactagaacttctactcatcataggatctttcgagtacaggtaatcattcttcagtgttatgtgaacttccatcttcttgtctacctccgtcgaattattaaaactcccatttcccaacttatctgtagccttgcatagagacggtgtgccagctggcttcacagtgggacttacatctttaatctcttctgctttgtatgttgtaagtgataatacgtcagaggttgagctgtttcgtgaatgcttcggctccacagagtccaagacctttctcacatttactggatccatcttacaagcgtttcgactattattcattttgcttcttatctctcgtctatagcctgattgagtatacctattggctcggttaagcttggagacatccagatcagagtcagatttgaatactgatttcggttctcgcatgcctctggttgcagatgtattagactctaccttttcccggtaaccattaatgggtttgcaactgcaagaatggtaatcatacctctcaccagtcctgccatctgaacactgaaactcctcatgagacctactgctatttgggctaccaccagctttcgaagctttcactctcacatttttatctgagccattgaagtgtcccgaagacatttctaatctatcattacagtatcctgcctcagaactactgacaaaagaagttttctctgtaaatctgcgtttttctgacaacctcaaagaatgatcagtctgaacctctttccataatctcgccgtcttatgagcaggtcttggtgtaaagcagccgttttcatcttcatgatctataatctccttatcagtgctatcacaagagtgggtttcaactcttggagaaatgcaaccatccaaacactcttcatcttgatcatcaggagaaccaggtgaagacaaatctacatctccattttcaattccggactcctcgcatcttatggtattgttagtgtcctca

SEQ ID NO: 8062 - DNA, 682 bp, Arabidopsis thaliana
tttgacgcccccatgtatccccatcctctttccctggaggttacatctcatcttacctccctgataaaactctccatttatttgattgctgcattggtttgaatataacatacatgctctgttcttctttgccaccagcatatggattcaaatatcacaaaagggttttcatcgttagcattatatatctttaaaatgtaaattagtgacaaaatgattagatagatgatcgtgtgagatgaattcacgtagagttttgtgttgttgtttcaggaattgtacgagtcaaggtacttcaaggggctggagttgagaaaatggtgtgaactcaacacaaacgcagagagtttctagacgcaattccacggccgctccttgacttcgtggatagatgtttgaccgttaacccaaggcaacgaaacagcgcagaggatgttctcagacacgagttcttccatccagtacatgaaacccttagaaaccaaatgctccttaaaactacagtggtggctgacgcactaagccaaactttaaactaataatacaattcttgaaaactaaaagagtaatttagcaaactagagagttagtgttaattagtattttcactgtattatttgaattaaaatcctcataatcgatatacttattctcctaaaccgtgtgcatgtatgtataggga

SEQ ID NO: 8063 - DNA, 1431 bp, Arabidopsis thaliana
ttttttccaactgacactcgaaagagttgcatcttatatctagcaaagtacctaaaaacccattaaaaacatgtagcaatattgttaacaagcataacacatgacctcactttcaacgattgctcatggtgatatcaagttcatctaagataaactcaaaagtttaaagcaaaaagaaatctcgctcttattctctgaacaaagttcagtttcacttctcgacaaaagacttgagatccttgagccattgaagatactctctgctatctttgttggccacataatctgccagaaaggtagtgaagcttggtttaatacctctgatctccaagtacctgtggaaagccttctgcaaattctcatccaagtcactgcacataacacaataaccaaattcaatcacataacaataccccaatctcatatattccaaacaagaactcactatcattgaagtaaacttactcaaagtcaggtccttcgtaagcaaggtcattatcagatccttgcggttgtttgatcgataaactatcaatcacaatctcatccgggtatgcgctgactccaaactcaagacacacaccatcacctttctgcacactaacaaccatcggaacccggactttacccgagctctcttgatcttcatcgtcttcttcattgtttggttctgcttcctcttcttcatcttcatcatcataagaagcaacagagtcaacttccacttggatggtttcatcctcaaatttccttgtcagcaacacagttctctcccctgaattatcaatgatttcaaatggaaacccttctggcttatcttccaactgtttttccaaaacatttctaattcagatacaattgttctaaaccccagaaatattaaaatctcatgaattcgagaagaatcatgtatattgaaagagagaacttacgaagtcagtgtcatgaggagcctcctctgcgacggcgcattcgatttcagattcgataacgctaacaagattctcgtcggcggttgttttagagatcgcactttccgtcgaaaagctcgagactgagaatgaactaaccgatccacgcctgatctggtggctaccacgaatcagcctctcgacggagacagcgccactgcggaagctaaccggagatctacccgcacggaaagcaagattggctactgttgacgaagctcgacgaaacacggtgctcaacgccatttctgaggattctagggttttccttaaaagtgaaaagagaaacagaaatgagggttttactgagagaagaagagaggtttaaggtttgtttatagtgcaaagcattatgtaggagataaaaagccatttaataaggcccaattacttaatgggccataagaagcccatatattaaaaggaattggtcattcgtacagtgagagtcatgctttag

SEQ ID NO: 8064 - DNA, 523 bp, Arabidopsis thaliana columbia
tgtgatgagctctgagagcattgcaccgagtaatccgaacaaagcaccagatgctccgactgatacccgttctccttgggaatctgttaagcaagacaccaggcttcctccaagcccggagatcacatacaaagctccgattctcactgtaacaccaaactcttaaatcagatcacagaaaattcaggagacggaaaatagaggggtttaaagggtcttactgaatccaaattcttgttcaaggcgcattccgatacacatgaggctgatcatgttagccatcaagtgaaggaaaccaccatgaagccatatgcaagagatgagacgccatctctcaccttcctccacaagtctcctttcgagagctccgagttttctcagcctgaatcaacaacaaagatgcattctgtaagtattgaaccagtttttaatagattccttgttctaaccggagagaaaaaaacgattatggaatcaagaaatccttccttacgtgggaatagaaggaccgagtagcatattc

SEQ ID NO: 8065 - DNA, 652 bp, Arabidopsis thaliana
tgtaatatcatatactctataacgtggaatataatgatcgttgtagtagaaaagcaaaagaaaattgataaagtcaagttgacctaactattttatgattatgtttaatgaaagtagttggcttagtccataactttttttccaaaaccaaggtacatttataacggttataaatataactttcaatacattaataacttctatagtagtattaaagacaattttatttttgttagttttctgttcgacaaaaaaaaatcaattttgatagaaacacattatggatggttatttgtaaactaaaccaacgtaattaaaattaaggttttttaatgacggacctgattagcgaaaccgataccgaaaccaagcaagatacgaccgacgatgagcatccaaacatgtttggcgaaaccattgatgagagctccggcgcagaagagtatgccgccgaagagcatcgagagccgccgtccgaactttcttgtcacggtggaagccaccagcgacgaaattagcgccgctagatatagagacgatgtgaacatcgttagcgtcgggctatcgtacatgacagtactggttcgttgacgcgtcctcttgttgtatccgatacaccgacgggaagaatcgcttgaggaaagacggcata

SEQ ID NO: 8066 - DNA, 917 bp, Arabidopsis thaliana
tgaaacactagggttacccttcgtgttttgattcgcagagcattttgaccaccttatgctgagactttgagattcgtgggatgtacggacgagtcccttgaacaccaactgaatctgaattatcatttaattgttgggagagaacaacaatttctccttcctcatgaccgtttgtgtcagccgtgtcctcctccactgctaggacatcaaaacgagaaggagacgcatgattaactacttcttgaggttgaggactcctctgcctgcctaccttagcaggcgataccgtgtgccagggaccttcgtccttcaaattttcctcgttttcctctgcaacttcctttcccttattctgtaaaacagtcggattcttcattggaactttctgagtgtgagaatcaccgtttagcgtttttgtcaaagtagccgaaggagatttcgatagtatttcgagaggtttttctttcatgagaggaggctctgttttatcctctgtttctatctccgttggtgtggatagctgattgggtgatggacgcgttagacaaacctcttgtatatgtccccacttagagcatgaagagcatctcggcggcaaccaaggatacttatattcgaccattgcatcaacgccagtttcagatttaaagcggaattgttttggcatttcctgtgttaaatctgcttctacaaataccttagcttcctcaaaactgttgcacagaactgtgtcagggtgaagcttttttggttccccaataggacttgcaagaaaactcagacccttccaagtaaacattgagcgtggaacatttttaatggtgatccacattggcattgttttaatttctggctgagcatcctcagcaaccggggaccatttagaaacgatcataggcatgtcagctatgttccac

SEQ ID NO: 8067 - DNA, 257 bp, Arabidopsis thaliana columbia
caacttcgccaaggcaaagttttgtcgcagattggccagacatttgagcctctcttggtaacataaggaattcagaatttgctacatccgagaatgtcggatgtgacttatacgcaagggcaacaaaatgctcaattgctgccagcgtgaattcgcaaattctaaggggcccttgacgatgagatacctgcaagtaatatgcgtcacttattaaaagccagacgtgtgccaaagtccgtatagtccctgattgagag

SEQ ID NO: 8068 - DNA, 477 bp, Arabidopsis thaliana columbia
atgctttattcatagatttttctgaccgaatacctaatcctccttccatctttggtctgcaaactcttttccaagctagtagatgttgcttcctttgtcctgtatgacttctccacacaaaatctcttgacactctatccaaacttttagttatagcccccggtaatgcaatcgtactcatcgaatggactggaatagatgctagcaccgatctggtgagagtgactctgcctgccatactcaaaaatctccctttccatcccactaaccttaatgagatcttctctaacacatctccataggtgtctttattaatccgcttatggagaatgggcattcctagatactttcccaactctctcgtcgcttgaataccactttcatcactcatcaacttaaccaagtctcgatgcacattatctgaaaaaaaaaatttcgatttttccagacttactttctgacttgataccacacaaa

SEQ ID NO: 8069 - DNA, 586 bp, Arabidopsis thaliana
tacttgtggtaaatgcgagtgtaatgcagctgctctttgggagaaattgcaacagagaagcagagtcactaagttcttgatgggtctcaatgaatcctatgaagctactcgcagacatatcctaatgttgaagcaaattccaaccattgaagatgcgttcaatatggtgactcaggacgagcgtcagaagaatatcaaaccagtgtctaagattgacaatgtggtgtttaatacttcagataacaatcagttgagttactatgatggtagtgtacagaatcagaatcagaatgtctatcaaggtcctcttgacaataatgtctatgctgcaatgcagaatcaatatataccaagagcaccaaggccagtttgtacttactgtggtcagactggtcatgtaatccagaagtgtttcaagaaacatggataccctccgggttatatcccagggtttaagagtaatggaggatatcagaatcaacctacaagaccatttactccatttttcaatcagaatctagatccaagagcgcagttctctaattctagacctacaactcaacatgctgcaaacatgatgaatgga

SEQ ID NO: 8070 - DNA, 1773 bp, Arabidopsis thaliana
  unsure (1)..(1773): unsure at all n locations
tatcatgcaaatcaagctcctgcttagtcaatgaaagaggacgaacttattagcaaaggccgacagaagtgaaaaagtagaaaccactatttcacttttaactaaacaaacactagtagtaaaaaaaaaactcacttgaccaagaataagtttataaaacgctgtactcaatgggacgtccaatagccgtccatcttgaagtgctttggccatcacacgccctaaaaggcggaaatattcaatgactttatgaaactgaccaccttcagatatgtcagctgttgagggccaaggccgaggaaacaatccaagtggtgccagaactatatctctgttagctgcagatggttttccgtcttcaatctcatctctaccaatttgcatagataccttgtcaccagaacttgatctccacatccctagggaagccttttgcagatcatggcttagaagtgtgtaaaactcaagggtagggcctagaccagtaccaacttcaccaaaatattctacttcaagcacagctttctggctagaatacatctccataacttttgcagcagaatctaatatcctatttcgggatacacggactttctggcgctgcaatctccctattctcatctctcgttcatttgtagacccactgccgtcagcaccttgctgctgctgcaaacgattcaatgcacgagacaacccaaaagcagtcgagtagaaatactgtctccgggtttgaaacggaaacaaaaatgggcatgctctagtcaactggtagcaccaagagggaagacttccactgcacaaagcaagcgcatcctggatttgtcgagccaatttgggtgtaagtttgctattgacaaattcatcaagaggaaccttagcagcagttgtactcagatcatctagacttgtaattttaccctctgcaaaacgatcggaaagagtttgggctcttaaacgagggcaaagctgatttaaaccctctaatacacgtaacagtgccagaacattatatgtagaattcgacttctcaaggtcgcatggaagctccccttgtaagatactatccaaaagagatgccctatgtgactgagattctacactggaattggtagtagcagatttcgtggattttgacggtgtggtagaacttgctccaccaacagacaacctattcacttggctgtctggcctctggtacatgatggtgtaaatatcattgaatctgcttccatcacttgagactagatcactgccaccaaacctgtcatcatcatcttcatctagcataagttgtcgctgtacagcctgataaatcgtcaaatgcctactaagttgttttcctgccgcagtaaatatcaacttagagggctcatctgaacttcgatttagggtacgtccagatcaaatctcgaaagttagctgagatccccaagttaactctcatatgtttcaagtcgaaatgctttagcagcctcttgggggtcatcctgtaactcaagatgaagagctacatcgtcaaatgtttttagattaacatcaaacgggtcagcctgcaatgggtattagttttagatggaccgcaacaggccggcccgctaggactgcgggcaaaggaactatgtccaggaccgcccagctaagcctaacgggtttgcaggctggccgcgggcttaatttttattttgaatttaaaataatataatttttaatattattgtaaatataacaattctaaaaattanataacttcatattatctcatagtttatatat

SEQ ID NO: 8071 - DNA, 539 bp, Arabidopsis thaliana columbia
  unsure (1)..(539): unsure at all n locations
nnnnnnnnnnnnnnnnnnnnnnctaaagaaaacgctgcaaacttttccgggtatcgggcgctggacggcgaattattttgctttgcgtggctggcaggcgaaagatgttttcctgccggatgattatctgattaaacagcgatttccgggaatgacaccggcgcaaatccgccgttatgccgagcgctggaagccctggcgttcttatgcgctgttgcatatctggtatacggaaggctggcaaccagacgaagcatgacgttggtcgccggatgcggtgcgagcgccttatccggcctggggaatgagcgatttgtaggcatgataagacgcgttagcgcnnatcaggcgatggggaagcacgcctcagttaatcgcgaaataactactattcaccagcaaatccagcggttgggcatcggcaatcacctcaccataaatcagatcgacgccgatgccagaaagcgtatccatcactaagggtaaaacgactggcccggcgatggttttcacccgagtcgctgagcgtgccctgaata

SEQ ID NO: 8072 - DNA, 589 bp, Arabidopsis thaliana columbia
ggtgagatgtccctgggacatcgtagcaagaaactttcaagtgcctgcagtcaaatttcagaacagacatgttatcgtctacattgttcataccaattttattgaacctaagattagaattccaatttaatagcataggaaagaaaagagactacaagcacgcctaagtaattgtctgattacaaaaattagatgagaaaacaaaaaatgcaagcgtagtgagaaagtaggaacattagggaatcttgcacgatacctgtaagctatactcgcgaagtcctcgtcattttctgaagcgctagtgcagtaattgattaatactggcacagtgttacctagatgagtgccaaaccggtaaccaacagcacggctgaaacaaaaacgcattaaatagcattacaaccatggcaagcctagtcgtagataaccattcatcccaatcaataaataggtagcacaagtacaactaaccgaagcatactacaacactacagtaacgtatggtaagaagttaaagatatataacaagctgataagaaggaagataggaagtacataaagctcgaatcatttgaatattggtacgtgt

SEQ ID NO: 8073 - DNA, 546 bp, Arabidopsis thaliana columbia
  unsure (1)..(546): unsure at all n locations
nnnnnnnnnnnnnnnnnnnnnnctaaagctgtatgaagagattgccgacgtgaccattcgtactgatgatcaaagcgctaaagtggttgcaaaccagattattcacatgctggaaagcaactaattctggctttatatacactcgtctgcgggtacagtaattaaggtggatgtcgcgttatggagaggattgtcggtactctcggggaacgtagttacccaattaccatcgcatctggtttgtttaatgaaccagcttcattcttaccgctgaaatcgggcgagcaggtcatgttggtcaccaacgaaaccctggctcctctgtatctcgataaggtccgcggcgtacttgaacaggcgggtgttaacgtcgatagcgttatcctccctgacggcgagcagtataaaagcctggctgtactcgataccgtctttacggcgttgttacaaaaaccgcatggtcgcgatactacgctggtggcgcttggcggcggcgtagtgggcgatctgaccggcttcgcggcggcgaagttaatcagcgcggtg

SEQ ID NO: 8074 - DNA, 584 bp, Arabidopsis thaliana columbia
caaaggcgactaacctggatagaggtcaagcaatgtgcagctctaattgcccagtgacacaagtactgaaccagaactgtattcatagacaaaaacacatgagggatgtgcatttcaagatggtagaattagcacgatgagatattcgacgtgacagttacctatcctgtcatggagagactacacacgaagctcgtaaatgacttggtgtgctgtgacacgatgtcgagttggggaagttgcaagccctgaaacttgctgagcttgtgactgcaatccaggatctatctcaccatgaggaaaaacacacgcagcacaggccgctaaatatctcccacatggcgaataatgagctcccatttcactgaacacacaaagaagcagagatatcaatatacatccaatagtaaaacatagcatcataggcattcaagtgtcacagactgatatcgcaggacccagagaaggagctttgcctgcaaaggacggcatgcggtattgtaaatagacatctgtcggatttcagttgtgcatatgggtctttgatgtcatgcgaccacattctgagtttgacagtacaaggt

SEQ ID NO: 8075 - DNA, 551 bp, Arabidopsis thaliana columbia
gaagatagttacacaatatcatacaacacagccaatttgacattcttctacatcataacataatcctaaaatcttacaagtttttttgcttaatcatctcagagcaatgtatctacttaagctacgaagtttgattactatctaatcttaatcagaacgatagacacgataactaaagatcaatagcctaatttacaagcaatctctatttcctaagaaaattatcatccaatcttaatctaaagaatatacacaataagggaatttcaaaccctaacccaaccctacttaccaaatgtgctcgtttcatcaaattgaaagcaataacaacaataaaaaccagaggaaggattcgaattcgatgaatttcagacttactttaaattgcgactttcgacgccggagtttttcgcggcgaaagaatctttggcggcaatcctttctttggcgcgatggtattgagcatcggatcccgtaaaatcctttgtctgtttagcttcctcctgagacttatagagctgagctttaagctccatgattgaggaaggaca

SEQ ID NO: 8076 - DNA, 279 bp, Arabidopsis thaliana columbia
ttcgatggattttatgatgggattgcctaggactagaacaggaacggattctacctttgttgtggctgatagattttctaagatggctcatgtcattgcttgtcataaaattgatgatgcattacatgtcgctaatctattctttaaagagatagtacgtttgcatggcacgcctagtcccatagtttcggatagagatactaagtatcatagctacttgaggacaacatggtggtctaagttaggaactaacttgtcattccctacgacatgtcatcc

SEQ ID NO: 8077 - DNA, 480 bp, Arabidopsis thaliana columbia
ttagcttaccctcgtaaagaacctgtgtgcgctccaccagtgaccagtgttgaacaatagaacgtcggctgtgcgccaagcattcgatgcatccacagagatttcgtcgagtttaagagttgtctttccgttaattttgtcgatgtctacaagataaggagctctatagaatgataccttcacgttgtagtcctgtcattgcatatacacattagcaaagaactggaagtaacttgaggtataacttaaggtttgaatggtaacaaacaatagtttgtttatcgcctttcaactaattttaatgaatagacctaaacttattttcagcaaattaaaattgttttcatttaagtgccttaaaagaataaagctgaaagctaaaattgttttcttatcggaaacttaaagaaagtattattaaagtaatataagaacttcaatttatagcaagaaaattaattcagattaattaaaatgact

SEQ ID NO: 8078 - DNA, 274 bp, Arabidopsis thaliana columbia
aaccaaactcttccaaaacaaaccctaaacgcaaaaatcattactcaaaaaaaaacaaagtctctctcttctaattagagagccaagaagatgcagagtacttgtgtctacagagaatgcatgcgcaaccacgccgcgaactcggctcttacgccatcgatggctgccgtgaatactctcaaccatccaccggcgatctctgcgtcgcctgtggttgccaccgcagctaccaccgtcgtatagacgtcatatcttctcttcaaatcaatcacac

SEQ ID NO: 8079 - DNA, 593 bp, Arabidopsis thaliana columbia
tgaacgagggccggaacaatcataccagagtaagaatctccggtgacgtaaaaagggttggagaaaaactgtggatgcttgcttagccactgcacaaaagaaaatatacatgctttggatgattgtgttttaattgagctaattgcaggtagaatatcaagtaacatctatatatcttttcatatgaatatatactggtcggttggaccctaaaagaagacaagcgaacgttttagcttagttcggcccaatattaatcgataattatataccaagagaactactaccatctacatacacaagagcttcaaggcacaaatgcaggtgctttaaagagacacctagttttgtcttattaccttttgaagaaactcatggatcctcttaacttcacttgtgtcactagattttccaattggagttcttgagtaagagaaaccagatccaactggctgatccaagtatattatgtttgccactaagaaaaagatccaagtttaaaatgattaagaatagattattggggtttgtgatcaatatgacatatatcttaatgctacgtttgccatgaaatgtagtggagacaaagagga

SEQ ID NO: 8080 - DNA, 599 bp, Arabidopsis thaliana columbia
gaggatcacgatcccagaagcgtactactacagaaccatcttcgagaagttcttcccgaagtaataaaatgccataaattttcaaaatctcacataaacgtctctgctttgctgatttgttttgttgtatttcctgagcagagtgctgctagagcgactgtaccaggaggtccaagtatagcttgcagtaccgcgaaacgtgtagaatgggatgcaacttggtcaaagaatcttgatccgtcaggccgtgcggctcttggagttcatgttgcagcttatgaagaggataaagcagctgctgctgctaaggctggatcggatttagtagatcctcttcctaagaatggaacataagagaacaacactacaggcattgaggatataagcaaatgttttattcttctacacagagagatcgttatcttctagagggatcaatgaataaaagcttcgtccatttctagctggagatccatggatcccagttagtcaagtgataccgttgtctcatttgtcctaagttctgcattttttgcgtcttttgtgttagacaagcttggacctagatgatactcagttcttagacgtaaatttgatga

SEQ ID NO: 8081 - DNA, 636 bp, Arabidopsis thaliana columbia
cacaggattattaagaataaaataaggaagcagcgagttaagtgacaaggggtcaaaggtgtttatcaaaatgtaaaattttcttctttttttccacaacatgtcaggcgagactcagtacagctaacaggacattcagctctcaaaacagtcactaacttagtttgcttgcaaaatagtcggataaaaagtattaaactgttcacctaagagaaatagttccatattacctctgccatctcaatagctgaaacaccaagagcccatacatcaacctgtattaaagagtcaaaatttcatcaagttgtaaacaggaaatccttaattctctactctctagaaaactttgcagtcttagtttctcactaggttatgtatcagatgctaatttactttcaaataggacacctaccttcccatcataacgattttcctgaataacctctggggccatccaatgtggagtcccaatgaacttcaaacaagccacaacattaaagaatccacatcaggcgcaaaaagtctataaggctttgattgcctgattgttcaaagaaagtttgacgaaataacgataggaaactttattcatataggtatttacagtgtttcgcttcgacatagtgcgagtaagtt

SEQ ID NO: 8082 - DNA, 468 bp, Arabidopsis thaliana columbia
ctgaggacaaggtaaggagttttcaattgagcttgagcttctctcattctttgaacagactgcgatggtgtgtctgagtttttcatttgctttaacttgagctcttcctggtactgtttcatccgtttctcttccttcatttttccaggccccttcccgtggaatttgtgcgagagtagtcgaaaggcttcttttggagttaactgttaacaacgtgagagtagaagatcaattattttacatatgcacacaaggacgagtttaataagagtgaaaatctatgcacacaaggacgagtttaataagagtgaaaagcaaagctttagaaaacttacagtgctaccaaactcgtcagtcctctcaatccggatgtccttgaatctatccttagattctttatccttagattctttacctccatcatcgatccacaatacccacaagcttgctcttgtatatgtccatatt

SEQ ID NO: 8083 - DNA, 486 bp, Arabidopsis thaliana columbia
gatccccgctccagctcctgctcccaccagcgatggtaagcctctctacttctctctctctcttcttccacgatattcgcatttccagatctgaatcgagactctctccgcgtgaaatctggaaacagtcgaattggattacgaattcgtttctctctgacatttgaaaatggtgtgttttggaaatggcaggaacatcgatagatcaagggatagcgtatttgctaatggtggtggcgttagtgctgacttacctaattcatcctcttgatgcttcttcttcctactccttcttctaatctctctctctctttcttctgtttttttttatttctttgcaacttcttattagtttcttcaatttgccttttttcttcttcttgtggataaaattttcaagagttaatttcatcatcatgttctcgattatgatttctggagattgattgattgatgataatctctactgtttgttcttttttgttt

SEQ ID NO: 8084 - DNA, 608 bp, Arabidopsis thaliana columbia
gtctgcacgaagagatggtggcaacggatcatcatgctccagatctgaccatctataacgttcgtatagatggactctgcaaggttgggaatctggtaaaagcgattgagtttcagcgtaagattttcagagttggtcttgtcccagatcatgttacttacaccacggttattcgcgggttatttggagaatggccagtttaagatggccagaaacttgtatgatgaaatgctgagaaaaaggttatatccctctgtgattacctactttgtgttgatttatggtcatgcaaaagctggaaggctagaacaggccttccagtactccaccgagatgaaaaagagaggcgttcgtccaaatgtcatgacgcacaatgctcttttatatggcatgtgcaaagctggtaatatagatgaagcttacagatacttgtgcaagatggaagaagaagggattccaccaaataaatatagctacactatgcttataagcaagaactgtgattttgaaaagtgggaagaggttgttaaattgtataaagagatgctagataaagagattgagccagatggttacacacatagagccttgtgtcaacatttggagaa

SEQ ID NO: 8085 - DNA, 478 bp, Arabidopsis thaliana columbia
tctttttggaatttgttaagccagtgactcttttaaactctgtttcttgtacttgaggataggtcattttgacgccgactcatctggctatcataatggaatatgcttctggcggtgaactttacgagcgggatttgcaatgcaggacggtttagtgaagatgaggtttgtatttggttctcttatcgggtttacaggtctccggtttccttatggtttgatctcttcttgtaaacaggctcggttcttctttcagcagcttctatctggagtcagttattgtcattcgatggtatgtagagaatctgtttcatggagcctatggactggttgtattcttgtattattctaacttgttgttaatactctactttgtttcatgtgctgtgaagcaaatttgccatcgtgacctgaagctagagaatacattgtcggatggaagtcctgctcctcgattaaacatttgtgattttggata

SEQ ID NO: 8086 - DNA, 528 bp, Arabidopsis thaliana
gtgaatattctcgtaactggccttgcttataagggaaaatgctaataagaagacatctgctcctctgtaactcaaaggcctaagcctattataatcttcctgacctgtaattccacaataataacttttatcgtaactagcattcattaataatcagttttagtataatcaagtaatcatacggcgtaccggcagtatcccacaggccaaggttcacggtactcccgtcgaccaccacatttgcgctgaagttgtcgaaaactgttggaacataatcctgtaaattagatagttaaatcatttatatatcaaaaaacatacattaaaccatgtttcttaagtaaacagatagcaaaaatccagaagcatgggtttgaattcagctttagatatatttcacgttaatgattctaggaaaaatatgcttaaacggatatggaaatataaacgcaaaagatgaaactaggctcttattaatttgccatgaacaacgtttaaaatgagcaaagatctcaggagcctaacata

SEQ ID NO: 8087 - DNA, 556 bp, Arabidopsis thaliana columbia
gaagatctagtaagacaaaaaaagttatggtaaaatatgcaaaagcatttgatgaaattggaaaaacacaagttaatacctgactggaagtaatctttatctaaaggagatgatacaagaaacaaataatgtgtagcaaatgaaactacttaataataatctctttctttccttttgccccgttgcttgatttatagttgcactaaacttggaacataagaagataacataaacgagttaatattccatgcgttgttatgtttccggtcattaggagtttctccgaatttcacagatttgagatatcctccttttccaataatgtaagctgtttggtaggaacaatccatggtccattcaggttcattcttgaaaaccacagcgacttttttctcctcgtcaatgaagaagtagtgagatcgacttccataaaatctgtccggaaaagtagtgagatcactttcaagaaattgctccagaatacctcattcggctcaatcttagttgtaatatatatcccattactccattgtaccgtcgatataagacagctaag

SEQ ID NO: 8088 - DNA, 578 bp, Arabidopsis thaliana columbia
tatggacaaaatctactgatttcaaatctctttttttcattttccctctttcctccttatatttcttattaagcgtttatttaaaagtgggaaaatatgaactaaattctttgtagtgtagtatttgtttgttgatataatccagtttataagaaagaggctgagaaaagcatattccaagacatatctaaacattggtctggtgggatatgaatcaggtacacttttgagtgactaatctatttgaaaattattggttaatagttattaatgtttctttttgattcaacaactgtagggtgaaaaacggatttgtaacttataatttcattgtgactcgtataagaaagttgtggacgatagacatgtccatccagcaatcgaatgaagtggttgtgattgacaatgttccattgtcgacgttaagcagcaaagaaacgacgacaaagtagagaagggtggaggagagtaaggaaatgcaagtgaagaagaaagcaaagttcgagcagagaccgagcgattgtgcgaagtcaattggtaaaccgattaagtttactggtaagggacaaacaagaaat

SEQ ID NO: 8089 - DNA, 459 bp, Arabidopsis thaliana columbia
ttgtataaataaaatttcaaagaaaattaaaagatttggagaacccaagagaaactaatcctcagtatagagccgatagaatagctagggttttccacaaaacatcgactaagttaacaaaacttttttttatagatatacacacagttagagatgatgatatatgagaaagaacctggagaaaacgcggccacagtcgcaggagtgaccgcgtgaaccgcaggtcttgagatgggctttgtagtcagattgaactgcatagcctttggagcatctctcgcaaacccattgcttgtggacactgtgtttacggcggaagtgctttttgattccgaccagatctccaagagcgtggcacgggtcatggtggagacatgttggctcaggacacacgtagactctcttcctcacttcctcatccttcttgtctctcttcagaagcttccatggcacttttat

SEQ ID NO: 8090 - DNA, 534 bp, Arabidopsis thaliana columbia
tttcttgatttctattttgttgttgttatggaattacgatatcagagcaactctgttacgctaaaagtgagtcaagaaatgatcaataagatgcatcaagaagcagaaaccatttggatccccgaactagcgagactcatgagtgaaacaaaggatcctttccttaatgttatttacgactctgaccctttagaacgaatcttttggggaaacatcgtgttggttggagacgcggctcatcccacgacccctcatggtctaagaagcacaaacatgtcgatacttgatgcggaagtgctaggcaaatgcttagagaactgtggacctgagaatgtaagtttgggtcttgaggaatatcagagaataagattgcctgttgtttctgagcaagttttgtatgcaaggcgtttggggcgtatcaagcaaggtctggatcatgacggaattggagatggcgtttttggtttggagcagagaaacatgcgatgtctttcatgtgcgtccttatctagtgataaatatttgatgtgagag

SEQ ID NO: 8091 - DNA, 1003 bp, Arabidopsis thaliana
tctacctatccatggactatgctactttactttatgtactcgcaatatagttcacaactagtctattgcttgttgcttatgtttgcttgtacaacatccaataagtatgtttgtctgatgttgaacttgtttaccctttcagggaccatcattcagggaatgtattttcatctatggagaacataatgacccttgttttagaagaaagcgaggatataccttcagagatgctttcaccaatcctacattctgttaaaaaggatgatgaggtaatacatggatggtctactgattttctatcaccaaccaatgctcttttgttaaatcttttaacttatcaacagatttcccaagtatcacggaggttggcagaacaagttctcagtaactgtgctagcaagctcaaaacttatctgaccgaagcagtgaaatcgtcgggtgtccctctagataagtatagtaacatagtggcttcgatatgtgaagggacattcagtgctttgcagcaagaccaagttgttgcaaatgaaaaagaagtaagcctttatttctcaccttttttactgccgcactgcctcaacttttttagtgattatgcaggtcttcagttacattagctcttatactgttcttccatatttttcctctccaggatagtcaaggtcatataaaaagggaaacggaagtagaggtacgatagtcattgttgatttgtatgaaaaggatagatgcctttcttcttttagcttttgtagattgttaattgatttttatgttccaattaaaacatgataaacagaaggcagcagaaatttctacccctgagcgaactgatgcacctaaggatgaatgtggtaagtctggagttagcaatggtgtcgcgcaacagaatgattcttcggttgatactgattccatgaagaagcaagacgatacgggtgccaaagatgagcagcagcaacttgataatcctagaaacactgacttgaataatactactggg

SEQ ID NO: 8092 - DNA, 460 bp, Arabidopsis thaliana columbia
gggataatgttgaggaggagacaacgagttatgaacaaaaagctaaatggtatatacaatagacttctttttgggttgaaagtcgttttatttcattggtaacaacaacacagtgggaaattatgtattacagagtagagacacatattcctgtttaaaatgaggaaacaagaagatcatctgaagtagtaatacctttaactacgttcctgtctgaaggtaaaccagctacaacaccatgttcaatgccacattcgtttgttcctctcctgatcttgaagtacccatcctgaaattttcagattctatatctaaggttctgtggtttctttggaaggtcgaaagtaaaagtttgattggagagaagaagaacttacatcaccccagcttcggttccattgatttgcaagcaactgcaacaattcaaaagaatagaaaatgttgtgaattttttggctag

SEQ ID NO: 8093 - DNA, 590 bp, Arabidopsis thaliana
gatccttatcaatgaatcctggaggctgtgacatgtagacatcgtctgtgagtgtcccttgaaggaaggcgttgttgacgtctagctgtcgtatgggccatgagcgatcaaccgcaacacccagaacaattcgaattgaagttgacttgattacagggctgaatgtctctgcataatcaagtccaggtcgctgattatatcctttagccacaaaacgcgccttgtatcgatttagagacccatcggaattgtatttcttggtgaagatccaacggcagccaacaatcgttacatggcttggtggaggcggaacaagatcccatgtatggttaccaatttgtgcatttatttcggaccccatggcgtttctccatcgttcatctttgagagcttgaatagctgttcgtggttctgattcagcggccaaagaaactgctagagaatacttgggatttggtttaatgatgccagctttggccctggtgcccatggaatgagtattgagcggacgttggttgttgttgttacaatttgagcaagcggaggaggtggatgtacaggattgatggtggagcggagatgttgagatg

SEQ ID NO: 8094 - DNA, 549 bp, Arabidopsis thaliana columbia
aaaagttatccatgaatgctatgtcaaaaaaagttttatgttgaattttatatatttctaatttggattgttgtttgatgcgattcaaacattgaaatctactacgccatcgaagcattttctctattattgtcccattattataaatattcaccagtaaccaaataaccaaacaattatggcactgagagctttcttggagctgtagtaacgtcctcaaagcctgtagagaatttactaatacattgcaaacttaaaaatgttcagatcgagaaaatctctttgttgtctctcgcagttaacaatataacgcctaattaacaaaaaaaagaaaagaaaatattactacaatataaacgcatttttgtatctcaatggtcggacaaaaagggacaaatgaagattttcaaaaacaccaaccaaggctgatgaaacaattcaaagatcttgcaaagctttttagttttagtttttttgtcctctatacgtagccgtttggtctttcgccgctcttagctgttcttctctgcagatccacttcgtagtgat

SEQ ID NO: 8095 - DNA, 531 bp, Arabidopsis thaliana columbia
caaaaaaagaaaagaatatggaacgaactaaaaggcggaaaaaggcgaaaagagttgagtcaaacaacactcttctagtgctataccattctgctttcattgtgatgagcaaatgaaatggtcaaattcgattcatcagtgttatcatcttttggagtctgttaataaagcaatcagttcgctatcattgaggtctgtctgtgaagcatatttgactggtatgttactgtctttatccacagcatttggatctcctcccctgttattgaattattgtatcagacttataattcaactccatggtttatattataagaccagtaccaagaaacctcaagaagtatattgagtttacctcataagtagcaaccttgcaattgcatatctcctgctgatgatacaatgatgaagtggagtccgaccttttgaatctgttgcatttatttttgcgccatattgaagcaatagttctaccataccgatatccgcagaaagacaagcaaggtgaagcaaagaacagtcgtttgaagt

SEQ ID NO: 8096 - DNA, 507 bp, Arabidopsis thaliana columbia
  unsure (1)..(507): unsure at all n locations
tggggacagttgatcaatatgtttaacaagatttgatgataattgataacaatacatgttgaagaagatttgaagacgagaatcgaagctttcgtctgtaatttggtaccaaaactcgtataattcttgaagattgatcttatcaaccattattcttcttctcctacacaatgcgtcgaacaactcgtctgcaaactctttggaattttcattctccaaacctttcaaacacagaacaacaaaatttacaatctctatcgattctccagagtcaaactcaatttcaaaactgtgaaaatcattatgtcgaacctatgcaatgagcaaaatcacttttgaaaagataaccatgtttagaaagatgagcgaaattgttttgaacatcgttccaatcaacgattccattttctttgctgcttatgaatttcaaaccatgaatcgctctctctgtacccgatccatcccgattaggtctagttggtcgctgagatanagctcgagggagat

SEQ ID NO: 8097 - DNA, 1059 bp, Arabidopsis thaliana
gttgggcaggaaatttaaaaacccgttgggccattaggattcacaaaagcccaacacctacaaaaagagatgtctccatctcatagtccatataccacatgcttaaaccagtttaaattgcatataccacgcgccacataaccggaaagttttgtacacgcgcgagacacagacattatcctttttgtatctgtcttccagcgtgtcgagtcagtgaggctccacgtcaccctttgatccacttaaattttaaaactaaaataattgtttaaatgaattcgagtgattgatattttattatagatttaatacacacccgacactctgtcaattctataggcatacgagctcactccaaatttagattcagttttttaatacgaactttttagttaagccaagattagcaataatatagatcatttattttcttgattgtagtttgattgttgtttttctcataataaaaaaatcccagctaaaatctcattttcaattttaaaccaatttatatggtaaacaaaattttagttcggtataattggaagaattaagttttgttgaatatcaggaaaaaagaaggggaggacaaattttctacagaggtgacgtggcatcattgaaccactttacttgtcggcagtgaggtgtgtttaatcacgtgtaacgcatccaatgcgtatgagagctttacagccgcacgatcacatgggtacaaaaatcaacagcgaagcaaaacaagagtctcacacttattaaacgcgcgtagtacgctccaccggtataagctaacggaggatataaaaactctttaactcattattgtcctaaaatctcaattttatccattttcacggaaaaaacataaaatctgttcttcttcttcggctgagagacaatggcggaggagcaaaagacgagtaaggttgacgtagaatctccggctgttttagctccggcgaaggaaccgactcctgctccggtggaagtcgcggatgagaaaattcataatccacctcccgtcgagtccaaagctcttgcagttgtagaaagtaagct

SEQ ID NO: 8098 - DNA, 737 bp, Arabidopsis thaliana
tgttatatctctttactagggacgtgaaaatactgcctttctgataaacatccatgaacctattatctggcgcattcatgagatgatccagcaagccaacttgagtagactatccgatcctaactcgacggctgtatcagttgatccattcattcaaatcgggtatgtacgggattttcttggtctatatatgctgtttactgaatgaatcttccattcaaaagacttaatcttggttacacccgtccaaaaatgcagagttcttaacttctcggaagttagatttagagtatccatggcgatgtcccccagtcaaaggccgaggggagtgcttggattttggtcatccctgatgactgctcttgggaatacagaaaacatgccagtaagtattccagagtaattcattggtttatgtccattggtttctacttggtactcgtaggacatcaattatagtcgacaagttttgtagtttttagaatttgttttgtcaatgtactacttgctacactttcagtccaacccagtatgtattttttttcttcttctaatttttcttatcttcaaataggtacgcataagtgagagatttcatgagaacatatccatgcgccaaagtactatgatcaataatgctattaggaacgtaaagaaagacctccttggccagcctcttcagttgctctcaggtgttgatattcttggcaatgcaagcagcgcgcttggacatatga

SEQ ID NO: 8099 - DNA, 536 bp, Arabidopsis thaliana
ccaacggacgagagttaccacgccgagaaagcattaccaagcggtgatttctacacaggacaatggcgagacaatctccctcacggtcatggcaaatacctttggaccgatggttgtatgtatgtcggagattggcaccgaggcaaaaccatgggcaaaggtcgttttagttggcctagtggtgccacctacgaaggcgatttcaaaaacggctacatggacggcaaaggtataattaacaaaaattccccaaaatgttgcatctgattttgctaaagttttgatttttattttgttttgactcaggtacttacattgattcctctggagatttatatagaggatcatgggtgatgaatctgagacatgggcaaggaacgaaaagttacgtcaacggagattgctacgatggagaatggagaagaggtttacaagatggacatgggaggtatcaatggaagaacgagaatcattacattggacaatggaagaatggtttgatgaatggctacgggacgatgatatggagcaacggg

SEQ ID NO: 8100 - DNA, 574 bp, Arabidopsis thaliana columbia
cctgatcggttgtatgcttctgggacgtgtatccaaggttctgaaccagagctttgctcagcttgtatcgactctgcttttattagggtgataaagaaatgtcacaaccaaacagaagccctcgactggtcctcctttaacgaggagtatccttgtatgatacgttactccaaccgttctttttttggattacttgagatgacaccatttttcaagaattacaatgctacagatttccaagtcaacttgacagagttttatcaaaaatgggaggctttgatgcttggtgtgatagctgatgctatctcgtcgccaaacccaaaattctatggtgccggcactggaaaaattgggattcaaaccgtttacgctttcgtgctatgcagtaaggatatatctccatggaactgttccagatgtttaagagggaatgtggataactataagttgtcctgcagtgggaaactcgtggccatagtttcagcccgagctgttatatgcgatgggatctctatcaattctatggatttattgagtatagggcttctccacgcttcctcgtgaaaaaggtaga

SEQ ID NO: 8101 - DNA, 581 bp, Arabidopsis thaliana columbia
actctacatatgttttctagagacattcccgctactggaatttaaaatacctacctgatggctctaaggttcttgcattgatgaacgattgcaccatgccatttccaaaaccaccaagcaacttggcaccaaatccggcagccgagagatacttgatagcctattgaagacgtggggagcaaataacgaaaaacacaaatgataaaacatcaaatgatgcaaaagaataacactggcagagaaacctttgacatttcaagaaaaaatcgagcaaaactctcccatgttctgacgtaaggctcatgcttcaagttgacatcactagaagaaaaataatttaaataacatagaaactcttggtaacgcaaacaaagacaccaaaaacacggatcagaacacaagggggaagggacttatcatatatataaataaaggaaattaccagaatctctctctcccggttaataacatactcagtgttaggcccatacagtctcactgtaacagacacttctttattagtgtcatctttcacagaaaccttcagcactgccatcatggaaaagatgacataacagtgg

SEQ ID NO: 8102 - DNA, 578 bp, Arabidopsis thaliana columbia
ccatccaatgatattgggaattgcagcaatcataagagactgtccaagaaaacacaataagatgtttagaacgcaagaaagaggactttataaaatggatctaaaacagaacgatcaagaatcagataacaaagtataccccttttcgtccaatgtattctgcaatctgaccactggcaattgcaccaaccatagcacccacattggaaagagaaccaaacacagagtactaaaacatggagtggtacatcaaagtcaaacacggctaaacaagcaatgataaaaaccagacagctctagacaatgatcagtccattacctcagatactgttaaaccgagatccttggtgattgcagcttgagttggagatgaataaccacactgaacaaaaggatggagggtttaaggaccaaacacagagtactaaaagatggtgatcaaagtcaaacatggaaggtttaagcaaacaatcagaaattccaattcaaagtcctctaaatctgtcagcaaacttgaaaaaatcatctcggttcaccaaatatgagatttcaaatcacagacttgcattgaaaatgca

SEQ ID NO: 8103 - DNA, 873 bp, Arabidopsis thaliana
gtcgactctagcctatttgcaggaatccgttgttacaacaacagtaaaactttgtctgaagagtttgcaagaatatgtccgtctccaaacgtttaaccggagcgggttccagcagattcagctagacattcagttcttaaaagctccattgaaggaagcagttgaggacgaagctgcaatagacttcttgctcgacgaggtggttacacctaaagctccttcctttacttttcttcttattaccatcaagcagaggctctatgtctatcttttgcaactgaccattgattctccgaccatgatgtgtgtttgtattgacaggtgatcgttgcggcttcggagagatgtcttgatgtgattccattggagccaccgatcttggacaaactcatacaagctaaactcgctaaatcaaaggagcacaacaacaacacagtttcttcttaaaagttttcataactcaaacaaagtatacatgatttttgccaatttatttccgcttcttgttatcatccgtagtgtaaatcaaaaccattgaattgtactctctagcattgaaccagtaaaatctacaccgtaacttcttctttacttttgtgaacaaatctttgaatttttttttttagcaacatgcaatttgacttaaaagatatgtaaaaccctaaaactaaactacataaattcctaattacactaaaaccctaaaattgagtgccgaaaaaatagaaaaaatattcatagtcacggcctcacgggtctctctattatataagaactccttgagacttaaaaaaaatctcacattccctctctctaatcaaaaagctaaaagcaatggccactgcgatgtcttactcttctcaaaaccatcga

SEQ ID NO: 8104 - DNA, 524 bp, Arabidopsis thaliana columbia
cagattataaatcttgctgcgatctgtactccagctgattacaatacacgtcctcttgatactatctacagcaatttcattgatgcgcttccagttgtatgtgttttcttcttagcttcgttcattgttttgctttagctcttgtttttgaagttgatggagacagtgatgattgtgtaatgcgttggttttgttaggtgaaatactgttctgagaacaacaagcgtctcattcacttttctacctgtgaagtttatggaaaaaccattggaagctttcttcctaaggatcatcctctgcgtgatgtaatgccttattgtacatttcgctttccacatgttattgtctttttatcaatctcatcgatgaatgtactgaggaacatgttgaagctgacgttttcgttcgttttaatagccacattatgaattactcattggatctcgttagacgtatttttgaattgaattaagactttagtccgctagtctatcacacacccatagaagcttggaatagttgat

SEQ ID NO: 8105 - DNA, 566 bp, Arabidopsis thaliana columbia
taattacagtttcaaaactcagattcttaagaacgctgagtttggggattctatgttgccttaagctccggcactgaagacattttctccggcgaagttaatggcagcttcgaatgaagttggtgatggagaaaacagattttctgaagagagattctgacccataaatattactccctcctccgtatcatccttatcgataaaccctaaatcagggagaatatctctatgatcggaaaaggaacggttgagattggcattgagaagattgccggttgtgatgtcatggatacttggcctgcgtttgtccttggctccggagagctgtctctggtaatacttttgggcgtggctcgccacttgcgttggcgtctttgacaccacgaagtttctcgatatgtttctccaatctcctttaccgtacttgagaaggcctaacaagaatctcctgcaaggaacaagaaacagagcattgaaaaccctaagaaaaaaggggatgacttgcgttgcaaggaacctaggaagagtgacttatatggaaagaattctgtagagatgaaagagtg

SEQ ID NO: 8106 - DNA, 540 bp, Arabidopsis thaliana
gtcttctggaaaagaaaaagatactggagattctgtgcagatagagtctgaaggaaaggttcttgaaggaggagacaatattgaatttggtgaaaaagagaaagataaagctgatgcagttcccatcgaatttgatattgtaaaagatgagaagtcaccagttttggataggacggaggaagatggaactgaaaactgcagagaccagtgacaaagccgaagcccttaaatgtgcagatgtgaaggtaagctctgagaatggtaatgttggttctgataacacaaagcaaagtgaaaaacgagcattgctgcctgcaaatattgacaaacaagatgatgggcttacccttagcggacggaaaatccccagctacatggccccgactgcatctgcaaaggccagagtcaaaggagaagcctctccgaggtttgcccaagcgaagactgagataaatggggcattacggcgccattcactgccttctccagccaatggtaagctgagtactactactatgtctccaagggctcaaaaacttc

SEQ ID NO: 8107 - DNA, 587 bp, Arabidopsis thaliana columbia
  unsure (1)..(587): unsure at all n locations
actcaactaattttgttatcacccaaaaagaagttcaaacacaatggctttcgctttgaggttcttcacatgccttgttttaacggtgtgcatagttgcatcagtcgatgctgcaatctcatgtggcacagtggcaggtagcttggctccatgtgcaacctatctatcaaaaggtgggttggtgccaccttcatgttgtgcaggagtcaaaactttgaacagtatggctaaaaccacaccagaccgccaacaagcttgcagatgcatccagtccactgcgaagagcatttctggtctcaacccaagtctagcctctggccttcctggaaagtgcggtgttagcattccatatccaatctccatgagcactaactgcaacaagtaagtatttagttttgttttacttgatctagagaccatgaattattttttctaatgacaaaatgtgttctcttgatcgtttggattgttgcagcatcaagtgaaatggaagcttacgtcgtcgttttggcgttaagagtatggtttccagaagtactagaatanaatacggctatatatcttagctgatattacgatgtatttgt

SEQ ID NO: 8108 - DNA, 580 bp, Arabidopsis thaliana columbia
taacagccgccagtgtgctctaaagccgaacgtccagcgttttaaaggtctgggggaaatgaacccgatgcaattgcgcgaaaccacgcttgatccgaacactcgccgtctggtgcagttgactatcgatgatgaagacgatcagcgtactgacgcgatgatggatatgctgctggcgaagaaacgctcggaagatcgccgcaactggttgcaagagaaaggcgacatggcggagattgaggtttaaaggaaagaacattgcccggtcaggatggccgggcaaacaaggcaggattaaatccctggctgcagaatacggatattcatctccagcacgtcaccttttacggcttcgctatacgccttcatgtgcggggtttgcagatgcgcttcaagatgcgcgatgctttcccactgctcaatcatcacgatagaatccggtgccatagactggaaactcacgccagctgcgcaatccaccattggcgcatagctgtggcaaccttcttctttcagtacggttggaacgattttagcaaactgatccgataccagctgacggtgatgttgacaggacgag

SEQ ID NO: 8109 - DNA, 579 bp, Arabidopsis thaliana columbia
tcaaagataaccaagtatgtcttgttttttgcattctgttacagattttgatttcccgattataaagagatccttatagcttacatctgacgggttgcctgtaaattctggtggcaggtggttcacttgcatccatctaattgcctggatcacaaaccagagtgggtgatttacaatgaatatgtcttgactactcggaatttcatacgcactgttacagatatccgcggtgaatggttagtttccatctctggttcctgttatctcttgtttatcaacatccgatggattaaaaaccgaatatctttgcttgtatataggttagtcgatgttgctcagcattactatgatctttccaacttccccaactgtgaagcaaaacgagccctcgagaagctttacaagaagagagagcgggaaaagaacgagagcaagaaccggaagtgaagaaaatcactctctttgcttcgactagaggatcaaatcactcagagaagaatgtcttagtcacaagaccactatgatttacctcgtcttaaattatgatggatactttgctttgtttatgtcaatgaaaga

SEQ ID NO: 8110 - DNA, 522 bp, Arabidopsis thaliana columbia
tattataaacaaattatttaccgaatataaacataaattgaatggcccaaccaatatatcatcagaagttggccaacaaatgtcacgttatgtatgttatgatttgcaacagaaaaaaaaaattcatcaaagacgtttgtggagttttgtgtcacgggtgttactaattttccttttttgagttcttgtaaatgaaagataaattataatggagaaaaaaaacttacttgagaggcgaggataacagcatcacggtggaggaaaagcgtaaaatggctggtcaggttaaagtttccggtgagccaccgtccggcgggaacaaataacaatgagccaccgtagtctgcgaaacggctaagttgtgacaccgcgtcgcgaaacgccgctgtatttgaagttacaccgtctcctacggcgccaaactcgtccaatgaggctgagtaagctctacatgatatggctgagtagcaaactcttctccgcgatggtggttacggtgcgacgatggcgatgattatggag

SEQ ID NO: 8111 - DNA, 562 bp, Arabidopsis thaliana columbia
atcagatttcggaaaagaagagattggacttaattctcgggccctgatggagttttaggaagcaaccataaaaggaaaagagccgggtattataggccggtttaagttgatagttaaaccgaagagctctttgtagcttacctcaagactttaggtaactcatgaccttcatagacaatggagcgtatgtttagtagccacgcatggaccattgcacgtgcagctccagaagacatgaggtgtaagtccaagcaagaatcagaccacacgttttcccaaacttgcctagatcttccctcaagtgccaccagttctgcacctcgtttctatagcagaaggttcccaaaagtaagcctttgtactaatagtaacgcattaaaaaacggttacaaaatttggcctctacaatatcagtgttattttacctggccaaagtgccaaagcatgtcagttagggcattgtagaaggcagaagcagtcgaaccatccatttcatttactttgtcaaataagctctgagcttggagcgatacattctctctctggccgatgagaagtcatg

SEQ ID NO: 8112 - DNA, 487 bp, Arabidopsis thaliana columbia
caaaacgcatggatcagaaatgagaccgatgcagagagaaaagagagtgagagaaggagaaggaacctcgacgactcgagtggcgtgaccgaaaccatgtccagtgacgtagtaagcgaagactaggtgcttgcttgaagcagagacaccttcgttctcatcaatcctcattttctccggtaatctctgggaggacgattcgataattgactgatgcgattgcgaaattgcgaaattgcgccaaggaggaagaagaagaagagagtctaataaatcttcagtgacttttctttttctttgcaattttgctctttcactcataaatctgaactaaccgaaattaattctccgattttaaaagcttgtttgtcttccctaaaatcgttataaattattaataatttattatgatgcgaaggatggttacgtaacaccgcaattcaagaaaaaagataaaacgaatttcgtgaatatgaattttataaat

SEQ ID NO: 8113 - DNA, 496 bp, Arabidopsis thaliana columbia
agcacatcacagaggaagctctaggatacgttcatgcagacctatggggctctccaaatgtaactccatcactcttaggtatgaaatattttctgtctattgttgatggtaagacaagaaaggtttggcttatgtttcttaaatctaaagatgagacatttgaccgtttttgtgagtggaaagaacttgttgaaacacaggtgtgaaagaaggttaaagtgctcaggacagataatggattggagttttgtaattccaaatttgaagattacctcaagaagtttggtattgaaaggcacaggacatgtgcttataccctcagcagaacggtgtagcagagagaatgaacagaactcttatggaaaaagtgagatgtcttttgagtgaatcaggtcttgaagaaatattctgggctgaagctgcttcaactgttgcatatctggtgaacaggtcacatgcttttgcagtggatcacaatgtacatgaagagttgtgg

SEQ ID NO: 8114 - DNA, 894 bp, Arabidopsis thaliana columbia
gtgtgaacgtatgttctagtctgtgaaggtatgattaattctgtaaacgtatgtttttctgagagttttagtaaaagtattttgagtacttttggccaatgtttgtttgtcctagaatttttcctttatatgtatttgtggtaatcacttctatttattaccgaaatagagagttagagcgagacgttgatagaaaaagtggttgtagctcttacgagtaaaccattatatataaatcttgtgtgcactttatttcttgctttttattcatgttcttgaggagaaattagatctgtaattccttttttatttttatttttatttatttttgtaaacgagatctgtaattcttaacataaggtctttgaagtctatttggtaaagttaaagcgattggtctcccacctgtcatgttcacaatctctaaccctacccgtttcacgggaaaaaaaaaatctctaaccctaccgttacttacatttcttaatcggaccatgggacttgtgtcgaaatctatatcgggggtactcggaagtctcgtgactagatctcctacatgatggtcttgaacccgtcgtcgtctaagtctacttgcattggccttattaattagtctacctttgtgggatcaaggagaggtcttccagtgagtactagtatatctcaaatagatagtatctttaaattttcataattccattaagtttctatataaagctccttcgaaatcataaaccaatgcgaactaggctaactcagatataaatcaatggcttgtcacgagatctgcctgggaatcggtctaatgctcgcagtctctatggtcaatgcagttgacttctctgttgtcgacagtactggcgactctcctggaggaaggagctttcgagatga

SEQ ID NO: 8115 - DNA, 379 bp, Arabidopsis thaliana columbia
gaggatttccggccagaatctaagcaagcaaaagagaatgttcaaaaatctactattatgccgcagcctatggctagccttttcttactcgacaccattttccatgtttgatgcaatgttttgttttgtgttagtttactgaatgacatgaactatttgtgttctttggtgtgatctgtttacaacagtttgaagttgatcacagtgtaaagaacccaacttacaacccgagaagtgactctagctgttgtgcctcatctgttactagtgatgatggaaatgtggttagagcaagtgtggtagcgaggcttatgggtctagagggtttccactaccatacgttttggaaccacgggataatcctgatcttgatccagac

SEQ ID NO: 8116 - DNA, 494 bp, Arabidopsis thaliana columbia
aaggttgaaaatgcctgggaaaaatcacgctcaaatagtttaagccgcagtacggaagatcagttttttatgtatttacgggtaaacaccctaaataaactggtaccctacgcggcacaacgatttattgataatctgcctgcgattttcgccggaacgtttaatcatgcattattggaagatgccagcgaatgcagcgatcttcttaagctatataaaaatgtcgctgtaaaacatgtgtttagccatccagatgtcgagcggcttgaattgcagggctatcgggtcattagcggattattagagatttatcgtcctttattaagcctgtcgttatcagactttactgaactggtagaaaaagaacgggtgaaacgtttccctattgaatcgcgcttattccacaaactctcgacgcgccatcggctggcctatgtcgaggctgtcagtaaattaccgtcagattctcctgagtttccgctatgggaatatta

SEQ ID NO: 8117 - DNA, 476 bp, Arabidopsis thaliana columbia
  unsure (1)..(476): unsure at all n locations
gtgttgattttttttttttgtttctggtggatggatttgagacttcaatagatatggaacttttgatgcctgtgtagattagagaagtaagggttttatagatcgggaataaatggaggaaggtggatatgcgtttgaggttaacaatggaagaccaacggcgagtgagtttggtacgacggcgaggatttcgtcaccgtcattgactatgtcatcgtctttccgtgaaggaggaggaggaggtggaagtaagggtttaacacgacggaggtcaatgaagccgagttttgacgccgataatgagttcattactttactccatggctcagatccggttaaagttgagcttaataggcttgagaacgatgtcagaggtactctatgattctcgatctgtnttatgctattggttgattcaagtgtccgttgacatttttgaatttgtaatttggtatacttaggtttttggatatatg

SEQ ID NO: 8118 - DNA, 483 bp, Arabidopsis thaliana columbia
taagacttcaggaacgatcaaagaacaactttctgcaatagacctgcgcttgaacaactttggcaacagaaagaggaaagggtccgggcattttctgatgtacaatcacagattcagaagatatgtgaggagatcgctggcggattgaacaatggaccccatgtggttaatgagactgacttgtctctaaagagattagatgacttccagaggaaactccaagagctccagaaagagaaggtaaaatattagttgggatatggttatgtgtggcctatgttcaaaccagaactaaaactgctttgtgtttgagcagagtgataggttacagaaggtgctcgagtttgtgagcacggtgcatgatctatgtgccgtccgtcgtttagatttcttaagcactgtcaccggagttcatccgagcttagatgaggcaaatggtgttcaaccaagagcattagcaatgaaacacttgcaaggttggct

SEQ ID NO: 8119 - DNA, 593 bp, Arabidopsis thaliana columbia
aataatgtcatgggaatttttttggaatatggcgatgactataaagcgtcatcataaaatcaagtattcaagaggacaaatggtgtttattgaagattcagtgaaggataatttatgacttttatttgttaagcaatcaatgaaagagattggctttgacaaagaatcaaaaatagttaaataaaatttagaaatcatcttttgtaaaatagaaagtgatggtggatagccaagccaagaatgccaagttgaaacatgagattggtgatggatacccaaactttggatctatcaaggtttttttctttttgaaagaatgtaaaatttatattcaaacaaaaaaacgttattacaaaagatgcatctgtttctcagaaattttagagtgaaaatagatagaggtgtagaaaaggtctgaaaaaaaaaaaaaaaacaaaaatgaagctgagggaagtagatcatgaggggagacgcgtggagagccataacctaaggcagttgtcgtagctatggtcaccaacgtcgtttatagagctgattctatttcgcacggttttgtcgatgagtttgatgagtctagtggtggtagaatg

SEQ ID NO: 8120 - DNA, 452 bp, Arabidopsis thaliana columbia
ccagcaataacaacttgttttaggttgttatatcggttaaaccgttgaaagtcgaaaactggatacttccagaaatgccggggctaatcaccgacttcttgatctccctcgatgaccgatttatttactttgtgaactggctccatggagacattcgtcagtacaacatagaggaccctaaaaaccctgtattaacagggcaaatttgggttggaggattactaccaaagggcagtcctgttaaggcggttggagaagacggcaacactttccaattcgaggttcctcagatcaaggtttgcaccaacgtgtaatcatttgaggatttaattaagtttcacattttttgtgcataatatagaagtggttttggtgatgtcaggggaaatctttacgaggtggacctcaaatgattcagctgagcctcggaggggaaccaattgtatgcaaca

SEQ ID NO: 8121 - DNA, 522 bp, Arabidopsis thaliana columbia
ccatccacactactttcaccacacgacaagtaaagaggatgatcgtcgtatctatgccactttactttctgcggtaaaagagcacacttgaagtccaaactatagtcacactcatcacagctaaagcttcctatatctagatccatgtttttgccacattccgtacaagacttagaactacgtttcgaaaagtataagggatgttgatggctttggtgcaccaatggttctcgaattgaaccacatcgtacatctagagtaaccatacgagtaagacactcgtacctgaaaccggtgaaactttgccaacaaagatcacatgaagtttcgtctgaagtatcatttgtgactagggtaaatggtaggttgtcgcaaacatgccgtttcttccgaggcaggttagcacatttttggtggagaatgaagtcacaattctcgcaactgtagaacgcatctgaacagatctggaagacacatgctttacatagtgtgctttcatggagaacctcccatccttgttga

SEQ ID NO: 8122 - DNA, 602 bp, Arabidopsis thaliana
tgcatatgtaaaactcagggaactcgctggtttcgagttttgtcgaaaactcaccgcttgatggatcatctgttgttttccaggatctcaagatcctgttgaatccggttttctgatcccatcccaatttcatctccgcaagtaaagtatctgtcggaaaatcgaaactctgcccataagaagtctgttaattggagtctctgagcaagaaattaccgttatcaagaagctctgcagccactggtgatctcacatctcctccggttatattcgtcgaccaaacaggcctatcggactgatcgaaaatgacgaggttattgccggatattttgagagttccgttggagctagagagaggattgtctctgtttgcaacccatacgtaggttcttatagggattatcttgtaccatatgccgagataccaacgcgaacttgatgcgggattgaagaaaccgagctcgaagatttgactaggagatataatggttttgttgcttgagatagtgagagattctgtggctgaaagagtgtttggagaaacagagaaagcaagaaacagaattaaaatgaggaaaatgaagaaagaatggtggtagttt

SEQ ID NO: 8123 - DNA, 1172 bp, Arabidopsis thaliana
cattgaacaaaaccggttcctggctcacaagcccggtttgctgccttaaccatttcagctgcaatgtctttatctcaactccatcaagagtgatctgaccagaatcagggtcgtaaaacctctgtagcaacgcaatcactgtcgatttcccgctcccgctctctccaaccaaagctattgtctgaaacagagggaaaaacaaaacaaaataagagactttatttgacccgaactgaaccaaactgattcattttttctatatcttaccttgccagcgcgaatagacagacagagatcttggaagatctgaacatctggtcttgaaggatatttgaaactaatatgacgaagttcgatatctcctttaacattatcaagaactctcccagactcatcacttggatcaatcttcgattctctgtctataaccgcgaagatcgatgcagccgcattgctagctttgctggaatcaggagacaatgaacttgactgagaaatagctacagccgccattgtcaaagcaaagaaaacctgtttcgaaacaacacaaaacactctttagaaggggacaaaaaacaggaatcatgagtttctgaaatgtttttgttgcctttaccctgaaaacagaatcaaaggttgttttcccgtcatcgacaagccttgcacccgcgtagaaactggcggcgtaagaagagaagaggacgaagaaagaaacaccgaaaccgataccactaactatgccttgacgtattcctgttctcataggaccttcacatttcttcttatacattttcatcactttctcctctgcacagaatgaagcaaccgttcttatgctccccaccgcatcattcgctacttggctcgcttcctcatacattctctgccaacaattttccgtttcatcagacaaaaaatagagatatgtaacttgtatagaaaatcaaagagagtttagtcgtacctttgcatctgcactgaagccaaccatgaacttcatgtatatataaccattaagcccgattagcggaacatcgcgagaacaatgaaagctaactgccaactcgccacaaacgctatgaccaaacccgcggttacagacgcaagattctgaaccgtttgagccaatgcgtctccaactagaccacggaccgtagctgcatcagcagaga

SEQ ID NO: 8124 - DNA, 622 bp, Arabidopsis thaliana columbia
catctagtaacccacaggaaaccaagacaagacctgtcgtatttgggacacaaggaaactctcggaatcagtcgctgtcctaaaaggtaaccttggagccgtacggtccattaggttcacatctgacggacggtacgttgccatggccgagccagcagatttcgttcatatctatgacacaaaatcaggatacaaaaaggagcaagagattgatttctttggagagatttctgggatatcgtttagcccagatactgaatctctcttcatcggtgtttgggacaggacttatggaagtctcttggagtatggtcgaaccagagactacacttatctcgattcattactttgatggaaatttaagctaagcctaaagaaaaaaaacttacgtaaaaataatttgttatacgccgtcttggttaggtttcataatcatatcgacaaaagaaaagaaagagagaccatggttcgattcacaagctgttcatttatgtaatttgttgtaaaaattgtacatttccatgaacttgggaatttgtttttgggatcataagtcaactcacattcctcgaaaatcttctagatttagttcgagatatagaaaagattttaagcaataaag

SEQ ID NO: 8125 - DNA, 701 bp, Arabidopsis thaliana
  unsure (1)..(701): unsure at all n locations
atttggtacaaggcaatctctaagagaacctacgtatgggttgcaaacagagacactcctctctctagttccatcggaactctcaaaatctccgacagtaatcttgtcgttttggatcagtccgatacaccggtttggtcgacgaatctgaccggagagatgtgagatctccattggtggcagagcttcttgataatggtaattttgtgctcagagactccaagaacagcgctccagatggagttttgtggcagagttttgattttccgacagatactttacttccggagatgaaacttggctgggatgccaaaaccgggttcaacagattcattagatcatggaaatctccagatgatccatcaagtggagatttctcgttcaaactcgaaaccgaagcttccctgagatttttctatggaacagagaatcacgaatgtaccggagtggtccatggaatggaatccggtttagtggtgtaccggagatgcaaccatttgaatacatggttttcaatttcactacgagtaaagaagaagtgacttactcatttagaatcactaaaagcgacgtttactcgagattaagcataagctcctcaggattgttacaaagattcacttggattgagacagcacagaattggaaccaattctggtacgcaccanaagaccaatgtgatgagtacaaagagtgtggtg

SEQ ID NO: 8126 - DNA, 559 bp, Arabidopsis thaliana columbia
tgacatggaagatgttgataacaatggtagtgaggaaaacgaagatgacaacaaaagaaaaagaaacaaaagggaaggtaagaaaaagaaaaacaagagtaaagccgaagatgttgaggatgtgattgatcggtttgagttcgaagtagaagattcagtaggaaatttcgttgatgagttttctgttggccgaaatgaaattccagatagttcagatgaagatgaagatccgattgttttgcgagatagaagaattcgaaggaacatagtcgatagattatctataggtcaattattcttcaatggtgttgagtttaaagaggctgtaattgagtatgctttaaacacagggaataatatagtttaaggaagatgggagaagacaaggcttgaattcaagtgtggtatcgtaggtaagtgtaaatggagggtgtattgctcttatgatgagccgagacatatgtgggtggtaaagacgacatatagaaagcacagttgtactccgaatgggagatgcaaaatactcagaagtcttgttattcaagacttttcatggaca

SEQ ID NO: 8127 - DNA, 594 bp, Arabidopsis thaliana columbia
ggttttaatttctttcgcagaaccttgccaatagatcacttgtggatgacgtgctgaggaaagttagcggtctcaaacccattgcagatgagctaggtgtaaccttggctcagcttgcaatcgcatggtgtgcttcaaatcctaatgtgtcatctgttatcactggtgccacaagggagtcacaggttagttcttgatcgcttataaagcattaacatagcgagtctcggtctagatttggatccaagatctgaaagattttgtttctttttttgtaccttgacagattcaagaaaatatgaaagctgttgatgtgatcccattgttgacccctattgttctggacaagattgagcaagtgatacagagcaaaccaaaacgtcctgaatcatataggtaaaacaacatccaagatctctcttccctattcaatcgtttacaaaagagtgttgcaggaaaaagaaaacattagaagaagctctgtgatgtatgttgttggatgttgtctcgttttcgctttgtttgttctctttagcagcttatgcatttttaagactcagacagagagaaagagagactaatgtttttttttag

SEQ ID NO: 8128 - DNA, 554 bp, Arabidopsis thaliana columbia
ctcaatgctcaattcttagatccggatcattcatggagggctcaaggagttagccacgtcgatcacgaacctgtacctaacatcagacttagcaagcctctccatcgcagtgttaatctcatccatcttaatcaattcaatatcagctgtaatgttgtgcttagcgcagaaatcaagcatctcttgtgtctccttcatccctcccacgtcacttcctccaaccattttccttcctaaaaaacagtaagtcgagttaacttgtgttacacgaaaaaagatattgcagaaaaaagttttctgatgttccttttttctttaccgagaacaagagggaacattggtagctcgagaggcttctcaggtaagcctaaagcaatgagctttccgttgactttgagtaaaccgagcaacggatacagagcatgtactgctgatatcgtatcgataatgtagtccattgttccaattgcagcctaagttttccatacaaaacaaaaccaagttaaagtcactctctttactttctgaactgaaccggattggaccaagtttaa

SEQ ID NO: 8129 - DNA, 635 bp, Arabidopsis thaliana columbia
aacctcaaatttttgttgttgttgtcagcaagcaaaaactcttttctttttgcagaagagggagaaatcttacttttgagactcatgtggtaatatgtacaaaaagacttactcctaaagtaaagagttactatgttgttgcaatgttcctctcttgatgattctcttccttaacaccagccaataaccctaactcaacatgctgatccttaatcctgctcataacccttgacagatcttcctcataaccaacaccaaacgatgaagacatcgtgtcctgtcttcttcctcgagaccgactttgtttgatctttagtatgaactgtgttacttctccaatagatggtctttttcttggtgtcttatgcacacacctgtttgcaatcttcgccagtaacctcacttcttcaatgcttgcgtttcccactagtttctgatcgagtatttcgtcgataccatctggactcatcgaagcctgatcatcagaaaaacagaatcattgatctcacaatcactcactgagttttggttcgatttgggttttaatttcagatttttgggttattcggtttggttgcatagaccagggattttacttaccaggttgatgtatccgatcagatctgtggggatgg

SEQ ID NO: 8130 - DNA, 469 bp, Arabidopsis thaliana columbia
cgcttcacgggggagctacctagagagattggcatgctttcacagcttgggaccttgaatatctcatccaataagcttactggagaggtcccttctgaaatcttcaactgcaagatgcttcagcgactagacatgtgttgcaacaatttctctggaaccttaccaagtgaggtaggttccctctaccagcttgagcttctgaagctctcaaacaataatctttcgggtacaatacctgtggctctagggaacttatctcgcttgaccgaactacaaatgggtggaaacttgttcaacggtagcattccacgggagttgggcagtctgacgggtttgcaaatagcattgaacctcagttataacaagcttaccggagaaataccacctgagctcagtaatcttgttatgcttgagttcctgctcctcaacaacaacaatttgtctggggaaataccaagctcttttgcta

SEQ ID NO: 8131 - DNA, 279 bp, Arabidopsis thaliana columbia
tctagagtagaggatttcaagtagtaaacatgactatgtcacgtctcccgagccgactcacctcttcttcgtccgtagctacagcaacaaaacccatccagttcgcgtgttggctccaaatcgagctgagttttgatttctggaagaagtttgggaggtttatgttggatgtagcgtagaggtaacgtgttacggtgtagcctttgtggagatgtaagtcaaggtgtaagaagaaatcagaaggatggtatttgcaagagccacagtatttagagtgag

SEQ ID NO: 8132 - DNA, 577 bp, Arabidopsis thaliana columbia
gaaactgaatcagaccaaagaaacatgtgaaggatgttaaagtgagcttcgccgggtattgctttagaacaggagcttgaagaaccatccaaccagcccatgacagacaatgtcccataaggtataaccatccgagtgtcaagctgtgcgagttgtcagatccgaccacctcttccttttgcatgttaaggccctggtcaaatatcggaaatcctctgtacaatgtgatcacggtggctccaccgatgctcacaagagttcccaatacttttgccacaccatgtttcctgaccaggtctatgtgctctagccttgattcatagaggaagatcaatgttagacccagccatgaaaatgattagaatggtatttctaggaggacgaagttgctagggtaccttaaggcacaagccatgatgaaagtgatggcaggaacagagttctgcattgcggaacgacaagttggagttgcatagtaaagtcctaataggtagaatccttggttcgctgtgatgctgatgttaaaatacacaagcaaagtttcagcattataatcattgatttaaggattgaggaa

SEQ ID NO: 8133 - DNA, 534 bp, Arabidopsis thaliana columbia
gggtaccttgctcatatatttaccaaaaaaaccaaagttacaacaagtgcattttatctgagtttttgaaaaatttaaagacaacaaatgactttacaaattaatgcctagtggaaagccaaaatattaagatgttatcatatttcgggtttctagtttttcgaagcaatgagattcggttgcgaatgttttatttttgctttcacttgaaaataacggacggtcaaacgtcggtaacaaaagtttgaatatcagagaaccattgatgattctggaccgttggaacataaagatactccatccctcggtcttagggtttgaactttgaatcacggaccgcactataagcggatccgttgaccatccaacacgtacacaatggaaggattcttgaccgtcagatcataaggaggattcatcctactgtcataactgtaatttccttgtcttttagggagaactgtccgatctcgaagtattaatggccatgtaacaagagcatcattgtggagtccaaaccgtttagtagagcaa

SEQ ID NO: 8134 - DNA, 589 bp, Arabidopsis thaliana columbia
gtaacgtccgccagtgtgctgtaaaggagaacgatccttgtttggcgtcactgtgattatcactctgcaatgccgggaatttcgtcagcatgatcagcagggcgaccagtaacacgatagccacgatgatcatataaggtgtctgtaccgataataccaggctgtgtttatacgcactcaattgctctggagacattttatcgagaacgtcttgcgattgatgtggcacgttagacaaaataagactttgcccaaagacaaccgcgataattgcgccaaacgagttaaatgtttgcgcaagatttaagcggaagtgaccactactttccggccctaataccgtaacaaaagggtttgcggcagtttccagacaacctaatccggctgcaataataaataggccaactaaaaacaaggtgtagttcattatttctgcggcgggccagaataatgcagcacccaaggcatataaaaataacccggtaataatccctgctttataactgagttttttcacaatacccagcagggattgggataatgaaataacaaagtaaaaggccgattggatcaggccagcatggaaatt

SEQ ID NO: 8135 - DNA, 529 bp, Arabidopsis thaliana
  unsure (1)..(529): unsure at all n locations
aaagtgccagcattttcatctcttgttcaagctgaggccagaagtcacaggaaatcatcaaccgctgacaagcatcctgtagtcgctggatatgcgccgataacaaactgactttaccgtcgataactctggcggtggtaaaacaaccatcaccaaactgcgttgcccgatcgcttactgccagcgattcctgcttatgaccgttaattaagaacataccggctccttatcagagaattgttagtgtggcagcatgttcactacggaacaagtcggaataaaagctaagaaaaaaggcccgcaagcggaccttttataagggtggaaaatgacaacttagatctttttaaagatcaaagaaccattagtgccaccgaagccgaaggagttacacagagtgtattccattccgctaacctgacgcgcttcgtgcggtacgaaatccagatcgcaaccttcatccgggttatccaggttgatggttggcggaacagactgatcgcgcacgncaggatggagtagatagatt

SEQ ID NO: 8136 - DNA, 514 bp, Arabidopsis thaliana columbia
tctgaaaatatctgggatttgtaaagcagctgaaagtacttaaaacaaagcttttagatggtcccggtggactaggtaactacttgttagagctagtagggtttattattgttttgtttgatctaccattagattcttatctttaattagcgtctaagctgttgtcatttagctgtatgattatcatttatccatgactgcttaagaacattgctgattacttcgttcattagtatttcttggatttttctagcattaacattgcttgttttctgaatctgtgcgtgtcttttttgaaatcgacagcgcactccaatcaggttgcccatgctccttccagtcaggttgcgcagatcaattgtgggcattgtcggacgaccctcgatgtatccttacggtgcatcatccgtcaaatgcgctgtttgtcaattcgtaactaacgttaatgtgattattcctatcgatcaagccacctctgcatggttgagttaagtatagagatctttctgttgga

SEQ ID NO: 8137 - DNA, 558 bp, Arabidopsis thaliana columbia
tgatgtgttttttcatttatttacagccgaagaaaccgtttcagagggtgaacgttgacgaaattgtgtacactgagaatagcaactcgtactattcaaaggttcgatataatcttcattgctccttgtatagcaatctttgttttatcaatgcctttattgaagtttgcttcactgtcttatagggtggtgctgaaattggctatggtcttaaagctcaagaggttctcgggcaagtgagaggaaggtaatgctcctctacctatagacttattgtatagagttagacaacgaggctctaggttgttgattcagtttggttatttcgggtttgacaattcataactaaagtataacctagtatgttcctcaccctttggacttgtcctatatcactgatttaggctcatatcctgatctcttatatgtcaccttgttttggtttagggatttccgacatgagaagacgaagaagaaacgaggaagctacagaggacggatgatcgatcaagagtcacattcgactaagtttaataactcagacgacgaagaatgatt

SEQ ID NO: 8138 - DNA, 554 bp, Arabidopsis thaliana columbia
tggacaagactcttcctggagttctctcctcgagcgcaatcattcaccaaaccgttttcatatagcgccaccattatatcgatcccgctcgagtccactttcatcctcaaagctccggtgagagatacttgaagggtttctgatgttggtctttgaaatgtggcctattaaaacaaaccaataatagtttcactgattattatgtaatgaaacacagccaaataataacaagaacacattacatatacaaaagatgtaataatgccttcgacacatagtgttgtcttatgctacaaagcactcattgagtcttgaactattaacattcatgtttaatttgcttcatgttaataaaataacacattgtgtagtacgagatcaatcattgatttttgttagtgattccatcaacatcgaaaaatgtaagaaattactcacccgaaacgcaggagacggaaacctaggagcttcaacaatagacttaagcaaggactcttcttcattcccaagtaattgaacacgaccttgaacaacaaactgtggagtaacattgt

SEQ ID NO: 8139 - DNA, 691 bp, Arabidopsis thaliana columbia
tcaaatagttaaggatttaattaggatttatgtaacgcaggttttgagcgatcagacttttgcaattatggttctcatggcgatattcacaacattcatcacaacgccaatagtcttggcgttatacaaaccaagcgagacaacacaaacacatagtagcgtcagtacaagaaccgcaaacatagacgcaagattgagaatgatgaagaaggcgagaagatgcagcagcttaaggttttggtatgtcttcaaagcagtaaagatattgatcccatgatgaaaataatggaagctactcgtggaagcaacgaaaccaaagaaagattttgcgtttacgttatgcatttaactcaactctccgagagaccttcttctattcgaatggttcaaaaggtgagaagcaacggtttgcccttttggaacaagaaaagagagaattctagtgccgttacggtcgcgttcgaggcgtctagtaagctaagtagcgtttcggtgcgttctgtgaccgcgatttcaccgttgtcaacaattcatgaggatatatgtagctctgctgatagtaaatgcacagcgtttgtgattttgccggccataagcaatggagactctggagaagaatttgaacggtgagatcgggtacaggggataacaaagagtcttgagaatcaccgtgttctgtggaatttggttg

SEQ ID NO: 8140 - DNA, 570 bp, Arabidopsis thaliana columbia
  unsure (1)..(570): unsure at all n locations
tnnnnnnnnnnnnnnnnnnnnnnnntaaagggtagcgtttaaattcccggcgcaggagcagatgacctttgtgcgtgacgtcgagtttcaggttgggcgtactggcgcgattacgcctgttgcgcgtctggaacctgtccatgttgcaggcgtgctggtgagtaacgcaaccttacacaatgcggatgaaatcgaacgtcttggtttacgcattggcgataaagtggtgattcgccgcgctggcgacgtgatcccgcaggtggttaacgtcgtgctttctgaacgcccggaagatacccgtgaggttgtattcccgacgcattgtccggtatgtggttctgacgttgagcgtgtggaaggtgaagcggttgcccgctgtaccggtggcctgatttgcggtgcgcacggtaaagagtcgctgaaacactttgtttcccgccgtgcgatggatgttgacggaatgggcgacaaaatcatcgatcagctggttgaaaaagaatatgtccatactccggcagatctgttcaaactcaccgcagcaaactgaccggactggagcgtatggggcaa

SEQ ID NO: 8141 - DNA, 594 bp, Arabidopsis thaliana columbia
  unsure (1)..(594): unsure at all n locations
tcggtaccggggatctnnnnnnnnnnnnnnnnnnnnnnnctaaagcggaactcagtctctgaatagtaagtcaacggcaaaaaatacgcatatctattctggtggcacgcaaattgttgataacaccagcacctcggatgttattgaagtttattctggtggcgtgcttgatgttaggggtggtacggcaacaaatgttacccagcacgatggtgcaattttaaaaactaacactaacggtacgacggtgagcggtacgaatagtgaaggtgcattctccatccacaatcacgtggcagacaatgtgttgctggaaaacggtggtcatttagacataaacgcatatggttcggcaaacaagacgattattaaagataaaggaacaatgtcagttttaaccaatgctaaagctgatgcgacccgaatagataatggcggggttatggatgttgcaggaaacgcgacaaataccataattaatggtggcacacagaatattaataattatggcatagcacgaggcccaatatcaacagcggaaccgaaaatatcaaaagcggcgggaaagctgacacaacaattatatcctcggga

SEQ ID NO: 8142 - DNA, 1039 bp, Arabidopsis thaliana
actctagacgtcttgtaagctcttcgataaccttgccaagcttaaactctcgtttcagaacaattcccagcgcgagatttcacagcctcaggtctcttttacttccaaacacgtttctgttctctatgatgtcgaagagaagaatactttcattaagagcactctcgatgttcacccgcgtcttcagctccgagctcttcataatgttaaggtacatatctctacttcttcctaattatcaccgtttgttacaataaaggattgattttttcctggaacactttgtcaatttgatgaactgtgcgcagagaaaccttcttgtcaactaaatgatcaaattgggcgtaatttgtcatctatggcacagaacaatttatgtgattgattgttgaatggtggtcatattgataggatttgtggtaccttatatcattggttttggttccttttctgttgagcatctcacaatgatagaatgtgattgtttctgagtgggacattgctgtgcaactaactaccactagctattgaaacttaacattttcttttatagttttggatttcggttgtatgctagtgattatgttgggttttttctaatgtatttatcggtttaactgtgtgttgttacaggcacaacaaggagaagttgctatggaggcaaatctgactgaacctggctactctctggagctttcatcacctgtgcctattggttacgtgagtggccatctcttacattgtctatttggttttgcaactgcagtagtatcaattaccggtaaattgttttcttgcttggttgggagttttctttaaatgctaattataatcccatatggtttactcttcctgcagccaagagcaactcttaaattcccacttggcgaaatttcgttacaagaaaaagatgaggaggaggaggagaagcagaaaagaactttatctgttaatgggatctcaaacggtcaagttatgaatggtgtttgtaccgctctatacacagatgaagagttgaggctgagatatgcttataagg

SEQ ID NO: 8143 - DNA, 595 bp, Arabidopsis thaliana columbia
ggacggccatttgtatgtaatcagctcatactcaaagttgtattcttgtgccatatgtggaatcacatcctgcaagattagaatgcgatacacattaagttaatgtggctacaagataagttcacatctagagataagaagacatatatagatacaaacacaaaaggcatatgtggaagcaaagaaacaaggagccaaccttaaattgaggagagagataattcttaataaaccagaattttacaggacgattggtgttcttcaggacactgagaatcataatcttaaggaaacgctcgtatctgtcataagcagtgcctcagcgtcagaaatgaattgataccagcaaatcatatattaaactttttttgttcacataatacacttaaaactcttatgcacacgaatatccaatctacatatagacgtagaaataccaaatatgattttcttttcatatgattgatgcacttaaagtaattcagattttctaaaatggttcaacgcacgtaattatattaagtcaatgtgtgcggtcaacaggttagaaaaatgatagcgcttacaaatgccctgaagcaatggagaatatatt

SEQ ID NO: 8144 - DNA, 471 bp, Arabidopsis thaliana columbia
ccagggttccagctaatctaaactaaatttgcagtgtaaagaatttctatattcaaaaggtttaacaaacaaatagcaacaacaccagaaacacattcttatgggatgtccaatcatctaaaaacttttccggattaatttgtacaccaaagccccatcacttaaaaaacttcatgaaaaaaagaaacagagaacaccacaaggttacaattttgacacagatttcaccgattcagaacttagttccagtttatatcggtcgtacaaattcccgagctttcgtttcaaaagtgcaactgcctacaccttgagatgtctacatcggttgggcaataaggacacttgaacgacgacttagagccattctttgacattttgttgatcgtctgcttgcaaagcacatgtccacaagacatcatcatcggagggttatcatcacttgactgttctttagagactggacagacaaac

SEQ ID NO: 8145 - DNA, 636 bp, Arabidopsis thaliana columbia
ggggatttatctagtgaatagtctcattggatatttggaagaaaagcccagatgattatttttggaaccacattcaagacacacagttgtcttgtattaacataatgaacggtttccaatgattcactctctggatgcagtcaatgtcttttattttggagatgttctttgggtttcgatcccggagtcaatatttggtagagttgggactgtctattttttcttgaaggcgaaaaattcatccttctgatgacaccgttagatggtgatgatgtttcccaaatctcggccgaagtggtttttgtggagagaataggttgaacattaactgagatagcgccgattaaagcacaatatatcattttgtcttgtcttttccactgagtgtacctccgattcgtcgtgacggaaccattggtggtgacagtaggtggtggtgcaacacaagaaccatcaatgtagccggcaagatcacacccatcgagtagggcatgaacctaacaacgccacatcatgaagttgttaccatgagtttggtaaagtttgtcatattgacatcaagagatgaacagaatcggaggtgacaatggtctgagagaaggtggctggagaagagccatgggaattgtaaaaaat

SEQ ID NO: 8146 - DNA, 596 bp, Arabidopsis thaliana columbia
agatccccatgtgctgtaaagcatatcgcgcgcggtgctgaactgccccggcgcatccaggccgtgcaccgtctggaaggtagtgttggtcagacccagttttttggcataaccattcatcagaccaataaatgactcctggctcccggcaacgtaatcagccagcgcaatacaggcgtcattaccggactggataatcacacctttgttcaagtctgccaccgaaacctgatcgcccggtttgaggaacattaccgatgaaccacgcagtgccggatttcccgtcgcccaggcatctttaccgaccgtcaccatatcggtgagtttaatcttatcggccttaagcgcctgcccaaccacatagctggtcatgattttagtcaggctcgcgggatccagtttctcatccgcattgccttctgccagcactttaccgctggcgtaatccattaaaatccatgcacgcgcatccacgctcggcgcttcaacggtttgttccgccgcgaatgccgttggggcaaaaaggaataaaaatgcagacccgctgcaagacacgaaggagagaggagtatgcgtcataaatgccaccgagtacc

SEQ ID NO: 8147 - DNA, 566 bp, Arabidopsis thaliana columbia
taatcactccattgatccagcatcaaatttggtctttcaactatatcagtcacataatgatgcaccactgcttgatttttgaagatccgtggccatttgttttatccttgccagttccttattcaggttttcaactacaccattcgactgtttcacagcttcctttgctctactctccgattcaagtcttttagcttgctcatcgttcagctcctttactacatcacttgaccgtttctcgacttcttttgctcttttctccaattcaagtctagcagatttctcttctttcagctgctgctctagcctctcttttgtctctctcagctcagtctccacctatgcaaggaattcataggcatgaccacatgttacaaaggaatcattaaacaaaaactctccttcacaaataatctgattatgaagtgtcaaaagaaaaagctaggtaaattcatgttatcacattcatgactcaatataacatgtagtaaagaaagaatatggaggaaaactccataacacattaccctctccatcatttgcctgagctgctgatttcaaaagac

SEQ ID NO: 8148 - DNA, 372 bp, Arabidopsis thaliana columbia
cgccttcagctagcgtctggtcgctaacctaatccttgaagtacaatctgtaagattgtgttgccggagaggcggagctgatgaccttggaactatcatcgcctttaggggttggactattttctgttgtcgcagaatctatccgccgtcatttggaaagtcaagttaatatcgtctctttccatgactgattagtctccaatttttcttgttaaaatctatctatatatatattcagatgtggagatatagggaatatagcttgcttgagaagttattaaataatttctcgttcactgctctttatcgaagttccctaatatttgcaagctgtattttgctaatgagagcgtcgatagactctctaaattt

SEQ ID NO: 8149 - DNA, 533 bp, Arabidopsis thaliana columbia
  unsure (1)..(533): unsure at all n locations
ctnnnnnnnnnnnnnnnnnnnnnnnttaaagtcgttttccagcgttggcatgacagcaaagccaatcgcgatttgatgaaaattgaatatgtgtatcagagtgcggaacagttacgtaatgccgatgcgttaaccctgcaggcacctgcgcactgtgtgacgctggaattaagcggttgcccgatagacgctgatggtttctgcccgatggataagtttgatagcgtgttgaatgaagcggtgaaataacagaaaactcccccgcgagaagcgggtagtcgctggttaaacgtttttacgttcgatggtctgttcgccccaaaaaagcgaatctttatcggtcttagcaaaggctttgactaacacttcatcactaccttcttcccaaatcttttccgccattttttcgtcgtacccggcgacttcgaaaatggcctcggctatttccggcgacgtattgcgcagagatgcccattcacgacgtgatgagctttcgcttcttgagttggcatgcgtatcctcctgttgaagat

SEQ ID NO: 8150 - DNA, 522 bp, Arabidopsis thaliana columbia
tataccgaccaactattggaaactttaatgttgaacttagaggaagatttttttttttttttttttttaaaatgttctatgtttatctacgttacatattctaaaaacaaaatgcgaacttccgaaaagtcgtttaattctacgattggtttgtcttctaattcataaatgaatttagtgaaagtttttatacgaacacgtgcgtatgtgtgtatagtacattgtttctattggtgtgcatagattctttatgataaaattatagaaagagacagcaatcatcttaggtttaactaatgtcaattattggttttgtagggctaaatcggtgcaggaaaagttgtagactaagatggttaaactatttgaagccaagtatcaagagaggaaaatttagttctgatgaagttgatcttcttcttcgtcttcataagcttctaggaaataggtataatttaccttattctacttatttaacgagcaagaagtctaatactagtaactcgtatgtatacgtaggtg

SEQ ID NO: 8151 - DNA, 630 bp, Arabidopsis thaliana columbia
tgaaaatgatgaatatcatgtctcagatcatctagctggactagttaatggaactgtagttaaccatggcgctgtggaagttggatctgagaatggccatattcctatggagagaggacactctgcagattctcttgattcgaacgcatcagttgcaaaagcttctaaggtgatgtcgtctaaggataataagtggattcaagttcggaaaggaaccaaaattattgtgcaagttgttaaagagggcctcggtacgaaaggtccaactcttactgcttacccgaagctgagaagtagattctgggtatgagatatgttttatcccgttactcttttccatttgtttcttattattctattttctgaaataaagtttatccttataggtactattgactcgttgcaaacgaattggagtctcgaaaaaaatttcgggagttgagagaaccggttaaaagttatagcaaaaacattgcagcctcaaggttttggcctgactgtaaggactgtagctgctggccattctctagaagaactgcagaaagacttagatggtctgcttttaacctggaagaacattacagatgaagcaaaatctgcagcccttgctgcagatgaaggtgtggaagg

SEQ ID NO: 8152 - DNA, 487 bp, Arabidopsis thaliana columbia
taatgtgatgaacatgcaaaacttaacctgttggagcagagtgtcatcattagggagcttaaggtcatccttggtactaccgttatcagtcaacaaactgacctgcaaaatgattacaaaacagaacaagtaactaaaccatataaaggaacaagtgctatttaagaacacatacatatccatcttcagaaatgtcaatcagctgataatcagtacggttgacatgaggaacctgaaacccaattcaacaaaaacaaaatctcaaatgggacttgaaagaaacaaacaagagatgaaagtgatcaaaggagcttttttcacatacatcacaattgtgggaagaaggaacaatatcttcgagtttcttgctggtgaagatatcaatagctacaaaatgacatttagcatgaccatgcttgccagtcttcgaggttgaacctcacatcctgcgaccaaaatgacatttagcagctgatcagtacttgtg

SEQ ID NO: 8153 - DNA, 466 bp, Arabidopsis thaliana columbia
gaggatcggcgtaacaagttattatgctttggtttgttagattgagaatgaatatggaaatattgactcagcttatggtgcggctgctaaaagttggatcaaggggtctgcttctatggctctttcgttagatactggagtatcatggaatatgtgtcaacaaacagatgctcctgatcccatggtgagtttttaagacttcaagttcttggataggtagtgtgtcagatttgtggtggttagtctttgtgattgagacattctttctatttgtttgtgtttcttggtagatcaacacatgcaatggtttctactgtgaccagtttacacctaactcaaataataaaccaaagatgtggaccgagaactggagtggatggtgagtctcttgcttttctttttgctttgttcaaagatggcatttgactcacgttcttgtatattggtaggttccttggttttggag

SEQ ID NO: 8154 - DNA, 516 bp, Arabidopsis thaliana columbia
catatttatatggttggtttgtttaactatcatggaaaattccacaagtaatcgtctcctccaggaaaaccatcagcgtcgtaagcagcatcaaagacagtaggacgaggggggctaagaagcattccttcagccatattcatgagcacattaggcatgtcgaataccaaatcctcgtccatgaatccattcatatttgtattatcataactactattcatgcaagccacaccacttgtttggctgttattatttgccataacaatcgcatccctagcagcaccaaaagcagcagcggccgaagcggctgctgctgtggatgtctgctggagacatggaggttggggcaggcaaagaggaaactgagtttgggaagttgagctcagcttgactgcctttgagggctagagctgccacgtcataggctattccgccatctcgggggtagagaatgttcctaccagatacggttaggttttctcggctcacggatctcagaaacccatttgtttgagt

SEQ ID NO: 8155 - DNA, 573 bp, Arabidopsis thaliana columbia
catttatcaactccgccagacttcttgacgagatccaacctcagcctcagttagtccctaccggccaaatccccactgtggctccaaccgaagctgaggaggaggatggaaccgatgacaacccaggactagcaaccacaaccacaactgcatcagcagttacagtcccagccggtccagcagaggctacagagccattactagagttctttatgcatgacgtgctaggcggatctcacccatcagctcgtgtggttacaggtatagtagctcaaactgaagtgaacggaataccattctcaaaggccagtaacagcattttcccggttgacaatggagtcccactggtcaactcaaacaacatcaacagtgtcattaacccaaacacagctccacttctcaccggacttggcggtgctcaaacctccaccgtcatccaaaacactaacggaaattccaacgatgcccttagcgccaacagtctcccttttgtaactgccgggaactccattgtcctgcttctttcgtcggagggctgtctttgggctttcgaaaaggtacacatgcaagttt

SEQ ID NO: 8156 - DNA, 897 bp, Arabidopsis thaliana
ggttttgcggtacttaaggctaagaaagagactgtttttttggggatgaagaagaacgaagatgagagatctagggttcatgaaaccagagagatgaaacaaattggtgattccaagtcttttgcattgatgaggactatcgagaagaagaagcaatcggcctcaccaattcaaggttctaaaaaccctagatccggggcgggtgaaacgggagtgattaagaaaattttgaggaagcctgacttttgctgcaagtctgttccatcaaggcctcctctcaacatgaagaagcatcaaccggtgaaagcatttgaaaaccctaaaacttgtcttgtgttgaagaagaactcaccggagatgttggagctattcgagatggccaagaagtcagcagatgttgccaatgccaagggatttctcgcagctaaagaagaggcatcaatatgcgtcgacatactcgctttactcatgaaattttccatcatctcaacggctattgaaacaagacggatcatggaaaagcttgagcgtctcacaaagcacaaagatagaaagatatgcaatgctgcattagcacttctccaccattggaggcagaccattagaaatcaacaacaatgagtagtgtcatcagagaatctgcggaagacaagggatggaaattagtaggatcgtgacttgaaagttttggttttctattcgtttagtaaactagagtagagtagcatgccacttaaattccattacttagaagcaaacaatgttatgagttaatgagttgtgaatatattatataaggattttcataatctctcggtgtgttgtttcaagtggaatgtgtgttttccttttgtttatgcaaattcatgaaaatggagtttgatttgacgacatgac

SEQ ID NO: 8157 - DNA, 598 bp, Arabidopsis thaliana columbia
cgcttaacgctttgtcagttcgtctgaagtttggccgtggggaccccctctccatcgtggattctctctccggcatggagagctcaagctctcggggacactccggaggtttcctctgtggagactgaggacgatttctgcgccaccacctcgtttgggtctaactctaactcctttccaaccggtttctcttttccagagaatgtcatacctgacacatatggaaggtaaaaaaaatcttcctactaaatcgacatgttagaattcaattattttcgttcaaggtataaattattcctttcagttatacacactttaaaattatgaaagactagatggtgagcaaaatgattcttgataacaatggatttcttactatctagtggtagttaaaaaacatattttgtgtttgttttccacatattgtgtttgtttccaaaaccgctcaattgcgaaagttaaatgtcgtgtatagggaggctgagaacaaggaggaggtacaaattacttagatgcaattcttgaggaggttattgttgagatgactgagcatagcttagatgtggttttggaggctaagcaagatatctgtaggata

SEQ ID NO: 8158 - DNA, 1251 bp, Arabidopsis thaliana
catatatatggctcagttttccattatatcccctagccgcacatctcgtggttctcggtatacatattctttcctgtccaacttcccaaacttttccccataaaatcccaccctgtaatatgtagcatcaataaatgggattgggtttgattcttggtcaagaatggactcgtatatattagtaagtaaagtgtgacacttagccaactgcccataagccttcctgctcttgtaaactggaataacaagttctaaaatgcttgcacaaaaatggtagagctcagcttgagagaaaagcttattagcaagctgtaaatacttgacggcggagtcaactgttagctttgaagcaccataaccctcgacttcagctgcagatgcctctgttgtaaactcgccacttaccatcgggcaaatcttacgcaaggcagacacatgatccttgctccacacaccatcattcctagccaccaaggcctacaaggcgaaagccaaaacatgcacataagttctggaagtagtatttagtggacgggaagacttgattgaagacagcagagcttaaacgccaaccagactgcgagatgatccactgcgcatgtaaaacacataccagatctatatattattacctgcattatcacacctgcaaccgccacagcacactgtgcagcttctgcccaagactgcatttcctggtgggcatcacatagatgcaataaccacattatgtgaagatccggaacaggagcaaacgccattccaagtttgtagaagctctctgcagcagcatatcgatccatagccatcacagatccctgtaataacaaaattttgcattggaaaaatacagaatgacttccaaactggttgaatctaatggtatcacgatatgaactaagaagaaacgtgacaggaaatggtgcaaacatgacagtgatgccacaaaacaggattggaaaacttgtgtaagtttgacaagcccggctgtgatacttattttagatcagtgatgtcaagacagtcattcacagtaatatctgaactcacctattttggaactccctaagattcccaagtttaaagttcaggaaatattaggaaagagaagggagggacaggaattactctctataagcgtaaaattatcttcctattagtgatgagaccatacgatcatgacaggaaatgcagatgtactcggacacactttaagttccatcactgtcaatttccaacttccacgtatca

SEQ ID NO: 8159 - DNA, 575 bp, Arabidopsis thaliana columbia
cattttttataccttgatgaattgcttcactcccaagttaccatttggagtatctaggtaccaaatccgtaggtatgggagttgatttaatattgcgtgacatgtgtagatggcaggcaaagtttagggcttttggactgaggataggttacgtaggccactactgctgggcctttttgttcttcccggtgacaagagcctctacgatcctgccacttgtcgggttaacgtcggagtcaagcataaaatatcacatttggcttggacatgtctcaaatttttgcttcctcgttcacacagtcgttttccttatctactgggccatggtcaataagttgatggaggtccgtgttacatgcatctaccttaatcttatccttaaaacaaaacaaaacaaaactttcattctttcttttattccaactgatatttgtttttacgatttcttatatatgtgaagacgtttgcatggaatgaacatatgtgcctaatctggccggaacaatagcgatggtgattggaatagcgatttgggtgacgagtttccatcctttagacgaaagaagtttgaaatt

SEQ ID NO: 8160 - DNA, 532 bp, Arabidopsis thaliana columbia
tttctaacagaatgatttggtttctgttgttgtttcaggtttatgaaaaggtttggctctttaccaatagtgttttgttatatgcagtaagccagaatccttagttgactttataatgttctcctagggagctgaggtcgtcaggatgtacaaaactctactaggaactcaggggttccgaaaggttgcttcccaacgctactttttgtgtggatccagtgacgagatttttcgtctaaagtgttctaatcatctctatatatccatatgttacagggaattgatctctattttgaaagacatgatgagcaagcagtgacttgtgaagacttctttgctgctatgcgtgatgcaaataatgcagactttgctaatttcttgcaatggttagtcagattattattgtggaatttcttgtgaagattcttgttttcatacttctaaggatataccatatacaacatcttaggtactctcaagctggaacgcccgttgtcaaagtggtatcccttacaatgctgacgctcgtact

SEQ ID NO: 8161 - DNA, 883 bp, Arabidopsis thaliana
caatgggaacgagcgaagacaagatgccatttaagactaccaaaccaacatcttcggctcaggttaatccttctcttctcctttcttttcaacatctttgttctgttttatattttaaggtgtttgatgtatctacctctctctttttcaggaagttcctcccacaccgtatccagattggcaaaattcaatgcaggttcgtgttacatgtacaactttggtcactattagtttttatagtgtaagtgaatactttctcgaaaacaccgggactgctgaacataatagtatatgcttatttctttaggcttattatggcggaggaggtactccaaatccttttttcccatccccagttggatctcctagtcctcacccctatatgtggggtgctcaagtaagttttgtatcgtatagttgttgatatgattctatgaaaaagaagtttgcatcttattctttggataacactaaatgagtttctctgttttgcattactttcagcaccatatgatgccgccttatggcaccccagttccgtacccagcaatgtatcccccgggggcagtctatgctcatcctagcatgcccatggtaatctccataccattaatacaacattagctatcgttgaaagctttttgctctgttacatggcaatgcatagataaatgagaaagtaaaaaacttgctcgacatttcttttgttgtagcctcctaattctggtcctaccaacaaggagcctgcgaaggaccaagcttctggcaagaagtcaaaggggaactcgaaaaaaaaggctgaaggaggtgataaagcgctctctggttcagggaacgatggtgcctctcataggtgatttttataacactctactcaacgtgg

SEQ ID NO: 8162 - DNA, 517 bp, Arabidopsis thaliana columbia
cgtagtagaatctctgattagatcttttgttgtaccttagggtatgaaattgctgcaattgaacgagattggtgcaaactctcgaaagccccggtaaatatattatcttgggaattttattttggtggtacgtgctgaatgatcatataataatattaactctccacctgcaatcaaaattgttgctagtatcccttggacgaagatttccgtggagggatatgacactaggctccgtgagtatacagtcaagctcgtgttggaaaaacatttcgcttcatgcggaaagatcacacatatttatgttcccagagactttgaaaggggtatcctcaagaggtaccgtactttgtggcttcgatttccccaaaaaaatatataaactttgtatccttggttttacagtgtcgccttcatgtgtatcaaaggagaaggtggcgaagaaaaggcattgctgcttagtggactgacgcgggaggatggactgcaatcgttaagcctgcactctggcagaaag

SEQ ID NO: 8163 - DNA, 530 bp, Arabidopsis thaliana columbia
tcgactcgccgccagtgtgctgtaaagggaaggtccagggtcggcttgcgaacctggtttaagaaagccagcatgggttactcctgaaatgaatacctgcgtgaggcatgcattgtaaaaatcagcagcaaatcaggcctgagatagcgtccaggcaaaacctggaaaatttcttagttttgccggatatgaagtgaaaaggtgagatgcatcacgcttcgcgcggtgtctgggcgttcaaaaagggcagtaacagcagtgcggaaatcccggcggcgatagagataaccacaaaaaatccgctccagtgccaggtatcgagtactttcgccagcggccaaccagcaagcgacgcccccagataagcaaacaagccgacaaaccccgtcgccgcccctgccgcctctttgtgggaacactctgccgccgccataccgattaacatctgtgggccaaagacaaaaaaaccaatggtgaagaagcaggttgcctgcatcacgtagctggcaaatggcatcagcacaggggag

SEQ ID NO: 8164 - DNA, 354 bp, Arabidopsis thaliana columbia
ccaacattcttgaaataggattgaaagatcatggaaccttttcagacagcacccaaccatttgaggcagaggataatcaaaatatgtattgacatacaagtcttaactcttcttattaagtatacaaaaaatggatacctgtgtagggtgagtttgaattgtgtccattataaatttctcatgcccatgttgtaaatgatgtcttgcacctatcgcgagggccatcctcttcgaaacaccctgtcgaactgctgaatcttcacctgttattgcctggaaaaagtttgtcaacaatcagtcatttgcatgaaattaagaaaggtggaaagataaaaacaatccttaagagggtgg

SEQ ID NO: 8165 - DNA, 745 bp, Arabidopsis thaliana
tcagcgtttgctctctgttctgcaggtttgtttcttacttttttttctctctctctatctacatatttatattcctttgtttgcagcttttctctgcaacttcatgtgcctcctactgagatcagtcttttagaaagtaagataataacattaagagcttgtgctctccacatgtgtgttaatgacgactaaaggagaaaattaacgacatagtatgttacgttagtgttatttggattgattaatcttggatataaagaatagacaagcttaagtctcttttttttttcttttttgtaggccgatcatccattttaatctatagccaagaagatgatcatcccgaggtattcgttttaactccaaaaaaagttgccaactaccgtgcgttgtatatctttacttagtaaaaaaccgaacaaattgataatcaagatcgtagttatatgatttcaagaacaattttgtacgttggtgaatacattctatttgtggacaggtagtagaaagaagaatacatgagcatgagagaattctgagaatgaattcaagagactatggccactccagtcctaaaccaaagctcgtgagacctcctttcaagcttattcccaactgatcatgcatatcaccgatcgactatatatagatgccagactttctgagatgtataatatatgtaacctaaatactaacactgcaataagtttgaatgataatcatatatataagtttcaagatatgt

SEQ ID NO: 8166 - DNA, 624 bp, Arabidopsis thaliana columbia
catcaccggtccaagtcaccttaactttgggaccagttggaccatcttgaccccgcatttctaaaggaattttgttgatgagttttcgcaaacctttccgtaaaaagatgggcaaaatctttgcgacagagttgagaaatatgtcaatcctgtaatggactcgaggtccccatttcctaaaataattcagccacggtggctcaaccacgccaggtcccgcaatcacttcatatccaatacctgcgtcaaagcatttgtcgcttcttgccatgtcgttccttattccacttttgccgccaccttgcaacacgactccaggtttggagaacattgcatgcccatgaagagacgaatatactactggtttgtttccacttgcatgaactctagatcgcatgcatccactaaagttcctccactgtgttcagaaaagtaaacacgccataactcaccattgaagttgctgatgcgtaatgtaacgtgttccagtctccaacatgctcgccaatatttcctagcgacaggctcttgataaacaaaaattttaaatgtgcattcccgttatagggaaagaatagcgatactacaatatctgtgaaagtagctcaaacattggtttgatgt

SEQ ID NO: 8167 - DNA, 516 bp, Arabidopsis thaliana columbia
gaaagaaaatacataaacttctattttatatcccaccctttttcttactatcaacaaaaaaagaaaattgtttaatgtcggttttccgattgttaaaaatatccgcttaattttcttacacacattttttattacaaaaaccaacttcaaactaaataattatgagggttatatatatgaaggataacaaacaaattacagattaagaaatactataatgaaggataacaaacaaatgacacattaataagaaatacttaaatttggcatgggtccgagatagttgaagactgacccctgtttaagcggattccaacttttaccaccaatttagctctccccaatcttgcttactactttcccttcccaccatctctatccatttttcctatctctctcaaaaaacaaagtgaaaaatataaacggaggatgcaagaactgccggattgtttgtacgaggaaaaccaaccaaccttaataactcctttatctccacaccaaatcactctctctacc

SEQ ID NO: 8168 - DNA, 518 bp, Arabidopsis thaliana columbia
aggatgcctagccagtttggcacagcaataacatgaatatttaatcaaaagttcaatgatattttgatattaccaaactgtcatacactaattgtttagattgaactttaataaaacaaagaaaatcaaataattgttcatgtgaaatttgaagtaatgttagaactcaaacttttcactctcatataggtaacaagtatgaaagtaaacacattgaaacgaaacaagatagaaaccatatgatgtttttatttctcttgccacaacaataagccgattgaatattttcagtacaattccaagttgttgaaatctctctctagtacaaaaaaagagaaacgaaacttttctagaatttctgaatgactacagaacttgctagaccggcttgttcaatggtctgagaagggtcagtaagtggctttggtgggaacccatgacctgaagggtatagttgtttggattccttggtcgagaaaactcaatgaaaccacgaatgtcgtatacccgtgtgatgg

SEQ ID NO: 8169 - DNA, 502 bp, Arabidopsis thaliana columbia
tatgaacggatgatcttatcctcttttgttcttgtcacaaatatacagggcttggattgtcgatggtcgaggaattgcagccaaagttaaaaatgcctctctttcttcagctttgcagatccaagactgtggagctcatataaaatgccccaactgcacttaccgcattgacaatagcaatgtgagtgattatatccacacttctctctcttgtcttaaacttacacacactcacctgtgtttcgttggtttcaggtactgattccatggcctggccttcctaaaggtgtcaagtttgagccaactgatgaggacattatcgaatttttggaagctaaatgtgggattggtggctctgaacctcatgtgcttatcgaagagttcattcgtcctgtcactgaagatgttggaatcaattacactcaccctcaaaaccttcctggtaaatgatcaataaagacctttaaataagctcataattgttgttctcaactgaaactgt

SEQ ID NO: 8170 - DNA, 375 bp, Arabidopsis thaliana columbia
gttggcagtcagcgtctctcagagtcacataaagcataccaggatgcaattagtcagggcgtagaggcaaaatcggttaaccaggcactggatgacgatagactgcaaggggcaatgggctcataaatcggttctcaggaagggaatcaatcgctgagcatagcggatcggcctatagggaaataggcaatcggatgtaaagggggttactggatggcatagtagtctgctggcaccttggcgagcccgtaagcgatactggtcgctcctggtgaccctgcagttgaaggagtggactatggataaactttcgcgccggtggctaacatggggaccgggagcatgcacctagatacggcaggtccgaccaagtgg

SEQ ID NO: 8171 - DNA, 481 bp, Arabidopsis thaliana columbia
taacggccgccagtgtgctctaaaggcgaagattttacgtgtcagttctacgcgtttttcacgcagacgatgcacttcttcatcgatgttaatatccagtttctcatcctgacggctaaccgcagtcagagaatcgattttcgcttccagctctgcaatcggctgttcaaaatcaaggaaattcagactcatagtattcctgtattagtcaaactccagttccacctgctccgaaccaatgaggccacggagatcgtttaataaacgatcgctcggagagacacgccacgtcgcgccaaaacgcaaccgcgcgcgtgcatccgccctctgatagtagagatgtactggaattgtcccagagcggtggggttccagagactgacggagctggtttaaaagctggtcatcaatttgcctgtccgtcagcgagatagcaagctcgcgagcatatttttcacgggcttcgtcaatatccatcact

SEQ ID NO: 8172 - DNA, 456 bp, Arabidopsis thaliana columbia
aagagagagtctgtcctttttgttttcatttgagtagtttatattctattacttttgacaaagaactatgatgtagtttctttacagacataaggtttcacttactattcttgattctttttcttattttgctttggacatttgtattagtcttctgttgtcggttgtaaattagtggttactagatgggctagcttgaaaaagatgcagatgtgttctaataatcttgctgattagtgggtatgattttttaactaggcctcagaggatgctaagaaacttgtcgacgaggaaagagcgtttgcacgtgctgagattgaaagtgcaagagcagctgtacaaagagttgaagaagccctgcgagaacatgaacagatgtctcgtgcctctgggaaacaagtattttagtgatggcttctatcataatcttgtaaatgtcctatgcttataacattg

SEQ ID NO: 8173 - DNA, 482 bp, Arabidopsis thaliana columbia
taacggccgccagtgtgctctaaagcgattaaccacccggtgccagggtaaggtgctgccttcagggagacgctttaacacaccgcccacctggcgcgcggcgggggcgatcccgccagtttcgccacatcaccgtaagtggtgacatagccttcgggaatagcggcgacgatttgccagacgcgttggggaaatgaatcttctttttccatcttttcttcctgaggtaatttttcagcataatctggaaaaacgcccgagtgaagtcgcattgcgcaagaaaccagcatctggcacgcgatgggttgcaattagccggggcagcagtgataatgcgcctgcgcgttggttctcaacgctctcaatgggggctctgttggttccccgcaacgctactctgtttaccaggtcaggtcctggaaggaagcagccaaggcagatgacgcgtgtgctgggatgtagctggcagggtcccacccatt

SEQ ID NO: 8174 - DNA, 524 bp, Arabidopsis thaliana columbia
ctcttgtgtttggagatgcttcatccttccttctaccttggaagcgagtattgaaggtcacagatgctcaggtaggcatttccaatttttttcatacttctgattttgcgcaatagttgttttatggaagtttcattttggcaactcactccttcttggtaatctgaagttctgtgctaatgtcttgacctcatttctaggttgagattgctattcgtgaaaatgcaaagcagctgtatgccgaacggttaaaattagttggtagaggtaatgttgttcatgttttacattttgagatgggaagtaatgttacatttgtagaacgggtttgagtttgcttgacttggttatattgattattgtggcacttctttgtccattgggttttgtaatattcgtttatcagcaagttgtctgaataccaaccttaattgttacttcgcatgcgactgtaatggtcccttctcatttaacattgataatagatatggctctttgacaaccataaaaagatatgacttagc

SEQ ID NO: 8175 - DNA, 445 bp, Arabidopsis thaliana columbia
gtgatatttctaatgtctatagtctaaatatatctaaagtataaatatgaacagttgtgattcagtggctggtatggaggaaatactttgactggcgtatttgggcgtctctcgtgcctattgttggtggaattattctgacatctgtgactgaacttagttttaacatgtttggattctgtgctgccctgtttggatgtttagctacttccacaaagaccattctagccgaatctcttcttcatggttacaaatttgacaggtcagtgccccttcctggagtctccttatgaatgaatttattgctatgatgtgctattcagttcttggaactatcatttccatgatcattgctgagtcatgaaaactgcacttagtttctagttacaatgatgtttgcatgtagtgtctttattggatttgatgtgcggtgactttgcttcta

SEQ ID NO: 8176 - DNA, 577 bp, Arabidopsis thaliana columbia
tgctgaatccaaagtggtacgaaggaatgatgtcaagtggatatgaaggagttcgtgagatagagaagagactgtccaacactgtgggatggagtgcaacgtcaggtcaagtagacaattgggtctacgaggaggccaactcaactttcatccaagacgaggagatgctgaaccgtctcatgaacaccaatcccaactccttcaggaaaatgcttcagactttcttggaggccaatggtcgtggctactgggacacttccgctgaaaacatagagaagctcaaggaattgtactcgcaggtggaagacaagatcgaagggatcgatcgataaacaatgggatataagcctttcttcttgtaaatgaacttaaaactttatttttgtgtattacagtattctaccaaacgacatcatctctctgtgaataagagaatgttttggctgacattttctgactttatatgaatgttgtggagcttcgtctttcatctccatttcttatatcatattcatatgtgtggattttatatgcgaagaaaatgaaactatagttaagtgtaacaaactatggttga

SEQ ID NO: 8177 - DNA, 193 bp, Arabidopsis thaliana columbia
aaacttaccgagaacattattctcgaaccggcaggcgaaacacggcacctgccattgcgctggcggccgtggcggcaaaacgtcatagcccggagagcgacccgttaatgctggtattggcggcggatcatgtgattgccgatgaagacgcgttccgtgccgccgtgcgtaatgccatgccatatgccgaagc

SEQ ID NO: 8178 - DNA, 561 bp, Arabidopsis thaliana columbia
gtaacgtccgccagtgtgctgtaaaggccagtgcgatcaggaaggacatgttgttaccgccaccggtattggtgaggatgatcaacgcgatagacgtaatcaccagctgcgaaatgaccagcgttaccggtacgccatttttgttcattttagcgaatgccgctggcagcaggtttttctgcgctgttacatacatcccgcgagaaggaccaacaatccaggaggcgatttccgccagaacacccagcaacagcagtgcggagatcacgcgaaccgtccactcaatttctggtgccacatgggacatcagaacggtaaaggtttgcattacccctgcggagaggttgatttcattacccggaatgaccatcgcaatagacaaaccaccaacagagcttaagcagattgccgccaccatcagcagtaacatagccaacggatagtcgcgccctgggttgctcatttcattgacgtgggttgcggatcttctacgcccatataactcaaaatgaaggcaacaaatactaccagggtgcccactttagagaagtcagggaagaa

SEQ ID NO: 8179 - DNA, 568 bp, Arabidopsis thaliana columbia
ggtgacgtcaactttctcgttatagacaccttgcttaatgtagataataaatggcttttggttggctttaggcactgcattcaaggcttcattgatagtcttgtactgaccacttccgtcgtgtgcaaccaccacgttagctttcacacctcctttcgttgccatgagccgtctagtgtttggtccaacccaacttggtataccgtcttccgccgacaaaagttttcttgcgtatttaccgagatccccggttactcctgccaccaaaaattgtagtcttgttcattcataattcttgtgtaagacttaaacatgtatataaaatgttttacctgtgacgttgaactctccgagaaggttagagatgttagtaatcatggcaaggccattactagtgagttctctagatgttttaaagattttctgcatgtcttgtgaaagtttcgagttagtttcttcaaacgtatccatacatgtttgttgataagcaatggagccactaagccaaacacgaagatcttcgacaaagacctcaatctgaggaattgagacccatcaaagttacaag

SEQ ID NO: 8180 - DNA, 623 bp, Arabidopsis thaliana columbia
  unsure (1)..(623): unsure at all n locations
tcccaaaaaagtactaatccctacacaccacaaatcacacatcaatagggacaaagcgagagagaagagagagaccggaccaaacacaaagcccttaaagataggaagatactttgtcatagctttgctatttctcaaaaaaaaatgagggacgacagagaaagaggagagggtgatttgtcatggcctttgatcggagagaaaagtagtgtcaaggaagaagtgaagaagcagctatggctttcaggcccactcatcgccgtgagtcttcttcagttttgtctacaagttatctccgtcatgttcgttggccatcttggctctcttcctctctccgccgcatccatcgccacctctttcgcctccgtcaccggtttcagcttcctcgtcagtttttcctcactctctctgtctttctacaaattacatattcccatatcaatttattcttaaccatgtatcttaatctttaatttaatttaccaaaaaaaaatcttccaaatttaggatattaggaataaatgtctgaatgtgaaacttgatttggtaattaatatcattttttttgattttttcctatacatatatgcaaacctttggatttntttaatatgtagagtttt

SEQ ID NO: 8181 - DNA, 605 bp, Arabidopsis thaliana columbia
taaatccaccaaaacaacatataagtaaacaaataaaaacccaaatatatatttaataaaaaatcaattttttagaattggccataaatattgaaaatcaaatagatttaaaccgttagaatgaatctttcataaaaaataaaactcaagatgaaaatttaatctttttcagtgaattgtaaatattaattgaaacccaaatcgaaatagtaaaccatttaaaaaaattatccataaaaattgaaaccctacttgaaactttacaaacattaaaaagaatatatatccataaaagttaaaccttgtgagcaaaaggttgaggcatgagagatcgcaagacagagagatgttgattcatttgtcttcttcgatttctttcgacggcaatgtgagtcattcgttgattctcagcttcttcctcgtttttgcaaacctaggcttcctctccgccgcttcttcctcgattcgtagctggtggttgcgctgtggtggcggtcttgattagatatctcgaaattgtgtcttcgatatgatgacatcattttcggcaatggccgagatcgcgagagcttgaatggagtggtgaagagttcagagagcaaaag

SEQ ID NO: 8182 - DNA, 1299 bp, Arabidopsis thaliana
tcccctgctgttatggatccgatacgattaccaaactacccttatcctgaaattgactaaaatacccctccgtcttcaacctctctgaccctatttaaatcagctaaaactctaacagcccaattcaacacggattttcaacacagagctgacgttagcattggtctctgaaatcccagatccgataacccaacaatggcgtcagagaacaacggatccagatccgattccgaatccatcaccgctcccaaagctgattccaccgtcgttgaaccgaggaagatagctctgatcaccggaatcaccggccaggacggatcatacctgacggagttccttctcggaaaaggctacgaagttcatggtctgatccgtcgatcatcgaatttcaacacccagcgaatcaaccatatctacatcgatccacacaatgtcaacaaagctctgatgaaactccactacgccgatctcaccgacgcttcctctctccgtcgttggatcgatgtgatcaaacctgacgaagtttataacctagctgctcaatctcacgtcgctgtctccttcgagatccctgattacacagccgatgtagtcgcaaccggtgctctccgtctccttgaagccgtcagatctcacaccatcgacagtggccgtaccgtcaagtattaccaagccggatcttcggagatgtttggatcaactcctcctccacaatcggagacgacgccgtttcaccccagatctccttacgcagcttccaaatgcgctgctcattggtacacagtgaattacagagaggcgtacggtctcttcgcttgtaacggaatcttgttcaatcacgagtcacctcgccgtggtgagaatttcgtgacgaggaagatcacaagagcattgggaaggatcaaggttggtttgcagacgaagctattccttgggaatttgcaagcgtcaagagattggggatttgcaggagattatgtggaagcaatgtggttgatgttgcagcaagagaagccagatgattacgttgtggcaacagaggaaggacacacagtggaagagtttcttgatgtgtcatttgggtatttgggactcaattggaaagattatgttgagattgaccagaggtactttaggcctgctgaagtagataaccttcaaggagatgcaagcaaggcaaaggaagtgttggggtggaaaccacaagtagggtttgagaagcttgtgaagatgatggttgatgaagatcttgagcttgctaagagggagaaagtgcttgttgatgctggatacatggat

SEQ ID NO: 8183 - DNA, 527 bp, Arabidopsis thaliana columbia
gaaaatactatgttatcttacatcactaatatgatcttggttgagaggaagtagtttttcaacgctttggtttgaacttgcatcaacctgattggaaattacaatagtcaatgtctcttatatatagagagaatagagaatattatgggtgagcaagaaaacctgtcaacccagaataaacattaaagacagcagaaaagaaaattttgttttgatggttaaagaaaggctttgatatgttgtgtttgtagttataaaagtacctgcatttggctatcaacatcttcctcattggcattttgatctttgacatcagtgtcataaacaggattgccttcatttgcatcatccttattagagtgctctgattatagtggagtaacaaatacatccatggggtcatcactaatctcctgcaataagatgcgttgtagtcgttaattcaaccaattttgtaaatagttgaagttaacaattacactaaccgtgtttatcaatggggtactatcactggagtcttgactttt

SEQ ID NO: 8184 - DNA, 1384 bp, Arabidopsis thaliana
taggttgcttcttaatgtgtataactaataaatcattgacaagtatcgagaaattgaagcctgatcatgacttgcatatttcacttattcgctacatttgcgtaagatgacgctgcctcatttttttttcatattcgattgacataattaatattcttgtgtgtttatctcaattgccaggagcattataaggatcttagtgctaaatcattctttcctaacctgattgagtacatcacttcaggtccagttgtgtgtatggtatgggtataactatgctctaatttgatttttacttgttttcaagttgtaattagatgagttaattgcatgtgatgttttaaacctggtaaaggcttgggaaggtgttggtgttgttgcttcagccaggaagctaatagggaaaacagatccgcttcaagctgaacctggtactataagaggagatcttgctgtgcaaaccggaaggttggacttctatcatctttaaaattgttggaagtaagcacttaaaataattctcatggtttgatatttttaaattatgcaatttgcaggaacattgtgcatggtagtgacagccctgaaaacggcaagcgtgagattggtgagatttcttgttttttgttcaaatcattcacccatctttcattgttgagacattgactatgtccagtttaggggcaaatcaacgtggttcaaactgcttcaaattaacttgataacataactagattagatcatacttgattactgaaattgttaggttcaatatatctgttttaaaccattactatcacttcttcatttacttagtttgaccaatcactctcattccttagtatgctaaacttttagttttcatttgctgacattttggctcttgtggttgtggcataggtctgtggttcaaagagggcgagctatgcaagtgggattcggctctagctacatggctaagggagtgatccttgagaagacagagtcaattataatggtgtccttacttgttttcttgttaccgatgatgagctttggtgttttgttcctgattttgggcggcaatataatataactgccaatctatggcttgattcttctcatatctgtgatcacttgtcatgtaatcaaaactagttacagattcatctgcatttggttctacgttacagacacctccaaaatcattcatcttcactctacaccgagcaatgaaaattttctaatctcaagctaaaagaacatacaaaagagtggctttacaaaacgcagatgctgcgtgattaagattgctcagatcagtgtaccggaatatcatgcgggtatacttctaagaccggttggtactatggaatctcaatgtcctcaggaggcagttccagtg

SEQ ID NO: 8185 - DNA, 909 bp, Arabidopsis thaliana
cgatggatagaaggtttagagaagagcttgtgagtctaatggcgaagagagttggggatgagggagtggctgcattgccgcctcgggtttttgtgaagggaaggtacattggtggaggagaggaagtgttgagactagttgaggaaggttctttcggagagctgatcagcgggattccgagaaagaaagcgggaggatgcgagagcggcgcgtgtgatggttgcggcggtttgtttttcttgccgtgttttcggtgtaatggaagctgtaagatggtgaaaggatggggtagtgcttcggtggttgtgagatgtaatgagtgtaatgagaatggtcttgttccatgtcctatttgcagttgatagagagtttagaagtctcactgatttcactctatgaagctattgtggtgaaacagagcaactctgtgtttgtttgatgtataattcaatacaaatcatctatgttaccaacttgttatggtctatgtaatgaacctttcaatgaatgaaataagctttgaagaaaataagctttcaatgtaatttcaacaaaccaaggaaaaggtaactaacttataagagtcacattgttggtaagatatctgaaggctgtgacacctcgcggctattgtctctgtcagatacagaatctgaaaaagacttgttgggttttcgtttcttctgtgtttcctccttgtgaatttggttaaaatttctatcagctttggcaacgatcttggagacagtgaatccagagtcttcaaaagtgtgtgctcgttgcgggacaattgagtcacggcagaagacatcaatccccatcgtgagtccatacacctaaaatcgcgtctccttttagtcctaacgcaaagcaaccgagacctgaaacagctatatctactgaacttgt

SEQ ID NO: 8186 - DNA, 473 bp, Arabidopsis thaliana columbia
gatgtactggattccccttgcagatacctgcatggttgcttctgggccatagcctcgatggggacaccgatatcatctccaagggctcgcattttagcaagtcccttttggtagtttggtcctcctctcctcacaaatatatgcatccttgctgctttcagctttgcttcctgttgagaaatataatcacagtatgacaagatgttttgcttttgatcctctttactcagtaatgaatctgatagacgttcgaggtttcttaagttaccttttctttaagagcgcggattatgccattgaaagtagcagcaacgtcagtgaagttggcaattccgcctccgatgacaagggctctgctttttccatccgggtttgctgtagcacactgcagtatattgtattgttattgttcagtcacatgaaagaaagtcttatggaagaaaataagtaaatttttcttacatcaataacga

SEQ ID NO: 8187 - DNA, 482 bp, Arabidopsis thaliana columbia
gttagctacaaaatcatctcaaagattttagttaacagactgaagcctcatctctctgggatcatctcggaaaaccaagcagcattcattcccggaagaatgataaccgataatgttattatggctcatgaagtgttccattctctaaaagttagaaaacggcaagcgaactcttatatggctttgaagacagatataacaaaagcatacgacaggcttgaatggaatttcttggaggaaactatgcgatacatggggtttgtagagacatggatttgctggattatgatttttgtcactacagtgagtttctcagtcttaattaatggaacaacccatggctacattcaaccacaacgaggaattcgccagggagatcccttatccttgtatttgtttattatatgtgctgaagttttaacacatctcatgactcaagctatagagcaacgacagatccaaggtgtcaaaataagcaacag

SEQ ID NO: 8188 - DNA, 355 bp, Arabidopsis thaliana columbia
gttggttatgaaaggcagcttcagatgaaaacctgaaacacacaaaagttaattccaactaacaaaagaatgaaatcgcaatgaaactacgaaaagggatcataaatacctggctctgtgattatatttagaagagcaccacctctccaatacgctccaacgtgaccttcaggaacttggtgcaccaacgatgagggaaacataacctgatgatagtccattccataaacaaaatctttaacaaatacaacccaaagcgagtgtctttagagttttgtgtcactcaaataggttttaaaaaagtgtacttgtgacattacactacactaatccaaaatctacaaagaaacaagtg

SEQ ID NO: 8189 - DNA, 899 bp, Arabidopsis thaliana
gatccttttattctccggtgcaccttcgaagaggcccatggtcttcatcgcctcgtcttcccgcaaaaatctcatcaaatcctctaggtaaatgtacctttagtcattcagaggagtctattagtgaaacttaaattggattcttttaatgaaagtaattgaaaatgtagactcactttgcgccacgttgctcaacgttcttgaaaatcttccttgcagctgctttagcctctttttcgcttcgtatctggcgggtggattcatcttcgtatgtgctttctagcatctgttcgtccagtgtggtcagagaaacatttctcacaatcttcattagtctcttcatgttccaagcagagatgttcttatgattcatcctgtgaagatgttccatgctaattccattatcagttgttgatttcgggattatcggggagagtttcggattcattactctcccgctttttcccggtggaaacgcagccgcgcaaagatctggtggtaaattagcacctgcgttctgcatcttgaatatctcgtcttgcgcccgctcttcctcttcctcaatcctgctcatttcaatcatgggaggacccgataacgtctcgatcacgtactggttaaagagcgcttcttgaatccgatcaaagtaagtactgacgtggaacgaagaggccagaactttaaccactagtgtcttgatcaaccacaagatagtacttagcaagaaacacaccaagatcttggttacgtaaggaagaaacctgctccttgtctccctctgtactttcttgtcgaacaagaagtgccaagcgagaaggactaggcctagccatagacagttctgaacagctctacgcacaccgtaaacgaagtaaagaacccgcttccgcaaaaggaag

SEQ ID NO: 8190 - DNA, 885 bp, Arabidopsis thaliana
ccgaatccctttgatacttattatcctccgtatactccgagtcgagattcgagagagttaagagaagaagaaggtataccggatttagaagacgatgattcacattacgaagttgttaaagaagtttacggcaaaccaaaattcgccgccggtggtggtcaccaaccaaatcccgccgccgtacacatgatgagggaagagtccccgtctccgccgcttgataaatccggtgctagtactagcggtggaggtgatgtcggagatgcatctgcgtatcagtctagaccaagtgtgtcggtggagaaagaagggatggagtatgaagttcacgttgttgagaagaaggttgttgaagatgaggaacggcggagtaatgccacggcgacacgtggtggtggtggaggaggagggccacgtgcggtgcctgaagttgcgaaagagattgagaatcaattcgtgaaagctgcagagtcaggaagtgagattgctaagttacttgaagttgggaagcatccttatggtcgtaaacatggtaaagctttgatctttttacaatgttgtgacttaaagttttcagctttctgtaattggttaagtagagttttgaacttgtagttgagatgtgacgtgagacatggaagaagccgaaaaaaagatcttgcacggtgttactccttcgttaccttctacctctggaggaacttcttcgtctgctgctgctgctgttgtgccacctacttatgcagatattgaagaagagcttgcttcgaggtcgaggaatctttcttcgacgttgcacaagctccatctttgggagaagaagctttatcatgaagtcaaggtaatggttgattttgtttttgtacaaatctttgatcttagaac

SEQ ID NO: 8191 - DNA, 579 bp, Arabidopsis thaliana columbia
cctctcactttggaggacagaaagtgataacataacgagaagctctacacttattcaaactactagaatcatcaaacgcataactataagctttaggacaaatcgctttaaacagattcgcgaacagagtcggcttacacgcctgaggattcgcatattcaccggtgcaacaatacttagccgattgcatcgccaagcaagcacttttacaaccaaccactttcccatctctcttaacttccaaagctgatggacaacaaatgttcaaattcacttcacaagccgcaacgccacatccaactccaccgccgattggtttcatcgacaccggaagattgaaaccgtcgacgagacttacgtcgtagaaatgaagcggagaggaagatgagcctaatgtcatttctactacggttgctggtggtacacgccggttccttggcagttgatagagccgtcgttgcagtctccggtttggcatgagcatttaccgttttggttaaaggtgcagccttgtctacccagattcgaccggaccatttatccggtacgtctatgatggtttcttcgcgcttccatgtg

SEQ ID NO: 8192 - DNA, 414 bp, Arabidopsis thaliana columbia
ctagaggaagtaaaaaacctgcaactcgatgtttccccaagcactctaggtagcctcagttgttcttttgccgagctagagaagcacggttttgacgttgcagcccctcagtcacgaatcaacaaaatgctgtctctccaagatgagcgagcaaagaaagcagaggaaagaaaaggtcttgagaagaagattgaagcaggagagatagaagggcacacgtatgaagaagaaatggctgagttagaactcaaaattctggagctgaagagacaacaagtggttgcgaaagagatgaaggaagctacagacaaagtgacaagtggaatgaaatcatatgcagaaatgattaatcacgagatagaagatttgaggcttgagtttcagtcaactgcttctgctccatggtaataaaag

SEQ ID NO: 8193 - DNA, 600 bp, Arabidopsis thaliana columbia
atcgttgatagataaaaccaacaatatttatggttcctcgttcctacacaatctatgtccaaataagaacctccaatcgtctaatgttccattagatcaagttggctacagttttagacttttagaagatcccgaagtgtcttagaacttggaagaaaaacttataccttaggagtagtcgtctcaagaagggatcttttagtatctgtgaccaaacagggtgaagggtatctgatgttgccaatgtcgaagcccattcgttcatagacgaggaaagaagcttctcggccttagtaaaaatatcctaacacatgatggtagtcagcacgcaaacaaaagaagtgaagagaaagaagtatcaagcaagtgatgaagctttatctctacctaccgtttccatatcagaggcggaaatctcacttaacaagcaaaacgcttggactggtgacgtgagaaaaatggtgaaaaggctaccactaggttgacgagagaaatcagcagagataagcggaggagtatgtgatggagacagaagtaacgcggctggttctcctttctcagctcacaaatattctcacagttcaaggaaagaaatatcat

SEQ ID NO: 8194 - DNA, 579 bp, Arabidopsis thaliana columbia
cacaatatattgattaattataatgaaggtggagcttgtggttatggaaatgctgttgcacaacctccgttttcgaaaatggtatcagccggagtccgtcgttgttcaagtcaggaaaaggatgtggtgcatgttaccaggttactaatataattacaatattaagcggaagagattaagaataaatgaaagattagcttatatactgatttatttacgttcaggtaaaatgcacttcgaaatcggcatgttcgaaaaatcctgttacggtggtcattacagatgaatgtcctggatgcgttaaggagtcggtccatttcgatttgagtggtacagcgtttggtgccatggcaatttctggtcaagatagtcagcttcgcaatgtcggagaattgcagattctttataaaaagtatgtatctaaggatttggcattagtatattactacaaagttattctatactaatttagtaaggttatatttacttgttatgtaattgtgtttcattggtatgtgtgtgtgtctagggttgagtgcaactatataggcaaaacggtgacatttcaagtggataaag

SEQ ID NO: 8195 - DNA, 376 bp, Arabidopsis thaliana columbia
tcgctctagacgctagacgatcctcgggagatcctcagggtttggaggatcaggagccatgtaacaagcgaaagagtctctccagttaacacatgaagaagaactatagagatcgaaattactatcgtagacaaatcttttagtggcgtcacgagtgaagtaggttttcttaacctcatgtagttcctcgtgatatctacgaactccatcttgaatctcgtgaagaacttcgaaagtaacaccatgattgatcatctggaagaatctccaattcgatgcagcgtctttgatctccccaatgatatcttcacgggagactgtcaggccgtcgaagtcgatgatagggatcgctcaaattggtggtagagacaaaagg

SEQ ID NO: 8196 - DNA, 597 bp, Arabidopsis thaliana columbia
gaactcataagccttgttgatatcagagggaagactcttcctccgacagaaggttttatcaagagaacaagtacaagagaatttttatggggttctaaacggattaggcacggaacatgagtctgtggcaactgtgatagagcactatctaaatctctatcctggtccttgttttgatgatgtggtgcataaactcacagcctttgattataagttaatagcctatgctaattctccctctgaagtcactcctcacatggcatatcacattgagaaagcatactatactcgtggaggctataatgattcccgtggtagaggtttcagcaacagtttggatcaggttcaagcacaggttctggatctggacaaaaacctacaagtcagatatgtggtagatatgggcactctgcattcaagtgtcacaacaggtttaaaacatgactaccagcctgaaaatctacataatgctctggctgctatgagggtgtcagatcaaagtcagtcttccagacacaggagctactgccacatcaccaattcagcttctcatcaaaaaaatgtctgttggaggaagagtctctctctgatagttga

SEQ ID NO: 8197 - DNA, 523 bp, Arabidopsis thaliana columbia
tagtgattgccgtttcctgtaacttagtttacttttttaccttgctgtaattgttagctgaaaacccgattgcaatcatggtttgatagaactgtcggttttcttgctgcgtgaaacattcctgtgtcttaatatctttatctcatcaagttagatttgtccccaatctgcagatctcaacaacagagaacaatcacttacgaaaacaatacttgtgatgaacttggaggttaaagataaccacgaagaagcagctataggtggccgacttgccttggaactctgtcaagagattgaagggaatgaaacatgggaagatacgatcgatgacattgttgcgggttttgaaaaacaacacaggcggaaactggtctacagcatctcattctactgaagatacatcatcagtcgcattaacggtcagattatgtagagtgttcttctgtgaccccagtcttgagatgttgacaaattatttttagttcatcggtgttatatgtgttagggtacatacttgagagtg

SEQ ID NO: 8198 - DNA, 547 bp, Arabidopsis thaliana columbia
  unsure (1)..(547): unsure at all n locations
nnnnnnnnnnnnnnnnnnnnnnctaaagaacaccggttttattagctggtttggcaaattgttagcaggcagcttaagcggttattcgccaacgatggtgatggtggcgttgattgtggtgttttatctactgcgctactttttcgccagcgccacggcgtatacctccgctctcgcaccgatgatgattgctgctgcgctggcgatgccggaaatcccgctgccggtgttctgcctgatggttggtgcggcaattggtctggggagcattcttacaccatacgccaccggccccagtccgatttactacggcagtggttatctgccaacgcggnattactggcgactgggggcgatttttgggctgatattcctcgtattgctggtgattaccggcttactgtggatgcccgtggtgttgctttaagtgaggacggtgccggaaattgctctccggcacccaatagttttacgcagccggtaactccgccagcggcaagcgcggaccacgctaacgccgagatccgccgtcgcgcctgcctttaga

SEQ ID NO: 8199 - DNA, 530 bp, Arabidopsis thaliana columbia
ctagctattgttactgtaattttgaaagaatggtacgtattcgagtctttaagcgggtccaataaactaacttgtacgttctgcaacacttctgaatttataacctacttccattttttcaaaaatagtggttagtgatactacttatccatgattttccagggtttcgctgtacctaaagaagcacagagtaaggctgtagagttcaattttaacgggaccacagcacagcttagacatggagatgttgttatagcagcaatcaccagttgcacaaatacttcaaaccctagtgtaatgcttggcgctgccttagttgcaaaaaaggcctgcgacctaggactggaggtttgactacttgtgtgatagtgatttaatatgtttatgtgcaatggatataatagaagtgtttgaaatttctcaattattaggttaagccatggatcaaaactagtcttgctccaggctctggagttgtaacacagtacttggcaaagaggtgctgcagatacaccgttgaatgttttgtt

SEQ ID NO: 8200 - DNA, 516 bp, Arabidopsis thaliana columbia
ccctgttttagcttctccgcttcgatctactgccgtaaacttttcccggtggcgatggagaaaactcgaaagcagtggaggaaatgtccatttcccctctcaagattctcacaacttcactaacatcaggccgtaactctggagctttctgcagacaagccaaagccaagttaatgcacaatcctgcttcttccttgttatacccatccttcaatttctcgtcgaccagctcaagaacgttccctgactgagccagttgcctacaccagctcaccaaatttgctttttcaagcttcatcggcgatgcaaggacgtgtaaaggcctcctacccgagactatcactagaatcagtactccaaagctgtagatatctcctttctccatcaagtaacagcaaccgcctccatattccggtgctatgtaacacaatgttcctctccgagtcgtcgtgctgcttaattcacggctgaacaaatcaccactccacatctcactcgccatcgatccattgttgt

SEQ ID NO: 8201 - DNA, 455 bp, Arabidopsis thaliana columbia
actctagactagaggatcaggaaatatttttgtaattcctgatcaaccacaggaatctccttaataatcggggcagtctcagcaatcttcttggcagcttcacgttctttaataagcaatgcctccgtttctttgcacttcagttgcaattcctccaaagaagactgtgcttttgcactttcttgtcttttggcctcttccaggtcagtctgcaatgttgaaagaggatgctaaactctcaataatattcatctactgcaagatggccctgaaaaaatttgggtcaaatttgcgcagatccacaatgtggtcagcttttcaaacagcaatcacacccttatccgtttctctaactgcaatctccaggtcagctcttcaacttgcttctctagcttgatcttggctgcttgcagtgcccagtttctctagcagcctaggtgtacaatgcattacag

SEQ ID NO: 8202 - DNA, 545 bp, Arabidopsis thaliana columbia
ttcggcctggctagaatcttcggaggcaaccaaatcgaaggaagcacaaatcgagtcgtcggaacatagtgagttaatctactatatcaatccatccccacaaaactctccaatttctttttttcaatctttaaggtcgtttcaatctcactgtcacagtggatacatgtcaccagagtatgcaatggacggccagttctctattaaatccgatgtatacagctttggagtattgatcttagagatcataaccggaaagagaaacagtgctttttatgaggaatctttgaatctagtcaaacatgtaagtaaaaacttcttcctttctttgacataacttggggatacagaggagcaaaacagaacataagcaaacgtttgtttcttcgtcttgtagatttgggatcgatgggaaaatggtgaagctatagagatcatagacaaattaatgggtgaagagacgtatgatgagggcgaagtaatgaagtgcttacacattgggttactttgcgtgcaagagaactcttcagacagaccagacatgt

SEQ ID NO: 8203 - DNA, 271 bp, Arabidopsis thaliana columbia
ttcgctgtggtggtgctgtggatgacgatatggcaaacataattgtagctcactcctgtatcttgatgctgttgatcctactaatgacagactattgccgatttctaattccagtcttattactctatacagatgtttaactcaatccaccttaaatttgcttatgttgaacagtgatcttgtcatacatgttaattctccaggaggatcagttacagctggtaataacaactttgtcagcttactctttatctgttttccggttttatgg

SEQ ID NO: 8204 - DNA, 651 bp, Arabidopsis thaliana columbia
  unsure (1)..(651): unsure at all n locations
attctagtcagttctggtttatctgcaagatgctccaagagcagccggttgcgttgtcctttcggcctaactcatttaggcgccggtccatggaaacgggtgttgacagagatgacagggggtggactcagcttcacatcaaagctcgtgaaggcgatctcaaagctgttaaagagctccttgaccaaggagcagacgtgaacgctctagcttgtggacctaaatcaaaaggaatgactcctcttcaccttgctgccaaaggaggtcacatcgaagttatggacttgcttcttgaacgtggagccaacatggaagctagaacctctggtgcttgtggctggactcctctccatgctgcagctaaagaacggaaaagagaagctgtcaagtttcttgtggggaacggtgctttcttacctgatgatataaccgacagtaggttcaacccgccggttcagtactgtcacggcttggaatgggcttatgaagagaggaagaaactcagtgaagatacttctttatcttgtggagacacttcttgcagttctgcgaattgattcttgtcttttgttatctttcttgcaatggctcataagtcgaagagacacaaaaccanaggtttgtaatcatgttgtattgaaatatgaaatg

SEQ ID NO: 8205 - DNA, 606 bp, Arabidopsis thaliana columbia
cgtgcatggtatgaaagaattgattcttacttcattcaaaatggttttgcaagaagtatgaatgatgcagccttgtacatcaagaagaaaggagaatacgtgttgatcgttagcttgtacgtcgatgatcttatcatcactggaaacaacactcatctcatcaacacatttaagaagaacatgaaggacgagttcgagatgacagatctcggtttgctaaactacttccttggaatggaagaacaccaagatgacagtggcatttttctttcacaagaaaaatatgcaaacaaacttattgataagtttgggatgaaagagagcaagagtgtaagcaccccatttacaccacaagggaaaagaaaaggagtagaaggtgacgacaaagaatttaaagatccaacaaagtaccggagcattgtcggaggattgctctatctatgtgcatcaagacctgatgtgatgtacgcaagttcttacctatcaaggtacatgtcatcaccaagcattcaacactatcaagaagccaaacgagtgttgagatacgtcaagggaacgtcaaactttggagtactctttacaagcaaagagacactaagattagtt

SEQ ID NO: 8206 - DNA, 567 bp, Arabidopsis thaliana columbia
ggtatgataatgggcggggcgtcgctcatagaagctattcagcttcagatagtagtcatgaacatgatggtaggagcagctacggttagtagcatcacgtctacttatctttgttggccatctttcttcactaaagcttaccagttacaaactcatgtcttctcctcagattgaaacttttataaatccttataacaatcttcgaaaacttgtccaaaagaaacgcaacaacattatgtctcagatgacaaaactcttggtaacatgaaacttaaaaggttctaaagccaacacacttacaagagaaaggaacagtcgatccaatagtatacatgctacaatgcctgcaagccgtggccatgagccatcaaagttaaggagactcacttcctctaggggaagtgcggtttggctcgtaatcatcatcaacagggctccggtcctctttcgaactgtcacaccggctcctacaacaggactgacaacagagtttctgccattgtcttgggggctacaccgtcacggtcagatccggcttccttttgaagctttggtgatggtggtggc

SEQ ID NO: 8207 - DNA, 559 bp, Arabidopsis thaliana columbia
caagtacattatatatataccacgttgcttcattttcttctacttcctactaaagaaactttttaatttccctttctcaatcctttcaagaagcttcttcgaaccaggaacctccaactccgacaacttcttcaaataaccaacagctccatgtgagaccatcagcttcttacacttcctgctcgaacacaaagccgccaaacccgaaaccgcatacttctttgccgagttacccggactcggctcaagcaacatcacaagactcgtcacacttttctcatctctcttcacttctctgcaattccttggaaccgtaaccagactcgctatagcttgagcagcaacctctctagctccactcgctttcgcctccaacattcttatcaacaacgggatacaacctgattcaccgatcattctctttgtctcatttgaggtagcaatcctgcaaatagttgacgcagccgcttgctgagctccgattgaacctgatttaagaacatggactaaacttgggattatcttgaagtaagtctctacagaaacagagccaacaaga

SEQ ID NO: 8208 - DNA, 1097 bp, Arabidopsis thaliana
tcactcagatccaactcatgtgcagcttccctgaggttgcaccaacactaaggttttgcttaggtgagcctgatctttgtcctggcaataagacattttctgtcattctctcagtcaatgatttctccggtatttcatcccacgcacaatttgaaatgatattctccgcagttgaaagagcatcgaccatggtaccacattagagctcaacagtttagtgtttaactcactcgtgggtgatttatggccagcttcctcactttcagttgggtcactaatgctcatcacaggcctaaggttgtcgttaggcgaacttggtcttagttcctgcaataacaaactagacggtggtggaatacttgcctcactgttgtggtgtactctcagtgaatctttcctactgacagatccatctgtaaattttgcctgaggcatcatcggagggaactcctcgccatgcaacatatcaatcttgccaagatctcgaaagagtgacgttctttccatggaagaaccagattttgatgcagaggtattaaaggcagacgaagcttttaggcccttgtcatccattctcaaggaacggttttggccacttgactcttttcccaaagtatcagtctctggcgatctctgaagtgttttccttgaataagtggctagagaagaatgccttctgatactcctgttaatagacgtcgagccatcagtctccattttgctcatcccttgctcaggagtcttgtttgcaaccctaatgggggacacgtaattatgctgctgagcaacacctagatcagtagagaccattgcttcaaaaggtctgtccgtccttttaggagttaaccaattatctttggacgtattacataatgatgacccttcctcaagagggaaatcttttcctcccggcttagagatttcaactgcaggcacggcaccaaccctaagaccaagaggactggtatttgcaggcttgacagaggcatcttctgcttcgacctcagaatccctagctgaagctccattatgtcaactcataccactgagaaagagaaatgctacttgtgtgaagtgtatatgcgacagtacattat

SEQ ID NO: 8209 - DNA, 568 bp, Arabidopsis thaliana columbia
tccacatatcccatcaaagcattgtttggaatcgttcctgcaggaatcatgttcatagctaacgccgcttgagtttgaggcattagcgttgtcgctgtagtcgccgcagccaccaattgtaatgcgtttgcgttacattttgttgttgagtatgatgaaactgttgagcaatttgaaagtattggtgattgatgttacctccatctgatatttggtagttaactagtctttgaagatcgtcaacaatggcagtttcatcatcgtcttgatgatttctcgtagagactatcaatgtgttgttgcttgtgtcgtaaggcattggacgatatatgttttgattggctagagcaatggtaacgtcagagttactgtttgtggtcgttgttgttgtgctgccgtcgccggaatattcggtggagagcttctcgagattgttgatgttgttgttgttgttaaggttgttgtcggaatgattagaggaggatgaatggtgttgttgttgtcttaaggctagacgggatgatgtcgatgagttatggttatgatgtcttttggagagagaacgtgg

SEQ ID NO: 8210 - DNA, 333 bp, Arabidopsis thaliana columbia
gaaagctttatttgcgagtgcaggtatgagaacctggtattagtagcaggaggaatcgggattacgcctttttttgccatcttaagcgatatcctacaccgtaaaagagatgggaaagattgtttacctggtaaggttttagttgtatgggccattaaaaactcagacgagctctctctgctctcagcaattgacataccttccatttgccatttcttctctaagaaactaaaccttgagattcacatatatgtcactcgacaatccgagccttgcttggtaagtcttacataactcttttgggagctgcaataggccttacttagtttttga

SEQ ID NO: 8211 - DNA, 568 bp, Arabidopsis thaliana columbia
tattaatattgatgagagatatgggtgcctcgtcatcaacggtgcagaatctctgttctctgagtcggacccgtatcgatcgattttgtgtcgaccggacggcagcaggattagccggtgagaaattccaaaccagcgggtgggttaaaaaagggaagggagctaggaaaaagtttcacttttcttgaagtgaactatggatcctgcgcaggaaatcttcaggtcaaggtggatgcttctgtgtcatatcgctgcaagttggttactacaagaactagtcttaccatagtccatagatggttgtttgaagattcctctgcaaggtaaagctacgaaggagatgatcgagcttaacgttgagaagttcattgatgtgggaacagtggatcaccgcagtgaaactccgtactcaattcctaaatcgaagctgactctagagtatttgagagaccatacttattttcgtgcaagaacctccatgattgcagcagttacaagaatccgacataagatgtgtcttgcggcgaagaataggggccggactgcataatactattatttcaagtta

SEQ ID NO: 8212 - DNA, 701 bp, Arabidopsis thaliana
ctcttcctcctccagcaccatcaacagtctcctcctccaccgcctcgacgagcctgtcgttcgatgaagaggaaacatcagagtcaaagatcggacggctgatatcagagcatccagtcatcatattcactcgattttcctcatgttgcatgtgccacgtcatgaagaagcttctatcgaccgttggagttcacccaacagtgatcgagatcgacgacggagaaattgcttacctcgccgttgaagccgctccggtgcttttcatcggtggtacttgcgtcggtggcttcgagtcacttgtagcacttcacctaagtggtcagcttattcctagactcgtcgaggttggagccttatgggcataattgtaattttctgtatttttctttctttctttcaagtctagcctatttataaccttaagaaattctgataataaaatccattgtaaaattttccattaatccactctttctttctgaaacacaaaaatgtttttttttctttatcttttgccagtcggtaagtattgtttagatcatcaagtgtaagatttgttccatcataattattacaatttttgtgaatgatttccgtttctttaatttccgtattgaagtattaatgtattatatatggtaaaaaaaagtgtattatatatgttgaaattgatcaaaaaaataaaaaatatatatgttgaa

SEQ ID NO: 8213 - DNA, 600 bp, Arabidopsis thaliana columbia
  unsure (1)..(600): unsure at all n locations
nnnnnnnnnnnnnnnnnnnnnnctaaaggtcgcagccctgctcgctgtggacttccattggcagcaggccatagccgacaaacgggtgatcggcgcgggtatcacgggcgtgaccgctggcacggaccatcgggccgacgttactgaagtcgcgagcgatttccgggtccagacgaccaatgccgacagtgcgctgttccatgttcggagtgctcagcagcacatccaccagctcctgcacttcacgacgcatctgttgtgccagctggcgggtctggatcatgtcgtctttcagcagatcgcgacgaatcccgccgatcaagttcaggccgtaggttttacgcgcaccggtaaggatctctgccattttcatggaggtttccgcacgcggaagaactgcataaagccggagtcgaagccggtaaagtgacaggccaggccaaggttgagcagatgcgagtgcaagcgttctacctccagcagaatggcgcggatcatctgcgcacgttctggcacctgaatcccatcgcgttttccacgacgtggtgtaggcggtgctgtgggcaaagcgcagatccgcacacacggtcagagaggaag

SEQ ID NO: 8214 - DNA, 853 bp, Arabidopsis thaliana
  unsure (1)..(853): unsure at all n locations
taattattatatattttggtgatttttaacaaaacttaactaatctttctttttttttgtaatcaaaacgcaaactaacgaaaccaattgtgaaaattttgatttacaatattaaagtatacataatttattaaaaacataacaaaaataacatcattgaaaacctttataaaaaatatataactaaatgctgtgactactttcctaagtttctctcaagtttttttcaagttttgctcaattatttatttggtaaattatatgcagaaaaacaaaacaattccacaactttttctcaaggttttttttttgtgtgctcataatttataaattgaaattagaaagatacatgaagattaggcttcatcggagaaatccgagtaacaagttcgaaaattgaaaagcttaaccatacataactcaaacatagagacacgaactgcagtaagcttgataggggaagaagtgtcgaaactaactaacacaagcatgcccatgaggaagggacggataacgaagaaactccatgagttgacaactctctgcgaagtcaaagcatgtgtggtaacctacagtccgtacgagaatccagtggtgtggtcgtcaaccgaagtgntttaagaggcggttttaatgtttattaaaaggccggcgatagaacggtccaagctgatgatgagtcatgagacctacttgtagaaccaaattaccaaagaaacaaagaaactggagcgtctacgtcttgaaaaccgagaaactcagcttacacattttatgtttgattgtgttgagggtaagataagtgagcatcagtatggtgcaagggaccttcaagatttaagttttcatattg

SEQ ID NO: 8215 - DNA, 1246 bp, Arabidopsis thaliana
  unsure (1)..(1246): unsure at all n locations
gaaaagagaatccaatcttagtcatagctttaattagtggcctaatcaattaataagacagtagccaaaagatttaatgctgtaactacaaattaatgagtccagaaacgtgataagccacaccctgagtaaaaaatcacccttttcgttgctatataaacagtcttgggccaagaaactaaacaaacacaaacaccaaagaaaagaaaaataaagataatgaggacgaagactaagttagtactcatacctgatagacactttcggagagccacattcaggaagaggaatgcagggataaggaagaaactccacgagctgacaactctctgtgacatcaaagcatgtgcggtaatctacagtccgttcgagaatccaacggtgtggccgtcaaccgaagtngttcaagaggtgatttcggagttcatggagaagccggcgacagaacggtccaagacgatgatgagtcatgagactttcttgcgggaccaaatcaccaaagaacaaaacaaactagagagtctacgtcgtgaaaaccgagaaactcagcttaagcattttatgtttgattgcgttggaggcaagatgagtgagcaacagtatggtgcaagggaccttcaagatttaagtctttttactgatcaatatcttaatcagcttaatgccaggaagaagttccttacagaatatggtgagtcttcttcttctgttcctcctctgtttgatgttgcgggtgccaatcctcctgttgttgcagatcaagctgcggtaactgttcctcctttgtttgctgttgcgggtgccaatcttcctgttgttgctgatcaagctgcggtaactgttcctcctctgtttgctgttgcgggtgccaatcttcctgttgttgcagatcaagctgcggttaatgttcctactggatttcataacatgaatgtgaaccagaatcagtatgagccggttcagccctatgtccctactggttttagtgatcatattcaatatcagaatatgaacttcaatcaaaaccaacaagagccggttcattaccaggctcttgctgttgcgggtgccggtcttcctatgactcagaatcagtatgagcccgttcactaccagagtcttgctgtcgcgggtggcggtcttcctatgagtcagttgcagtatgagccggttcagccttatatccctactgtttttagtgataatgttcaatatcagcatatgaatttgtacaaaataacaagag

SEQ ID NO: 8216 - DNA, 2058 bp, Arabidopsis thaliana
tataggcgggaaaaatcaatatttcatttttttacctaaaacatattttaaataggggtaaatagtcattaaaaattaaaaaagggtataaatgaaaataacaaataagaaagggcaatactgaaaagggattgtgttgaaagggcattcataccaattattcaaagtttttggcgtttctgtgagatgtactttgcatattttccaagttgtttgcccattctaaaaatttatttgtatgattcagagtacatctttaaattactgtagataacaaactttctgaaatttactttagataacaaactttagagtaatttctagcttaccacaattctatatacattgacaatatattactgtattttaaaagtacaatcacttaaaactattgcaaaacttcatattttaagaacaaagtaagctagaaattattcttagtaaaaagaaacaatgagagtaagagaaattaattcgccaaaataaaaacaaaacttagaaatacaaaatattatattacatgccccctcgtattacatggatagatttttttcttttttttgtcatcagatattatttaggatcagacgtaccaaactttggataagaaaaaatatttttatatagataataatgaattacctggtcaattaattgataagagatttcctggatgttatgtagaattaattagtccaccaaagtgataagaatcctagtgactataaaatcatctttctttgctatataaacattctttgagtaaacaaattaaacaaaccacacaaaacaaaacaaaaaaacatattgatggggatgaagaaggtaaagctatctttgatagctaatgaaagatcaaggaaaacatccttcatgaagaggaaaaacgggatattcaagaaactccacgagttgtcaactctatgtggtgtccaagcttgtgctctcatctatagtccattcataccggttccagagtcatggccgtcaagggaaggtgctaaaaaggtagcttcaaagtttctggagatgccgcggacagcccgaaccaggaagatgatggatcaagaaacccatcttatggagaggattaccaaagcaaaagagcaactaaagaatttggctgctgagaaccgagaattacaggttagacgatttatgtttgattgtgttgaaggcaaaatgtcccagtatcgttatgatgcaaaagaccttcaagatttgctatcttgtatgaatctatatctcgatcagcttaacggaaggatcgagtccattaaagaaaacggtgagtcgttgttgtcttccgtctctccttttcctactagaattggtgttgacgaaattggtgatgagtcgttttccgactctcctattcattctacaactagggttgtagatactcctaatgctaccaatcctcatgttcttgcgggcgatatgactccttttcttgatgcggacgaaatgcggtaactgctcccagtcgattttctgatcatattcaatatgaaaatatgaatatgagtcaaaaatctgcatgaaccgtttcaacaccttgttcctactaacgtttgtgatttttatcaaaatcagaatatgaatcaggttcaataccaggctcctaataatctgtttaatcagattcaacgagaattctacaacataaatttgaatctgaatttgaatctgaattcaaatcagtatctgaatcaacaacaaccattcatgaatccgatggtggaacaacatatgagtcatgttggagggcgtgagagcattcctttcatggacagaaactactacaactacaatcaactaccagtcgttgatcatggttccacaagttacatgccttccaccaccggtgtttatgatccttacttcaacaataatctctaatcaaaagagggagattttctaatctaagtgttcagttgtttgtatttgtgttttcttcatttcaaaagacaaaaactaattttgtttattaataattgttgtaatggttaaagtgtctctctttaacttaattatgtattttagttattaaggaat

SEQ ID NO: 8217 - DNA, 521 bp, Arabidopsis thaliana
tcagcatatgaatttgtatcaaaatcaacaagagccggttcactaccaagctcttggtgttgcaggtgccggtcttcctatgaatcagaatcagtatgagccggttcagccctatgtccctactggttttagtgatcattttcagtttgagaatatgaatttgaatcaaaatcaacaggagccggttcaataccaagctcctgttgattttaatcatcagattcaacaaggaaactatgatatgaatttgaaccagaatatgagtttggatccaaatcagtatccgtttcaaaatgatccattcatgaatatgttgacagaatatccttatgaataagcgggttatgttggagagcatgcacacatccctttcatggacggaaactactacaactaccaccagccaccaaccgttggtcttacttccaccggtcacatgccttccaccaccaccaccaccaccaacaacaacaacaacaacaatgtgtgatgtgtttcagtagtgtgcattttgtgttttg

SEQ ID NO: 8218 - DNA, 570 bp, Arabidopsis thaliana columbia
cttgattataagaagccattcctttcaaagtttttgaaaacttgtaaagttatcaaacaaacataactaataatgatgctccaaaaatgtaaacgatcgactgtttcaatatatgattcgccggagaactttaggtaaacgaaagccgatatttggttgaagtcctctgcatagacgacagctcttgcatcatcttgagtttctcactatcattgctccatttcaaggatctaatggccattgtctttagctgtggagagttctctaataaatacatcaccacatttttctctacttgaattcctttataaccaatccactcaatagctttaagagtcgaaatcaaacattaaggaacagtactctgctgctcccattgagtttggacatcaacataattgctgcaacatatctgttgaggtgttagcgtacacgcgatcttgcttgttttagttcgaatctgagaacttggagcttaggtgtatggttgagtacaagacgacaccagtataaagagcatgtacaaagacttagaaacactagctgattgaagacgcctattggacatga

SEQ ID NO: 8219 - DNA, 485 bp, Arabidopsis thaliana columbia
cctaatatttactgaaaggagaacttacctttaagttgattcagtttgatgtttcctttagggactaagacatcaaacttaagctcgtcgagttttagcaaagcccaatcaggagctgtgctgagccatagggacaaaccaccaaccttcatcttgaaatcgggatgtcctggctttacctacacaagggaatatcgataaccgaaagatttctagtcgaactcgtcaagcaataaatccgaatcaaagtgtgtttaccaatccgttagctttattcccacggtgatccaaccactctttaggattttcaataagatgcttccaagaattagaggtttcttcatctatgactttcacctttttggatcttgctggaaaaatacaatataacacatctgttaactcaaacgttacacatccttgtacacaagagatattgccaaaaggaatcacattgagtagaaaataggcacacaacataagta

SEQ ID NO: 8220 - DNA, 587 bp, Arabidopsis thaliana columbia
caacaaagccattgatcaaagaattgaagaccacaagattcgcttccactctcatttccttcattctccgcacaaacctcaaaccatctctcactctcccttctctgcaataccctcccacaacaatcccacacgttcttccgttcggtttcgccttctccttcataaccatcttctcaaccacctcactctcagctctcacggtctctcctttctgcacataacaagttgcaatcgtgttataagtcaccgtatccggcctaactccacactcctccatcttcttcaccacttcccacgcctcctccaccttcttcttcttgcaccaggcttgcaccaacacattaaacgtccttatattcggtccaacatcgacgttgccctcttccaacataagatccagtaactcagatgatctctcaggcttacctgcaatcccataccctttaatcaaagtgttgtaagtactcgtagtcggatttagaccaagttctttcattttcaacagagcttgcaccgcatcttccatgttaccggactcagagaaagcgttaatacagcattgaagaatatagaatcaagtttgg

SEQ ID NO: 8221 - DNA, 509 bp, Arabidopsis thaliana columbia
aacgtcatctacatcatacgtttcagcggcagaaagtgaccttcccaatgcccctaaaagttctttgttggttgattcctttgcgaagttgagatgtgaggtacagttaaatgtcggttccaaacactcataaagctgcagacaattatgtccttatgctgtatcatacgatagataaatttaggttcttcttacaggttctgggtgccaatattgtgaagggtagttctaagatgtttgctgtgtattcagttgcagtcacagatgaaagtaatcatagctggtctatcaaaagaaggtgatcgaataatattgctacggatctgatgttggtgctttgtcttttacaatttttaattatgtgaactttcagatttcgacattttgaggagcttcaccgacggctaaaagtgtttcctgagtacaaacttcatttaccgccaaagcatttcctatcaacaggcgtggacatacctgttatccaagagcgatgtgtctacttgacgagt

SEQ ID NO: 8222 - DNA, 543 bp, Arabidopsis thaliana columbia
gacaatttcaggcttatatactatttggggatgaggaatatctatacatttttcaagaagcttatagatctgcaatgcagtaccttcacaaggatccttggtaagctttctgtatcttgtatgatagagaaacaagaacaaacaattcctttgtttggacttactgttttccctagttttgtcgtaggtatgtagaagtcaatatggattccgcagctattgtctggccagtatttaccagccttcaagctttctggccaggacttcaggtaaatagtgattctacgtttgaccaaattgttaatatatttcaggctggaaaatttaactatgattttgtatctatgtttctctctcaaaaggttttagctggagacgttgatccagcaataagaactcacactgccttctttagcgtctggaaacgatatggtttcaccctgagggttttaatcttgctacacttagtgtccaggtactctatcttaattttccgtgtctctgtgatcacttgtcacttattacgtctgatggactatgatg

SEQ ID NO: 8223 - DNA, 910 bp, Arabidopsis thaliana
tcacggatgataaagttgagcatgatgtcgtcaggattagtcgttcggatgaagctagggatgtcttttagtcttaggttcttcatcgatggtatccagtctatttttgtgtccaagtgttccttggttaagtaactctcatctgccaaataaaccaccatattattgatcagaactcgatatcatctcaagatttcttaactacaattaaagatgcaaatttggatgcattaacattgatactgtatacaggatcagagccagcaaaaggttattataggtcaaagatgtcagacaaaaagtggtctaaatacaatgatatatggaatggctaattgcatagagtttacttttccaagtatgtgctctcttttggaatttaaattttattttaatttatccagtttgattttattttattttgcaagttatcctactattctagttacagccaccatatatgactattaattatgtttcgcaatcattgtgatttttagtgcctcaaataggggaatcgggaaaacctaaaaggatatgattttttctggattcatctttattcgattgaaagttctgatttacagtttgtttttaatatatagaaatcgtttgggtttgacggtgtataagttttacccaaactataattctctgttgttgacaaagtttattagtttgtgttattgatgtattttatgaccattgttctttattggtttgtattttttattcactatcggtatttcgtttggacaatcacaaaagtatggaaatgattatatttttctttttgagaaaatacaaatttagggatacttttttttttttgacaaatttattatttgtccctattgtggcctcttttttggtgataatttattagtggggcttctagtgggattttttg

SEQ ID NO: 8224 - DNA, 574 bp, Arabidopsis thaliana columbia
atgcgacatacacctccggttaattgagtggagcaagaacccggatgatttcattagctctctagttgtaaacatgagaaagaaatttgacgatttctgggataaaaactacctggttctagccatcgctaccatattagacccgcggttcaaaatgaagctggttgaatactattaccctctgttttatggtactagtgcttcagagctcattgaagatatttctgagtgcatcaaactgctgtacgatgagcattctgtaggatcgctattagcgtcgtcaaatcaagctcttgactggcagaatcatcatcatcggtcaaacggtgttgcccatgggaaagagcctgacgatagactcacagaattcgataggtacattaacgaaacaactactacaccgggtcaagactctaaatcagatctagaaaagtatctagaagagccactttttccccggaattcagatttcgacatcctgaactggtggaaagtcacacacctaagtacccaattctctccatgatggcacgtaaagtgttagcagttccaatgttgaatgtatcacagaaga

SEQ ID NO: 8225 - DNA, 371 bp, Arabidopsis thaliana columbia
ttcgtacctgcaaaggtagcttgtaacgaagggtcatgtagaaactgaactgagccattgtggacaagatagttcctttggagactagtatagatgaaccatcgcgtctaacaagagggtttttcgtgaagtagctagccgcgagatcatgaatctgttcgaatgtgatcgggtttttacaagatgatccgacatggtacacggtctgggaacctagcttccctgcgtgtattgccgcagccgtgaccattgcgtttgcgaccatgtccacaggtatctgtgaatacattctcagtggaccacaatgactaataatatagtgtgtaataatcagcaattaatatagcatatgtaatctttcatggaagaat

SEQ ID NO: 8226 - DNA, 586 bp, Arabidopsis thaliana columbia
ttttgattctaataaaatcagatttatgaaaattttaaaagacttttaatttacaaatcaaaaactaataatacattttaacagaaattaataaagttttgattgaataacaagagtcaaaagatctactaaagtttttaaaacaatatttcaatcacaaaccattttaggtgattttatttattttaatataatttctttctataggcagtagtgtggaccataaaattactgttaatttacttcctaaaaaggattatttaattgcaagattctaaactggattattcccacaatacacctttgtaaataaaaaccattaatccttcacaaatacagagtcgtgaacttaacgtctctctctattcctctgcttctctctttctccctgtgaaaaaatggactcggtggctctctactgcaccgctggtctcattgccggcgccgtctactggttcatatgcgtcctaggtccagcagaacgaaaaggcaaacgagcctctgatctctccggcggctcaatctccgcagaaaaagtcaaagacaactataaccaatactggtctttcttcagcaaacaaaagag

SEQ ID NO: 8227 - DNA, 533 bp, Arabidopsis thaliana columbia
  unsure (1)..(533): unsure at all n locations
atggtcatggactctcgttctcacacgtggcgtgaagcgtccaagctattgcgggtgccccgcatgttcccatcagtttgcacccttgatgggaaaatatatgtaatgggaggctgtgataatctagattcaacgaattggatggaggtttttgatacgaaaactcaaacttgggagtttttacagatccctagcgaggagatatttggaggctctgcgtacgaaagcgtaaggtatgaaggaaccgtctatgtttggtctgagaaaaaggatgtgacttacaagctacatgaaggtagatggagtgcagcagacatgtcggcgaatggttggggttggccaggatcttcttattgtgtgatagagaatgtgttatacagttgttttgtccacaaaatccgttggtatgacccaaagacagagtatggacacctttanaaggactgccttccttgccttgtaatggccacgttaaattggcggattatggtgaaaaaatggtgattttgtgggagaagtatgtggatgttgat

SEQ ID NO: 8228 - DNA, 553 bp, Arabidopsis thaliana columbia
tgatcgaaagaccactcatccaaaaaggaggcatctacaccaagatacaacatctcagttcattctagtaataaaaagcttctgttgcattcacaagcaataagcaaattgaccgcagagtcaaatttcattccagatactaatacatagtttttcaaacaaggaaacaaacctgtagcaaagtcttcatactcgtgcgggtaagaattccaagtgctgtgaggtaaggcactgcagaaaataggaataatatcggggctcccaaaagcaaacgtatgccggctctggttaaaaacagaatcaaattcaacaggattagctttccatcctgcaaacacacaatttcatttcaaaaagccgctaccaacttgacaagactaagtaagtatctacaagcatatatacagaagaagaagagaacctttagtgacagcactaggatcttcatagaaaccagcaataatagcaacatggccaggtctagattctgtaggaggacgagcatgagagacccccaacgcccctgattctttatgatattctcaagaagggt

SEQ ID NO: 8229 - DNA, 757 bp, Arabidopsis thaliana
ctctgcttcacggtgccggtaaaggaagtggaggagctgattgggaagcacgttacgacgtcgttttaggcgtgcacatgcactagcttatcttcatcatgattgtcttcctccgattctacacggtgacgttaaagctatgaatgtcttattgggttcccgcttcgaatcttacttagccgatttcggtttagcaaaaatcgtctccggtgagggagttaccgatggagattcgtctaaattgagtaaccggcctccgttagccggttcttatggttacatggctccaggtaaaattcaaaatttcgattttaacgttataaacttatcaatttcgaaatattaactttataacggattttatttgttttgttacagaacatgcttcgatgcaacatataacagaaaagagtgatgtgtatagctatggagtggtgctactagaagttttaaccgggaagcatccattggacccggatctacccggaggtgctcatttggttcaatgggtgagagatcatttagccggaaagaaagatcctagagaaattcttgacccgagactccgcgggcgggcagatcctataatgcatgagatgctacaaactctagcggtctcgttcctttgtgtgagcaacaaggcatccgatcggcctatgatgaaagacattgtggcaatgcttaaagagattaggcagtttgatatggatagatcggaatccgatatgataaaaggcggaaaatgcgaaaaatggca

SEQ ID NO: 8230 - DNA, 932 bp, Arabidopsis thaliana
caaaactccaaacttagttaagtgtacaagtactttctcaagcttacctggagccatgtaaccataggagccagccatcggaggccgattggtgggtttcgctaaatcgattccggtatttggataaccggagatggttctagctaaaccgaaatcagctaagtagggttcaaagtgaggacccaataagacattcatagctttaacgtcaccatgtataattgtggggagacaatcatggtggagataagcaagtgcatgggccacaccaagaacgacgtcgtatcgcgcctcccaatcaacacatcctccttttccggcgccgtgaagccgagaactcaagctaccgttagggagatagtcgtagaacaagagtttcagattccgattagagcaccaaccaagaagacgaacgatgtttctgtgacgaatcgatcctagagttttaatctcggagttaaacgcaccactctcttcctttgaccacattttcttcaccgcgagtgactcgccggagggaatcgttatacggtaaaccacaccggagcttccggttccgatcacgtttgctgacgtcagattcttaacaatgtcgtcgattgaaaaatcgagtttttggtaaagcgtcacttcccacgaatctatttcttctccgaggagttgttttccggcggctcttgcccggactagagtgtaaaccgccatgagaacaagtacggcagtgacgacgacgagaattaaaatagtcaatctaacgacggagctgttcctggtcgtcgggtcgggtcgggtcgagattgcgttcgagatgtaaagccctctgtttgaggcgagatcagaaagtggaagtcgccggaaaaagggcgtgttgggtaaatcgccggagaaatcgttgtaggagatgttgagagagacgaggttttgcaaatccg

SEQ ID NO: 8231 - DNA, 485 bp, Arabidopsis thaliana columbia
catcccgcccattccgcacccaaaaaaatcgcaccacaaaaccacgcaacctcacccagtagctccaccaggaatcctaatcaagactcgtggtcgccaccgtgaaaatccaatccaagaaccgaaacattctgtaatacctgtaccattaagcccagaggagagacttccaccacgaaaaactcaaaactcatcgaaaagaccattgctattaagccctgaagataatcaacaacaacgacctccaccaccacaagcaccacaacgcaacggagggggttatggatcaacattacctccaatacccaaaccaagtccatggagaaccgctccaacaccatccccgcatcaccgccgtggcccacggttaccaccaccctcaagagagacaaacgcaatgacatggtcagctgcattttgctgtgcaatattctgggtcattcttattctcggcggtcttatcatcctaatcgtttacctcgtct

SEQ ID NO: 8232 - DNA, 560 bp, Arabidopsis thaliana columbia
tcatgggttagtataaatgaaatagttgggaaatctgattattgcaaaaaaaaaagaagcctttgcaatgttgcccaccgaaaaccctacctctagtccctatctgattccccagaatttcatcaaagcaacttggattcgataatctcctccttggttacatttccggattctccatctctctccataagctcctctttcgatcgagtacttgataatcttctctcctcttgtgatgtctccgttcaagaccaactcgtcaatcgtactctcgagcgactctcgcttcttctccaatccaccaaacgatgctctcagaaactagccacactccacaattccatctcctggttcctcccttctgaactcaccgttaaggtaaccaatcaatatggatttctcttaattatattggtcctagccacatggttgatacaaagtccctaatgcaagcttctacatgcttcacaatgttcaataagtgtgccatggaccctttatgttactctcatattgacttgacaaaagcatttaaatatgttgatgaccgtgttttgcat

SEQ ID NO: 8233 - DNA, 504 bp, Arabidopsis thaliana columbia
atgccaagcatatgtagtaggtttaaataagagaaaaacacaatgcaaatttgcgtcagttaacattgtttttgcattaaaaacatttaagagaacgaaggcaattaatctctaaacctggagaatcccgcagaggaaggtaaccctgggttgtgtgcttggtgagccgcatatggtggtggactgtatgaagcccctaaagctcctggaccagctaaaactggcatcctgccaatcatataaagagatcacagcagcaagcaggggaaagaataaaatcaggaactagatatagtcatatagatgaagagctcatagcattcaaccaacacagtatccagaatgaaagtaaacattctaatgatacaacaccatcacaggttttgtttttccagtaggtagacccgcacaaaggtgattaaagggacaacatataaaaacacaaataagacggaaattcagcaaccaatacgcacgatatctaattcttaattctttgaaatg

SEQ ID NO: 8234 - DNA, 529 bp, Arabidopsis thaliana
agcatggcaaagcaaatacacgtgcaagagccatgttaattaagtaggaactagtagataggggttggcggaggcagtaagggaaactaacgttctttagtggccttacactagtgtaaaaggtagagcaagtttcggtggtgagatcataaacaccaaagttattgccaacaaaatagatgcagttaggctcgagtccacacgacgtacgagccgggatgcagaaagcctcactatgtccaagaaaaatgcaaagatctccaatgtgttctgtgtagatcatagtcttcttcttttcgtcagaagcctcatttgctctaaacaccatgaacttttttgttacgtgcatgggtgtattgtcgcaaaggtcctccacagtctccacgaacctgcaaagacatgatagaaccaatacgattctcaagccaaaaaaccaccaacgaaatgaagatatattgtaaatatgttatgagagatgtctagttaattagatacggaccacttgacgaggacaagttggccggtgggt

SEQ ID NO: 8235 - DNA, 982 bp, Arabidopsis thaliana
caacatccaaaccaagcctcagaatataaacccttcatcgagcatcatgttttccaagaaagagaaaaagttctacgttccaactcccggaggcaacatcttgtgctatttggatcctcactcagaggacgacgacctaattgatttcgtggaattggagtttgacgatcttccaaaatcggtgtttcaagagttggccgacgtgagtacatgttctaggacagaccaccttgtggagtcacccaccggccaacttttcctagtcaagtggtatactatctaattaaagctatatatagcttttgtcttcataacatatataccaaaatctctaatcctttgcttgagtatcatattggcgcgctttatcatgtctttgcaggtatggagaggatttagaggacattgacaacaccacactgtataatgtaacaaaaaagttcatggtgtttaaagagggagagaaaccgagttgtgtctacactaagaagatgatctatacagaagacattggagatctttgcatttttgttggacatagtgaggctttctgcgtcccggctagctcgtcccctggcctcaagcctaactgcatctattttgtgggctataactttggtgtttatgatctcaccaccaaaacttgcactatgttcctcacaaaagatgataatccattaaggaaattggaattcccttactggcctcctccggcttcctttccagtactagctcctaattaattatctctcttgcacgtgtttatgtttcgctaatgttatcgctgtctttgctttcccatgatttcatttaaatccaatgttctcttttaatctatgttcaatgaaatttatattagtgccttaaaagaaggcgaatctatcctaccaaaaaaaaaagaaggcgaatctaaacgaattcggttaattcatcatatttctcaattaatatacgtaagacacactttggcacaaaacttata

SEQ ID NO: 8236 - DNA, 584 bp, Arabidopsis thaliana columbia
tgcatgactctggactattgacaaacccaatcccaacaagaatttgcaaggcacaaagctgtgcagcatcgtccctcccaacaggatagtttcctagcaaatagtcatgttgcagctgcatatatgtgtgtcagcaacgaaaggcaagccttttgtgtggaaataaatgtcaccaatgaagaaaatgctcacttgaacatacgaaagttgcacaaacatcagatctgttacagcttcatcagactctcggaataatttttttttaaataccagtttgcagtgtagtatctctcctttatttcgatctttaatagctttaaattctgcgaggagatctccaatatacttgttatcatccaatcctatatattcctctgcaagtgcacagatagaaaaatgatcgataatgttgtattacttcacaatatatgacgaagccagtcatatgaaagcataccatttccgggatcagatgatttagaacttgaaacaactttacgacattcaaacaaactaaagctagagaaaggtgatagtttaattgttccagctaactcctgaaacagatgtcaatgcagtgagag

SEQ ID NO: 8237 - DNA, 552 bp, Arabidopsis thaliana columbia
ccttaatgaaaactaccgatggagaaatccacaagttaatacttgctatctatgtgtagtgtctagatgataaaagcctgatataaagtcccatatgacaatatttactgtgttcaagaaaacagatagaatagtaagagatgattaccctttctaatctttgaaagagaagtgtcttaaactgcctcacacctcgaccaccagagcttggatccaacctgtgagctttctcaaatgcataaaaccgacctatatacaaaacacaaggaaaatttcaagtgagtcacacagcaagtgaagtatatcagcttaattctgcaaacaaaacaacaaggaaacgcaaatacatacagagataggcaacacgagggcgctcatgttcaatctctgcagcaacacgcagaataggagcaatggtaccaagggaggccggaaccacctcatgatcaaaaacttcaatagacactgttgtggcagcactacgagatggccgtctcatgagcccctgagggcgtgagtcatgagatgtactctctgtgccatctctcctgt

SEQ ID NO: 8238 - DNA, 592 bp, Arabidopsis thaliana columbia
cttactgaagcatttattgtaacttgttcgtcactggtgacgtcaccattctttcttataaataaatcataacctattaaccttagtccataaagaagaagaagctaacgaaaaataatggcggagagatcaaattcagaggaagtgaagcttttgggaatgtgggcgagtccttttagtcggaggattgagattgctcttacgcttaaaggtgtttcgtatgagttcctggagcaagatatcacaaacaagagctctttgttgcttcaattgaatccggttcataagatgattccggttcttgttcataatggtaaaccgatttctgaatcacttgtgattcttgagtatattgatgagacttggagagacaatccgattcttcctcaagatccgtatgagagaactatggctcgattctggtctaaattcgtcgatgaacaggtatgaattttcaatttcgataactggtttgggtttttgaaccgggtttttaaaaccggtttgttggggagtttcagatttatgtgacggcgatgaaagttgtggggaagaccggaaaagagagagatgctgtggttgaagcgacgag

SEQ ID NO: 8239 - DNA, 567 bp, Arabidopsis thaliana
taaacttatattattatttttatttgttaatcttcttatcttctaaaaaagaagaaatattcataggaaaatatatttgattaacactagacctaaacgagctagtcacatggattgaaggtggagctgatgatgatgacaatcttgagcctactctgcattacgtggtatttaacggtgttggtgttgaagagtcacaagatgtgaaaactgtaactcctgcgccatgtcaaaggatcaatatcgaggtggtggagaagattccatcaagtgcattggttagggaatgcatgaagtgtttgaactccatggaagaggttgagaaaggtagtgatctttacatgtttgcgatggatttatttatgaacaaagagtgcagatagatgttcttgttgttggagacctcaaatttgagaatgacttggatgcttagacgtcaatcttgtggctctaccattgctgcctaagatcctcttattctcctacacttctgcttatgtcttataattatgcttaaaactctttattttcttttgaagaaaacagtttatgtgtttactagataag

SEQ ID NO: 8240 - DNA, 861 bp, Arabidopsis thaliana
aagattacaggaccaatgacaagtcaagatgttgtttctgctttgaacactgattcttctgatacagactcttgtgaagataatgaagatgttttactactctcatcttttgcacacagcgatgaaaaaaagccggaggaggataatagtaataacaattctgaagagaatagttctcttcttgtagctgctgcttctgaggtccaagtagaagttgcggtacacgaagatttctctacgtggcaacgtatcatccggcttgatgctttacgagcggattctgaatgggcaaattattctccatattcaacagcaatcacagaaagcaaagctcgcaggttagccgaatctgtcgggttaaaagactatgatcacttagaaagctgcaggctataccacgcagcacggttagttgcaattcttgaagcttatgctatgtatgatcctgagataggctactgtcaaggaatgagtgatctgttatctccaatcctcgctgtgatctcagaggatcacgaggctttctggtgctttgttggtttcatgaagaaagctcggcacaatttcaggcttgacgaagcagggattcaaagacagctaagcattgtatcaaagatcataaaaaataaagactctcagctttataaacacttggagaatcttcaagcagaagattgtagtttcgtttacaggatggtgcttgttatgtttaggagggagttgagttttgaacagacgctgtgtctctgggaagtgatgtgggctgatcaagctgccattagagctggagttgggaagtcgccatggagcagaatccggcaacaagcaccgccaacggatgatttgttgctctatgcaatc

SEQ ID NO: 8241 - DNA, 1028 bp, Arabidopsis thaliana
taatatcttacactattgaaatgaattttagggtactctccaacaaattcaatattgcctagctatatgtaaatataaaataaaggattttcctaaaaagatagttaagaaaaaatatagaaaagagttttccataaaaccaataaacataaaatcccaataaacacataaattgttttcttcaaaaaataaataaaaagttttaagcataattataagacacaatcataagtttaggagaataataggatcttaggcagccatggtagagccaccggataggcgtctaagcagccaagacattctcaaagttgaggtctccaacaataagaacatctctctgcactctttgttcataaacaaatccaacgcaagcatgtaaagttcactacctttctcaacctcttccatggcgttcaaacacttcatgcattctccaatggtatattcgtactccttaaccaatgcatttgatgtaatcttctccaccagctcaatattgatcctttcacatggcgcaggagttacagtttccacatcttgtgactcttcaacaccaacaccgttaaatgcccagtgatgcggagtaggctcatgattgtcattatcatcagctataccttcaattcctgcgactggtttgttgatgtcgagttctgatgatggagctcggtcatgtggtgattcgacaagatgattcaacactatgtagtggtcatcatcagctccaccttcacttcctgtgactggctcgtttaggttggtttctgatgatgaagctgggtcatgtggtgattcgaagtgatgatccatcactatgtggtggtcatcatcagctccaccttcacttcctgggacagactcgttaatgttgagtgctgatgaaggagctgggtgttgtggtgcttcggaatgatgattcactctcttgcgataaggacgcaaagcggtctttccaggttctacatgtcctttgaagatgattgccagtttatcagcgtgaggaatatgtttcaatctgaattgtt

SEQ ID NO: 8242 - DNA, 449 bp, Arabidopsis thaliana columbia
tccagcttccccagccaccgccctagccaggagtgtcttacccgtaccaggcggtccaacaagcaaacaccctttaggaatcttagcacccaaggctgtgtacttatcaggattcttcaagaaatccttaactttctgtaactccaacttagcttgatcagccccagcaacatctgcaaatgatacaccagtctcaggcacttcctggaacttggatttagaacgtccgaaatccataggaccacccaagccaccaggaccaccaccagggcctccctgagctcgcctgaaaagcaagaagagtccaccaaaggccaaaagcgggaaaatcaagtttccaatgacagtgaacaagtcattgcctgaggattctccttcagagacggatatatcaactccgttcatagccaagatatcaataaggtcagggtcgttagggacgatgactg

SEQ ID NO: 8243 - DNA, 750 bp, Arabidopsis thaliana
tggggagctctgcgggatggagaacgtaattgctgtgacggttttacggttaacattagacgttgttctgcacctctaccagaattacggagagtctactatgggctttatatcgcttgggagaagcaaatcataagagtggagctggagattgattcgatatttgtagttgggtttctcaagacaaggattaatgattctcacccaaagtctttccttgtacaattgtgctatggccaggggcggacccatgttgaagctgggtgggcatgtgccccattttaaatcttataaatagtgtattagctatgtatgtacaagaaaatttagatagcattgatggttttacagtaaagtgtgtttcatataaacccaatttcgattcccaaaactgtaatttaggtataatgttttttaaaatcataatataatttagctaattaaattttaactagtattttataaataaagtgccccatatagaatttgggtctagatccgtcactggctatggctttctcgcaaaggactggatagtccgcattgttcacgtgtataggaaggtcaattgttttgccgggattcagatattttctaatccaattagcatcagactcagatattttgcaaattctggttgattaatgcataaaagatcgcattcataaaaataccaaatctagctcgtctattattacccgctggataatattttcatgtgttttctattgattggtgattgaaaaaaaa

SEQ ID NO: 8244 - DNA, 572 bp, Arabidopsis thaliana columbia
tgaatttgggaatcgatccaacttttgagtaactttcaagagcctgcaacaagaagagagaaaaaaggatacatgtaagagttttccagttaggcaaataccaggaatagttgtcagagtgatgaaatatataccttcactgttttctgagagatgatcatatgtcttgcacgagatatcccagtgagaaaatcaccaatttcatttctcttcgataagtcctctggatcaaaactcctgcggtaatcgacagcaaacttgatattaagttcaatcatgaacaaagaagtcaggttctttaccacgattccatcgaaatggtcttctttgagagtcatattctctagtcctggagcatcaatctcaagtactttgtctgggactcttgacctacaacctactccatacgcgagcggaacataaaacgtcttcagactccgagatctcacacgagtaaccggcaattcatcgtcatcaatatgacatatcaaggtccttaccaaggtcaggtcttcaagaacaggacatccagagacaagcttctcaagactcatggtaccagaccatcgaac

SEQ ID NO: 8245 - DNA, 549 bp, Arabidopsis thaliana
catattctgccaaacgaacctcctcaaaacgcgaaattctttgtggagcttttaacatgacatgggtatcaaagttgtgcaaaatctcttcatacagatattttgcaaactcagtcttgccgatgtctcggctaccccaaattttgatatgacgaacttcatctttcaatcctaaatctaacaatctatacatggctttcatgtggcgatccatccccacaagaccacacaaatcacttgacttggaagcgacaaatatattccatatgtcaacggtaatttgatggatcagctctgcatcaccatccctatcacagagaatactaaaatcaggaaaccatttaaagtaacacataaaaaaattgttagatagaacctgattataggattaccaaatctctgagtactggccgcccggaatgctgcttagttgggacagtgcttgcctccatgtttgaaccttttcagggttttctctctcatgcaatgagaatgcttcgtacagttcccaatttgttttcttacaccataggatcacttcatagaaga

SEQ ID NO: 8246 - DNA, 739 bp, Arabidopsis thaliana
cacccagtgataacacctttgactttacgaccatctgccggatctttgcttaaggtatcggcgtcataagtacagaagatggtggtgatattaccttcggcatctttctcgacgcgttctgccttaatcacataagcattacgcagacgcacttctttacccagcaccagacgtttgtactgcttgttagcttcttcgcggaaatcggcgcgatcaatccaaatctcaccgctaaacggcacctgacggctgcccatttccggtttgttcggatggttcggcatggtaaccatttcgccttcgccctgatagttttcgataaccagtttcaccggatcgataaccgccattgcgcgcggcgcattttcgttgagatcttcacggatgcaggattccagcgacgccatctcaatggtgttgtcctgcttggtcacgccgatgcgtttgcagaactcacgaatagaagccgcagtgtaaccacgacgacgcagaccggaaatggtcggcatacgcgggtcatcccagccttcaacgtgcttgtcggtcaccagcaggttcaacttacgcttggacatcacggtgtattccagattcaggcgcgagaactcatactggcgcgggtgaacaggaatcgtgatgttgtccagtacccagtcgtacagacgacggttgtcctggaactcaagcgtacacagagagtgcgtaatactttccagggcatcgctgatgcagtgggtga

SEQ ID NO: 8247 - DNA, 635 bp, Arabidopsis thaliana
gtctttttaagtctctgcattggcatggagagcgagggtgcacacagaatttgcttatgctcttttcgcattagaatttcttcttagtattttgtatcttgtcactcaatatcatcaattaccgagaaactaatttagaaaagaaatcacatcgctgaagcaagagatgaaactgcaggccatgttatgcgtagtgaagatagccgttcatacaaagtatatgtagaaggtcaagcgccattaagcacctcttcaaatcaaaacgtacgaagaacgtaaaataaaaagagagggagagagagatcattcatatgtcctctcttagttgcagggctcaggagcaattcctatgcgagaattaggaacgtcaaacaagatccttaagttctgctgttggagattcgcgatcacgtttagaacagcgtttgcgttctgccgtatcccggccatggatagacacgtcagcgatcccgcgctgctgtggataagcgtattctccatcggcagcttcaagtcgagtgacgtcatgtgcagcgttatctttggcgccacattctcgttatccgctgagaaacacgtgtcaaacgctcccaatgttgagaatgacgacacattcaccttcattacaagattgt

SEQ ID NO: 8248 - DNA, 1197 bp, Arabidopsis thaliana
atgtaaaatctgtcccagaaaaacaaacaaaactaaactagaaaagagaaatttgaatttacttttccaaattccatttacacatcaaaattttatttatttgtttatgagtgattatccgaattacctccaccaaataaaaccctatcttatttccccctaaattattagaaaaatataaagtgattaagattcttttgaaagtttgtgtttatactttatcttgtactaagagaaacagaacttccctataaaaagcaaaagcaagtaagaataacgtgttaaactaaaacctcgaaaacaacaaaacccgaaactgaaacagagaatccaaaaaaaatgccacaactcgagaacaacgagccacttctaatcaacgaggaagaagaagaagaaacagcgtacgatgaaacagagaaggtacatatcgtaagaaacgaagaggaggacgatctagaacacggcgtcggatgcggcggcgcaccaccgttctcatggaagaagctatggttattcccggacctgggtttttaatgagcattgcgtttttagatccagggaatctcgaaggagatcttcaagccggtgcggttgctgggtaccctttgttatggcttctcatgtgggcaacagcaatgggtcttttggttcagcttttgacggctaggcatggcgttgcgacaggtcgacacttagctgagctttgtcgtgatgagtaccctacttgggcaagaatggttttgcgggttatggctgaattggctttgattggttctgatattcaagaagttattggtagtgctattgctatcaagattttgagtaatgggattttgcctctttgggctggtgttgttattactgctcttgattggtaaattctcaatttttagacatgtgtcttcttgtgttattgtttcatttgtctgtgtttggtcccagttttgtctttttggtttatggttctaatagcagtttagctaatctaatctatggattgtttgaatttggtgttagttaaccattagctgtgttaatttcatctttacacatgaatttttgtcactatgtgctcatttggtcattgattcatatgtgtgttttgctcaaagttttggtctttttgttggaatcaggaaactctagtgagtgtttatggttctaattgtaatttagctaatctattaaaggcttgtc

SEQ ID NO: 8249 - DNA, 341 bp, Arabidopsis thaliana columbia
ggccttaaaccgaacgagccagcctacctagatcagtcgtataatatatctgattttgctatcgtagtttgttatgcctccgccggcaccggtgatgataatgccacagccgatgtgcttgcaagttcaccattcacctcaaacagtctaattacagatgtgtcttgcgtaacaagaagcagcgagatacctttcatgtctgacatttttagggcgcgaatccgagatggaaagacgtcgcgtatttcaagggataccacagcagacttttcgcctatctcgggcatcggagagctgccaagatcatctgagaatctctgtacatagtaagcatacgcacc

SEQ ID NO: 8250 - DNA, 689 bp, Arabidopsis thaliana columbia
ctgttcttatgcttaccaacccagggaaactaatttgaagtcaaggagagaaatagataagttgagtgatctgaggcaagagccgtcttgtgttattgatgatatgttgttttctgttaatcttcatgactcaagagagtattatccaataatggtgtatgtatgatccaattatccaaaggaggcgcattgaaaacccttgtgggtttttcaaggttttccggctaacgtgcttcccaaggtgtctaaaatggtgaattttgttggattttgagcctttgatcaaacttgcaataagtgtgatgaagatgagaaccaaagcaacagaagaaaagagaagaagcgtcggagatgagactcgtgaagagaggagtcaacgacaagagagaagtcacgatactgcttcttgtattaagttgctccctttctttgctggtagaagccagtctcaactcttctgtacagttagtgaaaatacaggatctgttcaacatatattcaaatgttatagatttgggccaaacaaacaaactcaaagataaccaaacagctcttttacctgtattggttaccacatcaggaccttgtccaaacacttgtctagaatcatgactagagcagaatacatctaagagccgacgataaccaattatccttggaccatatcaacctggaagacaattatagag

SEQ ID NO: 8251 - DNA, 569 bp, Arabidopsis thaliana columbia
atccgtaaatgtataactgccatcatgtatttaatacacacgatactcaaaaagaaatgagaagtaagcaagagtattttcacatatagagaagagcgtacctcataatctctaactcgaaaaactggactgagcattgcacattgaagcgcacatcctcgagctacgcactcacttgcattcacagtcctgcctagctccctcttaaacaacgagcttagcatcttagatatagctggaatgcgggaccctgaaccaactagctccacagagtggatttgatccaaacttagaccagagtcagccaaagccttttgacacggtacaattaatctctccaacaagcctgctgacaactgctcaaactcttctctcttgatgaagctcctcacgtccttctcctccatcagacattcaatattcagctgtgcctcagcatttgcactcaagacctttttaactttctcacacgatgcccttaacctaacacacgccttggtatttgtatatacatctatgttgtatttcccttaaattcaagggcaaagtggttgaagagaactcatcaa

SEQ ID NO: 8252 - DNA, 598 bp, Arabidopsis thaliana columbia
cttttcctaaagtctgttgtcgatttgattgtggtgcttgatcttgatctccaagaaaaggtagaactattacaggggcctatgaccgtttttcttcctctatgaatcttggcacacatctctttctaacttatgctactcggaaaatatgtttcaggctcttacagcaatccaaactcttcttcaacttaaatccatagagcctcaggttctcaaagagtcctgcgggttggaagaagcattagagagaatgaagctacagctggaggaatcaatggcggatgaatacaagagagactatgctgcagatgtggagagcattcgtggtgaagtggaactgatcttccgccaaaagcttggacttttatgaacaccatgatcagtaagaaagcaactccctgtgcgttaatttctggtgggaaaagctttagctgtaggagttgtagacaaattctaactgccttagatagacttaagatgtgtaacttaggcggatcttgctgatccattttgcatgttattgcctctactcgagcgggtttctcccctcatctttactttcatatcatgtttggaaggttttatgtatagtattatg

SEQ ID NO: 8253 - DNA, 467 bp, Arabidopsis thaliana columbia
tagttctgtttcagtctagagcttgagttaaaagcacatgtatatataggctctgattggtaatacatgtaaaaagaacctaacctgcacttgatcaactcggtaggacaagcaaggaacgaaacagcgaaaccagcgcctgcaccggccacaaactgttgactaatggtcaaaggaactccagcttcagacctaagcagcccttccatttgacctctcacagtgaacaaaaccgcattgaaggcagcaacggttgcaagtggagctcccatacctttatacaaacctttggttccttcagaagcaacggtctgtttaaccgcatcgattgcaccggtgtaccttggaagttggcctggtgctggagtcggttggctctgaagtttgaccttgatagtgtcaaatggatgaccaacaactagttgagcagctcctccaacagtccctgaagctaaatccttccacgc

SEQ ID NO: 8254 - DNA, 486 bp, Arabidopsis thaliana columbia
tcattacctaaggttaaaaatcaacggccgtgatttagaggttagagtcatccctgagatcgatgtttgcaagtgggaaccatgggacttacctggttagtctcttcttcttcatgatttcatttttgagaattgaaaggtggaagctttgtgaattttggattgttattgagagtgatgatgataagattttttagggttttgtttgaatgtttagggctatcggtgataaagacagatgatcaagaatggttctttttttgtcctcgtgatcgaaagtatccgagtggtcatcgttctaatagagctactgatattggttactggaaagctactgggaaagatcgaactattaagtctaagaagatgattattggtatgaagaagactcttgttttctatcgtggaagagctcctagaggagagcgtactaattggattatgcatgagtatcgtgctacagacaaggaactagatggtactgga

SEQ ID NO: 8255 - DNA, 515 bp, Arabidopsis thaliana columbia
atgttttcttagaccaatgcagcaagggcttcaaaaatcaatgttaaatttttgagtgtttttgagtacctgtagcctttataaggaggagagacatcttgtgggaatttccattggctcatctgaaagacgcggaggaagagcatcgggtggattccaagaacacctgaagggattgtcatacccatgactctgcgggtgcgtttagtcgcgtagctgaagtagtaagtgtttgggaacgtctggagattggagttaatacttgttgagccttggattgtgagatcaggtaagatccaatcgccagaagcaaaaggacctgcgtttcccattaggcaatcaacgagacctctcacaccgggcttcttccaagaaatgttgaagtgatcgaacccgaaattgtaataagtctttagccatgaaatgtccaagcaatcgtacattatcacgcctatacgacacagctgcaacaaacatatgggtttcatgctcactccatcagctgtcctggtaca

SEQ ID NO: 8256 - DNA, 497 bp, Arabidopsis thaliana columbia
gagaaaattcataagcccttcatagtctaccacaaaaactctctttagtaattagcttgaaaaaattactgtaaatataaatctgaaaaggaaaccaagggaacccaaaacccagcgacaatgagcagatagagtttagagaatacctgaagcttcaaaattctatcctcaacggtgtcttttatagttatgcgagttacagtaactggccgagtttgtccagttcgatgtgcacgatcaatcgcctgatcttcggtagttggattccaccaaagatccaagagaataacatgacatgcagctaccatattcagcccaaggtttccagcttttagcgacatcagcatcacctttacctaataaaattttttttgcgcttttagagagcttcaggatcaatactccatgaacattccatatttcagagaaacgattagtatattgttttagaaaacatatctaagatatttacatcacttacatctggttttttactg

SEQ ID NO: 8257 - DNA, 307 bp, Arabidopsis thaliana
gactctagaatatcccgggtaccgagatatcctctgataatctacacctctttcagcttcatacatatcattggtgcttcttctaattttcatctctgaagctttctcaaactctttggcaagaaacttactaacataaggggtgcatctccctttgtgctcatgagattcaactgatctcattgcaatcctaaccattgcaagtcttctaatagtctcaagcatcggcacaaaggctttatccctagctttaacaattgagttgttgaatgactcagtcgagttattctctacatcttcacagtag

SEQ ID NO: 8258 - DNA, 951 bp, Arabidopsis thaliana
gtgtgctctaaagtgatcgcgatcgccaatttgtaatttgattgatggcagtagggtgatttcacctgcgtttgctgcaagcggggtaaatgccatcagggcggccgccagaaacagtgacctgaacattgttattctccttcacgctcgaagccgtcagcggcctgttaacgcaatattacggggaggtaaagccccgtatcatcgccataactcttaaatcataaaggagagcattttttgctaaacgttatcgtggggtggctgttgcttcggacgattgaccatcatcatcggcttacctgctaataacagccatgccggaagcatgacgatacagagcagcggtacgaatgtggtattgggtacaacgactgccgccataaaaagacttaaccagccatcgcgtgttaccaccagcacgatgccgagaatagcgcaagaaacggttattgccgctggtacggcgggaacgtgctcatgcagcatcaaccctaatgccacgccgacaaacactgccgggaagattcgcccaccgcgaaacgcactggcgcacaacgaccagggcggcaagtttaattaccgccagcaaaaagtaatcgctggtgctgaaagcctgatttgccaccatctgctgcatctcatccagccctttaaacagcgaaactggtccaccaataacccccagaataccgagaataaatccgccaatacccagcacgagcaccggatttttcatttgatgcatcatcgcgtgcaaccgtggtaagcaccatacggcgaccatccctgctgcgatggcaatcgccgcgacaattgcaccgctgagaatatcggtcatttccatctgtccgtaatgagcaatgggcagtgaaaaatgaggatggaaaaataatccggtagtaagtgcacagctgctgccgcattaacgggcaaagagacgatccatag

SEQ ID NO: 8259 - DNA, 1261 bp, Arabidopsis thaliana
cctcaggtgttgattcgagctgttgagttagagctgcccatggttgagcatagaatgtgtgtgagacacatttatggaaacctgaagaaaaatcatgggaaagataaagagatgaagaagtatgtttgggatgtggcatggagctacaatgagaaaagctttgaagctaacatgaccatgctttacaactacaatgtggcagtttggcgtgatgttgtgaagtcaaaaccaagaacttggtgcagggcgttttacaagcaaggaaacttctgtgaagatgttgagaataattcgacggagtccttcaacaactccatttttaaagctcgagacaaagcatttgtgccaatgcttgaaaccataaggagacttgcaatggtaaggatagccaagagagctgttgaatctcatgagcacaaagggagatgcacgccatatgttagtaaattccttgccaaagaattcaaaaaagcttcagagctgaccataagaagaagcactaatgatatgtatgaagctactataggtaacggttctcataggatatgcttaagtgagaggacttgcacttgtcagaaatggcaaatctgtggcattccttgtgagcatgcttatggagtcatgttaaacaagaagcaagaggttgaagattatgtgtgtcactggtttcggacacccatgtggaagaaaaattacacagacggcctatttccgcagagaggtcctgcattttggccatcgacagaacatcctgatgtgcatgcaccaccaccaccaccacagcctgggagaaagaaaggaaaagagactaaaaaagacaagaagagaaaaaagggaaagaatgagactcctactaagatggcaccaaaacaaatgaaaagggtaatgcattgtggtatttgtaatgcagctggtcacaactcaaggttccacaagaagaaaaagtcttcagtacaggttagccttttggttatgttttgcattgcattaaaacgtgtattaggcctataaaatagtttgactcttgttttgctttaaaatgtgtattaggcctttgaaggattgatgtctcaaggcagtctaggccctagcactcatggcactcaaggcagccaagtggaaccgtctcaaggagttgtgatgtctcaaggctgattagaaggagattagttaggtgtaagaggattagatgggtctagtttttgtttaccatctgattaaaacttaactcggttatgtaattttggttatggatgtttca

SEQ ID NO: 8260 - DNA, 539 bp, Arabidopsis thaliana columbia
cctgttatagataccacataacgaacaaatagtctgcaacccctcataagacacaaagtacctttctccgttaactactagtgttcctttaagtggattcttgagattcacttcaacacacacacgagcaaacctgcctcgttccttccgcaaagtcgtcaagtccactttaataggcttccccaatcctgctgcaattcccagcagaatttcattatgatagaaagtaactggcaaattcgctactcgcacccaaaccggagtcgtctctatcacatctctcaatggattaaactccggtgaccaagcttggaccattagaatgctgcccaaaactctccacggaccacccgtcaatgccatcatgtagtcttcctccacctcgaatctaaccatgaagaactgtcgcgggagatccaacactgacatccctcccgttggtctccatagatcccgaagcttccgagacaacacttcaattgtggtgtgacgacccaggattttcacaacatacactgcttgtacaacccgttcatagc

SEQ ID NO: 8261 - DNA, 1301 bp, Arabidopsis thaliana
gatgcatcacataaggtaattttattgttatttgggttgttgtttggaaattttgattccaaatctctgttttttggtagcttatcgatgataaccacattttcaagtgggttgacgaagcattgttagatgagattgagagattggctagaagaacgactgtacttgaagaaaccatttcgcatattacaacagagtccacggatcacaagaagatggtgtttgagaggatgcaaatgaagctagagaaagagatttttgagaggttagaagaggagctgttggaatccaaatcaagcatgaagaaaatgtgcattgttgtcatggtaggttgtatgatgatagttggtttgagtaaagtgataggttgaatagaaggagtagtgtattggtttgttgtgggttcttctatgtacttcttgtgttatgttgtgctttttttgttgttatgacttatgagaaacgtcgttgttataattggtgttatgttgtgctttttttgacaaaaacaaaaacaaagagtaaaaaccaaaagagagaaatagccaaaccaaaacagagataaaataggcaaaagttttgtcatttcacaatggttcttaatgccgagacatcaccataaaagcaatgtagtcaaatggccaacacagagaccaaaattacatatccgaatgaagtcttaataagatggaacacaaaaactaaacccatctaatagcttctaatccttctactcctactaagcattcatccttgagacatcacaactccttgagacggctccacttgactgccttgagcaacttgagatatcactccttcaaaggcctaagacaaaaaacaagtgtcagttaccacaatacattactattctacaacaaaacaccattttactaacctgtacaagtgacttcttcttcttgtgaaacctggagttgtgacccgcgtcaccacaaatgccacagtgcatcacccttttcatatcttttggtgccatctttgtgggagactcattcttccctttcttcctcttcttgtccttcttactctcctttcctttcttcctcccaggctgcggtggtggtggtgggacatggacattgggatgctctgttgatggccaaaaagctggccctcgctgtggaaatatcccgtttatgtagttcttcttccacataggtgtccaaaaccagtgacacacgtaatcttcaacttcaagcttcttatctagcatgactccataagcatgctcacaaggaatgccacaaatttgccatttctgacaagtgcatgtcctctca

SEQ ID NO: 8262 - DNA, 590 bp, Arabidopsis thaliana
tctagtaacggccgccaatggctaaaacaacaaatacaaaaacgaaagtaatattactccatgatttacaaaattaaataactattaattgataattatattttgaaacatactagatgatgacttcactgtcatcgcccggagcttggccggtgcttgaaccgtcgtagttccatttcggtaactgcgatggatccgtcactggtccaggcaaagtctgcaacaataatattgttaatcatatttttcttaacttcttaaacaagatttactcatcctttatgctctatacgaaaccaaagattttttttttaatatataattaatagttacccttgctttgcttctcatatccaagcccgatccaccaatcctattcatcatcaaacaaacgtaaataaatcaaaattcttttaatcaacccaaaatctttcaacgtagtagatgagttgagaccaagtttaagacttttgactcataaacaatctaaacccaaaatctttcaacgtagtatatgagatgagaccaagtttaagacttttgattcataaacaatctaaggaaccgtcaagaaagatatttttttaaga

SEQ ID NO: 8263 - DNA, 560 bp, Arabidopsis thaliana columbia
  unsure (1)..(560): unsure at all n locations
atttcactctccctgtttctaagtaaagcccatgaacgcttctcccaaatcgaacatcttcaaccttccctgcagctttcaagacgctaacaacggtcatttcgttagccgcgactccagtcttcttcatctccacgaaatacaccattgcttccgaagcagaaccatttctcacaaacccatcaatcattgcagtccaagtaaccacgtccttatcttcagctccatcaaaaagacgacttgcaaaatcgaataacccagaactagaataacccgaaatcaacgaattcctgacaaaaggatccgaatccaacccgaatttaacgatatgagcatgaaactgaaacgggttcgagtctctcagtttgaaaaccgctttgagaagcggaggaaacgtgtggcggctagggatgacgccgtttcgccgcatatgacgataagcaagaaatgataaccgacggttgagagtaatccgccggagaagtgaccaatgagcgaatccatagttgaatgtcagagtttggagttgacataataacgacgagcgtcgganattgagt

SEQ ID NO: 8264 - DNA, 542 bp, Arabidopsis thaliana columbia
tgtctgtagttgtttttcattttgacatctgaatgtttatgttaggtactggtggtgaagaggcttctttgtttgccatggacatattcagaatgtaagtcccatatactgctggtagaagcaagtatacttctttgtacttgaactttacttctgtttttttatccggttttggaatatcgacaggtacgaaaggtattcacagaagaaaggttggaagtttgatattgtagacatcaccgagtcagatatgaaagggtataaagtaagtaacttttgttcctccttatgtgaatattagtattccagtattgctctgttctcctgaagctaagatcttgaatgtaatttccaggaagccagtgctgcaatttgtggagccagtgtctacggaaaactaaagttcgagagtggaattcacagggttcaggtatgttataaacttataatatatgaatcacattctgattttcttgactaatcatacaaaatcaaataatcacacttgaacatctttgcacagcgtattcctatcacagaga

SEQ ID NO: 8265 - DNA, 517 bp, Arabidopsis thaliana columbia
tgactggttcatacctccacatgctgcttccagaaacggacaagccgggccaagaagatcacctcggtcagaacaatatgagaatgagcacatgggtaatggcaggagagggtgggataataaagcatctggaactattagatttggtgaaggcccttcagcaagaagtgtgtggcaagcatcaaaggatgaagctacacttgaagctattagagtagccggcgaggatggtgcagtccctcgtccaacccgagtggctgttgccctgaagctgaagccatgggagatgatgataacgaagggcaggaacgtgacccgatatgggtttcatggagtaatgcaatgcactcactccgtgttggtgacattgatgctgcttacgcagaagtcctctgtgctggtgaccagcacttggtcatcaagctgatggacaagacgggaccttctcttgaccagatgtcgaatgagattgccaatgaagctctaaacttcatctctcagtttctgctggatcata

SEQ ID NO: 8266 - DNA, 513 bp, Arabidopsis thaliana columbia
cgaccaccatgtgcaatctcaacctaaaaacatcacacaaagataacacctttacaagaaattacagaaaattaagctagctttcatcatgcgtttactaacccgaagtcgacacccatcaaaatcataaccatcacgtccataaattgcatcgtctgcatcacgaggatcttcaaactgccaccaataacaaactatcttagtcattagcctatactattacaagaagaagaaaaaaacaaatttgtacttgatcaatatacctcgacaaaggcataaccaggaggtctcggtggaatcttcaaatcaatgtccacaattggtccatactgaaacaaatatacataagagtcgatttaaattgtctcagcaagacagaattgcaaatttatgaacccaaacaagtcataatgaattcaatttttatcgagagaaaagaggaattttcaaaccttgtagaagagatcttcaacctcacacttgcgaatatctccaggcaaattcccaacgtag

SEQ ID NO: 8267 - DNA, 547 bp, Arabidopsis thaliana columbia
tggttgttgatttggacatttcttcatggaagaagagaagttgacccctccaagttctgaaccgaagtcggcccctccaagttctgaaccgaagtcggcccctccaagttctgaaccactaggtacgtaaaagaatgttttttgtctctctctttgttgatttggtttatttctgtgaatatctatgaatcggagcatgtgtatgttattgcctagttgaatttctggagttgatgatggtaaagagagacaaaaaaagtggcagagaagtcaaataaatcaaaggagaaatctccaacggaggagtcttcttcaaccaccccaaaaccagagaaattggctgttatcagaaggatccttcctgagatatttgctcaacgatgtggtcaaagaaacagtagctttgaggcatttgctcaacgtcggacgacatatgattattacaacatcaggtaattagaaaatcatgattattcattttgtcttatatcttataatagtcactaataaatatctgatttttcaaaatatttttatgggtgaagaa

SEQ ID NO: 8268 - DNA, 511 bp, Arabidopsis thaliana columbia
gggccggtttctaaattcacttatatttttttatttggattttgttttgatcgcgcatcatacttctacatttcgtatgggcatgtccttggcttactcctccaatataagatttaaggtgctacctccatatagggagaaagaagatataatcttacggtctttttaagatgtttacgtagcaacacacatatgtttcacaggttgtagaggtggcgtaggtgaaggtaaattgcttggaaatggctttggcagtggtggtggacatggtggtaaaggggggcgtgtttgttacaataacagctgtgttgaaggtggaattacatatggaaatgcaaatctcccttgtgagcttggcagtggaagtggcgattttagccctggttattcatctgctggtggtggtattgtaggtatgaaacgtcagatattttgatgattctgttctagtaaacttgagagattaggttgtgtaattgatgcaaatgtttgatgtagactattgactaga

SEQ ID NO: 8269 - DNA, 566 bp, Arabidopsis thaliana columbia
  unsure (1)..(566): unsure at all n locations
cattgctcatagggttttcaagatttgtcttgttggttgaaaagtctttacaacaatggttgcttttaggatttttcatagggaattttgttataaatggttaatgagtgtttatgttcggttttgtgtagtcggatggggaactttccatctcggtttcgcaggcggtaacatggaccctgagccagggagatgccgcagaacagatgggaagaaatggcggtgctcaagagacgccgttcctgatcagaaatactgtgaaagacacatcaacagaggccgtcatcgttcaagaaagcctgtggaagtccaatctggccaaaaccaaaccgccgctgctgcatccaaagcggttactacaccacaacagcctgttgtcgctggtaatactaacagaagcaatgcccgtgcatcaagcaaccgcagcctcgccattggaagtcaatatatcaatccttctacagaatctttacctaacaacaggtgaaaacagatttttaatactctgcatattcattgttagtcatacncacttactgactcttgcaaacagaggagttcgatat

SEQ ID NO: 8270 - DNA, 936 bp, Arabidopsis thaliana
accccactttctctcattatcttcctaatttgaccaacttctctccatctctcatggtaagcatagagattcgacatcactatgtataaatactcatctttatcagcatcccctaattcaatcatcttagcggcaacggttttcgcagctttcagatccttgcgagcactgcaagcaccaagtaacgccctccaagccacaccatcatacccaaaaccgaattcttgaataacctgttttgcctgccaaacctctcctctctgccccatagctctgataagagaacagcaatgctctacgcttggtttgattctatactcgttgatcatcatctcaaagtatccaagcatgacttccattggaacttcacaatgagaacacacagctaagagattcaagaacgtgaatcgatcaggtttcaggaacctttcttgtttcagttggttaaagagcttgatcgcctcgattgaatcgccattacgggcatatccagagatcatctcgttccacacaatcagattctttctaggcattgtccaaaacatcagctcagcgtgcttcaacattccgcatttggaatacatatctatcagagcactcgcgacaacaactcgagagtctaggccaagcttatgagcacaagcatggatgagactcccccatggaaccacagcgagagcagcaacggcggccagaactattgacagactgtactcatcgaatctgacacctgacgaatgcattttggtgaaaaactcagtagcttcccctgatttctcactgttgacataaccggtcaatattgtgttccatgaagatgaattaggattcggcatatccgatagaacctgaaaggcattattgaaatccccggacttgacgaaagcatcgatgagctcgttgtatgttacagtgtctggatcaagatcactaagt

SEQ ID NO: 8271 - DNA, 572 bp, Arabidopsis thaliana columbia
acaaatcacaaatcacatctcttcatcttcctcggtttatccaaatcctcattcagacttcatcaaatcgtttcttgcttccgatccgaaatttgcggcgggaaaagaagataacatcaacaaaaaaatgatttctctattcatctcaaacttttcaaacttatcaaacttatctccgacctttgataacatgaacatgaacatcccatcgaagaagatcgtaccggtaccgacaccgagtgagaaagttgtctctttggtatctcgaaccggacgagatctccaacgttacaacaccgcagggtatcgtcaagtcgtcgggtacgttcaattttaccaaaccctaattttaaaattctaggttatgaatttgggggaattttggaatctgattagaaattcgaaatttattgcagatgtgtaccatatagatacaagaaacacggaggaggagaaattgaagtgcttttgataagtgcacagaagaaagggaaaggaatgttattaccaaaaggaggttgggagattgatgaatcaatagaagaagctgctttaagagagacaattgaaga

SEQ ID NO: 8272 - DNA, 436 bp, Arabidopsis thaliana columbia
tagaggatcccccttttgaatctatgtgtagactctttacagcctaggtctaagaaaaatatttatacctggagtagcaccactaggctgcataccaaaccaacgagccagaggtatctcgccacctgatagatgtgttgacagcgtgaatcagattctaggcacatttaaccaagggctaaagtcacttgttgatcagctgaaccagcgatcacctggagccatctatgtatacggcaacacctatagcgcaattggtgacatcttaaacaacccagctgcttacggtacacttattctcggataacatggttgtcaaaggagtttcttctatgatttctactctgatcaaacatggtttatatggtacaggatttagcgtagtagacagggcttgttgcgggattgggaggaccaaggacaaattacatgtctg

SEQ ID NO: 8273 - DNA, 545 bp, Arabidopsis thaliana columbia
acaaacttatccaatggtatcactgagtcatctccaaagagcaagtataagtacttcaatgtttcaccaaggaaaaatgtctccatcttatctcttctatgaggaggcacttctgttacatcatccaatgatgtgtatccacctgatttcacctttgtgtacttttcaaaagcttcaaaaatttgccaaccttgatctcggtatctgcaattttagaaatgtgttagctttaagagtagaatagtccccaagaacttagattagtgagggaaaatcggatgaatagttttcatactttgtatcttttgtgatacgatagaggacaaagagtgattcaacagtttcagggcgcagtagattatgtcgatcagcgggcttaatgattatgtcatttgcatacatagaactcttattcccaccatcaagaccatcctcagtgtaatcctgctttattaaaatccaagacttaacaaaaaacaagaagagcaaggatgacaataacgttttggaaaaaagtacacacaaaacttacctttgtgtgaaag

SEQ ID NO: 8274 - DNA, 492 bp, Arabidopsis thaliana columbia
ggtctctcgtcatgtcaccacttagtttctttttatgtcttcaatagccagaaaatcatagaacccttgacgacataaagcctcatggcctttgtcatgtacatgccaaaacaatataacaagacaaagaataagcttcatgatttgagtttttatcattaccttgaagacgtttgtatcgtttagttcgaatcttcgaatggaggcaagccccactcttccggtttaaaatcgactagagaggttatgatttgatctgcaacatcttggtgagagatatctagtctaggatccggtaccataaccacgttcctgtagatagacatcaagatgtataaacttgtttctcggtttttattggcttttacatgaagagaacccacttacattccggcgtttttagcagcaagaactccagatggagcatcttcaaacaccagaaccttttgtgaaccacaggaccgtcctaaggaatccagacgaagaggaaca

SEQ ID NO: 8275 - DNA, 493 bp, Arabidopsis thaliana columbia
ggttcctttttggtgaatactaggagtaagagaagaagaagcactggtgtgaaatgtagcagcatagctgactacatcggaggtgacttggtgaagccggacatcggacaatggcttcaagacgtggaagaacacaaggcaatcgccatttacgctcctcatgagggtggttacgaaggtcgttatcttaaccgtctcaaaatgcagggctactactttcttgacatctctgctcgtggccttggtgaccctgagactacccttctcaagaactaccctgtttgccctgtatgtctactttcatccatcttctactttaatcttgtttcaatataattttgtgtgaaccatgtatcttctcttcttttaggctcatcttgggaaacaacctatagcaagatggtattatccaccagaagttgattacaggctcgctgctcttccccctagtgccaagggtcttgttgtatgggcctcgaagcaaaggtttgag

SEQ ID NO: 8276 - DNA, 516 bp, Arabidopsis thaliana columbia
cttgagtgactccaagcatcctcctcctcttctttaccttcatatttgttacttctcacaaaatccttcaaacctatatttcttgtgatgcaagtaaactcagtgtgatgatcgttggtcttaatctcctctttgacactcttcttagcggtaaattctggaattggtttcctcacgcgagtaatgtgtttttgagcatagtctctgcagtctccatcaatggttactctaaccggatagaatcttatagacctttccaacttcttgcagttgttgttgttgttgtcggttttatttcttgttcgactgaagcaagactttgaggatgaggacttaacgtctgttgtcttaccgacagaacaaagcttcactttcttggcgttagattggaagatcgagttgaggaagctagtgagacgcgctccaggagacactggctgcttcgatctctttagctcctcaattatcttcacggctttaggcttcttatcatcatcggacttggaaaacaatcta

SEQ ID NO: 8277 - DNA, 624 bp, Arabidopsis thaliana columbia
agtaacggccggatcccctatacagagagcagaacaagaagaatcaaagggtccatcacatttccaacaaaagattactaatttttcgaagctccttcagagcagtcatggctgtgacttgtcccttttcgaccaaattgttcttagataaattctcaattagtcctgcctgaacctgacctcgttcttgctggaaaactgactctatcacctgaacatatggtcacaaatcatcagaacatttgatttgatattttcagcatagatgaagagaatgagaatgagagtgacttgtacctgaatgtgttcgagcatcgaattgccaaggtttttcagagtattcatcacattctggtctgtgtctcctttgctgcccgaagatgaagcctgtggaagagaatgtgactcagaagagcaaactaaatcgctcttactactttcgactccattacatctcgtctcctcagcagtgacattgcgtccaaacttccaaaaccactggaattttcctggtaaaaccttactacgctccttgatattggcacagatttactgcagcgttgtctcatcattagactgagttactggaactcgatgctcggttgagaagaacgggaagaggag

SEQ ID NO: 8278 - DNA, 586 bp, Arabidopsis thaliana columbia
gtatgatggtaatttaactgatgaaaaaccgttaaaacggagggcgagtggtggaggaggagttgttgtggtgacggcgttaagtccaacgggatctgacgtcagcgagcaatcgaatctagtggatctgttttaccggtttcttcttcttgtcatgtttttaaaccgacggcgagactggtggagtggtgattgagtcatcatcgccggaggaggaggagaaagatccgatgacttgtttgaggttgtctttgccttgggtcaatgagtcaacaactccaccggagttgtttccggtgaagagagaagaagaagaagagaaggaaagagagatttctggacttggtggagattttatgacggtggtgcaggagatgattaagacggaggttaggagttacatggcggatttacagctaggaaacggcggaggagctggaggaggagcaagttcgtgtatggtgcaaggaactaatggtcgtaatgtagggtttagagagtttattggattaggtaggatcgagtagtgagtgagaaagagagaattgtgtagcaatgcagagaaagacccaattcatgatttgag

SEQ ID NO: 8279 - DNA, 966 bp, Arabidopsis thaliana
tgaattatggtttaggttaggtaacaaaaaaccctaaattgactcattcgataagaacagagatgcaatcataaatatgagtgcaaagcacgttaccggaagctgtgatggccttgtttgcgtctaccgtatagaaagattgatgtgtatcatcaatcccgccactagatggtatcgatctcttcctcagcctaagattcaacaaattaaccgccttagacgaaatctacacgagagaaagtttcactttttaattcttttgcttaatcaatttgcttaatcaatttgctcatatatgtttacttaaatttttgatgtttttgtagtattatttcactattattgtgcctaattaattgtttttgtttttacaaactctctcatagcttattattctgcatcaaactatccaggattcggtaaagacactacgatcctcatagaagagatctggaattctagtttcagttgtttatcaattccaataaagtctacacacatagacataggataagattattattaagacctttaaaaaaaaatgatgggaagcatattattgttactattattcttttctctggtccaatcacgttcagacacgtcatattcaaaaattcaacttcccggcgattctctgaccctctccgttaccgatttcggtgctaccggcgatggtatcaactacgatacttctgcgattcagtcaaccattgacgcctgcaatcgtcactacacatctttttcttccatctgccgcgtcgttttcccttccggcaactatttgaccgctaagctccatctccgatctggcgtcattctcgatgtgacggagaacgccgtgcttctcggtggaccgagaatcgaggattattatccggcggagacttcgtcggattggtacgtggtggtggcgaataacgctacggatgttggaacactggcggaggagcgattgatggcaag

SEQ ID NO: 8280 - DNA, 925 bp, Arabidopsis thaliana
aattcaatgtaaaaatcaagacagtgagaagcgacaaccgaacagaatttctgtgtttgactagttttttccaagaacacagagtcattcatgaacgatcttgtgtgtctactccagagcagaatggcagggttgagagaaaacatcggcatttacttaatgtagcaagggcgttgaggtttcaagccaatctcccaattgaattttggggggaatgtgtgttgacagcggcgtatctgattaatcgtactccgagctcagtgttaaacaatagcacgccatacgaacgtttgcataagaagcagcctcgatttgatcatctgtgtgttttcggaagtttgtgttatgcacacaatcgtcatcgtggtggtgacaaatttgcagaacggagtaggcgttgtgtgtttgttgggtacccgcatggtcaaaaaggatggagactatttgatatggagcaacatgaattctttgtgtcacgagacgtagtgttctcagaacaagaatttccatttcaaatgactcacgaacagagtataatcgatgaagaagaagctttgtggaccccaatagctgatgggtttgttgaagaagaaaataatttgggcccaaacgcaggcccaactactccactttgtgaaacagatcaaattggcccgtttgtaacagaattgcagtcacaagagtcgccgtcagctccgttacccacagaacaagttccgacgcctcaggcgcctcctgtaatcaacccgccgcctgtaatttcaacgacgtcggctccgtctacctctgctccgacgaatctgcagctgttgcctctgtctcgagctaagacaacaacttctcacgtggtggctccacggcggtacctctccgcgacgacagagtgaaagaaacgaacacaacctgtgactcttaaggattttgt

SEQ ID NO: 8281 - DNA, 573 bp, Arabidopsis thaliana columbia
cctgctgtctaaaagatacagagatggcaacttttgctcaacaggagcctgcatatatacacccacaggtaactcagaagcagccatttcactaaaccacaaaccaaacactaatctctgacaatcaaaaacctaatttttttcccacttctacacttacatactatacaataaggctagaaagtggaaacaaataagaagaaagcaaacctcaaggattcgagtgcaaatagcattagcgattccttcaccatgttcccgttgttcaccagcgataatagtgagatcagtgataataggcttagaattgaaagtaagctcacccaaaacaacctcataaagctgaacaatctcatccatactcggaggcaaaacctcttcaccaccaccgaactcatcttcacgctgattaagcaaagctttaaaccggtctaacaacgacggcggtggcggcggtttctgcggcaactcaacggacatacctttgcggctggtgctattaatcgaaacaagtcttggattgaggatttctctgagtcatcccaattcaatagtgaagagtgataattagtg

SEQ ID NO: 8282 - DNA, 593 bp, Arabidopsis thaliana columbia
caaaacctcacgacacgtcattctctccaattctacaaacaccattcatttcatttccctaaaaaattatggctcatgtaagtttctttgatgtgtgaactgtggaagagactactctcatcaaccatgaaccataaaaactccaccgctctttctctccctcaatcatttacatctcttccttaaatctctcttcccaccatcatcattccaaaccaattctctctcacttctttctggtgatcagagagatcgactcaatggtgagcttttgcgagctttgtggtgccgaagctgatctccattgtgccgcggactctgccttcctctgccgttcttgtgacgctaagttccatgcctcaaattttctcttcgctcgtcatttccggcgtgtcatctgcccaaattgcaaatctcttactcaaaatttcgtttctggtcctcttcttccttggcctccacgaacaacatgttgttcagaatcgtcgtcttcttcttgctgctcgtctcttgactgtgtctcaagctccgagctatcgtcaacgacgcgtgacgtaaacagagcgcgagggagggaaacagagtgaatgcaa

SEQ ID NO: 8283 - DNA, 506 bp, Arabidopsis thaliana columbia
tacatttaactattcttcattcaccaaactacaaatccaatcttcaagttcttagattacatttgttaagtcatcttcttaaacatgatcatggtttatcgtaatcaaaatgttatggccttgtcaattacataatcataataaaattgcattatagatgaagaaactgaagctacaaattacataagacaaaagaaaaaaagattacataaaatgaaaactgtggcatggtcgagcctgacaaaaaaccgcaagctggaccgacacagagagactaatacaaaccataatacaaatattaacatacgaaatttaacactaatccatatttaattaattactcttgggccagtcatgcaatttcacaaaaactccattgcaagcggctgaatttcctattttgcccctaagctagaatcgaatcccaatcgatctcgtacgacggatacttctccaacgagaacgtctcgttccactgcggcggctcctccgggtcagcgaacgtc

SEQ ID NO: 8284 - DNA, 803 bp, Arabidopsis thaliana
  unsure (1)..(803): unsure at all n locations
tgtttcgactgttaggcagaggacaacacttccacgaacaatgccccaaaagatgatgtttctgctggtaagactgacaagggtgaagagattgtaaaagagcggtcttccaaaaagggcaagaagaaagagagagaaccggctgataaaccttctgttaaggccaagattaaaaagaaggctcttgttttgcctcttgaagcctctatagttgcgcttcttctccttataatgttgggtgctttctatgtggtatgcagactttcttcgagttgttattttatggtcccatcttttacagttagttttgtcgtcaacattcaaatgataggagttcgaaatgcatacctttgttttgtagatccattgtgtttgggcagctgcagaagcatattcagctccatcaatagttttgacatctcagtcacgtgatggcctacacgtctttgatgattttagagagtcttatgcatggttaagccataatactgatgtggatgataaagtaagttttttcaacaaaaacaagtcagtttttagttcctgttaagcatcatcctttggtagaggtataagctgtctttaatatatgaagttgcctgagtttgatttgcaaaaataaaatcttggtaggtggcatcatggtgggactatggttatcagacgacagctatggctaatagaactgtgattgttgacaacaacacatggaataatactcacacgggcactgttggcacgtgaatggtcatctccagannaggcggcgtgggaaattttcaactccttggatgtgaaatatg

SEQ ID NO: 8285 - DNA, 685 bp, Arabidopsis thaliana
aaattccaagagaaattatagcgggttgcaaaaatggatcaccacaaacaataatagcaaacgagaacaaaactcaaaacaatttaggtctctgaaacagtatatatactcatggccatctttccatcaaatcatccagaaaaaaaaaacgaaaaaaaacaaaaaaaaataataaaacaaaaaaaactttttatttttaaataaaaataaaataaaaaatgggatacacaaatgtgtccattttattaggcctgttgatggtctttgttacaccgatggtgttcgcagatgatgtgacaccaatcccagagggcaaaccccaagtggcgcagtggttcaatgccaacgttggtccattggctcaacgtaaaggcttagatcctgctcttgtagctgctgaggctgctccacgtatcatcaacgtactattcacacttattgtcttaaactcatcctttgtaccaatagattttgatacaatttttttgaaaaacatgtaaaaattattgcaggtgaatccaaagggtggtgaattcaaaacactaacggacgcaataaagagcgttcctgcagggaacacaaagcgggtgatcataaagatggctcctggtgaatacaaagataaggtcactatcgacaggaacaaacccttcattacattgatgggaaacccaatgccattgct

SEQ ID NO: 8286 - DNA, 600 bp, Arabidopsis thaliana columbia
cagtatggttagcttactttgactctgtagttttaagttttttcaagagaagtaatgaaacaagtagctaaagaaatgataccttgaaaacatgtccagatccaccatgaccaagtctctctgaaaaattatttgttgcagtttcgatcgtcttaaatttgtattgcagggagcgtacagatgtaataccagctacaatgttaataaatgatctaattagttccatagacaatatatttggtaaaagcttagaggccaaataaaacaaatgaacaacactcactttgattaagttcaacttcttgatatggtttttccttccgagcaaaccggcgagcaagaattcccgagatgatgatgaggatgactataccaaccacaacaattgctagaatagttttcattgagatttttccgctacctgtagaatgaaaaaaaaaaccttataagtctttggacagagtcttgtgactgtaactttaagtcataagtttgcaaggacttactattgtctctcttcttgtcccggttgtctgcagaaggtggttgtgacgcaaccacaggacgttgcagtggaggaggagaaagaggaggagtagt

SEQ ID NO: 8287 - DNA, 523 bp, Arabidopsis thaliana
ggcttcctttgttgttcaaacgtgcagatgcagtaattcctattacctgcttcatactagtctgccttttctcgcttcagcattttgggacacatcgtgttgggtttgttttcgcgcctattgtcctcacttggctgctctgtataagtggtattggcttgtacaatataatacagtggaatcctcatatatacaaagctctttctcctacatacatgttcatgttcttgagaaagacgagagtaagcggatggatgtctctaggcgggatcttgttgtgcataactggtgagatatataagaaatcgatattgttaatgtcgccataaataatgtcagtaatctaactcgttgagtctttgttttaggtgctgaggccatgtttgctgatcttggtcacttcaattacgcagcaattcaggttagtttctactttagcttggatgatttacttattgttatatcgccacaggtttcaataaatctttgttttgtttgctgtagattgcgtttacctcctggt

SEQ ID NO: 8288 - DNA, 637 bp, Arabidopsis thaliana columbia
tgtatgtttctctgagattgctgctatattgggtagaaacgtggtaagagctgttgttgtatttcctttgtgtattttcagtttatatggcagaaaaagagaagaaatctttcttgttaatagtgactttgttactacatgcaacaacttaaaaatatagctcaagcaatgtgatcatgacaatagagaagcaaaggaatcattgatcttcaagtttatcatttcattacactcaatagtataaagattaaaagcagaaatgggaacttaggaggaggctgcagtagcacagcagcttgcggtggcggtggtgttggtcggagagtgatctcaaccttatcgtgaacgccttgaagcaaaagttcaccttcaaatgcgactattttgcgtttcttggcagctctcagagtcccaaccaatgcttcaaagatgttggcacatcgatcgtcattgaacaacactccaaacgtcacctgtattcaaaaggaactaatcaatcctcatgatcaagaatcaatcaactgtgtttgttagatctgagcgagagaacagagtagatgttacgatcttgattcttcagataagagtatttgttgactgaaaatgaaataatacagatttagtccagatataggga

SEQ ID NO: 8289 - DNA, 589 bp, Arabidopsis thaliana columbia
tgcttcttctagtagaccaacgagagcatcgatctcacgaagcagatcagagttggtaagagaagaaaccatttcttcgtattcctctttgtgaattgtactcgatgttgaagatatgaaaaatcccatgattcttgaagttgataatagatgctcaagatataaagcgtacctacaataataatcaaaaaacatataaaaatccaaacttagtcgaaacttttttttttttttttgtgaacttaccatcggacccaagaagaaagctcccacatcaaaggagatttctcatctctaaaagcagaaagtttcagataattccgaccaccggaagctggaaatacagagagctgatcttggaggatgaaacgaccgtgtttgacgatgtgatggataatgatcaaagacttgagagctacgcaagcatctccggtggtgtgaagacgttccattatggattcgacagctgaagaagcggtggctcgtgaccagtaccggcggagagaataacggcgaggtgacgattcccggcggcgttgaagggtcatgagtagtggccggaggacagagagatggaaagagagagttt

SEQ ID NO: 8290 - DNA, 550 bp, Arabidopsis thaliana columbia
aaatcccaatactctgaattagccctcaaagttcatatattttccactagatttttatcttcgccattcaaaaattagttaagtcttgaagcaatcaaatatctgaatggaaacaatcaggtttctttaagataagacttacatcggatggaaagcaattgcatttacagggtagacaatgtcccttccatcctctgatttccggtgacatttgaaagcatatctgaaacgaagttcaaatgaagaaatcagatttgttaaaagaagtaaaaaggaatatctcaccagaaaaaaaaatcagcaagaataaacaaaacgccgtagactaccacagttcatcaaagagaggtaagagaaaacaaattagggacatactttttagcctgagcagcttctgatagatcaaaaaactccattgaaacctcccttcaacagagctaagggcatatcctgcaaagtattattaaaatcaaaagtctggaagaggatattgaagctactgagagtatacttggaacagtgcgaaagcaactttgactgttgttaaaac

SEQ ID NO: 8291 - DNA, 559 bp, Arabidopsis thaliana columbia
gatgtgtaacttacttgccccaattgttgtgcactctcccttgacttaggatcatctgagcatagagtaacctctttcatggcacacatctccccactttcactgaggaagaaaacataaccgatcaaaacaggggtgacatagaaatataacatttgagttctcctattcaatattttgtgaagagaacaaatcagtttattgtaatttgtaaccatgaaaactgagatttgcccctgagaaacttaaccaacatatggaacaataatttctaccagtatgggatggattcagcagtgatattcttcccataggccatagccagtataaaatgcgatacaatgagcaatcagaacatctttgaaactaaaaccagacttgtttagttacgaacctgttaaagccaagatacacatgtccaaaacttcccatccccagcaatctcccttttttccatcgcgatccagggctaaccgtagcctctgcccttgccggacttcgggggacagacggagatgtcgctgctgaatatgtgggtgaaacggacaagtattagaga

SEQ ID NO: 8292 - DNA, 637 bp, Arabidopsis thaliana columbia
ctagaggatcagcggaggggaaacagaattaccggaaatagacccgagggccgaagatcgggaactcaagaaccatttgctgaagaagtatagtggatacttaagcagtttgaagcaagaactatccaagaagaaaaagaaaggtaaacttcctaaagaagcacggcagaagcttctcacgtggtgggagttgcattacaagtggccatatccttctgtacgtataaattttctctcatctctctttgccctcatattttttaaaatatatactacaaattaagtgttttaaaaacctatctttaagctagcaattccctctgaagccgctatgttaggccaagtaggtacttgcatgaccgattttgtgtttaaatccttgtacggtttccaacaacatggttttaaatccgaatgctcacaacactagaattagtcactaggatacatatcttagtcatggtgttctacccttaacatactattttctaacacgtatatcaatcacttttttttaaaaaatgtaagtttgtgatgaaatttttatccatatattttgaaacaatttaattttttttgtagttttaattagtttgacatgaaataactaatctacccgactgtaatgatagtgaaa

SEQ ID NO: 8293 - DNA, 526 bp, Arabidopsis thaliana columbia
tgattacctaatacctacacatatttttgctattcgtgctcaatatcatcttctttataatgtagcctggtgatttggaaaaagctcaacttggactagctcatagctacagcagagcaaaggtgaagttcaatgttaaccgggtggataacatggttattcaagctattttcatgcttgacacacttgataaggatatcaattcctttgctatgagagtcaggtttgttttcttattgttttgcctttcagattatgtcttgtctgttaccgtaagagaaaatggtttctgagcagctcatattatgtttttgcagagaatggtactcatggcacttccctgagcttgtcaagatagttaatgacaactacctctacgccaaagtttcaaagattatcgtcgacaagtcaaagttgtctgaagagcacatccctatgcttactgaagccctgggtgatgaagataaggcaagagaggttattgaagcctggaaagcatctatgggtaataacctgatgtagcatg

SEQ ID NO: 8294 - DNA, 623 bp, Arabidopsis thaliana columbia
ctttcttcaccaccttgtaacccggtacaggtagaaacccatgatttaatattgaaaatgttttttcatcaactaagtataacttgtgttagtccatattgatatcttgagttggccaagggccatacataattcattccaataacgtatcaagggatactgtaatggactagataagtccaggtctgattttaacaggctggtcttaaatagactgatccatatgaaatggtctacaaaagtttaaggtcttttttggtctacagttcgcaaacatatactaccgaatttgagcctaaccatctctatgttgcgactttcaactgcattttgttatactttgtgattatatatatatgatactaattgttatgtactaatgtacatgtagttggacggctgaggaagacgagatagtgtcatttccgactgtgaagatgaagcggagctcccgatccgagtggctactgtagatgatagtgcttctccgatctcacttgaagatcattaatagatcatttcaaagaacaaaactggtttgtgcaaagaggaagcagagaagtaacaaatgatcttattacaaatagtagagaagagagcaacaagattggtgggtagcagaa

SEQ ID NO: 8295 - DNA, 601 bp, Arabidopsis thaliana columbia
tagcatttaatatatttttgtttctggaaaatgtgtaattatctttatataaatgttcatatcagagcactatttctgggtttcaaaaagaaagctcagttagctattttctctaccacagaagaatctagacccagagagagagagagagagagagagagagatcagtaacgagagagtcaaagagaggagatttcagtgaagatgaaggagatgcaggcaatagagacgtcgcagccgacgacggtggctccggcggtgcatagccgacaattgggagctcagttgtcgggaagtatgagtttcagcagccaaatgtcgaaggaagatgaggagatgtctagaactgcgttatctgcgtttagagcgaaagaagaagagatcgagaagaagaagatggagattagggaaagggttcaagctcagcttggtcgtgtcgaagaagagactaagcgtcttgctttgatcagtgaggtatgtatctatattggttatttcatatataaagcacagattgttttttttttggagacttgtgcttcaattttggtttttgttatggaaattttttggattgggatgtgaaattgacatttggggt

SEQ ID NO: 8296 - DNA, 603 bp, Arabidopsis thaliana columbia
ttcaagcttaagagagcttcgaaagcgaaagacagatttcttctccatcgtgagagcaaatctccagagccgttttctcttcttcttcttcctcctcgcgccgtctctgaaactccatcatcgtatcaatcaaattgcttcctcctccaaagtaagcttcttttcgattctcaaccaatcatagtagtagtgtgcttctctcttatcctctgttttctaagttttgtatcaatctccacatagcttttctcgttctattatcgtagaaactcttaaactatagattagatcactcacgattcaatcataatcaatctggatctgaatctaattacgcatcgtgattcaaaatttgtgtttttttgtgtgtgtgtgacagttgaaaaacaatggaattggattcggagaacaaattgttgaagacgggtttggttatagtggcgacacttgttatagccaaactcatcttctctttcttcacttctgattctaagaagaagcgtcttcctcctactcttaaagcttggccccattggttggaagcttacaaatcttgaaaggcctattattatgttagagaggatccctaacttggaagtgtgt

SEQ ID NO: 8297 - DNA, 466 bp, Arabidopsis thaliana columbia
aaaacattgcaacagatgattatacaaagagcggtagtgtcgaattctcgcaatatcgtgatgagatcacactcgatgtaaacgtagaaacagtggacagagaggatgtcagctacaactacagtttgtccggttctgtagcaacgagacgctgtatagcgatactcagttcaggtactaactgtatgtctagttctagtacgttcttgatacatcttcgactgcgttaacatcggccaccatgcggttaaattcagagcaccagttggaagactaaggcgaggtggttgtaggatgttcatcgcgtgaggaccacagagctagtttcgagggcgacggcgagatcgaggttgatagatccgccacaagaagaggaacaaccatactcgagctggatcgggacatcggatcagttaagatcaggtgtacatgtcgagcactcagatggtattgaggaagtagatga

SEQ ID NO: 8298 - DNA, 571 bp, Arabidopsis thaliana columbia
ttgtgattgtcaagaaactgtaatttcatatctttatgaggaaacaagaaagtaaataagaagggagaaacaaaccttggaagaagtcggcgttgagaaaaagtcctcaggtctcttgggatgattacattctggagttgaagataaaaccagaatcagtaaagaacgatagaatagaagcagagatacaagaatagtttctttatttaccaggtttgcagaaccaagcatcgtcgtcaatggagtcaaaatgggtaggggccaagaaatcgaaccatttaggagctctgatgtgttcgtaaaaaacgtcttcaacaaaacgagaatcgattctcttccaatcgatatgagcaggctccatgagagaagaatacacagagatacagagagaaaggatggagttgttggttggagagaaaaagaaaaggagaagacgaatgtaaccgttgtagtgaacgttacaggtccatgtggacacgtggctttctcttgttaccgttgcagctttatttaataacactagccaatccacgtggaaaaagaaacgagacgtgggaagggaatgaatgag

SEQ ID NO: 8299 - DNA, 585 bp, Arabidopsis thaliana columbia
ttcacacggctttgaccaatgtgacatttttggttcgatttaatgactattagtggaagataacaagtattttatagtaaattaatgactttcaagtggttttcatcttacttacaaacttataatatgctataatattataatccataaataaaatctattaaatatgctatatttttcgtggcatcttgtgtagagatgatcatcagttgacaagaagtgccttgataatgtctttgcatttctcctcctcggcgtttagaagatgtccataacctaagacctcatggtacttaatccatgtaagcttctctgatatatatcgattaatttcgtatggaatgattctgtcttccatcccttgccaaacgtggaccgatccttcgccttccgcaaacggattttctaattcagtcgggtcgaattcccatgtcgcgaatccggctatcatgtcccggtgaagacattcatggtctccttgttgtctaactttttcctgtggttaatatagatcataaaataaaatgtattagatctaaataacatcattgtcataaaatgcaatattgtataaggttatcatat

SEQ ID NO: 8300 - DNA, 608 bp, Arabidopsis thaliana
ccgtctcttcacggtgttttagctaccgataaagtcatcggttatgcgatcgattattgtccgggacagaatctcaattctttgaggaaaatgcaatcggaaagtatgttttccgacgagattatcaggtaaatttgttgttgtttgacctaaatctttcatgtatacgtcttttttttttttgtcaaccacacatttgtcttagattctgttgttgatttactcattttcttgtctcgatttcagattttacgcggcggacgttgtattagcacttgactatttacataatcaaggaattgtgtatagagatttgaagccagacaatgtgatgatccaagaaaatggacatttaatgcttatagatttcgatctttctacaaatctagctccaagaacgccgcaaccgtcaccgtcactgtctaaaccatcgccgacgatgaagagaaagaaacgtctcttccgcttcaccagtttctgcaactcaggaatctcgccgcaagaatctatctcggttcactcatcatctacattggccgtgtcagattcttcaggtgagaagcaaattctttcgtcggaacagaggaatacgttgcgccggagttata

SEQ ID NO: 8301 - DNA, 520 bp, Arabidopsis thaliana columbia
  unsure (1)..(520): unsure at all n locations
agcctcttcttcttctctcccagcatagtatgtgccccatcgtctgatagattctcctcatccaaggtttgattatgatcttcttgcacgttcattaaagacatagatctgttcatcatgtagtttcctcctcctatatacaccaacagaattcatgactcaaatctatttatgtggagaaatagtgagagaaagagagagtatagtaccattgaagagatgaggaggacaagaagggagctgatcttgactgttgtcttcatgaagttgttggaacataaaaccatgttgaggaaacgccatctctaatctcaatccagcttctgttgttggatcaaacacatacatgtatgtattccaccaaaaacctatcagtgattaatggattgtgaaatcagtatagtgatgatcaaatatactttgttgtttgcagatttggaaatcactatcaaatgagttaggtgtttcttgtggatctcatcaacctctcatataagaganagagagagaaagaatgagg

SEQ ID NO: 8302 - DNA, 944 bp, Arabidopsis thaliana
tggtcaccgtcttcaatattccgttccgttaagctccatgcatgaaaccagtcaaaactccgaaacttacggattatccaaagagtcgccgttggtctgcatgcccttgttcgaaaccaacactacttcattcgatatctcttctcttttctcgtttaacccaaaaccagaacccgaaaacacgcatcgtgtcatggacgattccatcgccgccgtcgtgggcgaaaacgttcttttcggtgataaaaacaaagtctctgatcacttgaccaaagaaggtggtgtgaagcgggggcggaagatgccgcagaagaccggaggattcatgggagtgagaaaacggccgtgggggagatggtcggcggagataagagacaggatagggcggtgcagacactggttaggaacgttcgacacggcggaagaggcagcgcgtgcgtatgacgcggcggcgaggaggcttagagggaccaaagccaagaccaatttcgtgattcctccgctttttcccaaggaaatagctcaggctcaggaggataataggatgaggcagaagcagaagaagaagaagaagaaaaaagtgagtgtgaggaagtgtgttaaagtcacatcggttgcacagttgttcgatgatgccaattttataaattcttctagtattaaaggaaatgtgattagttctattgataatcttgaaaaaatgggtctagagcttgatttgagtttagggttgttgtctaggaagtgataaagcactcgtagttaagtagttgtagttatttcattagcaatattgtattattttcttgcttttgttgaattaattttatctgtagtacttttgtttttgtgtgttggagataaaccgtaataagtagtgatatttgtttattatccgttttgtttactttagaaacatgactatatatacgctataacattgg

SEQ ID NO: 8303 - DNA, 526 bp, Arabidopsis thaliana columbia
caagcggtaagatacaccatgatttgtgtcagacattaatgatcctatattattagtttattacatccactataatctcactgtaatagtaacgatcttgtcatctcttttgtttgttctcaggtgcttaaagatccaagtgtttcaaaggatgttcttcgagctagagctagaggattgaggaagctgggtaacgttttccaggtgagtcatattacaaaaataaagtcttggctctctaacataacatactgaaactcagctaaacattttacagggttctaagaaagcgtattctagagaaaacagcttgcgtcatgaagaagaaacaggagtgaaagtccacaccggagattcctcgaagccggcaacttaaaccaaggttcgaatctatcggttcgaaacagaacaatcaggttttgtgagaattcttgaatgtattgtaacgattaatattgttttattcgtatttatattcaacactaaataaatattgttatgggaagtgatgggttcgtctttatat

SEQ ID NO: 8304 - DNA, 457 bp, Arabidopsis thaliana columbia
ggccaaggattacgatgattacgttttgtttttttttactttacaagatgtctagtcgttagcctttcacagtctctcatttaatttgttatccttttcgcatagaataatattcaattgtgtgttctgaatagaaaatatgtgaacttgtaggataatcacttcggctcttcttcttgtttttgttttttggttttagggttatgattacgttagtgaataaacttttgtgctatgttcgatgaaattgttgaaatatgaatactttagggttttgtgtacatgacgcaggcatgggatcttccataaactaacggtttgggcagatggaccgagtatgataacgcagtgcccaatccagcctggccaaagatacgcttacagattcaacatcaccggccaagaaggcaccttgtggtggcatgcacacgcgtctttcctacgcgccaccgtatac

SEQ ID NO: 8305 - DNA, 531 bp, Arabidopsis thaliana columbia
tagtaacggagccagtactagcaacggtgccgctccaaggcttcaaacacagcctcaggtttataacataagcaagaacgactttagaagtattgttcagcagctaacgggttctccatcacgtgaaagccttcctcggcctcctcagaacaactcgctaaggcctcagaatacacggttgcagcggatcagaccatcccccttaacgcagttaaaccggcctgcggttcctctcccttccatggctccgcacagtctcatcctcagtttgctagacagcctccacaccagccacctttcccacaaaccacacaacaaccaatgatgggtcacagggaccagttttggtctaatacagctgagtctcccgtctcagagtatatgcgttatcttcaaagttcacttggagattcaggacccaatgctaaccaaatgcagccaggtcatgagcagcggccttatatcccaggtcatgagcaacggccatatgtgccaggtaatgagcagcagccatatatgccaggtaatgag

SEQ ID NO: 8306 - DNA, 584 bp, Arabidopsis thaliana columbia
acataataaggcttgaaagcgaggataaggatataaatggcagtttaaaactatttgctctgtaaattacaccggacagaaaaagtagcatactttcttacctttccatgatgctgaatcgctgttgcgataccaccggcattcacttcagcaaggctcttatcaacataaaatgcagctttttgatgaggattttcaccgtaacgaagagaactcttaagtacaagcggaactgtaaagctgggagggaacttctcttctgagaaagacatgaatatcaatcaatgtaagttgccaattgccataactagtgtaaggaggatcacataaaaacaatcacatacttccttcagtctgcttccatagccattctgaaaccgcagaatcatatgcagcaacatgctgaaaggccttccacgcaagttttctgcggaattgttggtcgctctgtcctcctttgagatactccaaaacagcttgataatctcctgaatcgacaacaatgagaacgtctttgtggttctgttgaaaaacaatagaaaatatagatttataatcttgaaaataatcttgcaagtgtaaag

SEQ ID NO: 8307 - DNA, 529 bp, Arabidopsis thaliana columbia
tctagccgtatttgcaccaatgatggttctttaatactttcttctggttagccacattgtgttgttttatgttatttcttaaccaattatctgtgagatgcagtataatccatcaattggtgcgactggaaataggtcattcaataatcgtctggtatccagtggcatatcaggaaatgaatctgctgaagctctgatcggaagaaaagtgtggacaaaatggcctgaagataaccacttctatgaagcaattataacccagtacaatgcagatgaggtactatttttgttcattgagtgtagattgctaattgggtagatagatggtttgttgtccctgccaatttttatagaagtctctgattatctattggatttgcaatttacgcacttgttttattctcacagggtcggcatgctttggtgtatgatatacacgcagctaatgaaacgtgggaatgggttgatctcaaggaggtaatcgttacatgaacattatcttaatattctttgcctgtggttgcatatg

SEQ ID NO: 8308 - DNA, 1027 bp, Arabidopsis thaliana columbia
caagaaacaaatcacaacaacacggtcgtgctggacgcaacaccatcactatatcctattccagcaccgtatccgccccatgattattacgatcagagtatgtatgtaaattacgagactaacccagaatttaacaatggtcaggatcaggatagaacttacagttactggtagtaagtagaagagactagagaggattctgtttttgaacctccctgatttttattaaatatgtttagagatctctttagggatacttaactcgagtgccctgagattttttttttgtctttagtcatctgtttctttggtatcagggcaaattgttcaatctcatttcatcaaattcccctgtttctgcaaaatttgtatcagaaaaaaggtttgcactttacagattaacctcttattttattcaaatgtatagaaaaagggttcactaagcagagcttaaacatcgagctcgaacggtaaccaaatctcattgacccgaccggagaactcgaagggtgagttatactgagcgaccgtgtaagctgaatccgacccaacaccaccgtcttctttgcttttcgctaatgcattagcccaagccgtacctttgaggctcgagtctagcgccgccgcttgttctcctatgctatcatcagacacgaatccactgaattgtctcacggccacgtacctagagttccatttctgaatgtggagattctccgacggagctggatcaggctggttctttttaggaacgtagaatgatacagtgaaggaagattcacagaatggaccgtcgcttggtgagacttgagagataaccggagcagtcatttctatcttctgatgatactcgttcttcccatgaatgtatgcaaacaatctgataccaaaatttgcaatctttatccgaacaaaagcgtcattttaaaagataaaactggaaatttcacttactggaagaaagcggttctggtacgatcacgagagagatactggaatcggtcagtggaacccagacggtgtgtgt

SEQ ID NO: 8309 - DNA, 870 bp, Arabidopsis thaliana
cagtgtgcaccagggtttattcgccaggcacaacaatgctaacgctggatacgcttaatgtgatgctggccgtcagcgaagagggattgatcgaagagatgatcatcgcactgctggcctcaccgcagctggcggtcttctttgaaaaattcccacgcctgaaggcggcaatcactgatgatgttcccgctggcgtgaagcgctgcgcagtcggctgaaagatgcccgagtcccgccggaactcaccgaagaggtgatgtgctatcagcaaagccagctcctctccacgccacagtttattgtgcagctaccacagatcctggacttactgcatcgtctgaattctccatgggcagaacaagcccgacagttggttgatgctaacagcacgatcacttcagcgttacacacgctttttctccagcgttggcgtttaagtctgatcgtgcaagcaacgacgttaaatcaacagctattagaagaagaacgcgaacaactgttgagtgaagttcaggaacgcatgacgctgagcggacaacttgaaccgattctcgcagataacaatactgcagctggtcgtctgtgggatatgagcgccggtcagcttaaacgtggcgactatcagttgattgtgaaatacggtgaatttcttaacgaacagccggaactgaaacgcctggcagagcagctggggcgttctcgggaagccaaatcaatagcgcgcaacgatgcgcagatggaaaccttccgcaccatggtgcgcgaaccggcgacggttcctgagcaggttgatggtctgcaacaaagcgatgatattttacgtctcctgccgccagaactgggacactagggatactgaactggagtatg

SEQ ID NO: 8310 - DNA, 496 bp, Arabidopsis thaliana columbia
gaggatcacattgtatcttaataactgtgaaatctctctcttctcaccaaacagagaagtcctgtttttttacccaaacagacaagtccccttttaacaccaaaaccataaaagccaaaaattcctctctcgtatgcattcacgtcaactcttgtatcaacatcatcatgtcagctaaaatttatagagccacagtttacaaaacaagacaaaattgtttaacatgaatcatccataaacaagcaacttatatataatagcctcagagaaatcacaactttcagccgatttattctaataatgtacatttaatcaaatatatgcatggccaattttatcaaacctgaccaaaagaatattgacgttcaacagaaaagaaaatgacaacgttaagaagattcaagagaagacattaaaggcttgagcagttctagcaaccttaataaaaacatcttcgagagttgtgtcagcaagtcccaagcaaacaccttgaaat

SEQ ID NO: 8311 - DNA, 677 bp, Arabidopsis thaliana
gattctagtgtcttattgagaggtagagaactccatggtcgtgcaattaggatagggttgatgcaggagttgagtgtgaacaacgctctgattgggttttattctaaattttgggatatgaaaaaggtagagagtttatacgagatgatgatggcgcaagatgctgttactttcacggagatgatcacagcttacatgtcatttggaatggtggattccgctgttgagatattcgcgaatgtaactgaaaaaaacactattacgtataatgcgctcatggctgggttctgtagaaatggccatggcttgaaggcactaaaattattcactgatatgctgcagagaggtgttgagttgacggattttagtttaacaagcgctgttgatgcttgtggtttagtttcagagaagaaagtaagcgaacagattcacgggttttgtattaagtttggaactgctttcaacccttgtatccagactgcattgcttgatatgtgcacaaggtgtgaaaggatggcagatgctgaggagatgtttgaccaatggccttctaatctcgatagctcgaaagcaacgacgtctataatcggtggttacgctcggaatggcttacctgataaggctgtatcgctattcccatcgcactctctgtgacagaagttgtttttagatgaagt

SEQ ID NO: 8312 - DNA, 450 bp, Arabidopsis thaliana columbia
ctctctccgcggtatccatttcttgctctcctccttatctctcctgcaatacacggttttgtatccatctactttcacaagcggggcgatgcaaaccccaaactgttcagaatattcatcaaggatctcaaccattttgtattggtgcctcacttcatctggagttgagttgttccagtttggtgaccagttcttgtacacagtccaaatatctccggtttgggggactatcctaacacaaccgcctctccctgtctccttgcctttccccagatgggaacacatgttaacatgatcaactatgtcagtatttcgtatcctgaaatgtccacacgactttgtaaacccatactgcacccatttaattgtaccaaactcgatgtcagtattggagctcaagtaggctatgtcaatcttaaaaggttgaacagatagtacttcacggaccat

SEQ ID NO: 8313 - DNA, 499 bp, Arabidopsis thaliana columbia
gatttacagctctttccttgcctatattaccatcaatgaatccctcgcatatccaataatctatcaatctatacttctttattgaataatcttcaggatataaagcgcaatattggaaacaagacctaacatgcttgtcatttagattgtcatagctatacttcaaaatcagaaggatatggtcgtccatgccagaaaactctgcagcatatgaagttaaaacatcaactgcatgatgccattcttgcaccgccctcttgcctgccatggtttcgccaatgacgttgagtgccaatggtaagccacgacattttccagcaacctttttggcaagttcaagaatatctggatggcttcctaaagatatttgtccaactttttcttggaacaactcccatgcgtcatttgttgacaaacattgaacttccattggatcgtgaaccccatgcgtgcacatacatctagagaacgagtggtgaatactactttgcatttgttt

SEQ ID NO: 8314 - DNA, 636 bp, Arabidopsis thaliana
atacaatgcaactctctctgtgcatcagcttgtcgaaaacgctgacgagtgtatggttttggacaatgaggctctctacgatatctgtttccgtaccctcaagctcgctaatcctacctgtgagtacatttctccatttgcagcttgtgtattcatgtagtgtgattgagtcctgacttgtttttgtgtattttgtgttttcattagttggtgatcttaaccatctcatctctgctacaatgagtggtgtcacttgctgtcttcgtttccctggccagcttaactctgaccttaggaaactcgctgtgaaccttatcccattcccaaggcttcacttcttcatggttggtttcgcaccattgacatcgagaggatcacagcaatacagtgccttgagtgttcctgaactgacccagcagatgtgggatgcaaagaacatgatgtgtgctgctgaccctcgtcatggacgttacttgactgcatccgctgtgttccgtggaaagctgagcaccaaagaggttgacgagcagatgatgaacattcagaacttcgaactcatcctactttgtggaatggatcctgacaacgtcaagtccagtgtctgtgatactgcaccaaagggtttgaaaatggcgt

SEQ ID NO: 8315 - DNA, 556 bp, Arabidopsis thaliana columbia
tgtagagtctcaatcatttaggtctagtctaaatcttgacacttttggaattgttttgcagtggtgggcaatggaactcaggaggagcatgcgatacgaacacagaaccgatcaagaacgatacatacctaaccccgtacccgtctaaaatgaaagtgcttgagaaagtgttaagaggtatgaaaacacctgtcacttatctaaacatcacgagattaacggactacaggaaggacggtcacccgtcagtataccggaaacagagcttatcggaaaaagagaaaaagtcgccattgctgtaccaagactgcagccattggtgcctccccggggttccagactcttggaatgaaatcctctacgctgagctgatcgtcaaactcaatcagctcagccaaacacaacgaaaaacttaaggttcttcacccccaatacttgtttgatctcaacacttttactttctattttgatggtaattgttgattatagaatgtgtagagtaaaaaagaaagatggaatataatggatcactcgatatctttgttactattggttt

SEQ ID NO: 8316 - DNA, 227 bp, Arabidopsis thaliana columbia
atttttagagaaatctctttaggaatgagttgtagtgcattgatctcatttaaatttatgtctctagagttccatccaaaggagcttcctagataatattggttctcaatgtagatgaagttgttgggtctcctgatggcattaacgcacgcgtcttgaatgcttccatctgatcacgttatagtttccgcttataagtccgatgcttgcagcttcacgtcgatcct

SEQ ID NO: 8317 - DNA, 785 bp, Arabidopsis thaliana
tccagatctgaagcaaccaattttacagtaggcgtcaaatgtcaaattcttgatttggaatctgaagatgatattgttattgctgaaggagagttgtgttctactgaaccagcatataagattcgtcgtgtaccactaggacctaacgcagctgctattgtagtcaaaacggtatttgataaacaagcttctgtttggaggcctataccaaacatcgtcttcattggacaagcgttgggagccaaaattgcatggccagagaataagttgattttggacaatgatgacttcacaagttggagcacaactgcaaacaagaacattgatgatgcatatacggtaattgtttagaggcttgttatcaacttatccaaattatagaaacttactctttagctaggttggtaatacatttgcctgaaatgtaggaacaagagagggttcgtattattgattggactgtggatgaggtttatgctgaaggtaaactgtgttcaattgatccaaatgaactcttgaacgaagtacctattggtcgcaattaatgcaattgtggagattgatttggtggttaaagaaagtgcctttttgtggagaccaattgctgagatgtcagtcatgggtgatgcacttaataagaaaatcgtttgggcttagccaaagatacagtttgttaataacgcaatgccgccttcttaaaaagtaacaagatcaacacgttcggtaagattcaagaacctttattttgtagtatgatttgatttgttgttcatatactggaattc

SEQ ID NO: 8318 - DNA, 423 bp, Arabidopsis thaliana columbia
ttgctcgggaaggggtttttccttcattcctgaaaatggtagaaactcaatatcacactaaagtttgttcagttaggtctgataatgcacatgaattaaaatttaatgagttatttgctaaagaaggaattaaagctgatcatccatgtcctgaaactcctgaacaaaattttgtagtagagagaaagcatcagcacctgttgaatgttgctagggctcttatgtttcaatctggaattccattagaatattggggagattgtgttttaacagctgtgtttcttattaatagattactctcacctgttataaataatgaaactccttatgaaagactaactaagggaaaaccagattactctagtcttaaagcctttgggtgtttatgttattgttctacttctcctaagtctaggactaaag

SEQ ID NO: 8319 - DNA, 600 bp, Arabidopsis thaliana
agtcagggtcttcgcttcacaccaaaatacaaattcattattcttgacttcgtgaaatgacagttaaaattctcagaaatgtataacaaccgaacaaaggtagaaaacacacagataataataatcatcaaaaaataaaaagaagaagaaaaggcaaaaaaagtgggaaagtgagaaggatctttcgttggggatcctccttggaggggttcactcggcgctttgggtttgaccaactcaactctaataatcttctctgccttcctctcttcttcttctttcttctttcatctctttcttttattaatcccctttcttttctaactttctcgattcatcagagccatgggtgtctgtttctccgccattagagtcactggtgctagcagcagtagacgaagcagtcagaccaaatccaaggctgctcctactcccatcgataccaaggcctctaccaaacgccgaaccggctccatcccctgcggcaagcgtaccgattttggctactccaaagactgccaggatcactacagcatcggcaagttgctcggccatggtcaattcggctacacctacgtcgccatccacagacccaatgga

SEQ ID NO: 8320 - DNA, 810 bp, Arabidopsis thaliana
cattcattcgcataaattcgctcttcaaccatataattaaatctataagacttcaatgaaatgtaccatccacatactagtcaaatcttatcatgatcttaggtacgtataacatttgattacgcaacacacctaatgacctaattcaaccaatataatcaataatgtcacatataatcaaatcataatggtcacactatgggacaaaacttagtttattttctcgacaaaactatgtaagtgcactgtgcataaacactactagacctaatctaatccactatacaccaaattgacgtataacatgaaatgtcaaaaacaatcctttaaagaattgacgaaaatatccttcaacgaattaagtgagtgtactgtttcacctacaccaactaatgaaaaataaaaactcaccagagaacggagacagcggcggagagaaaggtgatagcggcggagttgaaccggcaggcgaagctggagctgaactgccttggtaacccggtggtttaattatcatgatactacgtgtaactttcactgcttcttccggtagcgaatcctcaccgtacgatctcgcacttccagcttccgattgatctaatcacatccattaaaatccagatcaagaaaaatacatcaaatcaacgatctaatcaattaaggaatcagaacgatcaacagattcaaatacttcagtgcatgtttactaattttaagtttcgttttaaagagtttgattaatcggttcagtttttagcaaaacacggcgtaccattgccggagctaggtcggaaactgaaggtatggtgt

SEQ ID NO: 8321 - DNA, 744 bp, Arabidopsis thaliana
gcatgtcatctccaccacctcttcttccgcctatcctcttaaaaggtttctgttccattaaaaataagaaatgatcatcacacaacatacagctttcatcatccccccaatatatataaatatatatatacatatatatttctgtttctttctttttttgtagaaactgataatttcgaatgaaacagatttttatttttaaaaaggaaaagaaaatgttgttataagtcggaaaagaaatccacagaagcatgacaagtttatcttctaaatccaactaacctaaattctctccctctctttactttttttttttctcttgtcggtgattttggatttttctcctctttccatcaccataataccacctgcaagctccctccttctctttcctgctccgacatatttattctctgcctctctctctctctcaaaacccatctcgaaagtctttctctttcgagggtttagatcctccatggaaggcggcggagttgctgacgtggctgtcccggtacgaggaagagagacagaccttacaaaggaattaggatgaggaagtggggaaagtgggtggcggagattcgtgagcctaacaagcgctctaggttatggcttggctcttactctactcccgaggcggcggcgcgacgttacgacacggcggttttctatcttagaggactacggcgagggttaacttcctgagcttcttcctggggagaaatctccgacgaggatatg

SEQ ID NO: 8322 - DNA, 119 bp, Arabidopsis thaliana columbia
  unsure (1)..(119): unsure at all n locations
nnnnnnnnnnnnnnnnnnnngtacctggcgctgttccgtctggggtcagacagcgcgtcctggtcgatcagtctgcaaacggcgctgctattctgcatgcttacgttcagcacaccttt

SEQ ID NO: 8323 - DNA, 437 bp, Arabidopsis thaliana columbia
acttgttagtatagtggctaactttcggctcagactcgtgcattggctttgtagtgatagcagctccggctgttttaggtgtccaaggtgtagattaaggctttttaggatgtgccttttcatacaatcttgccagtctaaaacattgtctcacagtctgtggttgaaacattcgaacgtgcatttgtggtatcaccctcaaacctgccaagtacacgctaaccaaatattccctagacagtttaactctgatcataatcagctcaaacttctaatgatagtctaccacgccatccgtctcctgtagcttcttcaactcagccataagatcatcacactcatcatcaaacctttccttcagcagctgaacataccctggccaatcatacaaaacttccaacccaacaccagattgcataaacgagtgatgccatgta

SEQ ID NO: 8324 - DNA, 492 bp, Arabidopsis thaliana
ttgttttaagtcaaagatttgagcgccacacttttgcccatccgtttgaagtttatcgagctttgagaattgtgaacccaagtccttctatgtgttacttgcaagtcagtgcttctcatatatcacttgtttcatctccttaaatgttactttcctctgttttgcttatcttcatatcttttacacgaacaggcaagaggttgtattctagtagcgtcaagtcctgagattctcactagagtgaagaaagtaagcatctcttttttgagaatcttcttgttgtgtataatagggactaaaacagggttataagaacactttcttgattatgtaaaacagaacaagatcgtgaatagaccactagcaggaactgcaagacgaggaaagagtttcgaggaggatcaaatgttggaggaggcacttttaaaagatgaaaaacagtgtgcagaacacatcatgctcgttgacttgggtcgcaatgatgttggaaag

SEQ ID NO: 8325 - DNA, 547 bp, Arabidopsis thaliana columbia
ttatcaatggtttggaacctcttaccaaggagacaatggtggactttcctgatggcagtgaagtattagtaactttggaatataaaaacttgaaaaaccattgccatcactgcctcagattgacccactagaaaaaagagtgtccaggtctacaaactgcagtacctgtcaaaactgccaaatcggtatcacaaccctctcctcttaaagaaccacacacttcaagggatggacccaattctactcaaaagagttccaagtcaagaggagtaccttaccaacaatcgcgcctgccactctatctccactctcaaggcagatctcactctaacagaagaggtcatgaggagggtagccagcaaaactactccaactcagattacaggcactctggacagagagaacggagtcttagagctgcgtccacaaaatctcaagagcactatagatgagagcctaacagagatttctctattcagcaacagtcaagacacacatcaaatatgcagtggagagagacagtccccacagagtgctagcagagttg

SEQ ID NO: 8326 - DNA, 545 bp, Arabidopsis thaliana columbia
tgatccgatccccacatttttaagtactccacattactgtgggaaaaaatattataccattcttcatttcccatggctatgtccaaacgacatctaatcttaccattttcccgttttccaatccatgagaattgatttccatgaaagggaaaatcaataagtccacacgaatggatcatagcacgaaatggtagaaaggaagcttcagaacgtttttttcctcctcttttctcatggtttcctgttatctcattaaaatctccaataataaaccatgcctcagatctagaaactccgatacgcatcaacctttcacatacatattcacggtttgagacaacgtgatctccaaagataaatgtcataaagacccgatttccattaataatagtttcgatatcaattagccggtcatctaacaacaaaaacttaaccggaaattcattcgaatacaataaagctaaaccaccactagaaccctctggttcccagtttggaggttatcaacctaactcaacttgcacatcttgcagatacatttctga

SEQ ID NO: 8327 - DNA, 697 bp, Arabidopsis thaliana
tgctggagagctcaagccgccaaccattggtgagttcaagaattccatgttaatatcccctggaactggattttgatgataattctgatcaatagagttgttctatcacttcgttcataaatgtgtatccatcacctgtggctatagaatgtgttttgagttgcttcctataactttcatgttgtcctactttggcagcttctcgaggatctggtaaacatcctcaactgatgccttcaaccccaagatgggctgttgctaatggagctggtgtcatactgagtgtttgtgatgatgaagttgctcgatatgagactgctacgctgacagcggtcgctgtccctgcacttcttcttcctccgccaacgacatccttagatgagcatctagttgctggccttccagctcttgaaccatatgcacgtttgtttcataggtattgtttctgggcttaccctttcaattagggtttattggtagtagtctgttgctagttttaaggttgtgcttcctcgaatccctagatcagaattgttttctcactttcctgttatactgtcagatactatgccattgcaactccaagtgctacgcagagacttcttcttggactcttagaagcacaccgtcgtgggctccagatgcacttgatgctgctgtacagcttgtggaactccttcgagctgctgaagattat

SEQ ID NO: 8328 - DNA, 555 bp, Arabidopsis thaliana columbia
cgagtcttttttaaactgtgccacggccgctttaatgtaacgttggcccctttttgcttcatggacgcattgcgttacagtctcgaaaatcttcaaagtctccatggtactgttaaaatagtccttgaccagagattgtagagttccgttctcccacacttcttctccgcattcagtaatgacgtctgctaccgctttgcttacttcaactaggtgctcaattgaagaataaaggtccaatgagtttgggcctgtggagtttgggcctacgggtttagttacgcatctttcgttttcaagttgctgtgttttgttctgttttcgtttttgaataagtcagctcctttgtcggagaaagactcgggcgtttagctagtagcttaagtttaggagctgcagtttgattatcttgtaaggtctatttaaagactatcactgaagtcaattgaagtaagaagttttcagtctctgtttcttgcatactctgtttcaaattgagattagaaaacaataagtggtatcagagcttgtcacgagcttggtacgagagagaaa

SEQ ID NO: 8329 - DNA, 441 bp, Arabidopsis thaliana columbia
tgaatgtacgacgtaaggatcgctgctactgatgtcacggacggctaaattgacgccacgtttgatacggattctaaggaggcccaagagatcgtccattagtgagcttgtcctcgccggacacgccgttgtcatttcctttattaatgttcctgattatttcttccttactcactttctacaaccctttttttttgttaacgctgcaaccaacacacgtttaattctcggggaaaagcacaaccgagatagatgaaaaaggttaaacagagcctacttcacccgtgaagataattcaaaggtctctttagtttctttcgtcagatttcgttccgttcaaactatcatcgctaaatattagggcaggtctctttggtttctactcctcttttgttctgtttattttctttgagtcgtggggaggagataacgtgcgagaaa

SEQ ID NO: 8330 - DNA, 529 bp, Arabidopsis thaliana
tggatacaactggagaaaatatggacaaaagctagttaaaggaagtgagtatccgcggactattacaagtgcacgcacccgaattgtgaggccaagaagaaggttgaacggtctcgggaaggtcatattatagagatcatatacacaggagatcatatacacagcaaacctccacctaaccgccggtcagggattggatcatccggtactggccaagacatgcaaatagatgcaaccgaatacgaaggttttgctggaaccaatgagaacatagaatggacatcacctgtatctgcagagctcgaatacggaagccattcaggatcaatgcaggttcaaaacgggactcatcagttcgggtatggtgatgcagcagctgatgccttatatagagatgaaaacgaagatgatcgcacgtcccacatgagtgtttccctgacttacgatggagaggtagaagagtccgaatcaaagagaaggtataaaaagttgctctagtaaccattataatacttagaaagacaagacg

SEQ ID NO: 8331 - DNA, 498 bp, Arabidopsis thaliana columbia
catattctcaggagcagtatcatctcggtgaagtgacactggtgccatacgcggcagattcagatcagaaacagattgagctctggccccaccatcgttaaggttaaatctgcgtatcatttcatcctggcgcgtccacagcaaaggggttgtgcagcagctgatagagaggtcttgtcaccactaccaattccaccaccatgtgagctatgaggcgcagtgctacctatccttttcctgacaactgaaaccttctttccaccttctctgagttgccctaaagcaatattataagcttcagctgtaattgccccttcctcagcatacttgatggcttcgcgacataaatgattatagcggtgtatcgagctatcatgcccattttcactgacatgctcatctaactctaccatgctcttggcatttcttgtccaccgtctcaaaatataaatgtggtggcaaagtgagtatattagtgacagtaacaccgtcaaaaca

SEQ ID NO: 8332 - DNA, 643 bp, Arabidopsis thaliana
gaaccaaataccacaacactccaccttgattctacttttcatcatctcctagtgaactgcacttcatgaatttaaccttcggaaacaagacttaagagtcttacctttgtagctttagaacatccaaagcttcctcaaacttctttactggtatgcactttgtgagcatatctgcaggattcacagaagtgtgaattttcctgacctttacctcaccagcttctatgatgtctctgatgaagtagaacttgacttccacatgcttcgttctatcatggaaggcattgttctttgacaaacaaatagctgactgcgagtcacaccacacggttgcaggttttggctgcaatcccatgtcttctagtaaccctctaatccaaattgcttcctttacagcttccgtaagggcaataaactcagcctgtgtagaagacaaagctacaacatgctgtaaacttgatttccagctcacagtgttaccaccaactgtgaaaacatatccactgattgaccttcttttgtctaggtctgctgcatgatcagagtcacaatacccttgtacttcgagattagctcctttagtgaacaccacaagtctcttgagccctttaagtaccttagtaaccactttactgcttcccag

SEQ ID NO: 8333 - DNA, 939 bp, Arabidopsis thaliana
ccctgtaaaaacaaaacagcttttaccttctctcaatttttcatttattcaaaaatttgagcaatcagtgaacaaagagatttgtttcatatctgtcgtaatctactcaacatctctctgcatatcaatgagctcgctgacaaatcaagtccctgttgtggtgacactggttccaccttcggctgtgctgctaactgcaacattaggccagttggatccccaatgtcaggcgcctgcaggctggtaagcttctcttgcccaatagttagaccaggcattgaaagatcagaaagctcagattggcctatgtaaacggagaaacctgtaggatgcctcaggtgtgactggaagtcaaatagagatgagttggctgtggccagtccctcagatctactgtgtggcattggatagtgcacattgtggttgtgggtctgagtcgctaaactgccttggagagtccctgaactgcctgcaccgacgtggctgctgttgcgtgctgctggtacaacgtgggtgtgcttgcctatataagttgttagtacgctcttgaagtcatcagaggctctctctacatgcttcgttacggtacatccattagctgtgcatttatagtagctcctgaaaacatagaaaactgattttattaaattcaacaaagggatagcagcagaacagagcatttggatacaagaaccttggattcgggtttcctttaacgactttttgcccatacttgcgccagcgataaccatcatcgaggatgtcaatgtcacttgtggtctgcaccacaactcttggctcacggctggctctggttgatccactcgtttctgttgcataagcttctagtttcctgatacgggaatgccatcagagctcagaagtcagaacgtcttgtctttctaagtattataatggttactagagcaactttttata

SEQ ID NO: 8334 - DNA, 2104 bp, Arabidopsis thaliana
tgatgagtggaaaccgcttttcttgtttgcttaaatgtgtgtgaatttgacaaggtacctcatgccgacgagcttcatctctaaagaaatcgaagagaagagctggagaaacaggtaaccacagcgaagaagaagcgcagacaatgactcccgtgggctcgccaggatcatgaaggttcttcctggaagaaacccgcatgtcttgtccagttttggtggtgattttggtccattgatggtagcttgatgcagcaatggcgcggtagaagctttgtgtcattctctgagccatcttcagcacactctttctcccggcaagagttgtaactcctgattatcaacagaggagtgaaaaggttatatataaagaaagatagagagtgtaaatggaggatccggatatatagacggaccgagagagtctttggtggggacgttggtagccatgaagaagacaaggcgttcgcaatggagctgaagggtggcgacccagtgtcgagccccaaaggccaaaccggtgttgactaaggagcggaagagaggctgaactgtggatgcagacacgtcgaggtgctccacccaggtgaccttggagtgaccgttggaggtgtcctcgatgatgcaaccggaggggagttttcgacatttcagaagagaagcctccttctccgtgttgctgtcctccacggagaccgagacgtccactattgcccatttctcagggctcagctgccggcagcttctcacgaagtacacttctcttgtggggacgaccggagtgagcagctgcatctctccgaacatctgccacaatagttataaaccatatccatcccatgtatcagctgagtcgtcattcatcaattatcactatatgtatatattgatgagtactcaccagctgaatagccccgtcgatccgtgaaggcccttcgccttgccggataacatcgaccgttgcagcctttgagatcaagcatgcaaatgtctctttccattgtccctgcgcgttacacgtacacatcaattcctttttatacacatagaataagttatagtagctggtaacagtaataaataatggaaaagtaccacgtccatgaaactctgggcaagtttatgtgcgtccataaacacaatccccgcatctctagatgcttcgatggttttccttccaggaaacgaagaggcttgcgcttggggaaactccttgaggtactcatcgtagttgagaatctcacggccagtctcaacgctgcggagccacataggttcgcctgaggtggccatcttctggagttcaagggtggctcggttagaaatctcggcaatacgggacttctcgagggcaaagacgcccgtgtagaaatcgagagagccgagacggtgttcttgatcgtcggagcatgaagcctgcaggggatagggagtgcgtccaagagctgcacgaagcttatcgagctcggctttcagtttggagttttcgaggtggagatcatcggggcctcctccgcagttggggcaggaggaattagccttggaaaaagactccctcatggctttgttttcctctcgcagcttctctagttccgccttgagcagggagttctcgtgccgttcttgaatagcctgtccatgcatgattgattcataaactatatatatactactatagtcagacaaaaatccatatcacgtaagatatacattaccttgatctgtgtgcggcggttttggaaccagaacttgacctggcgagggccagccctagttgcttgctcagctgctgtctttgcttctcgtccggatgtggtgtctctttgaatagcctgcaacgtcctcaaattcagacatttctaaaagatgaaaatctttacatgcaactgaaccctaactaggcatatgtatactattactgatcagctttaattgtgatgaaacaaattaacactttattgtttaagcctttatatacgttataacgcgcatgtacctacagtcatgtcaggagaagacggggaataataacgagtaagcgtccgaaaccatataagcgcattgaaactaatgctggatcatatatcatcgatcggcaatatatttg

SEQ ID NO: 8335 - DNA, 818 bp, Arabidopsis thaliana
ctaaagtaaaaagattcgtgcgcgcagtgcgtacgcccattggatgttgcaggcttgagccagcttctggtgcaggtttccaacttgattgtcgattgcccggaaattcagcgtctggatattcatcctttgctggcttctggcagtgaatttaccgcgctggatgtcacgctggatatctcgccgtttgaaggcgataacgagagtcggctggcagtgcgcccttatccgcatcagctggaagaatgggtagaattgaaaaacggtgaacgctgcttgttccgcccgattttgccagaagatgagccacaacttcagcaattcatttcgcgagtcaccaaagaagatctttattaccgctactttagcgagatcaacgaatttacccatgaagatttagccaacatgacacagatcgactacgatcgggaaatggcgtttgtagcggtacgacgtattgatcaaacggaagagatcctcggcgtcacgcgtgcgatttccgatcctgataacatcgatgccgaatttgctgtactggttcgctcggatctcaaagggttaggcttaggtcgacgcttaatggaaaagttgattacctatacgcgagatcacggactacaacgtctgaatggtattacgatgccaaacaatcgtggcatggtggcgctagcccgcaagctcgggtttaacgttgatatccagctcgaagaggggatcgttgggttacgctaaatcttgcccagcgcgaggaatcatgagtaaggtactggaaatgttgaccacttaatcgggactctttaaagcacacccggtccgga

SEQ ID NO: 8336 - DNA, 554 bp, Arabidopsis thaliana
gtcgactctatccccttttccctgatgtgctgtaaagattggcttactgttccgggcaaactcgcatgggcaatcagtatcattttgttgttgatagcgctaatttacaccctgcatttttatccctggctgaaatttagtattggattttgcatttttacgctggtgtttttgctgatactgcgcaaagacttctcccacagtagcgccgcagccgggacaatttttgcatttattagtttcacgacattactgttttactcaacctacggtgcgctttatttaagcgaaggttttaatccgcgaatagaaagtttgatgaccgcgttctatttttcgatagaaaccatgtcaaccgtcggctatggcgatattgtccctgtttctgaatcagcacgattgttcactatttcggtcattatttccggcattaccgtttttgccacatctatgacctcaatttttggtccgcttatccgcgggggattcaacaaacttgtaaaaggaaacaatcatacaatgcatcgtaaagatcattttattgtttgcggaca

SEQ ID NO: 8337 - DNA, 628 bp, Arabidopsis thaliana columbia
gctttatcattcaaccagtgatctcattttcttatcattttaatgatgaggaaaaggaaaaagacaatattttataggagataggttcttaggatgatcagaaaataaggggaaatcgtagtagtgtagttttatatggtctgataaagattcgttagcatatcaaattgtagataacgattttgttggtctgctagttagaaactttgttagaaagtgaagtgtttcgtagtatgaagcagccttaattaggatgctaatgagatcatttccacaaacatgttttctgaaagtcttctttttgagaacttaatttgctattaaaaaccatagactcctacgatttcagtctcttgattctcctatatatgatctgcaagtgtcttgcctcatacacactgctgctttcttctgctgaatccccaggacacacagttacttctctgggaccttgagatggacgagatcgtagttccacttaggcgagctccaggaggatctccaacttacagcacaggaagctcagctcactgggacaatgtcataccaatgggaactcttcaaccggctccttgcaaacgcgatgttccaaagctgtcaccgatcatagcacaccgagttcacacag

SEQ ID NO: 8338 - DNA, 591 bp, Arabidopsis thaliana
ggtggttcctttctccttgagaatgttttgaacatcgacaagagctcgagtcgacgcatagagcgaggtaagtgggtgtgcgatcaagtgaaaacccatttctttaagctcatcaggcgtatgcaatggcgtgcgtccaccttcaagcatgttacacagtctgtaaccttttgtgcgccttccgatttccttaagctcgtcatcgtccctcggtgcctcaacaaaggaagcatcagctcctgcctgcacatttttccaatctgtctctattacccaccattatgtcttctcaaaagttaaagctttaataacacaacatgatttagtagtaacctccatataaagattagcacggtcaatggcgtctgaaagtcctgtttttgcggaaagtgcacgagcatcagtcctagcgattagaaaaaagtcagcatctccaatagcgtctcttgctgatgctattttagcagcgtgttcctccgcaggtatgacctgtttccaaattagaaaaataataatcatctgcactcatggactataaagtaataagtttcaatgtatagattttggtagcaaccgatgagggaatggtac

SEQ ID NO: 8339 - DNA, 784 bp, Arabidopsis thaliana columbia
taagagaaaaaggcaacagaaagaaaatgaatcataattatgaaagataaagtaggcaaccaataccagtattgatgctaattgtctttgctttttcttttgatgtgggggattacgtgctgagctttgaggtaatgtagctctttcatccaataaatcaacgcaaggagatacatccctcctgtttggattcattacacgccatacagtcatcaaaccctttccaataccatgtttcatcacagtagcattctcttgaatgcaatcctgactggtatgatccatcagctcagaaatctaaagaaaattaagatcagggactaagtaacttagcgtatccaggtaaaactaccttatgaaacaacacatatccactacctttctttttcttgccactttctgtttctgttgaccgacagaagaagtgcccagccaagaagctagcacaagagaaagaagtccacgttagaatcaatataactatacgatacttcttgaagtcatacaaaatcaagtccgcactcatccagagtccaattatccagtcatgcatatttttcattagaaaaatcaatactaatatgaaagcattaatttcatagtcacattataaaagctttggtgttaatagtcaatttttcagaaaccctagccttcttcattatacaggtttttatattgcgatgtagcgataaaggtggatatcctttgcgagctccagacgggagatgacaaattcagaccaagcgatggccacctttcgaaaactttagcaaaatgtgtg

SEQ ID NO: 8340 - DNA, 1007 bp, Arabidopsis thaliana columbia
cgcatcacagttaatgggaatggttccaacaaacgtctgctcaacagtctgagtctattccaccaaggtcatcgcttcattattctcaatctattccactgaatgctgcatatcagttgcagcaatctgttccgccaagctctgctcttcattatccccagtccattaccccaggttcctctcttcagtatccccaatctattacgccaggctcctcttatcagtatccacaatccatcatacctggttctgccagctcctatggaatatacccacaatattatgggcatgtggttcaacatggagaaagagaacggtttcctctctatcctgatcacagttctaactactccgctatcggggaaactaccagttccataccgatccaagggcatgtcagtcagcaaggtggctgggctgaagggtatccgtaccctggcagcacacccaaaagcacacaagcgctagcagaggagcaaaaagtatcatctgatatgaaaattcgtgaggaagttgagcctgaaaaccgtaaaactccggggaatgatcaccagaatcctccccaaatagatgatgttgaggtgaggaatcacaatcaggtccgggagatggcagttgcaacaactccacctagccaggatgcacatttactaccccctagtagagatccacggcaggacactactgcaaaacctgctacctaccgtgatgctgttattactgggcaggttcctctatctggtattgaagatcagctttcaacttcaagcagtacctatgcccctgttcatagcgactctgagtcaaatttaattgatcttaactacccggagcctgagcagtcttcccaaagggtatattgctcagagagaatacctcgtgaacagctagaattgctaaatcgtttgtcgaagtccgataactcattaagctctcagttcgtaacgtctgagtcaccagcaaacactgcacagcaagattcaggaaaagaagcggttggaaagtca

SEQ ID NO: 8341 - DNA, 1194 bp, Arabidopsis thaliana
tattggtacattttaaccatcgtgtttgttgtctcatcctcatctcggcttttgtggcgtgtttctattgcgccaaacgattactcaaatgttgtggcggagaggaagattcgcctgctactgctactgcgtctacgtctacctctacgtcttctgcgtctgcgtgatcaacttttagttatttgttttggtttgtttctttttctttcaatgattttagattagtaacctaaaggcatagcagatcgataatgagactcggcaaaatttttatctttataccgctgcttaataattaagttttcacttatttaatgatattgtacctctattcttgatctttcaatgattttgttaaacattaaaaatttgcaatgttattgttacatgttacttctatatatatagaaccaaaacgaaagcaatacaatactatgcaaatacatagtagagatagcaaaatcaacaaataaaaacatgtaagaagagacatgagctcatgaaaagaattcaagacagatgtaccaagcctgcctagagttcaagacatgtcatgatgacatgacaacaaatttgttagcttcttctttagatctagcgcaattgcagggtttgataggaacaaataactgattacttgttagattctggatctacataccaaataaaagaaataactcattggcaaactgtactttgaaaacatgttttccattttgtctccagcttacactcttctcacattagtctagtcaatgttaacttgtcattggagcactgtgggtgatcataaagagaaagaaaaagtgttcaaggtctgcaaagataaacatactttttttctagtttgtgtttggtgaacagcctttgtggtttttcctaaaggaatttcaaatgataaacagactacaatgcaagatgaagagtactggactcatgacaactaacaagttgtttgataaaaaaaaaaaaaacaagttgtttgattctctcgctaactgttcaagttggaggtcgagagcagaatcctattagcctccaacatttttgcaaaatattaatataattcagttgaaattgttaccttacaaacaattcaaaatttaggacaaaaatcgaaaacataggttagtaagtttccaattatttgttttttgatgacgatggtaatatcaccaaaacgaaccaagcaaa

SEQ ID NO: 8342 - DNA, 770 bp, Arabidopsis thaliana
caatcttgttaccaacacagacatgaatcacttaacagtcgaaacagaggatacgtttgcgagcttgcttgagcttgcagctaacaacgatgttgaaggtgtaaggctatctatcgagagagacccttcttgtgtagacgaagctggtctctggtacggtcgtcaaaaaggttctaaagctatggtcaacgattacaggactccgttgatggttgctgctacttacggaagcattgatgtgatcaagcttattgtttctttgactgatgctgacgtgaaccgtgcttgcgggaatgatcagaccactgcgttacactgcgctgcttctggaggagctgtgaatgctatccaagttgttaagctgcttcttgcagctggagctgatttgaatctgttggatgctgaaggtcaacgagctggtgatgttattgttgttcctcctaagcttgaaggcgtgaagctgatgcttcaggagcttctttctgctgatggatcatctactgcggacggagatctacgggttgtgacaaatgttccgaatagaagctcatctccgtgtcattctcctactggagagaatggtggatcagggtctggttcaccgctcggctctccttttaagctgaaatctactgaattcaagaaagagtatccggttgatccgtctttgccagatatcaagaacagtatctacgcgactgatgagtttagaatgtattccttcaaggtccggccttgctctcgtgcttattcacatgattggactgagt

SEQ ID NO: 8343 - DNA, 1177 bp, Arabidopsis thaliana
gtttgtgggtcaaataatagcctcaccagtcaccaccaacctacttatctattctctgactacaaactatatattataacaaacaacaaacgtattttggtatcaacgagtattaatctcttcattacatagccaaaaagaaaacactctctattaatggaatccaaaaccataaacgacgtcgtcgtatcagagtcaaatcacgagttagcatcttcgtcgccatcagaatttgagaagaaccagaaacattaccaagaaatcatcgcaactcttcctcacaaagatggctggagaccaaaagatccgttcgttgagtacggtggtcactggtggctacaacctcttcttgaaggtttacttcacgcccagaagttcttcaaggcacgtcccaatgatttcttcgtctgcagctacccaaaaaccggcacgacttggctcaaagccttaactttcgcaatcgcaaatcgctccaagttcgacgtttcaacaaaccctcttctcaaacgtaatccacacgagtttgtgccttacatcgaaatcgacttcccgtttttcccaagcgttgatgttcttaaagacgaaggaaacacgcttttctcgactcatatcccttatgatctcttacctgaatcagttgtgaaatctggttgcaagattgtttacatatggagagacccaaaggacacgtttgtgtcgatgtggacttttgctcacaaggagagatcacaacaaggaccagtggttagcattgaggaagcttttgataagtactgtcaaggtttatcagcttacggtccttatcttgatcatgttttagggtattggaaagcttaccaagcaaacccggatcagattttgtttctcaagtatgagacaatgagagctgatccattgccttatgtgaagagattagctgagtttatgggttatgggttcacgaaggaggaagaggagggaaatgttgttgagaaagtagtgaagctttgtagctttgagactttgaagaatcttgaagctaacaaaggtgagaaagatagagaagatcgtcctgctgtttatgccaacagtgcgtatttcaggaaagggaaagttggggattggcagaattatctgactccggagatggtggctcgtattgatggtttgatggaagagaagtttaaaggaactggct

SEQ ID NO: 8344 - DNA, 581 bp, Arabidopsis thaliana
catctatatcaacattataaaacgacaaataaaaaacaaacccaagaaaagaaattttttaaaaacagtgagtcataatcatcgaggacccgagagctcaatggcttctactacaagagacgattcctgaatataatccgagtaatacctcacacgcggcgaagaactcaccatccccggtggcaatggcggtggctgatgctcaccagtaccgttctgcgtcgcttcccatctctcagccaaaccgtcaccttcaagcatcttcataacttctgacattttcggtcgatgagatggattgaattgagtgcagagtagcgcaacttgaacgatttcttcgagttctactctatcgaacttgtcatttagatctttgtctattaactgctttagtttcccttcttggtgcagcttcttcacctgccatttttaacaatctcatttctcagaccaataaaccaaaccaaaccaattccagatcaagcacaaaaacagaaccaaaccgaatccaaaataacagtttagtcttcaaactataccgaattcaaatcaaagataacagaaaccaaactgagtctttt

SEQ ID NO: 8345 - DNA, 1948 bp, Arabidopsis thaliana
gtcagaattacaagtctcttaactaatagccaccactcaaataaaaattaatgggggagaatgttggatgagtacaaatttggcaacagaataaatgaatagaaaaacaaagggactaatttttaaaaaaaacaaatccacctttgtgaattcaacaacaaatttctacgtaataaacacaaacttcttttacaaatagacagttataaatgttattttccagatggaacaattaaatcatagaatacaaatcaatatatagaagtgtgtttttttttaattacgagtcagggaagcatccaagagaatgatgaatattagcttcgacctcattatagctttgatgcatggaagggaagcttggcgccggattatacgactgcgtttcgaacataagaatattagggttatgcggatgtatgacttgtgtctcaagcaaggtatctagtgttctccaatccacacagttaaagctcttctcttcttcttgctcgaaactctcgttctgatctttattcgtccctaaactaggcgacaagctcgggctgtccaactgcgggagctcaatgttgccatattgatgcatcgatgaggatgtattattaggattgtagtggttattgctcatgagcatttgattaaggttatgacttgatgaagatgcaccgatatgatgactcgtgttcattgtcactgaagatgagtagttgttactactttcgacgtggtagagctggttctgccatggctcgtaccctaatggcctctggtttggaattggcttcctaaatgctcgacacaccacccagccttcctcctatagttcacaaacatataaagtttttttagattacaagttattgatttagtcctgttttttttttttttctttttttttaattttaaacattattgaatcaaatgtcgtcaaacatgtaacattattgcttaggtttgatagacggagtatgtattgtactatttattagtagtttttggatgattgctttgatagtgaatcgcgtatcagtcagagtctttcaatgtgtatacctgaaccggggcaagctcggagttttggagacggtattcgtgcatgatccaatcggactttcttccattaggagctcgacccttgtagtagacaagtgtcttccgcattccgatgacactgttttttgatagtaccgccttgtctctacccgtggctttccagaacccagccgcagtggctcggttggtcctagtcccggtaggtacttcctgtccttatgactaaagaagtaccactcgttttgctcttcataccctagtttacacctcgctgcaaatgtaaaactaaatattaatgtcataaatttcttacattacaaaaggtcaaaatattagaaattttatgtttctttaaaaaaaaaagagaatattgaaaattatgtagtaaagtaatttctaaatgtgatatgattatacttttcaaccggtttaatttcaaaagaagtattatgatttatgattgtactatacatctcttaatttctttgtgaaattcttttcacactccgtttatgaacatacaagtcaaagaaagtaggctctctcaatcacttcgcatgccaaattcatcacatattattggttttcaaaacttatgtcataactagacaatttactgtcattccatgcaaaggattaatcaatgataatcattatacaaaatccacgttgattaatataattaccttgtatatcccatggctccattttgtagagatcaatctctacaatgacatctaaagcactcttcattgaattgatcttcctatctaggtaataacccacaagctcttcctctgtcggatgaaatcggaatcccggtggcattgacgattgcattatattatccatccacgatgatcctataaacgtatttaatttggaaaattgttag

SEQ ID NO: 8346 - DNA, 711 bp, Arabidopsis thaliana columbia
tgttgtacaataaaaagtgagactcaattaactcaaggaaaataactcatttcacttctatgaataatgactaaccgttgtcagatacaagtgtatcggttgtaagtgcattgatttgatccaggttgaagatctgaggagagggtaaggggaacgggactttgttcaccatgaagtctcgaggagccgccattgcctggaacagattgtgacatatgtgaaattagtattacagtatttcaagaggaaaacaaaaattctttggagtttcttccatggacagtgcacgattcgatcttttaccttggcaattggaaacggaagcttcacataccgaggccattcacgaatcatatcatacatgatctctgcctgcaagacatacttggaaatcaaacccactgagctaggatagtgacacagagaatgaaggattaaaagaatttaccaactcgtgagtggtaaagacatctggaccacccaattcgtatgtttccccatgctggagccatcatcctttagagcagcaacaatcgcagcagcaacatcaaccacataaacaggctggaatctgcagtagagttatcgttagggacggaactaaatctacatttcaagttgctatgaaccagtgaaaagagttgcacaaagaattcaagacgtacttggtggttcacacctatgagcgggaggaaccatatttttacgaca

SEQ ID NO: 8347 - DNA, 645 bp, Arabidopsis thaliana
taaagaatgcgtgactgttacataagttaatttaaacattttgagcaaatttttcatctggttaggtgttaattaaacaaataaagttactgtgcagccataaaaatgaagccgggatagcggtagagactttagccgtgagaaaacgatctgtcgcatcctgctttccttcgccagtcaccagtaacaaaacttcgcgggcattgagaatatccttcaggcctaaggtgatcccacgagtcacggggcgacccgcggtttttaacatctcatgttgctgtgttctggcatcaagttgactgatatggcaggccggttgcaggctttctcccggttcgttcagcccaagatgaccgtttttccccaatccgagaacgcataaatccagaccgcctttgcgcgcaatcaggttcgttacccgttcgcactctgtctcatttatctcttcggagcgaaacgtgatgagctggtcttcacgtagccccagcggctgcacgatatgctgttgcaggaaagtttcgcaggtgcctggcatcgttaatggcagatcacccattcgtcgagcttcacgaaggtgagctggctgacatcaacctgctgctggtggattttttctaccagataatgatacgtcagtaatggcgt

SEQ ID NO: 8348 - DNA, 519 bp, Arabidopsis thaliana
tagactatacaggataccgtgttatcaaggttgattttcaatagataacctctccttcagatctgggtttcttcattcgttttgggtaattgatttagttccccctctttgattttgtttcttcattcgttttatcttccttgtgtcttactaggatttttcgttttctatagacgatgtctccgattcctcttcctccccggttgattgctttcggcgaagaaccttgcggtgagagggtcaatgtttaccagaagtgaaaaccctcttcggtatattcaacgcactcaatgacggtgaacggcaatatatttgtcggtctactttcgctagactgttggagttttctaacaatcctgcttggatcgctagatttggaatttttattttgggtaggcagttggaggtggctaagtctaacgagatttgggtgctaatcgccggtacacctattcgtttttctttgagggcagtaagatcgtcactggattgcctgtggtaggtatcgagtttgaagat

SEQ ID NO: 8349 - DNA, 686 bp, Arabidopsis thaliana
ctctctttgcattttcagccaccgagtccatcgcttcaccagctttcccaaaaatgtagtcttttgctctctccatctgattttgaagctcttgtcccttttgagcagacacgtttcccacttcacttcccttctctttcacgtaccccgaagctttctctctattatttgtgtgtttgtgtgacaattacacaaaattattacaatgaattcaaaatgggtatttagtaaaactttaatctcatatacaattgtgtaaacaacttcatcttaagcttataaaagaaggaatattacatcctttagtgtttagtttcaaaaccaaatttatgagttatatttcataagtataccaaaacaatctcatgaaaacaagtttaaattttcttagaagtgatgcggaacctattactaaaccatagtgtatcaaatttctatactagaaatcacgtaaaaactaaatcatatcgtcgtttatgaattgtttatcatctaagagtatatgatacaagtattattcgaccgatgtctatgtagatctcaagtatgtccacacaataagacttactgaggcatcatcaagccatttggggtcgttcggtgagttacacagcacctttcacggcggctgagacccatgacttcttgcgctgaggtgcaatgatcacattcttccggccaacttt

SEQ ID NO: 8350 - DNA, 976 bp, Arabidopsis thaliana
tccaaaattccacttcagaatagaatggagtattttctcatgaggtatgacaaataattgattccttccggttgtcttctcccacacgtgccttgtgaatgagttctttaaagcacgttgctgtcactgcaagttgtcaaatttcgtcaactgttgcaaccgtgcaatcatccgatcaccaacttccttctctgatatggatcaagcaacaatgtccaaatctgaacaaatcacatatcaaaattagaattgcaacaaggaactaccagagaccaatttataaattcagaagcaaatatacacgagggcataattaatcaaactggctgcaagagacttataaaccctgaacagttgctaatatcgcatggaggacattgttgctagctcaactgggtctcagatgatgtctgtttcagtaaaaagtaacacataactgcattttatcaatggccataacacacaactttaacaaagcatagagaacaagaccataaaaacataaattacatcaaagaacaagaacagaaatctaaaaacaaagcaagaaggagcgatcacacttcaaataaaccaatgaggtagtggacaaagccctcacctaattccagatcaaaccggcggagatgacgggtgaggggaagtcagcgcaggataaacatgggagggagagagatagtggctaaattccacatgggtgacagagggcgccaaagtatgacttacttggagtgatttggatagaaaatggtgacacgtggacactcaagatatcatttttatctttttcccaaccacttgtgagctgtgtaggagagaagtaatgaacatataagcaaaaacaaatgttgttacaaaaacaagtccccaccacatttactactactagtttgacaaacataaacacatttcccttattaacatttcttgttaccacacaaagttaataagtacccaagtttatcagttttaaaca

SEQ ID NO: 8351 - DNA, 888 bp, Arabidopsis thaliana
tgattaaattaaatgaagaaccctctaatcggaaggaaatgatatcgattgacaatcaaccctgataacacaagaaaattttaagacgagggttatgttcttctgcctcaatcgcaatctctctcctttatatagtaatgaaagcacacgaatgttcgttagtaggagagaagaaaacataaaaaaaaaaaaaaaaaactcccgaacgcaatattccactacaatcttagaatcctacaacatgcaataattcgcgtatactttacaactgacaaaaacaataacgtaaggatacatgcgtaaaaagttatgttaacagtgttagggtaacaatggattttgaaaagacctaaataacaagttttctatccatatagaatgatatttctcaataatttatagttttaaaatgtgtaaattttaaacagtctcgcaaagcaggcatgtgaggaagggactagtttcttctgttcatgtgtcttacatagaaattagagaaaaagcggccgctcaataatagttaataataatcacgtttatgttagttaataccaaatgcacttttaccacgttaaagaataaaacttgtaagtagatcataacatatgaaaatacatagctaatcaatacatatatgaattataacatgtaattttaggcccaaatatagcataaacatcatgggccaacaaacaatacatatatcaatctcttgaacaagcataattcaaataataatgatagcataaattcattaaaaccctcaagagtagtaacttatgcgtctctgtcccttttacattcagctggcataaccgggaacctagtccggtcggtacagtagttgtagatggtcccttcatacgacccatttgagacgcgccattg

SEQ ID NO: 8352 - DNA, 592 bp, Arabidopsis thaliana
ttcttgtgttatctgggttgattgtcaatcgatatcatttccttccgatccgagggttcttcattcgttttgggtaattgatttgagtctcctctctttgattttgtttcttcatttgttttatctcgctgtgtcttactagggttttttactttgtgtagacgatggctccgattccacttccttccccggttaatagctctcggcgaagaacctcgtggtgaaagggttaatgtttaccagaagatgaaaaccctctacggtatattcaacgctctcgatgacgatgaacggcaatacctttctcggtctcctttcgctagactgttggagttcccaacaatcatgcttggtctgctagttttgggatttttattttgggtaggcagttggaggtgactaagcctaatgagatttgggttctattcgccggtacacctattcggttttctctgagggagttcaagatcgtcactggattgcctctggtaggtaccgagtttgaagatgaagaagaaaaaggcactgcgggaaagacgatcctttcacagtaagttgtttggcttgaggaggatgtaacgttgatagggtt

SEQ ID NO: 8353 - DNA, 631 bp, Arabidopsis thaliana
atcagcaaacgtattgatggataagaatctaaacgcgacgtaggcgatttcggattagcgatcagatgcaatgttgatgatcaacaagtgaaatcaacaccacctgcaggaacaatgggttacttagatccagattacgtaacggctgatagattaagcacgaaaactgatgtgtttagcttcgggatcttgttgttagagataatcagcggaagacaagcaatcgacgttagatattcgccgtcgtttatagtagattgggcgattccgatgataaaaagaggcaaaatcggtgggatttatgatccgagaatcggaccaccgattgatgtaagtgtgaggaatcatttggggttagtggcggctaagtgtgtgagaacgtgtagagagaaacggccggggatggaggaagtggttgggtggctcacggggttgactaagtcggttaggtcacgacggtgggatgagttaagcattggaaacccgtgtatgatggtcgagacggtgggtggtcgacccgtggaatgatctgattatttgtttaaaatcaagtgatcgctttgaagccattgttttttctcttatgggttggtcaatttattcatttaacataataaagcatatactgtag

SEQ ID NO: 8354 - DNA, 1435 bp, Arabidopsis thaliana
taactgttgggagtgtcccctgtttagcaaaacctggactcaagaacttggccacgaaattccataatctgtaaacatcttcaaagtttgtcaagaacccaagagaagctgtgacaacctcaactcttatgaacccattgtttcttccttctcgatccaccggtttccaagaacttgaatcttcgcttcgattatcgatgatctttatgtgacttaggtaaccaattcctagagaaatgccttctctttcagctagtttctgcactatctctggatgaaccattccacttttcaaatccctgatattgaatgccacggaagatccacgctcgtatttgatctttggaccgtaaatctgaacaagattcttgtgctctccatctgaatctgatctaggcagccttaattggagcagagaggtcacaagccagttaatgaggtaccggagtcttgaggtggttttgttgagacccaacatgtttacatgatcaatgtgcctgcaaacaatctctggttctctctgatcatcatcccattctactccattgcttccatcttcttcttcatcttcatccccaagactgataacagatgcttctccatgatctactgatctaaacgatactcttcgtttactgggatgttcatcttcattcacaagaagtctcccaccattgtactgactcttctcccttcttcctaacagcctaaattcgccttcagtttctcttcttatcgcactgtctttgattccagagctcgaaccatttgcatgagcagttagcttactgctccctccttcttcttcttcctcttcgatctcagtaactcgcaaccgacgacttgtgtctatctgattcatttcagaattttcttcttctatgacttcttcacccacttcatgtgatactgacaaaacagcagcatcgaaagagagaacatgcctcccaccgttgctgccattattagcctttgaagctggtttaggcgagcttcttcgtttgtggttttttcgaaccagtaaggggctcttttgcttgttcagatgacctgcattatcagaatcagcaggactctgacccaaatcaatccagagggagctatctgatgactcgtcttcgctgaaaaccggacttttaatcaattcacccactgagatactctcagcttcctcaaacacagcgcttgtgttatctctatcagaaccaatttcatgatccatatctgtctcaaagacatcctgcacctgagcagaagtatatgcaccggaaaatgcgggtaattgagttcccaaggctttattatctccattaatagcaatgccattatcttgaatcccagtcaaaccttccaagccatccatggagtcacttagatacagaggatactcaggtgttatcttcacaattcccgaactcgttttcccagattgact

SEQ ID NO: 8355 - DNA, 643 bp, Arabidopsis thaliana
acaccgaggaaaacatcgtagtacagttaaacgatgcctcattacagaatctatagagcttatgcatacaaaatcagatcttatgcatctacattgcagactctaaaacacaaaatctagatgttatgcatctacattgtggtttatggttcttaataaccgactttttctctgttttgtgtacctgaaagtcagtcctcccacaaccacggatgagtacagcatccccggtaaaagccattcttggttggggctgatcagctccttcaccagtcacatatgtaacacatcctgcagtgtgtccaggtgtagcacgaacctgagacaaatgtacactcttcactttctagcctctcatttattgtaccggtttgaaattgtggtttcatacctcaaggtatatatcaccaatagatactttgtcaccaggttcaagaaacaaatcagctttggaaccacttgctttcgaaataacggatttcacacccgggagcttcgtctgtgtggagcaaacaaagatagatcactgaatcttcgatttaaacaaaaccatggaaatataaacaaataacatcaagcaagagaaaacagaccttaagaagtccagtaccagtgacatgatcagcatgaacatgagtggtca

SEQ ID NO: 8356 - DNA, 586 bp, Arabidopsis thaliana
ccatttctgaagaaacaagaacagatgttgaattagcatctgaagaaaatgtaaatgtttatctctaagaactataaccaaaacctaaacactgataatgatatagagacttgggaaaaagaaatttacccattagcatatggcacttcctcacgcgctctgtatggaggtggtgatctactgtagctgcggccacgggcaggaggaggagaaggactgcggcgccttggaggagggggagatcttgcacgagggctgtaactcctaaaaccagaaaaaggcaaggttacttaatccgttcaaaataaggtactaaggtaacaaaataaaaagcatcactgacctccgtccatagcttgggctccttctgtatcttggaggagtgcgactacggctcttgctgcgacgccttccagttccaccacggttacggcattcacgtgcgaaatgaccagtctcaccgcattcatagcatttcaaatcagagccaccacgaccaccacggccgccgccaccacctccacggtcaccatcacgaccgtcgccagcatgctcacctcgattgtgagactgttcaaccctccag

SEQ ID NO: 8357 - DNA, 610 bp, Arabidopsis thaliana
gaggatcgactgaacagtgaaaccttttgattcaaactgttgaatgattttagagattggtgtggaaggaagaggaagaagatcggttaaaagagaagatttcgacgttcttgaatcacgacggccgaggaaaacgtcgtagtaaggaccaccgacggtgattagaagatcacgtgttgcgacggagatgatgtctgagcaagaaactgtgttgggacaagcgagttcgagagctgttttggctcggacaatgacgtcgaaaccgtctccggggagtgagaggttgatggaagagtcacgttctgcggtgttgaaggcggtggaggagatgaggacggaggcgtcgcagccgttagggaaacagtcgtggaagaagagacaggataacggcggctgcggtggtgggattagtgatttgtttgtttgtgattgtgtcaaggatgatgtcgaggaatattgggcatgtttttgagtagaagtttgtggttaagcgagattgagctgtgaagaagaagacgaagaggaggaagagagatttgagtgaaccaattgttgagaagagagagagagagagaggggggtatggcattatatgcgaggagatgaagta

SEQ ID NO: 8358 - DNA, 575 bp, Arabidopsis thaliana
catctactggaagaacctcaagaggatcctctaaaggcttaggactaggagtaggtttttgattagaagaggatgggttgttaggttgaataatgggtgtattattctctagaaaaaactacaaaccaaagtctcaaacgtacgtaagaagttaaactaaaagaaaaaagacaaaacgtgtgtaaatatatcaaactaagatgagcaaagaaagtaaaggaaggaagcagagtccaatccaaacattagagtttgaagctgcactatgtggagctggtgatggtcccatctgatactgtactggagcatgattaaccggtgactcagccaacggagactgtgaaggagacgaaaaagagcttggtggtcggacgggtccaggaaccggagcagcgacaggtcccaatgaggctggtaatacatggatttgaagcttttgtcccatgtcacagtgaccaggaaatccgcatatgaagtgttggagtccggtttggttagaatgacgatatcagacccggtctcgtatcttgctagcggtttggacggttcacacatctcgtaatcattgtgagtga

SEQ ID NO: 8359 - DNA, 589 bp, Arabidopsis thaliana
acgggctttgttgggggttccttgatttcagcagcagattcttctgatgtctttgctaacactctaggaacaatatcttcaaaagggttccacaaaacctgtcacagaaatatacagagtatcaaaaaatatcaagtaaatcacaagaatgacacaccaaagaatcagtatcaatcagagaatgtcctcaatatgaagacatggaacactataatagatcaagcattaacaatccttcacctcgacagataatattttcggagcaggatccagaggtcgatcatccttactcgtgtcaacctctcctagtcttaaaagattgtagattgaatcgcccgttacctaaaagaattaaaaacaagttgcagctaaatatgatcaagaactagaaaagaataattgcacgaagcagaaaaacaaaacaaaagaagtaattttgctttaccttgccaaagatagtgtgcttcttatcaagccaatcacacttatccaaagtgaaaaagaactgacttccattagaattaggtgagctcgcattagccatggaacacatccacggtggctaaatctcagccttgaatggaactca

SEQ ID NO: 8360 - DNA, 517 bp, Arabidopsis thaliana columbia
cggtgtgtgtcgacttctatgcttcagacagcagtcaaagtacagagcacggcgaaatctgatacaacaaccacaaagtcttacttgcgactcactgatttgattttcaagtttcaactatatatatagcaagaaaaagagacagagagagaaaggcttacaagttcatattttgctggatttggtccagaagaagcctttctttttcacaggaagattttctttaggggatttatagttacttctggacccgaaagagaagtgtcgagccaagaaaggctttgctgaatagcttttagcactcgaacttgagacgagtctagggctcttgcttgctgctgctgctgtcctgtggctgtggtcaaacattacaaaatcatcgcaatcaaagtcactgtccaaaactcggtttctgagtcttttgttgtgtctcgctttcaaatccatctctactttcaacgctttctctgacagcttcgctgttttcttctcagcattgtacatattgggcatgaag

SEQ ID NO: 8361 - DNA, 567 bp, Arabidopsis thaliana
ccaacatctctcctccacttcttcagacaaaaccaaacccatttggactttctttgtcttaaccctaagatttccaaaggttttccaacaaacccgcaacgattagcttttgttctaatatctcatcaaaaccctttcaaaaggtgaaaacagaatgggaagaccaccttgctgtgaaaagattggagtgaagaaagggccatggacaccagaggaagacatcatcttggtttcttacatccaagaacatggtcctggaaactggagatctgtcccaacacacacaggtttgttttgtttcttaatcaaattaactaattaatagattaattaaacttttgatccacctcttaaaccctttttatgtatttatcttgaaagtgtactaggggttgtgatttcttctcttttttatttctttctctggcttggttggtatgaacatttaataaaagtgtaataaatagctaataagttatgtcaccgactctttcgccacatatcctaattccatttaatcctttttcttgagtaattgtttgttaaaaggtgtttaggttgagagat

SEQ ID NO: 8362 - DNA, 899 bp, Arabidopsis thaliana
ggttgcactaaaccaaagcgcgttttcttcactctctcactctcactctctcttctacttccattaaaatctcaccgcctctttcactctcactctctcaagctcaagagttctgaatctcccttcaacaatggcggaacaatctcaactcaagaatctcaccatcatcctcctcctcctctgcttatccttccaatcactatccttcgccgccgaatctcacctaaccgtcgatttctactccaaatcatgccctaaattcctcgacattatccgcgaaaccatcaccaacaaacagatctcaactccaacaaccgccgccgcagctctccgcctcttcttccacgactgtttccccaacggctgcgacgcctccgtcctcgtttcttccaccgctttcaacaccgccgaacgcgattcatcaatcaatctctctctccccggagacggattcgacgtagtaatccgagctaaaacagctctcgaactcgcttgtcccaacacagtctcttgctccgatatcatcgccgtcgcggtacgtgatctcctcgtaaccgtcggtggaccttactacgaaatctccctcggccgtcgcgattcacgaacttcgaaatcatctctcgtctccgatctcctcccgctcccgtcgatgcagatatcgaagctcatcgatcaattcagctccagaggcttctccgttcaagaaatggttgctttgagtggtgctcacaccatcggattctcacattgcaaggagttcacgaaccgggtcaacccgaataatagtaccgggtataacccgagattcgcggtagctttaaagaaagcttgttcgaattccaaaaatgaccctacgatatctgtcttcaacgacgttatgactccgaacaaattcgata

SEQ ID NO: 8363 - DNA, 1162 bp, Arabidopsis thaliana
ctcagctaagcttcgatcaagagatatagttaagcagccatacctgtgacgcaaccttcattatgaatattggtgagcctgggacctcaccctgaacttgcttgaatagagccctaacctcatcatcattatgaacctataaatttaaaaccagaataagtacttatatagtaatcggcttagtccacaatcaaaaggcatatctacagaagctgaccttcctgattcctttaccaccaccaccccacgatgctttgatcattgctgggtaaccgacaacttgacagctagcaatcgcttcttcagttgtgtagacacatgcttgccggtagatctcctctgggatggttaccaagttgctattaggaggtattttaacctgaaaacataggaattcagtatataaaaatgaaaatatatacctctggtacacaagctaagcttaacaagagtaaatttacttacatgggaaccactccatggcagagtgggtacatcagcagcttgtgcaatcaacgaagaaccaatcttatctcccagtgctgccattgaagatgctggaggaccaagaaatatgattccttttgcatctagggcatcaggtaattcggggttttcagatgcatgaccccaaccaggccaaactgcatccacgcgtgttacttcagccatctgcacacaggttgtagacaaagatgttcagatgaatgaaaaataactccaaagaccaaaacttcattgctgaaattgagcttaatacatgtgttctgtacagtaaaacacgataattcagataatagtagttcccaaaagttggattcacctccacaatcagctgaacgttagcataattgttattgttggttcctccgggaacctcaacaaactgatcagcgattctgatatgctccgcattgatccgcatgtcttcaggggttgccatccccaccaacaatatggctttttccgtaccaaatgtttcataagcccatgttctgacactacgtataaacttcacagccgccattccattgttagctatcaaaatactatggatcggccttttccctctaagtgctttacagaactcatccacttgagacaccgtctcataatttataccaggtcctacagcactatgattcccgttaaccgagccagc

SEQ ID NO: 8364 - DNA, 602 bp, Arabidopsis thaliana
catttacatgggaaccactccatggaagagtaggtacatcagcagcttgagcaatcaacgacgaaccaatcttatcccctaatgctatcattgaatctgcaggaggaccaagaaatataattcctttctcctttaaagcatcaggtaattcagggttctcagatgcatgaccccaaccaggccaaactgcatccacacgcgtgacctcagccatctgcacatatcatttatatacatatatgaatgacgaataacaaaacataagtattttccaaaaagttgcactaatcacctccacaataagctgaacattagcataattgttattattagttcctcccggaacctcaacaaactgatcagcaattctgatatgttccgcattgatcctcatgtcttcaggagttgccattgccaccaactttaccgctttttccgagccaaatgtttcgtaagcccatgttctgacactacgtataaacttcacagctgccattccattagtagcaaccagaatactatggattggccttttcctccaagagctttacagaactcattgacctcagccacatttctaccgggtactacatcactatgat

SEQ ID NO: 8365 - DNA, 982 bp, Arabidopsis thaliana
catttaaatcagaactcatatgctctccattctcatttgtgtttaattcacagcttatatgggaccgagctcttggacttgcacttgagaggccaaagagtgttaccatggactggcttgaagcccattgtaagaaagcttcatctgcttaagtcaccaccgagtcctgagttgtcgcactctctcgtgtttcaacaaaagtcattctcttccacactggatagctttttttgtttttaccttctattgacagaagaaacatttgttcatgtagaaattgttcctgagaaacacatgcttggtgcaaatttgcatttccgggaaactcgtgataataaataaacagttgtattcagtttgcgtaaaactcaaacatcaatatcactcatgaattcaagcttatctccgttttgatatgcataaaagtaaccagactgcgaaatagagtccttcgttatgagtttatcaaaaagaaaatgggattaagagctgctggtattgtcggtagtagtctccttgttagaaaggtcatcatcatcagcaagagaggctgtgaagttgagtctctcttcggcgccggcagtgataaccggcatccaaacatcagctgtgccgctaagaagcgtctgaacctgtggatcagaagctatagctgatgatatcatctcatccacatcatctaactttgctgataacttgtccaattccttagctatctccacctgaaaacacaaacaatcacacacaaagcctcagatttacattacaatgtgtaccagatatatgagtgaacacaggatacagacctcattgaggtgttgagcagactttgatggcactttagtgacttctaaaccaagagcttcaatcttagaacgtagctcaacctcttctgtatttgtcaatgattctacctaagaaacaaaaatcatcagtaggcaacaaaatcatctgtatttgtcaatgttgtagtacaattagt

SEQ ID NO: 8366 - DNA, 562 bp, Arabidopsis thaliana
ctcatatttgtacaacccaagaggctcttaaagcgagagttcgaagtggcaaagtaccatcctaactctagcaccacatatccattgttatgaaactgttctggctctgtaacattagacggcgaatacctcttgtccgtcaagaacgcaactttgcacgtttcttctcctccactagagttctctatatttacggttatagcctgaggacgccccaccggtagcctcgcctggcagcatctgtaaccagtacagatcaaatttgttacttcttcaccactctttctgtgttcgcagctcgattcacaacccaagatctctgattctgtatctgtcatcaatgcctttataccacaaccaaccgccacaagacggttctcgtcggtcaggaaatatgggctgcccttacctgtgacattcaaaaccgggagcgagttttggggtccttcactagtattactagaacaacccaacgatgtcacaggacatttgatttgaacaagtccgtatggttagttactgtctgggagagagatattcaccagcttcccgattgatcata

SEQ ID NO: 8367 - DNA, 584 bp, Arabidopsis thaliana
caaaaaacagagtattataagttttcttgcaatacaagaaagttatgttgtgagtaaaaaaaatgatgagaatattcagaaaacagagtggatatgattttgcataccggtagtcatgatggctgattggatcatggagggagaccagcgtgggtgaaacgattttaagtaggcagctacaccagcaacatgcggacaagacattgaagttccggtatcaacggagtactttacacgtcttgtatctgatatgcttggtggggcatcaggagaataagcagctacgatctctgatcctggtgccgttatatccggctgcaatacatattcactttcagtcaaatttacagagtaatttaatttttctccttttctatatataccttcaatatgtcaggaatgattgtgtttgggccacgagaaaagtaggaagccacgacgggagctctctggttaaagattgtctcacttttcagaacagccgctttgggattcctggccaaagcaaacaaaagtttgagctttaggatggagtatttgtaagaaatataataagacagagttatggatattactttggtgga

SEQ ID NO: 8368 - DNA, 1084 bp, Arabidopsis thaliana
gaagtttggaattcaatccagtaaggaaaccaaaaattgaaatgttataccaaaactaaaccattcccaaagggagataacagtcaaaagctctaaatggctaaatctataacaaatttaaagaaaaacatatataagccaaaatctttgtttctttgagccaaaaaccaaacccaacaaaatagaaattacaaactacttcttccgtagataaaggaagaagaactgaatcatttcattctttggtagcactaaaactttgacgagattcttttttcttttagcgaccaccaccgcggtagtaaccatttcctcttggcctgtagtcacctccatcctggtttcctctgccagacccacgcccaccaaaccggcctcttggtgcttctgttgggtaaccaccccttccacgtcctcctcctcttcctgaccaagtcaatacacatcaaagtcagaatgagttacatgctgtacactttctttcttatgaggctttcacaagacgctcttaagaagttttatgatacaaaatttgttggtcatagagcacggtttcaaaagaagacttacttgctccgcgaacaccagcgggatttggtcttcgttcctcaatgtatacttgccttccacccaagtatataggagaagcctatatattattattacacaaacggaaaatgataagaacaaagcgaaaggggaacagaagatgaaaattaatctagtgaggtaactgtggaatagaatctagaccttaatcgcattctcaacggaagtcatgtcctcaaactcaacaaatgcataacatacgcccataacatcctacatgtttagttgcataagattgttagttttggctcttcatatcacttaagataaacatagagaaaaggattaaaaaaaacacgaaatgaagattatttaccttgcgggttctgaggaacacaccatcaggcttgattgtaccgaagttcttaaactcttcctctatttcagaagcagatatgtcggaaggcaaattcctaacgtacactgatttgacacaactgaaacaaggcacaccagaaagaaatgaatatatgac

SEQ ID NO: 8369 - DNA, 803 bp, Arabidopsis thaliana
ataagtttccttgcaatacaagaaagttatgttgtgagtgagaaaaaaaagagtatgctcgaaacagagtggatttgtttttgcttaccggtagtcatgatggcagattggatcatggaaggagaccagagtgggtgaaacgtttttatgtaggcggctacaccagcaacgtggggacaagacattgaagttccgctaataactgtgtactttacatgtcttgtatctgattcgcttggtgggacataaggagaataagcagcaagaatctctgatcctggcgctgttatatccggctgtaataccaattcacattcaatccaacgcagaattgttagaatgaccaatacgagtaatttaatttttctgcttttctgtatataccttcaaaatatcatgaatgagtgggtttgggccacgagaagagtaggaagccacgacaggagctttctggttaaagattgtctcacttttcagaacagctgctttggggtttctagccaaaacaaaaaaaaacgttttgagctttaagatgtgagtttttgtaagaaatataataaaacagagaaagttgctaagtactttgtggagttcacatatgagaggacaatattatagtcatcttccgatagaacagagactggaaatgagaagacactagccgcgtcttcataggggttcctaacaatggatgcgacggctcccatagcttgagcttctccgggatttcgctgggtatcacatagcacaatcttacctttcacacgtttactgtctagacaccctggtgagcaaacctgata

SEQ ID NO: 8370 - DNA, 565 bp, Arabidopsis thaliana
gcaaagatgcgtgccctttatatgcagagcaagaacagtaaaaaggatcctttaccaagtgccattggtgattcgaaaatcgttgctcctgagaagcccttgctcttcattcagccaaggattctccacctattcagaacaatgaagctaagactgaagacacacctgtactctcgactgttcagcccgtcaatggattttcaactattcagcccgtcaatggaccttcagctgttcagcccgtcaatggacctttggctgttcagcctgtcaatggaccttcggctcttcagcccgtcaatggaccttcggccgtaattgtcccggtacaagctgatgaaattaaaaaaccttcaacacctcctaaaagcatttctagtaaggtgggagttatgatgaaaatgagttcacaaactattctcaagaattgcaagagaaaacagattgattggcatgtacaccaggtaatatcattcgttggatttatatctcgttggcacttattgaataagctgaatgtgactctttagggtcctctttggttcacttctattttggtggttag

SEQ ID NO: 8371 - DNA, 1650 bp, Arabidopsis thaliana
cttgttggccctgaaatcacagcttgctcaacttcctcgtcggttgcagaaacattgttctcctcggatgtgtcgggagagcattcgagtgggtacacacttcaagcaatgtttctattgcagttgacaactcgctaagctcagctcacaccctcattcatatcacttgtcaagatcacaaaggtcttctctatgatattatgaggaccttcaaggatttcaacattcaggtttgtgcaagtctttaatgggttttttctgacccttcaaattcatatgctttgcttaaaccttgcgactgttatttacatgagactcgttttctcaaatcttatttgatgatcagatctcatatgggcgttttacaatcaaactaggaaagaactgtgagatcgacttgttcatagtgcaatctgatggccgaaagatccttgactcgagcaagctaaatgcattgattactcgtttaagagcagagctacagcaacctctgagagtggtaatgatgaatcgaggtccagatactgaacttctagtcacaaacccagttgagttatcaggaaagggacggccacaagtcttccacgacatagcacttgccctcaagaagatcgatacctgcatcttctcggtataatataactcacccaatcacatcattcgagctcataccaaaaacagtccatttttgtatcatctaaatatcgatgaatctgatgtctttactaggctgaaattggaagacacgtgactggagacagagaatgggaggtgtacaaagtgttgatcaacgaagaagacagcttaccaatcccgagaagcaagatagaggaagaagtatggaaaactttgatgggctgggaatgaaaatctttcagagtataggaccattagctaacctcagactcatcgaaagagtatggctataagatttgtcactttatgatgcaatgagtgtatgtagattaatatgatacgaggagatatatctgataagccacagtgtgtatatatggtttgagtctttctttttgtgttgatgagaaattgtaagtagagaaaagcagaacgttggaatgttgtaaatgagtactgtgtgggtttcatagtaagaagctaaagtttttctctttgttgtattgagctgagatttttctcatattatatgaagtgagtggctatatcgtaattaaacacttaatgaggggcaaaaagtgaaggagaaacctaagaaaaatggcgactctttaagaagcacacgaagacaatccgaaagctgaccacaaagttttctactttgcaatttagataaatctttctatccactttgagaataaattaagggctctcaatttcgaattctgcttctccaacgaaaaaaacgaaatctttaatggcgaagaaaggaggagcgacgctagctgaggatgcaccatggcgagtttcgtcaggaagaccagtgcctaagatcagtcgctctccggttttatctatctctcaaaacccagaaaccgattacgccatttccgtcatgaaggttgtttgttttgcggattgcaatcaaatttgggaattttcacagttttttttaattatggggttgcgtgtaatctctgcagcatccgaatcctgtgggaggtgggtttgcga

SEQ ID NO: 8372 - DNA, 933 bp, Arabidopsis thaliana
tactcgcctttctattagttagggcaaacaattaattatgcttcaagttaattatctcctacacgaaactatgcatacagatataagaaaattttaaactttgactctctctacctttaaaataaccatgattatgtaatctaacacgtcatattccaaaaaacacaattcccttccaaatcagccaaacatggccttactaatatatacacaccactcgttttttttttcttaggagcaaaatcagtggaagtgaacagaaagatgcacaaagtaacggtgagtggctacgttgatcccaagaaagtgctgaagacagtgcagagcactgggaaaaagaaagctgagctgtggccgtatgttccatacacaatggtggcttatccatatgccgccggagcttacgacaagagagccccgccgggttttgtgaggaagtcggagcaggctcaggcgcagccgggaagtactgacgataagctcatgtccctctttagcgacgagaaccctaacgcctgcaccgttatgtgaataagtatagatagcatgagccgatgttataatttgtaatgtataacgttttatgaagttaaagtactggaaccttttttgttactgtattatgtgagaagcaacgcaacatatagtaattactctgcgtttaactagtagattatttaatgatatagttttacttacttgctttgtatgaataattgaacttatttaaattgtgttccattcaaaaaactaaggttttgttggaagcattcgattgagattaacctaatatacgcctcaaaatattttatgtatttctgggtgtttaatttgaataaaccaagttcatttcatgcgagttaagacctaggagaaaaaaaaaaaacaaaaccaagtttaaagtttagttctttaactataaaagttttgagc

SEQ ID NO: 8373 - DNA, 971 bp, Arabidopsis thaliana
  unsure (1)..(971): unsure at all n locations
tgacgatcacatggctgagatttgttacgagaacgagactatgatgattgaaacgacggcgacggtggtgaagaaggcaacgacgacaacgaggagacgagaacggagctcgtctcaagcagcgagaagaaggagaatggagatccggaggtttaagtttgtttccggcgaacaagaacctgtcttcgtcgacggtgacttacagaggcggaggagaagagaatccaccgtcgcagcctccacctccaccgtgttttacgaaacggcgaaggaagttgtcgtcctatgcgagtctcttagttcaacggttgtggcattgcctgatcctgaagcttatcctaaatacggcgtcgcttcagtctgtggaagaagacgtgaaatggaagacgccgtcgctgtgcatccgtttttttcccgtcatcagacggaatattcatccaccggatttcactattgcggcgtttacgatggccatggctgttcccatgtacgacgtcgttttattataaaaattatcctttaattgaccgttacgacgtcggtttttaattttaataatatgatgtttaggtagcgatgaaatgtagagaaagactacacgagctagtccgtgaagagtttgaagctgatgctgactgggaaaagtcaatggcgcgtagttcacgcgcatggacatggaggttgttgcgttgaacgcgatggtgcggcaaaatgccggtgcgagcttcagaggccggactgcgacgcggtgggatccactgcggttgtgtctgtccttacgccggagaaaatcatcgtggcgaattgcggtgactcacgtgccgttctctgtcgtaacggcaaagcacttgctttatcctccgatcataaggttttgttggttttttgataatctctcttgtttcgtttatcatcgttaaatgtttaccngttagatctacggttatggtttatcactgtaatgaacgaga

SEQ ID NO: 8374 - DNA, 600 bp, Arabidopsis thaliana
ctcatagttctcataactcatagtccaatctttgctaattaattatcctatcaaccagagtatataagcaatggatgaaataaacgaacttaacaattaatatttgaaagctttatatatacagtttaaccagcatatgtgcggcctcaggaacccgtcaaccggactggacaggtcaacaccgttgactttgataacacgcattctttgggaaaatccgagcgaggagaggagttttgcaacttgaccaacggctcacaaccgacgaagccacttctagtgtggtggctcaatacgcagacgacaatgacttattcaaagtgggagccgttagtgtcctcacaggtgaagacggtgagatcagaacaaattgttgggaattcaacgatagttaaatttgttttttttgttttttcatataatctgattcttgattgtttgttcgtgtgtgttttttccacccgattattgtcaataagtccatatgttatgttggttcagatttgggtggcatgtgttgtgtttgagttgctattttaattgtctttgaaattatatatttgaaatttgattttatgatagataattttgatatatata

SEQ ID NO: 8375 - DNA, 563 bp, Arabidopsis thaliana
attttttttaatctaccacaatatagtaggtagagtattttttttataacaagaaactttcgtcgtttcatggccaatagtgatccgactctgataatacatgtgtcatgtcgacaaaagtaaatcagttgtccatgaatgtagtacttaggatgggtaaaactgtaacaacacctctgcaacctcaaagatcatggtaaattgtagtggagtttctttaggaaataaagctctaaatattttcaattttgaattccatgcattagagatgtattttcacaagcaaaatgtttaaatttcttttacaaaaaaacgaaaaacaaaattatccgatgatctctaaattttttttgatggttgattatgttggattatgaaggaactaatgttggctacagtagataatccgtctaatgcggcggagtgggctatggcggagatgattaacgagccgagcatcatgcaaaaagctgtggaggagatcgatagggtagttggaagacccgttttgttcttgagtctgacctcctagtctacctacgtgaaagcgtgtgtgaagagca

SEQ ID NO: 8376 - DNA, 341 bp, Arabidopsis thaliana
taaaaaaaatactctacctactatattgtggtagattaaaaaaaatactaagcgaagtccataatatgcataccgtcacttgtgctttgatctcttcttccgatagagtaggctttccgttggtgtctttcgccattataaacatgtcgagaaaatcttgaggctctttcatcttcccatttcgccattgcatgagtctttcatcgacaaaaggatcgttatacttacttacatttctcattgcgtcagcacaaccttctcatggccttccaagtccaagaaccttaaccacgggacataatccgacaatgcaaaggcgtaaagatgggttaaaaccgtaa

SEQ ID NO: 8377 - DNA, 571 bp, Arabidopsis thaliana
ctctacgtatgaacatgttctataagccgattataaaaagatatatgtccatatataataatgcataccgtcacttgtgctttgatctcttcgtccgacagagtaggcttcccgtcagtgtctttagctattataaacatgtcaagaaaatcttgaggttctttcatcttcccatttcgccattgcatgagtctttcatcaacaaaagggtcgttatacttacttacatttctcattgcgttactcacaaccttctcatggccttccaagtccaagaaccttagccacgggacataatctgacaatgcaaaggcgtaaagatgggttaaaaccgtaaacaaagattccacatgttcaatctcttccaaccctggtcccgatccatcttcacttcctttaccaaaatgccttataccaaacatcatcttccgagctacatttccactgtattgccgtaccgcaagccttaaatcaataaccacaaaagcattaccacggtttttgacactacggttattgatgtacggactaagttatcagctcttcggttctcttttgtagcatcatttgg

SEQ ID NO: 8378 - DNA, 772 bp, Arabidopsis thaliana
gtcttgcaggtgatgatactgatgagtttgtcaaagacaaggcatgaacagctgctgcaagcaattgtgtggtaccagatccaaagattacgaatctgttatctgtaactgcatttcccactacactatgaagttttctaatgaccttctcgagctctcgagacacatatgtcccatctttcgtatatataactcatcctgtgccatcccgagaccaaaatcgcgcttctctctgcttgtcgcatccagaaaggctccaagaacaaagggtctcctcttcagaatccacaaaagcaaaaaaataacagttttattcaaagtttacagattggtttggtcataatgatcaagatgaaaagttgttgcatacgagttagcatcgacaggacaatctttgagaagaacggagcaatcttttcctatgtagcaattgttgcactcacaaggaggtttctggccgtcaaggacaccaagaccatccacaaaagctctgccgtggcctgagcatgaaaaagaggctacagtttctcgttccgctgcagctctgttggtccacgttggattccatgtggttgaactataataaagaatatgaatggtgaatacgagattcaagatgattgatactataagaagtagcttcttctgcatcatctttacttaaaacctgcaaaaaaaattcagcttcaactttttgtttgtataaaaggtggggatcaattacaaaggaatcaaaacaattgttaaatgattcaaatatatatattcaaga

SEQ ID NO: 8379 - DNA, 567 bp, Arabidopsis thaliana
cagcctcttcggttctcttttgtagcatcatttgggaagctcttcttgctcgtcacgtgagatgccaccactctcctcatcttcttccactgctctccttgtggctccaccgcaacggtcaagtacccgcggctgcagtactccgtgcccatcgttagcggtctagtggcgaaaacggagtcttgcttcttcagaatctctcttgcaattctcggggatgtcacggggatcacgtgagtattcgcaagacggatacatgcaatatcggtgttgagttctttcatgagagaatgtatccaccggaacaccggtttgttcctccctagtatttccggtaggtttccgattaaaggccaagatttcggcccgggagggagagagaggtttctcgtagggctaattaacatggttttcttcttctccttacgcttcatagttaatgcaagaagaagcaaacctataataaacgcgagcattggggtggagtcaagcatttttttttttaaatctcaatttggagaaattatttgagttcgaaaaggttttttcttatctatgatgaggaat

SEQ ID NO: 8380 - DNA, 896 bp, Arabidopsis thaliana
atcacatgacaacaacaagtgatcccttgtttctgaatacaaagaacagagaccacaagtcgtttggagcggctctccccagccaacaaatcttgatttggtaggcaatcggtccaggtttgctatccacatgttaaaagtatgtttaggcgtggccgctttacattaaaccaaaccgaatctgacgagtctaccaaatcagctcttggtcttagaacagaccacgttcttgatgatgagaagcctttgcaacttatatgttctccaccacccaaccataagaggccatacctcgagaatccttttgcaacttatttttctttccaacatttaaagcacatttattttcaacagattacagttagacacaagcattgttccattgccgtttcatggctataaatagcttattcctcattgtttcaacagaattcaaataatttctacaaattgagattaaaaaatgttcgacgactctacctcaatgcttgcgtttatcctaggtttgcttctcctatcattaacaatgaagcgtaaagagacgaagaaaaccatgttaatgactagccacacgagaaacctctctcttcctccggggccaaaatcttggcctttagttggaaacctaccagaaatactagggaggaacaaaccggtgttccggtggatacattcattgatggaagaactcaacaccgatattgcatgtatccgtcttgcgaatactcacgtgatccccgtgacatccccgagaattgcaagggagattctgaagaagcaagactccgttttcgccattagaccgctaacaatggggacggagtattgcagccgcgggtacttgaccattgcggtgcagtcacaaggagagcagtggaacaagatgaggagagtgg

SEQ ID NO: 8381 - DNA, 744 bp, Arabidopsis thaliana
taccgccattatcatctttctcactgctttaatcctatctgctccaaagaacttaaaaaccaaaccaaagacaacattaaacatttggatacaaacaatctaaatcatcaaaaacatgaaatcaagtacagaggaggagttaccatatgctctgtcctacaaagcccgattccttgagctccgtttttcctagctgcaatggcgtcttcaggtgtatccgcattcgccataaccttatcggtcatcgaacatttgagttagaaagtttaaaaatatcaaacaagttaaaggaacagaaactcataaacaccttgagacgtctgattgcatcagcccaggacatgaaagtctccaaatctggacttaaagccggagagccaatgcttgtttccctaatataacctcaccggttgatccgttcattgagatccattcgccttcattaatcgtcaaatctccaatcaatagaacctgaaaatttttaaaccctaactttagaaacaatcttcccctaacttatatgacaagtttctaaaatcgaatccaaaaaccttgtggttctcgtcgacacgaatctcggaacaaccagcaatgcaacattttccccaaccgcgagcaacaacagccgcgtgtgacgtcattcctcctctagccgtcaatataccttccgctgcgtgcatacctcccacatcgtcagggcttgtctcagttcgaaccagaatcacagttttacctgagaatgca

SEQ ID NO: 8382 - DNA, 889 bp, Arabidopsis thaliana
ttctttcttataacacgaaagattcgtcttttcatggccactagtgatctagctcttataaaacatgtggtcatgatgtctacaatagtacatcatttgtctatgaatgtagtacttagtatttggtaaaactgtaaaaacacttcttaacctcaaagttcatggtagattgtagtggggttttttaggaaattaaagctctaaatatttaatttcagtttggaatccttgcaatatatagatgcattttcacaagcaaaaggtttaaatttattttagaagaatttttttttatctggtgacctctaactttattggtggttaattatgttggattatgaaggaactaatgttggcgacggttgataatccgtctaacgcggcagagtggggtatggcggagatgattaacgagccgagcatcatgcaaaaagccgtggaagagattgatagggtagttggaaaagaccgtcttgtcattgagtctgatctcccaaatcttaactatgtgaaggcttgtgtgaaagaagcattccggttacaccccgtggcaccgttcaacctccctcacatgtccaccactgatactgtggtagacggttatttcatccccaagggaagccacgtattgattagtcgtatggggattgggagaaatcctagtgtgtgggacaagccgcataagttcgaccctgagagacatttgagcactaacacatgtgtggatctaaacgagtctgatctgaatataatatcgttcagtgcaggacgaagaggttgtatgggtgtggacattgggtcagccatgacgtacatgttactggctcagttgattcaaggattcacgtggttaccagtgcctggtaagaataagattgatatttcagac

SEQ ID NO: 8383 - DNA, 539 bp, Arabidopsis thaliana
ttttctcctgaactatctgatgctcgtatatcgtgggccaaaggtggagtacttacaacggttgtagacgacttctttgatgttggagggtccaaagaagaactggaaaacctcatacacttggtcgaaaagtatgttgatttggctccttcttctgagctcttcctctgcttgttccctcgtaaaagcataatcgttcttcgcttacaaatttcaggtgggatttgaacggtgttcctgagtacagctcagaacatgttgagatcatattctcagttctaagggacaccattctcgaaacaggagacaaagcattcacctatcaaggacgcaatgtgacacaccacattgtgaaaattgttaagtatcaatcatcccacacaattatattctctgttatcatagcctaacaactcatctgaccatacttcattggtgctatatcttacgcagtggttggatctgctcaagtctatgttgagagaagccgagtggtccagtgacaaagtcacaccaagcttggaggattacatggaaaa

SEQ ID NO: 8384 - DNA, 566 bp, Arabidopsis thaliana
catccacatcatatagcacacagctaagatcaggaacataaccagcttgcttcatttttatcgatatttctttcattttagctaacacttcttcccttcttggatgggtacgatcattggcgtggaagtaatgtaaggtttgctcgtgttgaatccagcttcttcctggttcttttgtaacagctttctgcatcatcatagctcttacattgtttacatctgcccatcttccagccgaagcatacaaattagagaggatgacatagttccctgcattctctggttcaatctcaatgagtctgcgacctacagattcgccaatatccacagataagtgaaccctacatgctcctaaaagggaacccaagacaccagcagttggtttagatggcattcttttgatgaattcaaatgcctcatcaatcctacccgcacggccaagcatatcaacgatgcaaccataatgctcagtgccaggcttagtcccgtattctcccgctaccatgccatcaaatatattcaaccctgtgtcttccattctcccatggctgcaaccagacaaaaca

SEQ ID NO: 8385 - DNA, 744 bp, Arabidopsis thaliana
tcctggaatcgtttttgtgttgcttgttgaaaaattgtagactttgtgcactttatgaatctgtgatgtttgaagaaattatgtagtcatgttgagaaatgagaactaagtagctttttgttttattgttagtctggaatcacagaaggttctgattcagcattagaggctaaagtaagtgagcaagaagtgggaatgtaccagaatgaagtagttgagagtcaaggtataaggataaggagaagaccacctactggacctccattgcattacgttggaccttttgagttccggcttcagaacgagggaaacacgcctcgtaacatcttggaagagatcgtatggcacaaggataaagaagttgctcagatgaaagagagaaagcctctttatagcttgaagaaggctcttgataatgttcctcctgctaaagacttcattggtgctcttagatcggctcaccaaagaacggggttgcctggtttaatagctgaggttaagaaagcttctccaagtagaggaatcctgagagaggattttaaccctgtaagaatttacacccttttaaaccatcctgtgacgtgagtaagtataaggattgcaagaactatgtctgaaggcttgaaattgtaggttgaaattgcacaagcttatgagaaggggggagcagcatgtcttagtgttttgacagatgacaaatacttcaaggtaatattgtgaagaaaatgttctttgagaccaaat

SEQ ID NO: 8386 - DNA, 881 bp, Arabidopsis thaliana
  unsure (1)..(881): unsure at all n locations
ctctcttatgtcaatattggtttacttgtttttggatttctctcatataagccttttctggtatcagcaagagagggaagagtatgagtatgtgatcatagaagggaagattgttcacaagttaactggaaagttcttacacacaatgcatggatcggaaggaacaaaatggatctttgttatgagtactttcaagaaactctatgccggtctggtaagttaaaaccgttatatctttctattggtgatgaattgatattagtattgaaaaagattctaatggttcttttctttgtttatgtttacttcagaaaaagaaaggaaggttccatcactcaagctttttggctggaggagctacattagctgctgggagggtgattgttgacaatggagttctcaaggtaacttactaaggccacgtccttttcttagagtggttgagatacatgttcattcatatcaacttttttattatgtctgccttctgtgatttctctgtttgatcgttctgttttcggtttaatctcagacaatctctgcatatagcggacattacaggccgtcagacgatagtctcgacacatttctcgggtttctcagagagaacgcagtgaacctagacaatgttgaggtaatgcccttgttctaatcttggctggtgaatgatatcattaactagagtttggttgtttagaaaaagagactacttgagagctaatatatctatgtatgtgtaggtgcataaagctagtgaagattctgacagctacgatgattatgttaaaccaacggaggatctgaaccggaaccgttaaagaaagaggacacaacattccaagcagagactganacagatgagaccggtacggaacagtggg

SEQ ID NO: 8387 - DNA, 817 bp, Arabidopsis thaliana
ctaaagaactggaggaggttatggtcagctgcgtggtatagccaggataaatgggaatgtaattttgatagctgtggatgctgatcatcaacacgaccgcccagagcagcgaaatcagcttataaccatagcgcatcgctccccacatcatcaggggcagcaataatgacaaggtataattggtgctaaaaattgtgcttttttcatttaacggcatgcataacagcaacaataaagcacctaatgccagtagccagagcgcgaactcttttttggtgactttggcatcaacctgctgttttaattgcgaataatagctacgtaaataaaatggatttcgcactacccgaatgatgaagtagcacagcgggacaccgatcagattacccaccagtaaggcctgataattgattaaagtcccgaggttaaaaggcatgacaccgaccagattttctctgctcgccagtaatcctacaaatgcagcaaactggaaaagtatcagaaacagcgttgcaggaaacacaatctgccagaatatacgctgggaaattaaacgggtatcaccatgtgaaacgttgttacgccggggagtaaagaccctgtaaccgccccaacagagaatgataatgataataaaattagccgttaatgatagcgtttcgtaaaaacccagctctgcatatttgcggacaaaaatccctaaggcgatccctggcaatgcgcccagctgaaaacatcatcatgctgatcatcagtgcgagagcgagataaaagagaaaaacgtcacgggaagagatatgcgcgaaagtattaatgt

SEQ ID NO: 8388 - DNA, 848 bp, Arabidopsis thaliana
  unsure (1)..(848): unsure at all n locations
taacaaaaaaaaaactgtcttttcttcatttctgttctttttttggttgccgagaaaaacagaggataattttccgatctctgttttttttttctcggtgaccagaatcggttggttctgttttttttttttttttccttctttgttattgttatcttattaatgaatcttttttattgttataattgacagattttttttaaacgagcttgatcaataaattctctcaagatctatggcggaagagcatcgatgtcagacaccagaaagcaaccgtctctgtgttaacaactgtggcttcctcggcagctccgccaccatgaatctctgttctaattgttacggcgatctttgtctcaaacaacaacaacaatcctcctccatcaaatccaccgttgaatcttccctctctgtatctcctccgtcgtcatcatcatcggagatctcttctccgatcatccctcctctccttaaaaatccatcagtcaagctagaggtaccggagaaaaaggcggtgatttcgctgccgacgacggagcagaatcagcaacagaggccgaatcggtgcacgacgtgtaggaaacgggtcgggttaaccggattcaagtgccggtgcggtacgatgttttgcggggttcataggtacccggagatccatggatgcagctacgatttcaaatcggccggacgtgaagagatcgcgaaagtanttccgttggtgaaagcagcgaacgttcagaagatatgatcagagccgttcgatgcgttgacttttcctctcgtaagtcttcatttctacgcgtatgtgtgtctccgtccccgagaaatcggatggtgcgatttgattg

SEQ ID NO: 8389 - DNA, 608 bp, Arabidopsis thaliana
cccgcccgaagatttcattttccccgcagtccttgttgaactacttatgggtgtcggcgaggcagatcgtgtaagattgtttgatgaggcggattttgtgtacatgccattcaatttcgacaaaaaacattgggtggcattgtgtgttgatctcaaggcgcacaagatcacaactcttgattctaatattcagcttcgcaaagactcagcgatgtgtgccgaactccagccgcttgctgctatgctcccttacctcttcaagcaggcaaactcgtccagggatcccatctcgttacaccctttctcgattgatcgcctgcatggtatacctcaggtcacatcgtcctttgattcaggcgttttctcggtgtttctcattcacgcccatgccgctggtgggatcgaggagtgtgtgaattttgatgtagctgccttggatcaagaagctaagaaacttgtctcgaccataatacttgttggtgttgcttcataacttcaaagttatcgaactatttcgtatcagaactctgtgtttatgacctgttttgttttgctatttggttatggtcccccggatgggttcttttattatggtgatggtttatttt

SEQ ID NO: 8390 - DNA, 1520 bp, Arabidopsis thaliana
  unsure (1)..(1520): unsure at all n locations
tactcgaagttttacgctataacgatgaaacatattgacctaggagataagatatacgttataacagagttaccgttaagtgataatagttagttgataaatatagctaccaaaaagttaccgtccaaagagcagagataggtgataaatatagcgagttatagagtaacaaagctttgaaaacgatagcgaaagcaaatagtcaaagctaaagcaaagccgataaataagttcaaacatgtgtactacacgcaaaaggaagggaggcaatgtctttaaggccaatagtcggctaataaaaatattaggaggcaacacccgacaatattattgtcgagacaagttttttaacttctacatccagcgcaacaacgtcaaactccatgcattcctcgacccctccgacagcatgggcgtggatgaggaaaaccgatagaacaccggaatcgaacggggaggaaacttgcgggataccatgcgggcgatcaagcagaaagggttgcagcgagatgtccccgctagaagagctagtctgtcggaaaaggtaagggagcatggcagccagcggctggagttcggcatataacgctgcatcacgtcgtagctgaatgttggaatcgaggatggtaatcttatgtgcctttaggtccacacacagcgacacccaatgttttttgtcgaagttgaaaggcatatacacacaatcagcctcagcaaacaaacgaacacggttggactcaccagcaccaattagtagatcaactaaagcagatggaaaaatgaaatctttgggcggcaaagttttagcaaacttcggaaagagcctcgtcagctgtgaaacgaatttcgagccaagcacatcaaccctgagcttctcgccatcaatgtcgtctgtccgtaagagatgtctgctgaatttgatcaaaacgtccatgactttgctagagaagtgtttcttccgctcaatgatgtcgaaaatctctttgtgggaaagagaagcttcaccaacaatgctaatcgagctgcaaaatcaattgagagaagttataattctagtgtaatatgataaattagttaaccggtaattgcattacctttttccctttatcttcgagagagatcgttggtaacgcacttctggatcagatgccaactccccgacgcttagaaatggggatgggtgacccaccagtaacttagttttcttgtcgaagtgaaaccgcccatctaacttactagaaagcgtccttggtcttttgctcttccttccttgattgacatcgccatcgggaccgccgccatctttcccagccaatagtttaccgccggaagangnngggggttgaaaaatcctaatgaaaagataaagcaaaataaggagtggggggggggggaaagaaaaaaattaaaaaggaggaaacttcggattacctcatctgaatcctgataagggttgccaatcgtcatcagatttaagagagatacagtgtgagtagataatacagtttatagtggataca

SEQ ID NO: 8391 - DNA, 577 bp, Arabidopsis thaliana columbia
ccactcgttctatgaactgtcttcgaactccagccatcacagcttccctcgaggagtcatcgtctcctcctttgccatcgttaagaactggctctgattgacacagaagtaaggctacacctgaaaaaccaaatcagttgcaagtatgttagacatgtgcctaagaccaatctgctcaaagcatgatacaatcgccaatgtggtcacatcaggtctcagatcagacaaaggctagagatgagacatgacataatcatcaaacacaaataagcacagattacatcagacaaacaagggttcattcaaacttactctctggggtgcacctacggccaaagctctttaagcctacatgagttcctttgatggcgccatggtggtacccagcaaggtaggaagattgcaatcagggtagttcggaatacaatcagtagatattatcttaacgaactttgttgctgggtatctactacccaattcgtctagacaacccaatagcaaactacattctgcaacactatcagagaacaacaagaaataaacatgagttaatagtgttcaagcatgtagtaaagaa

SEQ ID NO: 8392 - DNA, 1093 bp, Arabidopsis thaliana
gatagaccaccagacgagttggcctgtttgaagaggtaagggagcatggctgccaatggatgtagttccgcatacaacgctgagtcacgtcgaagttgaatgttcgaatcaataatagtgatcttatgcgtcttaagatcaacacacaatgccacccaatgttttttgtcgaaattgaatggcatatacatacaatcatcctctgcaaacaatcggacacggtcagactcacctatccccataagtagatcaacaagtgctgcagggaatattaaatcctcaggcaggcttgttttggcaaactttgaaaagagtctagtcagttgtgaaacgaacttcgagccaagcacatcaacccgcagtttctcaccatctatgccgtctgtccttagtagatgcctaggaaatttgatgagagcatccataaccttgctggtgaaatgtttcttccgctcaatgatgtcaaaaatctctttgttggaaagggccacttcaccaacaatgctgatagaactgcaacaaagattcgggtaattgtaaatccaattgttatcccataacaaaattaacgactaagaacgttaccttttcccctttagcttcgagagtgacctgtggtaacgttcttctagatcagacaccacctcgccggcgcttagcaaaggggatgggtgaccaaccagcagcttgggtttcttgtcgaagtggaactgcccatctaatttgctcgacaaggtcctgggtcttttgctctttcttccttggttaacgtcaacatcgattccgcctacatctttcccagatgttagtttcccgccggaagccgggggtcgagtagaaaaatcctagaaataattgaaaaaacaaattaacgaggttgcaaaaaaggtgtaacactaaaaaacgcgtaaaaaagttcagtttacctcatctgaatcctgtttggcgtcatcagtcgtatattatttgtgaggcgaggtaataaaaatgggaaatgaacagtggagatttgtttaattgtcagatttacaattactaaggtcgcagaatagttacctgtgtggtcggtagcaaagtagcacgaccagaagca

SEQ ID NO: 8393 - DNA, 602 bp, Arabidopsis thaliana
agtcaccaatgagtctgtccagaaggctgtaagttcttgctttcatactcaagctttctttactattatgatggttttctctgtatgatatatgtttctattgatcctaatgatttgtaattcctgcaatctcaggctgctgctttgaagggatctgaccaccgccgtacaactgaagttagcgcaaggctagatgctcagcagaagaagcttaaccttccaatcctcccaaccacaaccattggatccttcccacagaccgtggaactcaggagagttcgccgtgaatacaaggccaagaagttagtctcttaatcataatttttttgcattgatcatttaagcatgtttagtaagttgattgtgatgctaactggaactctttcttctactagaatctctgaagaggattacgtcaaggccatcaaggaagagatcaagaaagttgttgacatccaagaggaccttgacattgatgttcttgttcacggagagcctgaggtcagtctttgtctcttactagaccctaaaactaattacaacgtcctgtttctgactcagccatgctttgacaatattatagagaaacgacatggttgagt

SEQ ID NO: 8394 - DNA, 977 bp, Arabidopsis thaliana
ggtattgaatgttctaatatagtaatgtggtgttgttaatgcagcttggtgttgagaccgtccctgtacttgttggccctgtctcttacttgcttctttccaagcttgctaagggtgttgacaagtcatttgatcttctctcccttctccccaaaatcctcccagtttacaagtaagagattacttttgctctagtactcaattattctctttgacgctaggaaatttgtttctgacatactattggaatggtgaatcttttctcagggaagtcattgcagagcttaaggcagctggtgcctcctggattcagcttgatgagcctctctttgtcatggatctcgagggtcacaaactccaggcttttagcggtgcctatgctgagcttgaatcaactctctctggtctgaatgttcttgtggagacctacttcgctgatatccctgctgaagcatacaagacccttacttccttgaagggtgtgactgccttcggatttgatttggttcgtggcaccaagaccattgacttgatcaagtcaggtttcccacagggcaagtacctctttgctggtgttgttgacggaaggaacatctgggccaatgacctcgctgcctctctcatcaccttgcagtcacttgagggtgttgttggtaaaggtattatattcttccagaatctcttatgtggattactcaattagaagtgtttaatttgttatctttctctaactcgttggttttgttatttgtgaattggtgcagacaagcttgtggtctcaacctcttgctctcttctccacactgccgttgaccttattaacgagactaagcttgatgctgaaatcaagtcgtggctagcttttgctgcccagaaggttgttgaagttgacgcattggccaaggctttggccggtcagacaaatgaggtattgtaaaaatcctcaaacatgtttccaagtgaccctttgtttgaaa

SEQ ID NO: 8395 - DNA, 536 bp, Arabidopsis thaliana
cgccttgaatcagagagaaacacaagttttatacctgttgaggacaacaagacttcatcgcctccaggatgatcatccatgaatggagtcacatcatacacctaaagaacgcaacaatcacagatcataaccaagtagtagacacaaactctgtttctctagtgtgaattaacatagaatcaactaaatctacgaggggctcgattaaagcttctaacagtaacaatccaactctacaactttaaaatcgaagctttgacacaaatcaatggcggaagagaactaagttcgtcaaaaaacagagatgttctcaaacaaagagacaagatctaaccttgccggaaataataagccaacaatccttagttttgttgtgctttgaaacttcttcaaaacttagaaccttccgatctgaagacatcttcactcaaactgcaaaacaagaacacatcaaagctactaatcaaaatttctgataatacagagtactagatacagattcaaatcggaatcatcagaacgatgatgaatgaacg

SEQ ID NO: 8396 - DNA, 1405 bp, Arabidopsis thaliana
caacaactttcttgatctcttccttgatggctttaacgtagtcctcctctgagaccctagtaaaagagagattaaagaaaccattagcatcacaacaatttaagaaaatgtgtgacgcataagcccaaggattaaatttaggagactaactttttggccttgtactcacgacgaactctcctgagctctacagtctgtgggaaggatccaatggttgtggttggtaggattgggagattgagcttcttctgctgagcatctagcctagcactaacattggttgcacgacggtggtcagatcccttcaaagcagcagcctgagataacaagaatgagaaactatctcaatcaatacaagattaggaaaataaaccattgggtgagcacagtgcatcagtttgaaatcaaacttacagccttctggacaccctcgttggtgactcttggggaagatctccttgaagccaaagccgcagcattggcagagaaaagagcctgaaagaaaaaaaatattgagttctagatttttctggatcaattacactacagataattcaagggtccactactaggggagcatgtgggtaaaatacctcgtccttctgaccagccaaagccttggccaaagcgttcacttcaacgaccttctgggcagcaaacgccaaccatgacttgatttcatcatcaagcttagtctcattgataagatcaacagcggtgtggagaagagagcaggaggttgagaccacaagcttgtctgcatcaaaaagacaacagatcaacatttcatacagttgtttttcaataattccctagtaatgtcaggtaaaaggcagatgattttggaagaacaattacctttaccaacaatgccttcaagtgcctgcaaggtgcttagggacgcagcaaagtcgttggcccagatgttccttccatcaacaacaccagcaaagaggtactttccctcagggaaacctgccttgaccaaatcaagggtcttggtgccacgaaccaaatcaaatccaaaggcagtcacacccttcaatgaggttagggtcttgtatgcctcagcagggatatcagcgaagtaggtctcgacaagaacattcaaaccagaaagagttgattcaagttcagcataggcaccagtaaaggcctggagtttctgaccctcaagatccataacaaggacaggctcgtcaagctgaatccaggtggcaccagcagccttaagctcggtaatcacttccctgtacacaaatcaaagtcattatatcagtggtatgtcagaggatcattgataacatcaaggatacggatggcataataaagaaaaacaataaagtgatttcttacttgtagatcgggagaatcttagggagaagagaaagaagttcgaatgact

SEQ ID NO: 8397 - DNA, 585 bp, Arabidopsis thaliana
tgctaaaggatgataaaagacttaccaggagaatgtctgctccttcagcctcgtcttcacgtgcctcaatcaatgcctctctgtagtttgctgggttcatctgatacctgtagttcaaaacgtcagtttgtaactgttagtgttagcagaagaaatgcaaattcagtatcgatgagggttgatgggatttacgttttcttgtctccgaaacgcgggtttgagtccagggcttcacggaaaggaccgtaaaacgaacttgcatacctgttggccgaagattcattcaattagacagaacaaacaagaacatgcttccagaaaataaatgtatgattacttacttggctgtgtatgacatgatggagacgttttgaaatccttcagcatcaagagctgagcggattgcacctactcgcccatccatcatgtcactcggactaactacgtcagcaccagctcgagcctggaaagagagagagaagaagaaatcaacctcattggtaagaaaaagtttcagacattttaactctttgatatcgaaaaaaattacctgggaaacagcttgtttacagagctggtgtactg

SEQ ID NO: 8398 - DNA, 754 bp, Arabidopsis thaliana
ctcacaagaaacatcaataacattctaggattttatatatcaaccaacacaacttcatgtcagtccaaaacagctacatgacacacaccaaaaaaaaagagaaagaaaaaccaaacactaatatatcacactccagaaaagattaaacttttaagtcttgtttccaaaagcaaaagatagatatcttccttagcaagcatccacactttacatgatgttgcagctattgttattaccagcgtcttcttcactagacatgtttgttgcatgtgaatgactactttgttgttggtactgatcacttgcgtaagggtaataaggataataactgtagggactaggggtataattgtaataatacccattgcttgatgctggaacgaaagatgatctttggtacatcatttgctgaggctgatgcatcatttgcctactctgcatgttcattggatgatgattattgtacccattcatgttcatcatcatgcctccattactattggtgaggttgtgattagtgacgccgttgacgttgtttaacggtggagcttgaagctgttgttgaatcccatttggagggtgattcactgcgttggttgcgccgttgaagccagcaagacccatgagagctccaatctcgttggcttcaacaccagtgctcattttcccggcggttctcattctcatagccgccattacttgttgagtgttctggttatggttgctctgtttttggttgactttctttgatgct

SEQ ID NO: 8399 - DNA, 1230 bp, Arabidopsis thaliana
tttatgtgctctttaaaattaaccaagatttcaacggccatacttcttataacttttaataatatctctactcacctcattctcatgaacccaccaaacaaaaaaagtaaagaaaagaaaaactaataaagaacaaaaaaaatgtcctcttcttcatcaagaaacgcctttgaagatggcaaatacaaatcaaatctcttaaccttggactcatcatctcgttgctgcaaaataacaccgtcttctagagcttcaccgactccgccaaagcagctgttggtggctacgccggtggaggaaggagattatccggtggtgatgctcctccatggttaccttctctacaactccttctattctcagcttatgttgcatgtctcttctcatggcttcatcctcatcgctcctcaggttcaatttcaatttccaatcattacattagttcaggaactaattagccactgaaattcttgtttagttttagattcctatgtgtattagtaatttagtatagaaattattttttggggggtcaaactagtgtatagtttttgtttaattagtaaaatgttatgagttatttttatggaaatggtactatcggaattgttaaatccagtgtatagtttttgtttagggatttagtattagtgtagagtttagaaaaatgtaaattcgctacaatctcgttccattccattttgtgcaaatattgcatgtgactgactacttggtcctttgaggtttagtgtgaatgttcatgaatatgtaggtccatgtattaagatattctagttgaatccaaaaaaatcataataaatacatatacattgatttgttaggacttataggatttaggatttaggatttaaccaagatgtatctataattcagctggatgcatggaacacattatgccacgtttaaattagttatttttctgaaacttttcttttattattgtttggcttttataagaaccttagacaagaagaaaagtaagaacaaaaatgcatatcaatgggtccacttgatgtgtttatcctgtttttgtctctagagtctctcgaatttctaatatcaaatgttaacattttattttatatggttgtaaatcaaatttcttggctatgtgatattataacagttatatagtatcgccggaccagacacaatggatgagattaaatcaacggcggagattatggattggttatcagtaggacttaa

SEQ ID NO: 8400 - DNA, 485 bp, Arabidopsis thaliana
ctttggatccactttccaccacgcatcctcatctacgggcattgtctccgctaatgcagctgccttctttactttggcttcttccgtctttgcctcctccaccattctattgtatactttgcaaagctcttgaatcttcgcttgttggtgagcattcatgaccgatcgttgcaacgatgatgaggcctcacgattgagaaatcgctctgccacggcttgaaaagacggactgccgaatgtgtatggttttcctgagcaagagtatccgagaaacgcaacttcagcaccacagagaatggaaagctcattgcttattgtagattccatttcgacgcttagataatgtgaccaatctgtcttcatctttttcaatttttttgatgttaatcatttgctttcctttggttttcttgggattcattttggaagaaaacaaaaatatgaattgactataaagaaaggagaaatttagattaagtatgtgt

SEQ ID NO: 8401 - DNA, 1393 bp, Arabidopsis thaliana
ccttgctcacacagtttatcatagagctcttgatacttctccatcatcttcttcgccttttcgtgatccttcacgtcatttggatccactttccaccacacatccttattcacgaccctcgtctccgccaatgcagctgccttcttgactttgacttcgtccacctttaacatccccaccaatctattgtattttttgcaaagctcttgaatcttcgcttgcttgtgagcattcatgaccaatgatgatgaagaagacgacgaggcctcgccgttgagaaaccgctccaccacggcttggaaggatggactgccaaaagtgtatggttttccagagcaagaatacccgataaacgcaacttcaacaccacagagaatagaaagctcactgattttagtgtagataccatttagacgcttagagaatgtgaccgatctgccttcatctttttcaattttcttgatgttaatcttttgttttcctttggttttcttgggattcattttggagaaaaaaacaattatgagtttattggttataaaaaaaaaagagagaaatttaaactaagtatgtgattgttgtttttggctttagcaaggaatatgttttttttgttgggtgcaagataaggtttatatagatggaaaaatggtagtaatttaaatttcattaaaaaagtcaattcttaaattaatgtttggaaggttggtaatatttgtaatccgcatagttatggtcgattaataaaaactcttaattccggatgtagagactttgactagaagagattttatggtaataatgaatgtatgatattagattaatgtttggaaggttgttaatatttgttatccgcatagttatggtcgattgataataactcttaattccggatgtagagactttgactagaagagattttatgttaataatgaatgtatgatattctgaacttatattttttttttttgcgtaaaaggtttatttataccaattttctgtttttttctgtagagaagcgaaacgtattaaaaataaagctactacaaaggaaaactaatacatccaaaataagtaagaagaagagaaggagaggtagaagaagaggcatggaaggagagaagtcgatcccttaaagagcggtccagggaagcttgagtaacagacggtggtgagttgatgttgttgaagatccgggcattacgctctcgctagatgagatagcaggccgcttgcaagatgagcttgacaatagtcgtgatcttggggttagaagaagtccttgcctgcaaaatccaagaagaaatcgagagaagaccagatggaggagaagccaaaccttgaaggaacccttcccaaagagtggcagaataacacagtcaaagaataagtg

SEQ ID NO: 8402 - DNA, 460 bp, Arabidopsis thaliana
gaaacggcaaatggaagaagtgtcgtcggagatggaagtggaggttcaaaatcgtcagctttcggattcttctccggctcaaaacgtgaagaaatttgggctcaagaactctattcagaccaacttcggctctgactacgtcttccagattgtcccaaagtaaaagctttctgttctctcttttcgataaccatactaattagtttactgaaagtgaacccaactctggttttgtgacagaatcgattggacagcaatcgcggtttccttatcaaccaacaccgtcaagctttactcgccggtgactggtcagtactacggcgaatgtaaaggccactccgataccgtcaatcagattgcgttttctccgactcggcggcgtctcctcacgttttgcactcttgttcctccgatggtaccattagatcttgggacactcgaagtgtctacaggtgagttt

SEQ ID NO: 8403 - DNA, 617 bp, Arabidopsis thaliana
tccccctaaaaacttacaacaagtgaatctaaacaccaaacctcaaaacacatccaatccgaacaattgtacctaaaaacttacaacaagtatatctaaaaacccaaccactaaagcctcttctttgggtccttctcatcctcttctttcttctccttttccttctccttctcattctccttcgccttctccttctccttctttttttttctttctatttttgccttttctttcgtaaaatgcgaactgacatgaattgatggcttcactaaccttttcggtagcaccacacagcttattatagttcttcatcctcatatttcttttccttcctacaacttcatcaccacaagccatctcatcagatttatcatcactactcttctcaaagccagatccctcaacaaaaaaatgaacacgtttctctccacctgtctcattctcactagtcggctcattattaataacactcttctcaagacatgatggctcatcaccactccttaactcaccatcaacacttttcttaacaccactccttaactcatcatcaacactcttctcaacgacacctagcacatcatccgtcctcaaaatctcattaacagtgttccaaa

SEQ ID NO: 8404 - DNA, 791 bp, Arabidopsis thaliana
tgcaaaaaatgcacagactcgacgccgtgcatctctttgtcagcagctacgacaagaacacttcttgtccgaccaccaatggttaccatctcagctcggagagtcttcatgttaagagacttgagaatctccataaggtccggcaagagatctgatctatcttcacaacatagagaggctttgaagattatatgaccgtcgtttgaatagtctccaaagtgtagaacactaatttcgtcggtctctgatggtaataatgtttggtcggagtcggaggtctctagggtttgctgtttaagttctctgactcgttgaactactttggcgagcagtgtggctttatcggtctgaaaatagaaacatgaaattacaatgaaaagtttggatcaagaagttgaaatttgatgtttgtatcaaatcaaatcaactgaaaaagcttgagaactttcccaaaaagtgatatactatcccaacgagcttcacaaaaaggccatgaagcttttcgtttttctcatctgatcactactcgccagttttgaatattcaaatcaaaatatatatcaatctttagaattataaatgtagaaaattagggatcatctttgataaatatgtgcttgttaataagtaagaatagtaagacaaaaaagactcaattgaaaccaaatgattataaaatgttatcatgaaaaagtacagtattcatgagctaacaccaaatcgaatgaaacatgagaaaattttaaagatgtaaactctgggttagagaagatgcaaaaccctaattatat

SEQ ID NO: 8405 - DNA, 909 bp, Arabidopsis thaliana
tgagttgagaacacttttatagttgtcaaaatccttttttcgtttgtcaacctctttggcgccatcattttctaccacttcacaatacttgtccccaaaatctgccaatctccaacttttaatctttctttataataaaaaaacaaaatacacgactaaggaccttatatatgtaccaactttctaaaaaaatttgtttaacccgttcatttaagagatcatattcgttgcattgatgttaactttgtaaagtttttatttctaaaaatgacatccagtcagagagtttattttttaattttagtatgtggttgacaaaaaaaatacaatatttctaatcaagtggttcaatcaaattgttttgtcatgatattatttttagaaaactaaaatattgtaacatgcaattttagcatgaagactttaatgttcatccgattcgaataaaattttatttcttataaatagagagtttaacaagaaaacaaatttctctaacatattattttttgatcaagatcattctctaaaatatccattattagtcaccacacaaatatatgaaagtgtgtatgaaaacttgaaacttttcccacgtgaccaagtggcaaaactcctgctacgagttccaatctaaccttaaaagagttatactgttcaaatcagaagaaacataatgaaaggagttacctaacaagaaaaatgagagtttctcaaagttagaggctatgagtgaatgaagatcttggccggcccaaacagggcagacaaagatggagataatgacgcaacttagtcctcctatgatcactgtggaaattctcttatgggtcagctttacaacctgctcttctctgaaccccgacactgatatcaacgcaaaggtgagtatgaatatcagcagactgt

SEQ ID NO: 8406 - DNA, 712 bp, Arabidopsis thaliana
ttgtgaagccccaaaaaagcaaaaataactaatctcgtgatgtatacactagataaggtagacgaatgcaataaaatttattttatatctaccaacaaacttgtagctactagctacttttgtgatcaaacacttgaagaaagtcattcccaaatatcgtataataaataggtaatgaaaatttatggattaaaaactcaaatttctgagtaacaacaaagatattgaacaagtaaaaaatcctttataaattaaaaaaaaaaacaaacagatcgtatgctctcacaactcaatcaaaaatcatctcaaataggaaattaaatttgaaaaagagaaaagaaattaagaagcatcatcatcatcatcatcatcatcataattcataaaatatagtaatgataaattaagaagaacactatggttttcttttgcccacgtaaacctgtaatactccatcagatcctccagccactagggtacactggtccacacctgattgcctccaacagacgctactcacgaaccgcttatccgaaccagaattcataccaactggttcaaacccatctacccaaaccggcttcccccatctcctatcgtacacaaacaccctgttgttttccgatccacaaccaaacaacgcgccgtttctccacacagataaccccacgaagttccgattattcacatgcccttcgtacgtgcgaatcac

SEQ ID NO: 8407 - DNA, 709 bp, Arabidopsis thaliana
taacggccgccagtgtgctctaaagggcagcgactgaaatcgcctttagaaatttgcaggcgttgagcatcgagaaggtgcagtgatcggttgccaccacgtcaatcgcaccatcgctgatgccacaccacagtttgtcctgctcgcgtacgttacgcagcggtgggctaagaatgaacttcatgccatcttctgtatcgtaactgcgttcgtccaacaggagatattgtgggcaggtttcaacccagactggctggtgattcgcacgggcaagacgcagataatccagacctaagccgttagacaggtgcacgatatagagcggggcgttaccggcaatttgtgccaggttaatcatgcgggcgatggcttccgcttcgcattccagagggcgactcaaggcatgatagcgcggcgcggttaaccctgcggcgataaattccgcccgcttgctggcgatacgcgatcattttccgggtgcacggtggtcagcgcgccggattcatgcaagcggcgtaatgcctgcaaaacctcgtcatcgttgagtttgtattgataggttaaatagagtttaaaactgctcagtccttcctcgactatcatcgggatttcgtcgaggattgcgtgattaatgtgctggatccaccgtgaaagctgtaatcgatgacagctttatgggcggcataaccacgataaacatccagttgat

SEQ ID NO: 8408 - DNA, 1319 bp, Arabidopsis thaliana
gttgtagaagttatttgtagaagctcctatatccaaaaagcaaatcaattttgtttgtactctgacattttctttaatttgtctcttatggaaggcattcacagggttcatgaatgggaaggcacctcaaacgatattaacagaccataatatgtgtctcaaagaagccatagctggagagatgccagccactaagcatgcactctgcatatggatggttgttggaaagtttccatcctggtttaatgccggtcttggggagcggtacaacgactggaaagctgaattttatcgcctctaccatctggaatccgttgaggagtttgagttgggttggagagacatggtgaactcttttggactgcacacaaacagacacatcaacaacttgtatgcctcacgttccttgtggtctttaccatacctgagaagccattttctagctggaatgactttgactggccgatccaaagccgttaacgcctttattcagaggttcttgagcgcacaaacccggctagctcactttgtagaacaagtatgttctcttctccttctgacagtgtttattcattgctagtgaaatgagttatttcaagctcttaggccttctatgcagtaattgttcaagcatttattttatagggtttatgcattttaatctcatgaaatggtactgtacgtgtgttgagtttgctatttttgcttatttgagttatgggtgaatatgcaggtggctgttgttgtggattttaaagaccaagctacagaacagcaaacaatgcagcagaatctccaaaacatcagcctaaaaactggcgcccccatggaatctcacgcagcctcggtgctcactccttttgcattctccaagctccaagaacagcttgtgcttgctgctcactacgcatcgttccagatggatgaggggtatctcgtgaggcaccacacaaaactcgatggaggaagaaaagtgtattgggttcctcaagaaggcatcataagctgcagttgccaactgtttgagttctctgggtttctctgcaggcacgcactccgtgttctctccacaggaaactgttttcaggtccctgataggtatcttccacttaggtggcgcaggatcagcacgtcgtttagcaagacgttcagaagtaacgctgaggatcatggagagagagttcagcttctgcagaatctggtttcgactctggtctcagaatcggctaaatcgaaggagaggctagatattgcaactgagcaaacctccatcctcttatcccgtatcagagagcagcctgtctcctcacttgctatca

SEQ ID NO: 8409 - DNA, 549 bp, Arabidopsis thaliana
catgataccagtttcaatttctaaacattatctcataatatttgggcctcaggagcccattatagcccataaaacgcataacggctgaatagagtcgtactgtacttgaaattgaaaggcatctactagtagactctagagttttctggattctgttttccaatcttttcatcgttttcgtgtgaagtttaaagaagtttgggacccgtaaattctagaagctctggagatttcttgttcaccactataaatacatcatccgagtcaccagctttgctcagaagtagaaatcgaactcgccggaaaatcgtaattagctatctcagcattccaaacatctctttcgctttcgaaatcaaatcgagaatgtcgcttattccaagcttcttcggcaacaatcaggcgaagcaacagcatcttcgacccgttctcactcgacgtttgggatccattcaaggaactgcaattcccgtcgtcgctctccggagaaacatcggcgataacgaacgcacgtgtggactggaaagagacggcggaggcgcacgtgtt

SEQ ID NO: 8410 - DNA, 797 bp, Arabidopsis thaliana
  unsure (1)..(797): unsure at all n locations
tgaggaccaattctcgggtgaaatcagacagcctagatcacctgcgatgactgagtcgaaaaatggttcattaatgaaagacattccccttgatcaagttgcagacacaacgtcctatggaagaagccggagaactagtcgtggttcgagtgaccaaatgcttgaattatgggaagaggctgctgaaccagaatccagcataaagtttctgatcaacaataaaaactcaaagaagcctttgattccccgtcttcatcgcagaagcaggaatccctctgttgaatcacagtctgagaaaatggttggagttgttgacaaactagagttatctagaagcactgaggacaatgcaaagattctggagagacttttgtctgattctcgaagattggcaagccttagaatcagcctaagagatctgaaaagcaagctggagataaacgagaagccaggcaagttcactaaccctgattttgctagagtgaggaaacagatgaaagaaatggaagaagccatctttcagcttgcaaacacaaatgagattctttcgaacgaaattgaggagaccggagatgtcagagatatctatagaaaagtggttatggagaagtcaaggattgggtctgagaagatagagcagatgcagcaagaaatgcagaacattgagcgaacagtgctgaagcttgaagagggagcaaccaagagtanaggaaggagaaagttctctgagagtaggacagttatactcttgagagacattatccataaaggtggcataaggacagcgagaaagaaga

SEQ ID NO: 8411 - DNA, 487 bp, Arabidopsis thaliana
atttcgccatgatagcgatcaaagcgttttccgggaaccatctcatgcatctccaccatttgccataacgtgtaaagtgttattatccatgatagtatcaggactgctatgcctggtcccctaacatatataacaagactttgtaatatcacgaatattactaatcaaatcaaaagtaaatttatgtagtaagaaattaaaaaactacatatgtattcaaattacatctttttgtatgttcaaaatttgcaaagatttgatgaaaactaaaaataatatatatcttcttacttctgtgaacaaaacttaacaaataaatgcaaaagcaaacaagttaaaagataatgtgttgaaaacaatcaaaattgtgtaccatccgagttgggccatgaagaaagggagaccaaggacgccagctccaaccatggcagtcacgttgtgaaacgtggagtaccaccatttcgcgtttctcgatgaagttatcgga

SEQ ID NO: 8412 - DNA, 558 bp, Arabidopsis thaliana
cctaaaaaaaaaatatatgttatagacctaattcgatcatgattttttttttttttttgacaaggttatgcaattgctaattaaattaaagttggaaactcatgaaaccttgtcacctaataattgatttgaggcaaagaaaagttcaataagaattgcgaagaacatagaggagttaccttggttgcgaagtcaacttgattacaagtagcgttataggagttctccaaaagatctttaaaggaaggtttgaaggataaagatttgtcaatccatacaccataagccgtagataagtgcaagtcacttctctccattccatcatttaaggcaacagatacggttttcgctaagactgcgttgaggtaatccgatgagggtaacatgatgaatgataagatttgttctttggtgacgcagttggaaccagcggcaatcaggcagacaaaacgttgattgacattggtgagaagacaaggttggagccgttggaacggtagggatgacatgctttgctagtaataccatgacgtcggtttgattcccattgattttcca

SEQ ID NO: 8413 - DNA, 1185 bp, Arabidopsis thaliana
ctcaacaactcaccatatatggtgttcacaaattcttcattcccaatgctcttttcctactcaacatcaaaacaatcaaataccttaattcctttttccagtgtatccaaatacattatttgaaacgtgtaacaatatatatacattatatgtacctctgatatgttgtagctgatgtgaggcacgtaaggccctagaacccaaaagtttctattaaattggagttggggggactggagggaaaggtcatctctccgacagcagatatctatgatggcgagaatgtctagactagttgttgacacttcaatggcatcaatgcgttcaagagaagacacttgcaagagctttaattttttgttctcaatcttcaaaggaaccctactttttttgaagcagcagatgcctagtacaagcacctcaagacaagggcaagatgcgagtaccctgttaaagactccaatctcgggagcgacgattgataaaagtttgagggtccggagattcgagcagtttctcaagggatgtgagctttcgagaaagtatgaatgtagcgagagagacataagacttggatgggacaaggagtctggggaaaagttaaaagttttgaactttcgatcccaagtaccataatggtatctaagtgtgagaactttcgtgcgtttcacgcaactcagtaatcgaatccaagaattgagcattccatttccaccttgatatgggacatggatgatcacgcagctctctagatgtccacgatgattgtttataaccttttacaaaccaaaaagtgatttatttaagatatgaataagcagatacaaactaataagagaaaagaaattgactgataagaagggacctgagtaatcaatgtagcaactggattcgaaccatcgagcgtgttgttggaattgataatattcttccgcatgtcgaagacgagatgagacatttgattccacacatgttcccatcgcttcgacacaacactcgtccttatggcttcttctgtggaaagtctcgataatattatgagcaatacatcgtcagggagtttgctgatccaatcaacatttttgacctgatcagatgataccattaggcaaacaaataggttaatctacgccacagtataagagttacaagtagacatgcattatataacagagaagtgaacag

SEQ ID NO: 8414 - DNA, 828 bp, Arabidopsis thaliana columbia
gttctctacttggagccttgactttaactaaggtaaggttaaatctttgcttcgtgcaacatgtctataccttttcgttcattttcaaacttgattatgtcattgcttacacggtgatggtttctatcttttttgttttgaaatggttagatgaatcttccatccacattgtttccctcgattgatcttgcatacattgaggataaatactctgacatatcaagacaaagactatttggttcttggtcttcgacaaaaggcctcaaactcaagaatgacatccctgaccctccatataactataatgacactaaggttgtgattctcttgttctcttcttatttacctttcaatgttttaatataaaaaggttgatgatagaacgttcgagctattgcagatatgggtttcgactaacccccgtggtgctgagagggtaccaccagatatagtcacgcctgaatcagatttttacctccgtcgactgtggggcgaccctaatgaggttcataaatttgaatctacttgcttttatttgagaatggcttcaagatcatggcacattttgttggtatggcatgcaggatttaacagtcaagcagcggtatctagtaacatttacggttggctatgatcagaggaaaaatatagacactgtgttgaagaaggtatcctgccttgcctcccatacatattcttcttctttccttccttttctcattccttgactttacatttctcagttctcagataacttctctataatgctgtttcactacgatggccgggcaagcgaatgggaagagtttgaatggtccaagcgagcca

SEQ ID NO: 8415 - DNA, 611 bp, Arabidopsis thaliana
atctcagcggcgtaaatacgcagctcgaaaatctgaatcccctgttgcagatccaccaggaagacttccggtgccgggttgtcgatcaccagcgagcagcgacgcgctgcggtgagcaggatttccgtcacttcttcgctattggcatcggcaggggccggtatcgtcaacaccacgcgcgtgaccgagtcagagagcgaccagttgataaactgctcggtaataaacgccttgttcggcacgattatctctttacggtcccagtcgctgatggtggtggcgcgggtgttaattttcgtcacgctaccggtgagatcgcgaattgtcaccgtatcgccaatgcgaatcggtttttcgaacaggataatcagaccagagataaagttggcgaaaatttcctgcaaaccaaaaccgagaccaacaccgagcgcggcaaccagccactgcaatctcgaccactcaataccaatcattgagaagccgaccagcccgccaatcagcatcagcagatatttggtgatggtggtgatggcgtaacccgtacccggcgttaaatccaggtgctgcaaaatcgccagttccagcagcgcgggcaagttgcgcacctttag

SEQ ID NO: 8416 - DNA, 645 bp, Arabidopsis thaliana
ttgctagacagaatggaggtgatttctattgctgggtatatcactgatgaaaaagttcatatcgcaagagactatttggaaaaaactgcacgtggagattgtggtgtcaagcctgaacaggtctcactttcatcctattctccaattgtctcttcttttaactctcggtaaatgaaaatgagtgagtgattatcaatgaatcacatacttctaagatttcgtcaatttgttcgtactatgcaggttgaggtgagtgatgcagcgcttctttccttgatagaaaattactgcagagaagcaggtgttaggaatctccagaaacagatcgagaagatttaccgtaaggtaagttttgctacaagactccgaattgattcctcaagccctcaatgtcgaacaccatttacttttctgttgtagattgcacttaaattagtgcgtgaaggagcagtccccgaagagcctgcagttgcaagtgatcctgaagaagctgaaatcgtggctgatgttggcgaatccatagagaatcatactgtcgaagaaaacactgtgtcctctgctgaagaaccaaaggaagaggcccataccgagaagatagctattgaaacggttatgattgatgagtcacaccttgcggattatgta

SEQ ID NO: 8417 - DNA, 679 bp, Arabidopsis thaliana
ggaagtggagtttattattattacgttaatggaagatatgaaggagattggatcaatggaaggtacgatggttatggaatcgagtgttggtctaaaggaagtaaatataaaggacagtataagcaaggacttagacatggttttggagtttactggttttacaccggagattcttactctggtgaatggtttaacggtcaaagccatggctttggagttcaaacttgtgctgatggaagctcttttgtcggagaattcaaatttggtgtcaaacatggacttggttcttaccatttcaggtaataacaaacaaaagctgttatttctctgttttatttctgagttctgttattatgaaatttttgttgttgtaggaatggagataagtatgcaggagagtattttggagacaagattcatggatttggtgtttaccatttcgctaatggtcactattacgaaggagcttggcatgaaggtcgtaaacaaggctatggcacgtatagatttagaaccggtgatatcaaatccggtgaatgggatgatggtaatctcgttaaccatcttcctttagactctgacccggttcgtagggcggttcaggtattttacatacataatgaaactttcaattagagaaattaaacattgtttggatttatgattacttaatggttta

SEQ ID NO: 8418 - DNA, 808 bp, Arabidopsis thaliana
ttcttgtttagtgtgacactaaaaaaggtggcaaaacaataaacaaatgtacaatatacactcaacaaaaagaaattttggatataaacaaatttaatatttggataaagcgcgggaaaatctcctaaaatagttaaaaaaaaggttaaaccggcccggttcatagtcaaaaagtatgctcctcttgaaacacgcaacgcccacgtcttcctatctccgagactccgacagcaaggttacttaacagttaatcaaactagattcgctttcttccatcactaatcttctgactttttctatttctgccccaaatctttttcaaattcatataaataaccaaacacttgttcttcttcattcccccttcgtcttcctcctcctaaatcaccggcgataatggaatgctctgcaactcctcccaagctttatccaaccgtcgacacttcaaccaccgttgctcctctccctaagtcctcttcctcctcctcttctactaataataataatctctatccttcaatcaatgtcaatgatcttgtcaacaatatcttccccgatcccaccgcctctgactcagcttcagcgcctcctctcgcgacggaggaagtgattctcacaatccacggcgcgatggtccacctcattgacaaatcctacagcgtagagctcgcttgcggcgatctcgagattctccgtcttgttcaaggagatatcaccgtcgcggttttcgctcgcgtcggtgacgagatccaatggccgttgactaaagacgaacccgccgttaaagtcgatgagtctcattacttct

SEQ ID NO: 8419 - DNA, 508 bp, Arabidopsis thaliana columbia
tcaaataagatataaccaaatcctaccaatacaccccatgtgaaatcactgcaaagagaatattctctttttaattaaataataagtaatttaattaatgactcgtaccctaaatagaataatagagaataaaatgaatattcataccaatatcctaaaaagcaacgaaaaaaaactcctttttcttttcttttttggttgtaatgtcaaattcagtaaacacaacaaattaaaaatatgattttattttttaccaataaagaaggtgaaagcttttagaccactaaaaacaaagttacctccactttcttctcttccacaatgggtttatcctcctctgctttcttctccggcggcggaggcggaggaggaatcggagacagaagctgaacttgacggtgggtcttcctctgaactctagctaatactttcaatggatcagctttctcacctttcaccaccactttccccgttttacaatcagtcatcacgtatgatggaaggaata

SEQ ID NO: 8420 - DNA, 641 bp, Arabidopsis thaliana
gtatgtgaattccttagtgtggtcagtcaaaaccgcaccaaagatcatgctgtttctctggagagctctttatggaggactgtccactggcaaacaactccgagaaaggaacattgttgtggatagatgcttgcatcaggagtggagagtcagagtctatcttgcacctgttttttatgtgtcattttgcccaataggtgtggaaacaggcccctttctctagatattctcttttgtgtttgctccagcaagagtctgttttggtcctttggcgccatggatctgctggaatttgtgaaaagctaggaatcaaaaagtctttaatgatattgttctctcttatcagaaaagagtggggcaatgctcagcccatacctcaccacaagacaagcaaccttctgtgcctttggtagcgagcaggagtctcctcccaaaccaggattggcgtagtgtctcttgtagaacggatgcggcttggagagaggacatcaaagtggcgggccttggcgggagtattaagggaccaggggcaggagggacctcaacgtgttctgcaatttgcgagaacgtttcatcaactctcatggctgaaagtttagcctgtagaactgcaattctagatgtagtcagcttaggagtgg

SEQ ID NO: 8421 - DNA, 539 bp, Arabidopsis thaliana
gattagttattattgataaattataaactttaataaaaataattgaatattattggtttaaagttatagaaaatagtaaaacacaaaataatacatttcaaatcaactttcatatgtttaccttaatatgtgtgtttttcctaaacaattatataaaacagaacagatgaagtatgatatagacctactaaaacattcaacagcaataaagaggtttgattatgattacggttaagaaaagcaatagacatacttatagaatccagagtcataagtattcaaggaaggtggaatgaaggtttatattacaaaaagattgtagactcgcattccaacactaagcagaaacatgagatgtattgagtgggcagacacattttttatatatatccatggcatactgacccctaaacgcgttgacgtgtttctcagtaattcagccattttctcggggagtttatctcttgcatggatctcaaggaacttcatagcaatcagggcacaatcaccactgcgtaaattcttgtatatgccatcta

SEQ ID NO: 8422 - DNA, 464 bp, Arabidopsis thaliana columbia
ttcatcaaatgctgaagcttaaagcctctcagctaaagcctcggacctacagagtttgtgagagcactggcttctcttatgcgttgactagtttttgctctgcactggcttctcctgtatcagcctcaacagatgacatagtaggcattgtcatgattttgacaggtttcccgagtttggttttatcgtccaatgctgcgagttgaagggcttttgcacagaccgggaaacactgatcatcccatgactccagaattacgcctgaaccaatgcaagtggttccctcgtaaaacgctgcaaactgtccagcagctagaccttgatcgtcttcgtctaggtgcacaactgcaacatgctcgtctccttccatttcaaaactgcagctgtagaagccaggcccatgtcggacctataaaaggcgtctcaacttatcagtgccaagtaaactagcatgtgtagaaagt

SEQ ID NO: 8423 - DNA, 632 bp, Arabidopsis thaliana columbia
tgctagtaagaactgaactcccttatgtagggagaggacatccatcggggttgtctacttgatttgattgtcagataatcactagctccctctatttagtcttccttgcttcttattgactgtagtttgaatctcattttttggcggttggtgtatatagtatgtacatttttgaatcccaccaagtactgtaccaaaagaaaaagaacatgaaattaattttcttactttggcattaaaaattctaggcacacctttggttctacacatgttgcggttgtacacctatttgaaggtggtcaaggtagcactctagctgctggacagtttgcagcattttacaagggaaccacttgcaatggttcgggcgttattctagagtcatgggacgattaatgttttttgatctttgcaaaagtttttgtggacaaagatccgacattaaaaagatgataggtaacttgagtagtatagaagaaatgtaggtctctcaactcattgccaattgatttttaattgaaagtccataaacccgaatttaacattgtatcagagtccgaacacaccctaccctgctaatctggcccagaaaagagacctgatcaccgtcactaattgattgccaaaataaa

SEQ ID NO: 8424 - DNA, 522 bp, Arabidopsis thaliana
tactcttaggcaattcactgagtctgagaccttggagcttgaaaacactagttatggtttaagtttgcctttgcctccttcgcctcctcctacattgcctccttcacctccaccacctcctccatttagcccggatttgagaaatcctgagactagtcatgacttggctgatgaggaggaagagggtgaaaatgatggtggtaatgatggaagtggtgcagctcctccgcctccattgccgaattcttggaacatttggaacccttttgagtcacttgagctgcatagtcatccaaatggtgacaatgtagttacacaagttgaactgaagaagaaacaacaaattcagcaagctgaagaggaagattgggcggagacgaagtctcaatttgaggaagaagatgagcaacaagaagcaggaggtacttgccttgatttgagtgttcacaaatagaggctgttagtggctgtaacatgaagaagcacggtcgtctgaagtttaagcctggagaagttatggac

SEQ ID NO: 8425 - DNA, 983 bp, Arabidopsis thaliana
gttctactgcaaagtaaacgatgaagcattgggccaaataatcaggatcattgaggagtacagtcttgcctcaggcagagagttaattaccttaagtcgagtatctattttgggaaacacatttcagaggagagacgctgcttggtgaaaaggaagctaggtattgaacgagaaggcggggaaggagtctatttggggctaccagaatcgttccaaggctccaaggttgccacattgagttatttaaaagatagattggggaagaaggtcttggggtggcaatcaaacttcctctctcctggtgggaaggagatactcctcaaggcagtggctatggcgcttccaacctacacaatgtcatgtttcaagattccaaaaacgatctgccaacaaatcgaatcagtaatggctgaattttggtggaagaataaaaaggaaggcagaggtttgcactggaaagcatggtgccatcttagcagaccaaaagctgtggggggacttggatttaaagaaattgaagcttttaatatagccctcttgggaaaacagctttggagaatgatcacagaaaaagactccctaatggcaaaggtcttcaaaagcagatatttcagtaaatcggatccgctcaatgctccattagggtctcgaccatcgtttgcttggaagagtatttatgaggcacaagttctcatcaaacaaggaattcgggcagtgattgggaatggagaaactattaatgtgtggacagatccttggattggtgcgaaaccggcgaaggctgcccaagcggtgaagagatcacacttagtaagtcagtatgctgccaattccattcacgtggtcaaagatctgttattgccggatggtcgagattggaactggaatttggtgtctctgttattcccgataatactcaggagaacattttggctctcagaccaggtggaaaagaaacaagggacaggtttacttgggagtat

SEQ ID NO: 8426 - DNA, 854 bp, Arabidopsis thaliana
gtcttcatctcctcgatattttttggaatctgaggacaatgcagaccttgaatctaagaaaatgagtcacaacactttgatggctcttataaagtacttgctgaagaggaggccggctgttatcgagaaggccacttctgaaggaacagaagaggtcatttcggatgctgttggtaaaacttacggggcaaatgattcatctaagtctaagaagtccagcaaggtgcagatgatttatcttccgcgatacctaattgatgactagttcttggatattaacactttataagcttttgggagctactgactgactaattccttggaagttgatgcatggataatataagcagcttcccttgatttgtacgtttgatagtaatttgttggggacttaacatctttttttctgcagggacgtggtatgatccctcttaattcaggtgcaagagagatggcagcaatccttgatacagctcttctccaagcacttctacacactggccagtctggagttgctatagagttattaaagggtgtcaactacagtgacgttaagatttgtgaggagattctcatgaaaagtaacaattattctgcactattagaactgttcaagagcaattcgatgcaccatgaagcccttaagcttcttaaccagctggcggatgagtctaaaacataccagtcacaaactgatgttacacagatatttagtcctgagttgatcatcgaatatctcaaggcaggttttctcggtgctaacctttcgtctttgtctatctttagattctaaatggttatagagaactacaaatttgttagcacctttgattttggtactgactgaaaataat

SEQ ID NO: 8427 - DNA, 478 bp, Arabidopsis thaliana
aaagctatttttaggtagtaatcccaaagcggtgatctatttcacaaattaataattaaggggtaaaaaccgacacttaaagtgatccagattacggtagaaatcctcaagcagcatatgatctcgggtattcggtcgatgcaggggataatcgtcggtcgaaaaacattcgaaaccacatatattctgtgtgtttaaagcaaatcattggcagcttgaaaaagaaggttcacatgtcaaacaacattcgtatcgaggaagatctgttgggtaccagggaagttccagctgatgcctactatggatgtcacactctgagagcgattgaaaactactatatcagcaacaacataatcagtgatattcctgaatttgttcgcggtatggtaatggttacaaaagacgcagctatggcatgcgaagagctgcataccattcctgagagtgtagcgaatgcaatcattgccgcatgtgatga

SEQ ID NO: 8428 - DNA, 603 bp, Arabidopsis thaliana
  unsure (1)..(603): unsure at all n locations
caagaaaatcaaatttagaatgtggatttttgagttaacaaaaagttgtaacttattgattgagattttcgtaaaagccattcttcatgccaagtcaacaatggccattggctagtaccaatctttttacttttcgatagataaaaagcaaatggcttcgtgcttgtcctcttttttcttttcttcgattttcctaatcgtgtaatcttatgatattaataacagaagaatcataattaagcgcgttatattattccatctctttctccgattctcatatcttttaatcgtttgatctgtgaacctaacttttattcaatttcgctttcaccaaatccagagctaagatcttcagattcgtgggtcaaataatgtggtcaatgggtttgataaggcgtacggcaatgtccaatgccattagagcttcttcgcaaaggacatggcttggtcacggtggattaagaagctgcgtcaccgtcaaaacaccgtcggaggatgaagaggagaagaagaaagagataactatagcggaacgtnagaagctaatgaggcttgtgaatgttgaagacatgaagaagaagcttgttggtgtggctgatagag

SEQ ID NO: 8429 - DNA, 532 bp, Arabidopsis thaliana
cgccagtgtccagtgtgctctaaaagttgtgttgccgttttcttgcgcacggcgacagacgccattccgccgccaatggcttggactacaagcgaaatgatgtcgcaagttacgaagatgatgagatacactcgcgggctgaggattgaagagtcgcggccaaggagttcgatgaagcggccaaggaggacatagacgcctgccgtgtaaaaggtgggcgcttcggatttgttagcttctcccaagttcgaagatctgtaaagtatatagtggagggcttaccgatgatcagggttgtgatttgcatgagaaaagcattggtgttgtatgggcattctgcggaccaggttcgcccggcccatcctatgacttcggctgtggtggtatggtatgagaagacggtataaaatagcgaagggtaaagaagtacttactgagactcccacagcgaatacagcgcaccaccaggtccgtttccaggcaaactgaactgtctggccaccattgtaaggccgaagaggcaagaagacga

SEQ ID NO: 8430 - DNA, 522 bp, Arabidopsis thaliana
atcccctgcctaatattgcgaggttatagtatttatttagataatcaacgaaagtttagtatttatttggaaaatcgatataagtttcatatttattttgtttcatcgaagatttaaatcaacgttttcaataagttgaagatttttgtgacatttttcccaaaatcaactgtatttaaatctttcaaatgatgtttattatgtgaaagcttatgattaatccaacaaattagttaaaatttggtatctaattcatgttaagaatttatcagtgatttcttaccgcttaattggctaactttagctaaagtggcaaaaggactgatgtatataagttgataaaaaaatggatgtatatatacataacataatataaatttcaaacttcgaaacatttttttgaaaagttcatatgataagtggatctaacggttctggaccttttgagacatggccaaaacgttgctacaaagcttcttcataagatcatcaagagacgccgtcggcgaatcaacatcagga

SEQ ID NO: 8431 - DNA, 600 bp, Arabidopsis thaliana columbia
ctcatcgatcgtagtagtaaagtgaggttcttgcttatcagatctctcaatcgtctcgtcgtcgtcttcgtttagagaagactccgattcgtggcagaggaagagagcgagactgtctttaggctcacccatttaacggcggcgatgatgatgaagacgacggcggcggcggagatagaagtgttcttcttcttctgcttctgcttcggtggtgtgtccgtacacatcaaaaggggaattataaagaatttgtgagaagagtgttttttttttaatttatgagatgagaggcaaagttatcgcagtgaatataggggaagaataagaagggaagctaaatcatcgtatttgatttttcttccattactcgatttgggattttaggagcaagtgacgaaaaaacaaagaaaaaagagagagagagtggagagagagagagagtctcccgcgtctggtgccgccaaaaataagtgggggagagagagggggcgttatttagcggttacatttaaattaaaaatctttattatttgattaattttaggtttaatttgtcactaatatttgagtatatgtataatatcatcactcttttttttg

SEQ ID NO: 8432 - DNA, 812 bp, Arabidopsis thaliana columbia
aggctttgctcgaggatgtatctacgagttttggttctctttctattaggaatggctatgggaaaagaaatgcttggtagtgttttgtttatcttgttttatgtttttgtatgttttcctatcaaactatctatggtatttttatgatattttatggtatttatggttttcaatttacttaattataaaattcgattcacttttcatgagattacaaattttctaaaccttcttttttattttatttattaagttgtcaaaaataagttttgagttttaacttgggtcattgagtcttcaaaatggagtcgttttgaaccatttgttcccggaaaaatacatgatgcccgctaacttgtttaacactcccaatacgaatgtcggctaaaggccccaaatttatctaagtatgtgctgatcagcctacaatcacaccaccgtggcaacggctccttgcggtaattactggcataacctcccccgcattttctccatagaaaccctctcttctctggtggataatttcaattacttgaggagcagataatatatttctagaagatgctaaaagatatacaaaaaagaaataaaaaagaagaaatacaaataagtcaagttagataagtttgtaaattttgttttaataatagaattaagggtagctaatcttattatataaagtacagttttgaaagttactaactcacgagatcatgacacgtgtcaggtctatcattgagatgttgatatatgtcaaaaaaaagtttctttaaaaaaaaaaaataaacatatttacatatactaatttatat

SEQ ID NO: 8433 - DNA, 1615 bp, Arabidopsis thaliana
acaccatttatttgattaattattcttaattatatttgttgaaaattgcttaggattatttagattaaaacatgaaatttgagactcaatgtgacgtgttgtggaataattaaagcattagaagttttttgtttgacatcaaattagtaaattttagattttataacagtttctataaaaagtaaaaagtactaaaatttttgagttattattacaggagatgatattcagaggaacagacacagttgcggtcttaatcgagtggatcctcgctaggatggtccttcatccagatatgcaatcaacggtacaaaacgagctggatcaagtagtcgggaaatcaagagccctagatgaatctgacttggcttcacttccatatctaacggctgtggtgaaagaagtattgaggcttcatcctccaggcccacttctatcatgggcccgtttggccataacagacacgatcgttgatggtcgtcttgttccggcagggaccacagcaatggtgaacatgtgggccgtatcgcatgatccacacgtgtgggttgatcctttggagtttaaacctgagaggttcgtggcaaaagaaggtgaggtggagttttcggttcttgggtcggatttgagacttgcacctttcgggtcgggtcgtcggatttgccccgggaagaatcttggttttactaccgttatgttttggacggcgatgatgttacatgagtttgaatggggaccgtccgatggtaacggcgttgacttatctgagaaactgaggctttcttgcgagatggctaatcctcttcctgctaaattgcgccgtaggttaaaaaaaagaagctcatatgagaattagagattttaattaagcagcttttcgttttattagaactaacattttgatacgtgatgtgtttttttttcttttctttatttgtgcgtgtgttgtgaacttgtgagtctgagaggagagtgatgtgttttactttttaggttgtaaatacaagaaaaagtaatttatatatttttagtttcaatttatatttacaccacattgtaatttagttaaaatctaaaatatcagaaatatttgattgttagcccacaaaattgtacgtttgatttttataaaataaattatgaattctatcacagatcaagactgcaacaggataaattaaaaaccaaaaaaaaaacgcaacaggatattaaactataaaatttagtttccaagattctggtgaacgatctttgcaagtctactatcactccggaaacgtttttttttattatatataataacaatcacttgtttaataagttgcatagaaacacgaatgtttggtttgttttaccaaacaattaacattacacggtttaaaaaagaaaaaaaaactttacttaagaaaaatattctcatatttttaatcgtcttctagtaatataatatagaaatactaacattacatttcgaaatttgattaataaatcccctctcgaattagtaaattaaaaaccaacattcttcatttctttgtgtccttttttatgacacattgaattctgtgtctttaaagtggcaaaaaataaccgacagtataaaggttgaaagggg

SEQ ID NO: 8434 - DNA, 1185 bp, Arabidopsis thaliana columbia
tctgcaataaatggctcagttaacaattttgactcagttagagatcctctctctcccgtatctattacagaacctgttaaactgagagactgtttaaagaagatttacataaatctaaactccacgtggcacgtatctatccgaatcagtattaatcccatcgaagaagaaaacaattcttcatacaaaaaaaactctcttctcaagtctctccttcttctccgtccttcccaattcttccgttcaaacaaatttctccaaacccaaaccctaatttcctccgtctgtgaaatcaagggttttctctgatctgggttttgatcagaaatcagatctaggtttaattttcgaaatcaaattatgaggaagagagaaagagagaacccttgttcgatttgtgggcattaccataagtacgaggaaggagaagtatgtggagtctgtggtcactgtatgcctgtttcttccgatacggtggcgccgcaacaagtccacgtcagtgcttttccgtcggagattctccctgagtttctttacctcggtagttacgacaacgcttctcgcgctgagcttcttaagactcaaggaatctctcgtgttcttaatgtgagtttctttgctttgattttgaattcatgaattgcttttgttttaaacattgatgatgacccttaagaaaaagataagatctttgaatctttgaatcggtttgtttagttagggttttgccttgtagatgaatctctcttatacttatacgttttgttgacttatggtttctgttaaagttcctgttatggtaatagagaggaatgtgttgtttactatttgttggtattgactctgtttttgttactctgtttcagacggttcctatgtgccagaatctctacaggaattcattcacttatcatggtcttgataatgaaaaagttttacagtttgatgatgctattaagttcttaggtatgttgattctatctcaagtttctagatttcatctttatgattttttcttgacggtcttgctttgtgtagactaatgtgagaaggacaaggcacgtgttcttgtgcattgcatgtctgggaaaagtaggtgagtacatttatcattctcttactctcatcctaaacttgcggctgctttcttatgattaccattaattatttagactaatagagtga

SEQ ID NO: 8435 - DNA, 527 bp, Arabidopsis thaliana
cttcagtttataattgagagtggcgtactaccacacctttataatttgctgacgcaaaatcacaagaaaagtataaaaaaagaagcttgttggactatctcgaatattactgctgggaataaacttcagatagaggtatgcggtttttttgttgctatctctaatatgtcaagaagacggctgttcatggaagatattcatttctgattctggaagaaaagtgaagaagttactcttttcttaactttttagtagagcgagctaattttagtactttcatattttccaatgacttctctgcctagaaacctaattataccctatttgctactgaaaatattgagattaattaaagtttcagaggctaaaagcaattttttaatcagtttatatatttgaaacaataggctgtggttggcgctggaataatcctccctcttgtgcacttgctccaaaacgcggagttcgatataaagaaggaagctgcttgggctattccaatgccacatcaggagggtccatgagca

SEQ ID NO: 8436 - DNA, 1826 bp, Arabidopsis thaliana
acgaagagttcttctactagcatttaagtctggatttcaagtttgggatgttgaagatacagagaatgttcatgttatagtttctgcacatgatggacaagcattctttatgcaaatgctactgaatccaataaactctggagttttagatgataggttttataagagccgtcctcttttggctgtgtgtggtgattattcaagtaacaagatcagttctgataaccccggaagtgaaaccgtagctactcctactaatgtctatgtctactcgttaaagtctcagtcttatgtgcatacgttgaaattccgggctaccatctattcggttaggtgctgttctcggattgttgctgtactacaagcagctcaggttcgtatgtcatattgtgtcacttttggtttttgtgatttttctgttctgaagctaacaatgtgtaacttaaaaatatgtatttgcagatagattgctttgatgctgcaacactggaaatggattacaggattgtaactaactccattgtgtgtggctccttgggtgttggatatggccctcttgctgttggtccacgatggattgcgtatagtggaagtcgtattgctacctcaagttctgcaatttttacttcagaaattgtctcactgtcaacatcatcacccagtgttgcacaatttgcaagagactcgagtaagcagcttgcttctgggatagcaaatcttggagacaaagggtacagatcattgactaaatactgctcagaggttttgcccaatccgtatattcctggtttgaaaggcattggagttggtaatgaaaaagtagcagatgcagagagcataggaatggtatacacaaaatcctcctcaatgtttttgctttcaagttgattttttccattggtatgtgccttaaacatattcatggtatgggcaggttattgtcaaagatatcacaaacaaaagcgtcataacgcagtttaaggcacacaagagtccgatttcagctttgtgctttgaccaaagcggcctgcttttggtgactgcttcgattcaggggcataatattaacgtctttagaataatgccaacaatctctacaagcagagctgtgaagacaacgacttttgcccatctgttcaggcttcagcgcggttttactaatgcggtaacagagcccttcacttacacatgttgaaaaatgtgatacttatttatttaccttaatgtggattttcaggtgatacaagacatatgtttcagcaaggatagcaatttgattgtggttggttcttcaagagggacaagtcatctttttgagattaatcctgagaaagagggggatgctccggttcctatgtctgcaatcagtaggataagaagcggaaacagcagcggatggattgggactgtgagcggtgcagcatctgcagcagctggaatggttgcaggctcggttccgggtacagtcacatccactttctgttactgcgatgaaaagagtaacaataactactatggttctgttgctgatatgtgctccaagacaaatcttctggtgtttgctccttctggatgtatgacacagtatgcgttacgggaacatcaggttggtgttggtcatgagactgctgcaatgacggggtttgattctgagtcaggtctagagacagaaggaaaattagcggtagatccaataagaaggtggtccatgatccaaaaccaatctagaagagagacgcatgaccccacagtgacatatatggaggtggacatcagtggattctaaagtaaagtgtttcagaggttgttagaaacaaagtgttgag

SEQ ID NO: 8437 - DNA, 533 bp, Arabidopsis thaliana
agaggatccccatgaataaagtaaaagaggatctcgagttgtcactcaattttgtctctttatgtgtgtacacacctgtagaacaaagagggaggcccaagcgagtgttgcaaagattaggaggatggagcctttgaggaattccttatcacttgatgagttcttagacgacgtcgtattagcatgtgaagagtcttgaatatgcatatatttggtccaaaatagctcaacgatgggtcctttgtaaattgtcattagcatcgctcccgccactgtcactaccgttccggctattttcgcctgacaccacagtttcttcaggtccaacatctccatcctattatcaaaattaatagaagaatttattaccatttaaaaccatttgtaacgtttagaaaacaataatcgtattttagttgaaagccacataatttagatttgcacatttatttacgtaccggaatagtacagccaagataaaggtcatggccggaagcatgttactcatggcgcatgagaacgttggggacgta

SEQ ID NO: 8438 - DNA, 520 bp, Arabidopsis thaliana columbia
aactctttgagtggtgaacatttggatatcatttgtcaatgaacttttcttttgtacatattaaatcgaatgcaaagagtacaatgagttatatcagcttacaaactctctagtgtagtactattaacctataaaagctttacactgtctacgggtactgtaagaaagtagttatttgctgagtaatacaactatacatccaagtagaagatttacagtatgactaaagagtatagcaacctgggaaggctatgatacagctgcaacttttttaacttttagcgttgtctaagcgtgattttgcacgatcaagtgtaatttctctgcgttgtaagccatgccacacttgtcttccactgagctttgctatctgtttgtgcaatgccttcaaatcgacaagaggaactgttgtaggtcgcccatgagcacactgtacacagacttaatgggttaatttgattaaagagatgaattcctttggtaggatttgatgtttcttacgcacctggaaacaaagtga

SEQ ID NO: 8439 - DNA, 118 bp, Arabidopsis thaliana columbia
ctagaggatccccctgccgccgcgtccgtggacggcggcgacctggggcgactggaccggggcggtcaaggccgcgaccgggcgcaagggcaaggggctgttcatgccgctgcgcaag

SEQ ID NO: 8440 - DNA, 354 bp, Arabidopsis thaliana columbia
taaatccgcctccggaaagcacgctcatgaatactagttaacagaacttgtattgccaaagttctgatatctccaaaagaaagaattatagaaaatcaagatccaaggaaacaatgcacaatcatatctcaaagttaaagaataatgattagaagtgtgtacccgatcggattaaagcatatgttaacaaacttagaaatgtgccccctgacaacagcagtaatcataatgaaccgttcaccggtgggttttccgatgagcagcttatcatcatcattaccaaaaggatctagcatcaactctctaataccgacaatgagaccatcgaaaatcatatcaatcgtctctttagta

SEQ ID NO: 8441 - DNA, 870 bp, Arabidopsis thaliana
attgctagaaagttataggattgattcagatagtggaatcagacaactttttcttttatgggcgattactcatttttgttctttggtcttctgattgtttagtttcttagcagatgatttagtcttctcttttgtgatccttttttgctttccttggaagtgtaggtaaggatttgtgtccatggcagctttgcaaacgcttcgtgaatggatcggtatccagcagttcccacctgctactcaatctaaattgctcgagatccttgggaagtataaagaagaggttcctttcttgtttctagcttcatctgctttctgtttgtttcttcttgtcttagagagatttaagaaagaaaaaaaactggtgtaggatgtgagctcgctaacggtccttgtaatggggaaaggtggtgttggaaagtcatcaactgtgaattcagttataggcgagaaagctgctgcagttagtactttccaggtgccaagtttaatgctcttctcatggcttgtctttatgactattggctatctttcttttaattttaatcatagaaagtgtgtgaatatacctctttatagtctgaaggactgaggcctaccttggtctctcgcacaagatcgggattatcattgaatatcatcgacactcctggtcttattgagggaggatatgtgaatgatcaagccatcaacattataaaaaggtatgatgaactgtttccaggtctaaggagttactctcctaatttggggctcatttgtggcatttgtattcatttggattcgtgaatgttgaatttgcacagatttctcctcgcatgactatagatgtagctctatacgtgaccgtttggatgtgtccgggtggat

SEQ ID NO: 8442 - DNA, 448 bp, Arabidopsis thaliana columbia
atattgtggcaactaaagattgttacaaggagacaaggattttcatggagaattttcttactaaactgggaatcactgtaagaaaatctcaattcataactttcattttgtgtcctttccagctccatcgattaacactttgttatatatatgtgtgtgggtgtgtgtgtgttaatgtctccaggtaacgtttattgactctgatgatattgcggggctccaaactcttgttaataaccatgaggtattttaagtgataattataagttcacttagtaactttaaagctggtaagcaatatatgaacttgtgatcttttgttgttcaggtttctgtgttctttaccgagtccccaacaaatccatttcttcgatgtgtagatattaagttagtttcaaaaatctgtcatagaagaggaactcttgtttgtatagacgctaccattgca

SEQ ID NO: 8443 - DNA, 671 bp, Arabidopsis thaliana
tgattgttgaagtaacctgctgttacactgttaccacctaccacaatctcccctctaggcattggtttatctgaaattctgtagccaccttcttcccaagaaacgagctgcaagatgaaatttgttactcatgattacaataaacttgcacattgtcaacatggtgtgttaaagattgtctgcaaaccttaacgtagccgcatggaagtggaggtccaacacgaccaacagcaggatcgtcccactcagaaaacgtagctccagcacacgtttcagtcaatccatatccttggccgatgggagacctaacagaaaataatgcacaatcataatcagaacaaactaatcccaagcattgtgaatttgcaaagaagaatacagataaacacaaaccaggcaccaaaatggtgtttgtctaagccaaaatgggacaagactcatatgaaaatatcagatgtgagactacattaccccatgcagatattgatgaagcgttgcgaatcaggagacagaggagctcctccaacgagcataaaacggatgtgtcctccaagcacagcgcgtattttcttgaagacaagagcatcccataacattttctccaaaccccaggcaccaaaccaacttccatccacagctgctaaccggcgcttgtatgcaagtcaaaaagg

SEQ ID NO: 8444 - DNA, 339 bp, Arabidopsis thaliana columbia
atttccaacgccatgtctgagatgatggcttgaagcttggttcctatcgctaatgtcaacttcaaaccaaacacaattagtcggttctttctttatattgctatttccgtggaagctagcacacgctacaaaggtagattcagttacttacaagtggaggaatcatggtgatcacagcagtaacataccaccctataccgcgaacaattagcttctaagctttgtatgttgaagaatattacaacacaagattataaaaagactaaccgtgaacatcaaagagcaaaaagagcattacaaaggcccatagctcgggactgcattaccagaatgattgtg

SEQ ID NO: 8445 - DNA, 945 bp, Arabidopsis thaliana
tgcgttctctcggtttctagtttgatccgtttggagaatacctatcaacgcgggtagagtattcgcttttactatcgcggatttcgcgtcttgattatttgcaagaactgagagaattgtcaaagcttcatcaaccatccggtggcgggtggaatcactgagcatcttaaccaatgcagttactataccggctctgactgctctacctttgtttccatgataaatgcagagattgaacaatgccgttgctgcatctttcttccctctcggggtcccgttctcgagcagatcaactaaggcaggtatcgcacctgacccgcctattatgatcttgttctcatcggctaacgacaggctaaaaagtgtcgctgctgcgttttctcttgcttccatggttccggctctaaggacttgaacaattgaggtgactgcaccagcaaacattatcagctctttgttgttttcatatatagagaggttgagaacacatgtgattgcgttttcctgcgttgcaacatcctctgaggttaaaagattcaccaaaacagggattgctcctgcttctgcaatcagaatgcgattatccgtacttctctttgacagagagcggatttcagaaaccgcattccttcgatcctctgttgaccggcttgagagtctctgaaccaaggcccggatcaccgacatatctccactgttttttgtcctgccgttaatgtaacctgcaggttgctcaatgttgtgttcagcgcaccaccgagagatgagacttctgagaacatagtttggtgtaagcgtaaagttttcgagtttctgctgagtcttaggacatgttagatcccacagtcgatccatctctgtatgtatgcctctcgtaagtctccattgtagagagcaatacaataacaagcaacatcagcaaatcattaaaagtctatgggtacg

SEQ ID NO: 8446 - DNA, 574 bp, Arabidopsis thaliana columbia
ttcttcagcacaccgctacatttgaaatctcccaacttttttcattctctctgttgctcaaactagtttccctcaacactcaaaggtacgtctttgatccttcttcttgtgtttcgcttcgttacttatgggttctttctgaaattcgacttcatcacaccatcatttctgtttatgacaattcgttcctcgtaatgttacttcaacctctacctgtttttctgcttcattcgcgcgaaaaatcgttgcttttgactcatgttcctctgtttcatcttactgttgtctgtcttaaaacctgaagtctccgaatttaggtcatcatcttgtatctctttcaaaaaccctagttttttggggttctgtgcagtgagcagccgtacagtttgcactgaagttaccatctttcatgatctttgaagtatctatatgaatcatagatagttcttttgtttgtctcagtgtagaaagaagcgtcagtgagtttgtaatggcgggtgaggagaagcagactcttactccaaaggagatgatacttcagaagtttggtgttaaacaatttacagaattgagg

SEQ ID NO: 8447 - DNA, 1184 bp, Arabidopsis thaliana
ttcatcaactgaaagacgaggtaaggaaaaaaaccgaagatttgaagaaaaaggatgaggagttaactaaagagagatcagaacgcaagtctgttgagaaggaagttggagactccttgaccaaaattaaaaaggttcaaactttatactgcagaatctccactttgaaaaccttcaccctataccttgtatagtcatacgttccctatcatctgtttctcaggagaaaacaaaagtggacgaagagcttgctaagctcgagaggtatcagacagcattgacccatctctctgaagaactggaaaaattgaagcacgcggatggcaatctccctgaggtatcaagttttatatcatttggatgtaaatgtgtgttttctataattttatgattattttaccggtatgttctaaactctaaatgttttttgtagggtacttcagctgtccaggttctatctggaagcatactgaatgaccaagccgctgcttacgtgtcagctgtagagtactttgaacgtgtggctcgttctattgccagcaattctcaagtcagcactaagcctactgatatggtgactgaaccttcctctggcattcctgctggtaatctaaaaagcaaacccaaaaacctaccaaattgtgatttttttttaccccagtctaaagtgacaaattaatctttggcgcactgagccttcaaccatgacgagagtcccttcttcaacacctttaataaaatctccggtggcaactacccagcagctacccaaagtagcgtcagacaacaaagagaagagattgatttcacagaaaccaagcactgagttccgtagaccaagtggtaggaggattgttcgtccccaacttgtcaaacctgaggaatctcccaaagttgatgttgatatgccagaagctgagggaactggtgatgaaggaaaacagcctgcagcccatgaaccagagagccaagtgactacatctgtacggcctgttcaaacacttgtccgtaaacgccaggctgattcgttggtttctgagccacaacaagatagtctgactcaaggggaaaccagttctgagattgcactcctgcatcgaagaaggcaaaaggatctgagtctcatcctgatacttcagaagtgaaaaccttgcaaaagagccagcgatagacgaattgatgga

SEQ ID NO: 8448 - DNA, 516 bp, Arabidopsis thaliana columbia
ggagatcttgaatctaaatagttgcgagagtttggtagagattccatcctctttttcgcatcttcataaactaaagaacttgtggatgagttactgcataaacctacaagtcattcctgctcacatgaacttggtatccctagaacgcgtcactatgacaggatgctcaagattcagaaaaattccagtaatttcaacgcacatcaattatctggatatagcacacaacacggagttcgaagttgtgcatgcatcaattgctttgtggtgtcgtctccactatctcaatatgagctacaatgaaaatttcatgggattaacgcacctccccatgtctttaacacaactcatcctaagatattccgatattgaaaggattcctgattgcatcaaagctcttcatcagctgttttcacttgatctaactggctgcagaagacttgcatcattgccagagctccctggttcgctccttgatctagaggcagaagattgtgaatcactggagaccgtatt

SEQ ID NO: 8449 - DNA, 615 bp, Arabidopsis thaliana columbia
tggtgaaatcagtgtttggtgggtctgactttgttcaggctaaagaagctcctaaaatctttggtcgacagctgagtcttggtggagcaaaacctcggtctatgagtattaatttctccccgaagaccgaggatgacacgggtttctcattggaatcgtatgaggtgcaagcgatcggaggctctaatcaagtgtatggttatgagcaagggaaagatgagacattgtatctaactgacgagcaaaagccgaggaagagagggagaaaaccagcaaatggaagagaagaggctctaaaccatgtggaagcggaacggcagaggagggagaagctgaaccagagattctacgctttgagagcggtggtgcctaacatctccaagatggacaaggcttcgctccttgcagacgcaatcacttacatcacggatatgcagaagaaaatcagggtgtatgaaacagagaagcagataatgaagaggagggagagtaatcagataactccagcagaggttgattatcaacagaggcatgatgatgcagttgtaaggctaagctgtcagttggaactcatccagtttcaaggtgatacaacgttgagggagaatgaagtta

SEQ ID NO: 8450 - DNA, 596 bp, Arabidopsis thaliana
atctcatcatcactttgtcactaaatcagaatgaatccatccgagcagaatcacttgtccggtaaattcttcaattatctgtttaaatcaagatcgatatccaattagataagttaataatcttttcttgcctcagtggaaaaaccttcacagacttcttcggggccgtacacaagtccaccaccgattggttatccgaccagagatgcgatggttggtgatcctccagccgccgcagtggagacaaagtccaagggcgatggtttttggaaaggatggtatgtttttctttcattcactctcttcatgtgattatagatcatgatggttctaattatccgttttgcaagacattcatacgacgctcttattttatttttaatgatctatcagtatagggtttcaatttcttgtgtgtttctctgttttcctgaattattatggagtatctctaattcgagtagtcaaactattggttttgaactgcaaatgttttggcaaaatttgggtcaacattttctagtcaagatttgtttttttcccaacattttagttgataactagtgtttaatttcttgcaattttgttgtttgttt

SEQ ID NO: 8451 - DNA, 471 bp, Arabidopsis thaliana
ataaccaaaagtatggaattttccaagaattaaagcaacacttccaacaactcacttgagacaatttaagggctgtccgtaaaactttggggctttaaattccaggaaattctccttgttgaaggcctccacttctttaataaacgcctcttgatcctgtggtgcccctgcttcatcaacttccctggcctgtataaaaacgtgaactcgtgatgaaatagagccactgtgatgaccacagatctcacaaaaaacaatattcaacgcttaacgcaaatgcaggcagactagttgtctgaaatgtgacagaaaagtgctctcatcacctcagcatcactcaacaaccatgtcttccacttcttaacactttcttcaggaacatgaggactcgacggatcccccttcaaaggatttgattcccaagtgttgtctctcttgaccgcatcactagtaatcttcttttcagactga

SEQ ID NO: 8452 - DNA, 1595 bp, Arabidopsis thaliana
tgtaacaccaagatcaagcagaaagctatctcttggagctctcgattcctttcaggagcaggaaaacaagttatgcttcaaagtgtccttacagctatccctgtgtatgctatgtcttgcttccttcttcccctatcactctgtgatagaatccagtctaccttgacaaggttctggtgggataagacagatcagcagaggaagatgtgctgggttgggtgggatcgcctagccgttcctaaagttagaggaggtctgggattcaaaaacttcaaagcctataatgttgctctccttgcaaagcagagctggcgagtccttccacacccttcttgccttttagctcgagtcctcttaggcaaatattgccagaatgagtccttcctgaaggccctgagtcccacttttgcctcccatggttggcgcgacctcttagcagggagagatcttctgagaaagcaacttggttggactattggtaacgataaatctgtgctagtgtggcaagatgcctggcttgtccatgataaacgaattcaaccggttggacctgccctcttctatcaaggattggaaggttaaggatctgtttctccctaattctgtagattgggatgaaggaaagatagaagctgctatcccatttgtgaaggatctggtcctggcaattaggcccagtagagctgggggtgctgataaacgaatctggctgggagccaaggatggtttatataccacaaagacaggttataaagctactctttgtgatgttgattctgattcctctcgggatccggttctttctttcaactggtttgatgaagtgtggaatgttcaatgctcccctaaaatcagacttttcctctggaaggctgtgagtggtgccttgcctgtaggctcgcagcttgcaattagaatcccctcctttgatcctgtttgctgcagatgtggagagttggaaacctctagccatgctctcttcaactgcatgtttgtccagagagtgtggaggcttgcacctctggagggtattgatttattccttgtgtttacagatgttaaacttggcctctcttggctaaagaagaagaagacgctcccttctgtgggtttggggtactgtgctttatacccttggatttgctggactctctggatcacgaggaatcaaaaagtattctcaaacatacttttcagtgaactcgaaaccattaacaaagcaatccaagatgccaaggaatggcaatttgcacaggaaccaaactctcgttttcaggttaggagctccatgggtctcagagctgaagttttctctctgaattcgacggtaatccacacagatgcagcgtggagtgttctgacatgctctgcaggtctaggatggaccctcaaatctccaggaatccctcttaaaaagaactctgctctatctgagcatgttccttccccgcttgttgcggaagctttggtcgttcactcggctctttggtctgctcacaatttgggtcttcacgatgttatcttgaaatcagactgccaggtccttactatggctattatctctcagttccctttgtccgaaatccatgggatcc

SEQ ID NO: 8453 - DNA, 1969 bp, Arabidopsis thaliana
cttgcgctgatatcatagcggttgcggcaagagacgcttctgaatacgtatgtttgtgattatatatgaatatacccaatatcctttatatatataaaccatgcatatgtataacaactctccaaccaatacttaggtgggaggtccaaaatgggcagtgaaagtcggaagacgagattcgacagctgcgttcaaggctctagcaaatagtggtgaactcccgggatttaaagatacccttgatcaactctcaggtcttttcagcaagaaaggtcttaacacaagagaccttgttgctctttcaggtaggtccaagaatcatatttgtatatacattaagttttttttttgatgactccttaaatgtgtgaatagctatgctaattgcatcactagtaataacaatgtactagacaaatttataatttctaatttatattctttgtcacgataactattcaggagcacacaccataggacaatctcaatgcttcttgttccgggacaggctttacgagaactcaagcgacatcgacgcaggatttgccagcacacgcaaacgtcgatgcccaaccgtgggaggtgatggtaatctggcagcattggatctagtaacacctaattctttcgacaacaattactacaaaaacttaatgcaaaagaaaggactattagtaaccgatcaagttttgttcgggtccggtgcatcaactgacggcattgtgtcggaatatagcaagaaccggtcaaaattcgcggcagatttcgcaacagccatgatcaagatgggtaatatagaacctctcactggctctaatggagaaatcagaaagatatgcagctttgttaattaatacatgcatgcgataatgcattttatattgtttgttaaatttattcgttgatctctttgttgtaatgttttgtgattcttactaccaaattgtgtattatttgtttttaatatttgaataaatgccaattagttttatgattatatagtcatattttttgataattcaatccaagttacaattgctggttcaatgtggtttgggctaaaccaaccaccgaatctgtatggttttatttttagagttccaccatatattgggtgcaccatgccacatggaattcttacctaaaaaggtatctctgtttcttcaagcctgtgaaaatgcgcgaccaatgagtaaacagagcatgtgaccgaattttcgaatcgagaaaaccatcgtcttccttatttctacgtattttacggcgagcctctagtcgctcatcgtcagccccataaatttcctgaatcttctccgataacttcgtcttatatacatcgccacagaaatttcggttcctgttcgtgaattagcggtagggtttcatttgtatctccgcaacgaattttcctattgattggttcgtttggatctgagaggtattgatttcgatcgatctcaaaagggtagttgttcgtttgctcaatcgaacgagattgttattgtcttctgctgtggaatagtatctggatctgtcagattaataggctagtttttacgattgagctatcggaaatgatttgatcttcatgtgtggttgatcatcgaagagtgtttcattgagactgttaatgaatattgctgtaagagaggaggaggagaatctgcttttaagcttctcgtcgtactcgtttctgggatttctcaggttctcaagtttggatttcaataagaaatctgcgtccaccgtaaaccctagatttagatgggataaggtgttctttcagataaaaggtgagaactttccgaatttaacgtagttgaactgagatgggttcgtcacaaggctccacactctcggctgatgtgatgagccttgtggatacattgcctgtgcttgcgaaaacccttatcgctggaggagctgctggggcaattgctaagactgctgttgcacctttggaaaggat

SEQ ID NO: 8454 - DNA, 426 bp, Arabidopsis thaliana columbia
ctcaaggtggaatataacgttcttcatatcgagggttgggactccaagacatttgacccgaactgcttcagcatgtttccaatgattatagacatcattcagcatattatgagtcaaaccatctcgccctacacatacccccaaagcaaccattcagcatagaaatagcagtatacaaaagatacagaagagtgcattcgttattggtgaccaaaaaggaaagttttctaagccctgacaagaagacacacacccttcaaatttctcaatttaaccacatctatcaatgacagtaaggtagactacaatctcatgaataaggagtgaagaaacgaataccaagattgacttgtcctgtagttttgtcctctgacacagctccaccagagatttcctttcagcttcagtgagtgatgcccttgaatc

SEQ ID NO: 8455 - DNA, 600 bp, Arabidopsis thaliana columbia
tacttgaataccagaacctcactattaaatgagtgattaagaaatgaaacactagttttacatagaaacctaatgatatagaatctaacgagttcgaatccaaaggatgatcattttttgatttggttttgtaaacaccaataagttaagcataatcacaacaaagatggattagattcatgatcaccagaagttattacactcactcgtcactccccataaacataaacgaagcaacataaactagtcacaaacgatactagttatttaatttattattacgaaaatgatgaacaacaattaaagatcaaatcacttcaagaaaccttgagccatcttggcataacctccaagcccaccaccagactcttcatcgtctttcttagccgccggctcaggctgacttgctggctcagcctgactcgtcggaggaggaggaccaccagcaccggtggagtgtgacgactcgtagtcgttgagatacttctcagccttgtcgaggtactgaccagtgctactcttttcatcgaacttaccgtatttctcggcagcgtctaagatatcagcagaggctccggcgactttacccttgtcgagttt

SEQ ID NO: 8456 - DNA, 731 bp, Arabidopsis thaliana
gttgtttcgtgcttccgaagagaacaaagaaccattactaatcacattcttcatctcatgttcttcttgatttttggagattcccctttggagaatgttgttgttgttgttgttgttttcgttgagaagccattggtgagatgattgtccttgtaaatgccatagattttgaagggagtcggatgcactacgaggtgatggagatgatgaggacgcaaaaacgttggttggtaaggtttgtcccaaaaaggcaatgttattgcgattggtattaaaaccaggttggtccaattgtgacgaagtagtattaagctgtcgttgttgatgattttggttgatatttccatggttgacttccacatccagggcattgttcaaatatgcgggtgctggtggaactgagacaaatctagcactctcttcagctaaagcgtcacagaatgctctatgtgtgatgaaactatctttcctgttccaatccaatcatccaatatatactaattcaataaagagatcttagctgattttagttaaagccaattgaatttaaattaaactaaatgttgtatgacattgtttttcatgaaatttaaatttcgctctttaacaaaaaaatttgacttaaaaaagggtgttgtaatacatacctggaaaagagggtacacagtcacatctgtattctttagtacacaaatcttgctatgagctttccaatcggacatgacagcata

SEQ ID NO: 8457 - DNA, 469 bp, Arabidopsis thaliana columbia
cccagagcaattcgacggcgatcatttgcttatgattaggtgattactatataataatacattgctgacgaagacgatgtagattatgtagctgctgttcagctggatgagatctaccaggtttgttatcttttttttctgctgtgtgtaatgaatgagtctctatctgctactcacaatttcaccatcatcaccagacttttttggagaggctgaaactagagaagaagagactggaggataaaatgggtttcagtgagattgacaatactgaaaatataactgcttcctgctgcgtgttctgtccagagattgtgactacagggtctggatttagcagttgggtgaagacatgttttattgctagcagtgaaagttgttctctagacgtagagttacttgctgcacttcagcacctcttggttgctcgacctactgaacatcaggttagtagatagttggaattttt

SEQ ID NO: 8458 - DNA, 516 bp, Arabidopsis thaliana columbia
atcccccctcttccaagcttggaaacttaagcaccaactcatccaggcatttctgtgttgtactacctgatggcatcttcagtgttagatcaggcacacctgtgagctctcgtgctctggcgaataacaacactttgatctccaccgatgaagtgtcatcactttcaatctttgtaacttctttgtccatggccacctgaaagcacccacaatgattgagtctcaatacacaacaggaaaagagaagcaaagagtctccaaatgtgaattgttctagtctgagtcatgacatgcctatataattggatctttgattcagtgaacaaatacttaatggatctaagagatgcgatttctatgttgaaccaggaaatgaataatcacgtatgcttctcaaaatgaagaagatttatgaatctcgaaagatatacaggaaagaagagtttacggagagattgattaaccggaaccgtgaaattcgatcgccggagattaaggtgagacaagtaggaatgg

SEQ ID NO: 8459 - DNA, 532 bp, Arabidopsis thaliana columbia
gtaagagctacacattcggctcctgatggggtcaatcaaagtcggattggttttgttgcagatgttagacgcatgaatgttgctctcactagagccaaactctccctttgggttttgggtaacacacgaaccttgcaaagagaccataactggggtgctcttgtgaaagatgcaaaagaaagagaagtcatcataccagttaagcgaccgtacaactacatgtttggtgagaatgtgatggaacaaaaccattctgagaatcttccaaagaattttcctaagcctgataaacagcattcacgccgcaaagaacagagagcagagacatcttctgatagaaaactgaggaaaactgatggagatgttgtgcctatctcatcaaaaggatcagagagtaagcacaccagacgaaatgcgaaagaagaagcttcatctcaaagggaaaaactagttgcaagctgtgagaaagtaacatccgaagagactctgagacggagccatgaaaagaaagaaaaaatgaaaggcagagaga

SEQ ID NO: 8460 - DNA, 1097 bp, Arabidopsis thaliana
tcagaatctcccaagacacctcacggttcaggtacttactcatctctacaatatctgacgtgttttacaagaaatctcttattcaaatcaagaagtcatgttttaggtacacccatccagtaggggacagatcagcggtgaggatatctcgagtagtgacggagacgcttcggctaggcaaaaaaggtgtacggtggttcgtgatgggagacgacgacacagtgtttgtggtggacaatgtggtaaacgtcctttcaaagtacgaccacactcagttctactacgttggtagctcctcggaggctcacgttcagaacatcttcttctcatattcaatggcatttggaggcggtgggttcgccatcagctatgctctagccctcgagctcttgcggatgcaggaccgttgcatccaacggtatcctggtctctacggcagtgatgatcgcatccaagcttgtatgactgaacttggtgtacccctcaccaaagaacctggctttcaccaggtgtcattttctacgtttcctcgatgtttaattacttcggtttggtttcggttcggattagaacggtttatctggattgaatacgtctaattttaatgtttctatgtatgcagtacgatgtttatggggacttattggggttattaggtgcacacccagtggctcccttggtgtcgctgcaccacatcgatgtggtgcagccgatattcccaaagatgaagcggtcacgtgcactacgacacttgatgtcttcagcagttcttgacccagccagcatattccagcagtccatctgctacgaccagaaccggttctggtccatctcggtctcatggggtttcgtagtccagataatccgaggcatcatatcccctcgcgaacttgagatgccttcaagaacattcctcaactggttccgcaaagccgactacattggttacgcgtttaacacgagaccagtgtcgaggcatccgtgccaaagaccatttgtgttttacttaaactcggctaagtatgatgaaggacgtcgccaagtgattggatactacaacttggacaagacaaggcggattcccgggtgctgatgga

SEQ ID NO: 8461 - DNA, 659 bp, Arabidopsis thaliana
gactctagacctgtgtaagtatgaacgaattcagactgtgaatctgcgaatagctcattacataacgctgttcttactctcttccaccacctccgtctcagcctcctccaccaccactttcacctccaccttcaccgccgcctccacctccaccgccttcacaatcattaacaactcaactctccatagctagccatcatcagataccatttcaaccaggatttcctcccccaacatatcctttatcgcatcaaacatacccaggatctatgcagcaagaccgctctagtattttcaccgtgagttctttgatttgttatgtttcattttactcatgattcctcactatacatatgcatcttttatcatttttgtttaaaccccctggacatcatgtgcagggtgatcaaattgtccaggggcctggaaattcttcacgtggaggtcttgttgagtgcgctggaaaacccgaatattttgtgcagcagtcctccagtttttcaccagcaggagtgtgcagctccagggagccttcatcatttacttcctccagacaactagaatttgggaacagcgatgtacttttcaatcctgaagcttcttcacagaaccatcggtttcagccgagcacccctctgtcccaaagacctatggttagg

SEQ ID NO: 8462 - DNA, 411 bp, Arabidopsis thaliana columbia
cgtttaaaggactacgagtacacaccacagcgtcttccatgcacgtttcttctcgcaatgtctgagtcagctccgccacgctatttcctttaaacgtgaaagcatatccaacggttgtttcatcttccacgtgtccttcctcgtcagcgacatggtaatatatggttcgtccatcagatttaggcggagactcaaccgactggtcaaaatcaaaatcaaaattttcaataaccggaaaacggtacaactgtaattttaaacaaaaccaaaggtgttttaggaatttaggaaaagtactcacatctgaatcggatctgtctgaaagagaagacgaagtccttggagactcagccgacaacggcgaactcgtcggtctccgatgcggcggtggagacgtcgtcttcggtggcg

SEQ ID NO: 8463 - DNA, 607 bp, Arabidopsis thaliana columbia
cgttaaacacaccccggttaagcattctaaacaaaaccatacgagtccttggatcaagagcctgtagcaaagaacaaaacaacatcaacacattgcagaaaacacttgataaatgatcagacccgaatcttcgtcgaatctttgtgtaacagttagacctcacctgttcaactgttgcccggtcagctttatcagtattcctacttctcccaatttctgtatctctaagacttccacgaatcgcagttgtcacagaattcgacatcccaactttaactcttccttcccatccctgcatcaccagtttatctcaaatcacatttccagctacaatataccacaaagttctccactttacaagtacaaaacctacctgaacttaaaccctataagcaattcagaagctttgacaatgtttcatttgagcagagactatgagcaattcagaagctttttcaaattcaaaacatcatatctttataagtaatccagaagctttttcaaattcaaaacatcaatttgataagaaacgttacctctaaaggagaagcacgaacatgactagtaagcttctgggctttatttgatatagggtgaagagactaga

SEQ ID NO: 8464 - DNA, 530 bp, Arabidopsis thaliana columbia
cacaagattgcgtttcctgatttagagttcggttctactgtatcgaggaatgattctatgtcttcttgcgggagcgattccacagggactcagagcatcagaacgccgttgggagaagagggtggtattactagtatccggactttcgttgaagggcttaaagagatggctaagcgtcaaggcgaggtaagttcataaacatatatactaatcgattcttctatgtagcttacaattgattttcaaggtttgtttgatcaggtctcaaatgctgaggattctggtaaaatgaggagggacattggtctggactccatggacagagaatttgagagacagcggcaagagattctggagctatggcaaacttgtaacatctctttggtgcatagaacatacttttacttgctcttcaaaggagatgaggcggattcaatctacatcggagtagagctaagaagacttttgtttatgaaagatagcttctctcagggaaaccaagcattggaaggaggagaaaccttaacatt

SEQ ID NO: 8465 - DNA, 626 bp, Arabidopsis thaliana
ccggagattcaacttcagctgaaggtaaataaaagtaaaaattcttaaatttctaacaacgtctcttgatgaaaacatgcaaaatctgatatttagatcaatataaacccacaggaatggaattggaagcttgcaacttgagaatggtgaaaggtcagagtcagtcagagtctagtttcactgccatggttatactccaggtctggtctggtctggtctcagaggtttgtaccgggtggtcggtttaaaagtacagcgtctgagaaagtgtttggttcattgtccagggctatttttttgaaatgactggtacaccggtcgtgagtcgacctttgtgttgtttttaaattttggagggttataaaaacttacagtggagtcttttgtttttgtgttgacaacagtttgtatgtcggttaaaaaattgaaaccataaaccctttattggtcttaatatgtttggtgtctgatttcctaaggaaaggtttttttttttttggtcaaacctaaggaagggtttatcttcgagttataaagactcgaatctttatttgaattatgaagtaaagtatcataaaacagcaataaattattatgaatttgacttacctgagcaagtaaattgt

SEQ ID NO: 8466 - DNA, 518 bp, Arabidopsis thaliana columbia
ccctggtcaacattcatatcctcagattcaaggtcctgggagatcacccaatacgttcatggtctttttgacaagaacatcgatttcaggttgtggggagtcttcatagtctttgtcagtcagcttccttagctttttttcaacggtatcatagacctttcgtacaataaatccagggttatttttgcgttttggaagttgtttatgggccgggacaaaataaacaacacatctgtgcatcacagattctgctggcacttcatcacgatggaaactgtagaaaagttctcgtgtatcacttgattgccagtttccaccaccccttttctctgcttcttcggggcgataaaaccactgtcccagaatcatcatgcttccatctttagtttgggtaatatcctgtcaaagaagcatgtgtcattatttcaaagcggacgacacaacaaaaactaaaaagatgaatacaaaatttagcacaccagcaccttaataattgcaacatatggtttttgactttt

SEQ ID NO: 8467 - DNA, 489 bp, Arabidopsis thaliana columbia
catgcacaagtagtgattagccattacatactaggataaacaagatacatacagagtgtgagagtggtccaatcgaaatggaaaatgggagggggaaataaacagcacttaccaacgttagagcttaactccaaaactgaacatccctggagaatgtcagcattttctgagagataaccattcataagcatcgcaccaggccaaaccagctgccctgttaaatcaaaatcagctgtccaagaaacattttagacatagctttatgataaacactacaagggtttagataaaaaaaaaaatatatctctgaactcattgttcttatttagtctttcaatggcattagaagttaaaagaatacaccagcctagaatacagataagtaactccagattgactatttcaagagcatataaacagttcatagtcaaaaataattgatgaagaaattccaaaaagggtactgaatccatatttagctgccaatgg

SEQ ID NO: 8468 - DNA, 1153 bp, Arabidopsis thaliana
atactcggagtgtgcttaaagttgaaatctttgtcaaaattgattcgccgttgactcaaaaacgactccgattacgatgaaattcgaagaacccagatcgagaatcgttcgattagagtggaagatcgagaattgagtgagaaagttaccgtcttgcggggagaatcccagctccgggaccgtaagaattgcctttgccggagcgaaggacgtcgacgacggcgtcttcagcttcgatacaggtacggaagcaagggtagacggaagggtcaccgtggccgaggggtaaaatggtcttattgacgtctttgccgcagttgtcgaagagcatgtagatgacacctctaagcgttacggtggatgctttcgctgccttatcacttccaccgaaacgccaaacgctactttgaccatttcgtgtttgcgttatgggctctttctcagttttaaacgcgggaacccgtagattggcgtgtggttgttcttcgctcatcttctctctgtgctttgagttcttctttctataagaaggccaaacaaaaaaaaagtactatttgggaaaaaaaaaactttacaaatgaagtttcaatacggattggatttttggtatataatgcaaagttttgaattatggaacgtgatcaataatcttgggagacctaacacaaaactaaaatcacgtgccacaaaaattaatcaaattggcagggctttgtgaaggaatgtttgggcctggcctgataagaatagttggcgagttaaaacccaaccgattagtcaaccggaatgagttcagtttgaaatgtgatgaatcagtttggttacattgtcactaacatgctaatgggcgtcagtgcattgtgatttgtgacgtcaaatttaattagtagatttattatcaaacaaattgtaagattaaggatgtgattagaaaaccattgtagcgtaaataaatgggcgtaaaggtctgtagaccccactttccaacgttaatttttcagctacttaaagagagaataaaagtttgagccacaaaaaatattcatttgataccaaattcttcttggtcaacaaatttctatttttagactatgggtgcaaatgttgtttgaaaataagaggttataaaaagttaaatgatcattcatcttat

SEQ ID NO: 8469 - DNA, 521 bp, Arabidopsis thaliana columbia
caaatttttacaactactttttaaaaaatgttttacattttggaacattaggtgacgtataagaatcaaaatcttgctaggtagttcttatgtttctaatactgtagttggttggttttcttatatatatgtttcagatgttttatgtcttccgtgaagcactcccagtgtttcaaaagctgtctcatttatccgttaatctctctaacttctgttggtcttctatgccaatgctgatcaagaaagctccaaatctaaagactctcaacatcgacgtatgtatattgcaaacacaaaagttcattagatactcatatagaaccttgaatctcaagtcttctgcgtcttgtttcagggtcccttgcactacgagagttactatcgttgtgcaggcgatattttttgcgagtgcgtgtcagagtattctttcctagtttcatgtcctctggaagtcctaaagataactgagtactatggtagctttagagaattgatgcaaatgaaccatttcttggagaaat

SEQ ID NO: 8470 - DNA, 550 bp, Arabidopsis thaliana
tgtactccgatcttttgtcaacggcgaaggaagatgatcgattgccagtcgttgagcagttcttgaagctccattccggtttgaaaaacgtccaagtaataacagagtcattgaccaaattactctctttgatgtcctccccagataatgaagtacacagatccgaggacgctataaaagcggcatcggaaaagcagaaattggcagcctcatgggtccaagctgcgttagtcactaacttatcgcccttctctgtctactccagcaaacaagccaaacttgctgcctccaggagcaaacccgtgatcatactcgagagcccgggtaataattcctctagtaaaacccgtgggaatatccaacacaagccaacgactggatctaaactcgtagcacaaggaatgatccgtaaacacagggagaacagtagcagccagaaagccacctaggtagcagggtcagagtctccaccgttaaactgggtgaaagggaatggtctaaacgaggcaactgatctggcagagaagttgcaaatggttcacaagatcgg

SEQ ID NO: 8471 - DNA, 605 bp, Arabidopsis thaliana columbia
gacgcacccgcagagatatttttatcctccttatttgacgcttttaccccccttcccacattttaatcaaattttcttctttctgaaataatagattgagcaatttgtgtttggtggaatattgaaagagtagtgatatggcaaattggaacaggtgttcggagttgttacgacgaaggcaaacgtacggctgagactttgaccatggactatcacagaggcgctaatgttgaggtctgttttctttttcattatatttcgctgctagaaaatgcagatgcagattttgactgatttattattcctcaacaggttaggattgctaggatattcaacacttatggcccaaggatgtgtatcgatgacggtcgtgtggttagcaacttcgttgcccaggtgcggaggactttgtgttagattaagtggcttaataaatgatcaacggaattataccttttattaagtaatgatgattgttgtgcaggcattaagaaaagagcctttgactgtttatggtgatggtaagcagactaggagttccagtttgtcctgatctggtaatcccttttactttttctccttaagtttcaaatcatgattagata

SEQ ID NO: 8472 - DNA, 1020 bp, Arabidopsis thaliana
tatttggattcttaagtttgagaaaagacaacaacaaaaagaaaaaaacaccaacaacaagttcatgacagtttgtgagaaactgacaaactaataatttcccccctaattttgatttcttaaagaaattactttggttatgtaagattttctatatatgttaactttaagaaaagaataaaataagagattgagaagaaaaacaaaatacatatgtgaaacactaaatacaaaacactttttcattgtcaaagaaacagaactactaccctataagaaatggttctcattagatcccatttcacgtgtaatagtgcaaaactataataatagtaatataaataaattaaattaacaacaattagtgatttgtgctaatgttggcactgcatcactcactacccatacataaaatccgcagaacttaatcttaagaaatactgtatatttttcctctgtacgtagatgaatcttgattgttttcgtcaccgtcaatccgtcatccagctgccggaaacggtgatgatgttaagatggatcgtttttaggaaatatgaaatccatgttggttccgaccccgccgctaccaaacataacatcagccatgtcaacgacagcaagaccgtagtcaacagaatgaccagtggtgacggatgagattggaatggtacttggagtggcagaggatgcggttggagcggttgagttgtagcaagtgtgtgagccacggtatgtgacccggaaggtgaagggatcgtcgttaaggcgttggacttgtttcttggccgggcaattgtatagcttttggtgggtgcacctatagtacgccctgcaaaatagaaatttaataatcttacatctatatgataatcaagtagtagctaataactttgttttttaaagtacgtagttaatgattgaattagattaaaggtatttgataacgaaatctgagaaagatatgtacttgtaacatcgaagtttcaacttccagctgaactttaataataggattatttg

SEQ ID NO: 8473 - DNA, 527 bp, Arabidopsis thaliana columbia
  unsure (1)..(527): unsure at all n locations
gtgattagctagcttttaaacaaatttttgagacaggttttcttcttaaagtgtgttttaattttgggatcgttgtgtggaaataaaaacaggtgaatccggatgatgttgtgtttggaggatgggatataagtgacatgaacttagcagatgccatggctagagccagggttcttgatatcgacttgcaggaacagctcaggccttacatggagaacattgtgccactccctgggatcttcgatcctgatttcatagctgctaatcaagggtcacgtgctaaccacgtgatcaaaggtaccaagaaggaacaagtcgaccacatcatcaaggacatgaggttactctgtgttctagtgattattcttattggttgaatcgaatctcgtctgattattgatgtgatcgagtgtgatgttgaatcttagggagtttaaggagaagaataaggtggataaggttgtggttctctggacggctacacagagcgttatagcaatgtggtcgntgggatgaacgatacaatg

SEQ ID NO: 8474 - DNA, 460 bp, Arabidopsis thaliana columbia
ccgttgtgaaattaaatgatatcccttcccgcagaatgtaaaatcacacaaccaatatttattcaatgaaatctgatggttttagcttgttaacattaaaaaacgtgcccggttatctattatcctgattcgtaaaggccaaacaataaattcattatgatgataatattcatgtgatagtttgtttgcggcgagagataattcgctttttatcaccgagcttctcccgataaccaggattaatcagcgcaattttgatcttaacctaccgcaaaacaaccgtgcttcatgatacaaatggattctcattatctgaacaatacgcagcacgtctatgacaaagggcgagttatgcaaactgagcaacagcgagccgtaacacggctttgtatccagtgtggattatttcttttgcaacatggtgcggaaagcgcgttggttgatgagctttctcacgact

SEQ ID NO: 8475 - DNA, 437 bp, Arabidopsis thaliana columbia
  unsure (1)..(437): unsure at all n locations
tgcatgtacagccaatgtcgcgtgcattcagacctgcaataaccgtccagatgaaaccgagtgccaagatataattaaaaaagatatatcaataaaagaggaagaaatattgcatgaatatgaaaaaagaccaatgattttatatgtaattatgtgcttgtattgtatcgggataaatgtggggaactgtttgaanaccgtgttgttggtgagttcggcgagtgtgctgtgtcgagaanaaagtgtgttcctggaggatctggtctcggaggatttcctgccccgggcccttctgttcttgtgcggggcttcggcgtctcgggctttagcgggcagtggtgcgttgcaggtggcttggatcctgcctttggtgccttcggctgccggctgcgtgagttcccgcggaaggtgtctctggcttgttggggcgtctcttg

SEQ ID NO: 8476 - DNA, 689 bp, Arabidopsis thaliana
agaaggagaagagcttcggaagtggttagtgttactaaaccacgtaattaaaccttttaatcaattgtataactatctgtctctttgcattactctttttaatatctgctacttgttattcatttatcatttggaattcagttttttaatctcactcaaaagatttatctttttgtttcgtttgtctgtttctgatgtcttggtgcatggttattgttgtgatcattgattggtataatggggtttgagttcttaagccaaaccttggagggtttttttttaatctcactcaaaaaaatttatctttagttccgtttgcctgtttctgatgttttggtgtatggttattgagatgatctttgattggtataatggggttttatttagttcttaagccaaacgttggaggctttggtaaattgttttatttgatgttgtatatgtattggctgtgttaaccttttttatttatttgtaaccagccttcgaaaatcaaatcgttcatcaatagtgttacttctgttccactcgagctaatacatgaaccccttgcatgttttcgctgggaattcgacaaggtacgttttgaaatccttgtttgtgaacctgtttccctttaattctgtcatactcttgttttgatggttggcggttttgttttttatatagggtgacttcatcattgggtg

SEQ ID NO: 8477 - DNA, 560 bp, Arabidopsis thaliana
cgccagtgtgctcaaaaccgaaaaaacaaagtcatgatcatattataaagagagaactgaagtgttatgaaccgattcgagttgtcacttacatccagatcaacatgatcaacaatgtggagaatggaaccaccaccatcgcaaggacggatgagaaacccgcttggtttcatttcagctctcacaaagtttgaagaaggtggcccagtggggcacccagttgcagaagtaagcgacctttcacaaacctgaagacagtgagtgaagacaaaagtattaaaacagaaactacataacagaaaaagcagattcaagaactcaccacatagcttccatcttccaaacatgtgctatatctcagcgtccaaaagtcacgagctgctgctaaagtcgtaggagcatacatctgcgtgtaaataagctcgatcgtcccaccgtttccagcaggtatcacactcagagtatccacacttcgacaatctcggagccaagatggacgatctttgagaatttcagcaacctatatttgtttcaaatcaagactagcgtacgtaatgatt

SEQ ID NO: 8478 - DNA, 532 bp, Arabidopsis thaliana
ccaagtggtttttagaaaatgttttaatatgtattttcatggttatgtatgtagcctggtccggattctattggtatcgtagctgtttcacgcaactgcagtggaatagcagcacgtgcctgtggcctcgtgagtttagaacccatgaaggtaatggtgttttctttttattttaatcttgtgttgtaagaagcggaaattctacgaaggcaatctaaacttcaaatactgtgtaggtcgctgaaatcctcaaagatcgtccatcttggttccgtgactgtcgatgtgtcgagactctgaatgttatacccactggaaatggtggtactatcgagcttgtcaacactcaggtctgtttcataaatccatgagtgttgtttttgttcctttaaaatgtaatgatcattattcatggttggttatcagatttatgctcctacaacattagcagcagctcgtgacttttggacgctgagatatagtacaagtctagaagatggaagctatgtggtgggtattaggacctggtttt

SEQ ID NO: 8479 - DNA, 587 bp, Arabidopsis thaliana columbia
tctccatgatcttatatgcaaaaaattctctcatgctgaccttggttcgtgggttttctgaatttgttgttttctttttaagctcgagatctatgtgataaccatcttctccatagggaaacaaaagaggatactgcaatggtagttacgctgggtgtagttcacttatacgtgcaattctcttgttttcgtttccactataatatctcttggcccaactgagttgtcaaaatctccaacaaacagaccaccaacttctgaaaccgttggtaaattgtaagtcttaccactatttgttgaacgacctgagaccaattttagtttgagattaggcatctcgattgaatgatcaaaccgctcctttgccattcgaagaactttcacatatggattacactggtcaagcatacacttgattgcttcgacgatatcctcacgtagacgttttgattcagttgatggtgttgcctcttagaacttgaataattaagaaatacagaacgattagcctttttgagtattttgaagtagtatatatgacaacgaattatatttgaaaataaagaatgtatgtagatatggttaag

SEQ ID NO: 8480 - DNA, 536 bp, Arabidopsis thaliana columbia
gttcaggagtatatgatctcgagaggaggttccgcttcattttgcctatatgatacgcgtggattgagccgtatatcatcgtctgataacactagtatgattgagcaatggatgacaaggggcgtgcttcacggcgaacctgtcatctggttttgattctatcttgattactctttctttaatcagtttcgttttggttacattactgagtttttatttactcagggcatctgatagctcggatttaaaggatagactcatccgagatggtggtaccggttatgagagaaggaaagtgaattcgattatctttgttgttaatgcggtcgaaatcttgaaatcgatggaatgtgaaacgagctatgcttcgatgataaccacggcctttaactctccgatactattgtttaaaggttggttagtccatttgaataaactttagcctctctttttttcagtctcaaaaaacttgaaaatgtttttcagatgataagccagcagtcgtttatactcatggagatatgcttcacgcgagg

SEQ ID NO: 8481 - DNA, 789 bp, Arabidopsis thaliana
atctatttacagtgttaagaagaagaagaggggacagcgtgcggctggtccagataagactggaagaggactacgtcaatttagtatgaaaggtcttatctctttctctgcccctattatgctttcatctaaatgcctttcaagtttctagctatgaattgtgtggataatgcctcttaagattggttatacatttaactgatattatgttcgtctggccttcctttcagtttgtgaaaaggtggaaagcaaaggaaggacaacttacaatgaggtacggtagtttcctttttaaacaaaaagcttcacagtatttatgctttgcaagatccattcacttctgtttatgttatatgatgatactgatttattgtgcttaccagtgtgattaaacacttgtcaagatcacatatgggaatatcaatttgtctcatgattagtactgcaaacgtgtagctctgtaatacggtatctaacaggtgatagtactttcaggttgcagacgagcttgttgctgaatttgcacttccaaataacgatggaacatcccctgatcaggtatgcgtttcttcgatagtttctaccctggaacgtgtgcaatactcgttgtgaactctgatgaaattatatcatgtgaaaacgttttaccagcaacagtatgatgagaaaaacataagacgaagagtatatgatgctttaaacgtcctcatggctatggatataatatccaaggataaaaaagaaattcaatggagaggtcttcctcggacaagcttaagcgacattgaa

SEQ ID NO: 8482 - DNA, 578 bp, Arabidopsis thaliana columbia
ggtactatccaacgctctctcttgtttccaagatgtttcgtctatcggttgcatcacctgaactatacgcgagacggtcccttttagactgtcccgaatgctatatctatgttttcatgttgaacctcccagctaaactcagctggtatgttctcgaccggaaaacatcaggtcctagtacagctaagagctaacaatctcttggtggctgttcccttgctccacttacatagttatatgtctctacgttcaagcttagccgtcgttggttcaacaatctttgtcatgagtgcttgtctgtattgctcatggactgcccatctaacatgtgtgccacgcagatgactgtgtctagtagcatagaaaaaacttgtgtgtaccccttgattgtgtcgaataaaacagaaagctcaaagtttacatgaattactaaattgtttctctttaaaatccttaaactatgtaccatatatgcatatgggattaagataattactacgcaataatcgaagtctaattcagggagactaatccaagtaattcacaatcttgattaagagatcattggtagttagaag

SEQ ID NO: 8483 - DNA, 492 bp, Arabidopsis thaliana columbia
gccagtgtgctgtaaagccttacaaggagcgaagttccataatctcccccctccccctcaatgatccaaataaagataatgcatccagctggtcattcttagcagcactttccgcatcaccgaaacatggctgaaatggtcggagtaaaccgccacctgggcgtagatgccgtcgggtaaggcatcgatatcatcgttagggtccagttcaatggttcccagcacaccgtccgtgccgggcacgacgcgttaatgattgcaataccccctgcgcctgataagaaccgcctggcacgacaggtaaaatactagtcagtttgccgtgaaacacctgcccaggtagcgcgttaaacaccacttccgcatcatcgccaggtttcagacgtaacagcgagttttgccgaaattgggcgacaatttgccgtttttgctcggggatgaagaccatcactggacgcagcggcaaggcagctgggtatgtacctgggcgga

SEQ ID NO: 8484 - DNA, 986 bp, Arabidopsis thaliana columbia
cctagctgcatctgccgttaccattcagagacacaatgggtcattcatgacatcctgactttcttaattttacaaatcgtaggtaaaagcaaacagttttccgacagcgggtgggataagttatcttgaggccaagcatctgttacttctaagttattgccaggatcttgtatattatattctaaggaaagcaaaaggactctctattgatggtcatcctcttgtaaggagccttgtagagatacgtatgtttctggaaaaggtttgcatctttgtctttttccactttctatatcgccaacaagtcatggagtcatagttttagcttgtttttcttttgtgtagattcgtcccatagacaaaaaacttcagtaccagattcagaagctcaccacagccggtgggcctgtgacagagctagctcattccgagggaaaggggtcgtgtgaacccaaaaatctgaagatctttcaaattataagcctaaacctgacttacttgctgacaaagaggatgaccaagaggtgaaaccttactatcctccaacacttgtgaagaaatatgttgcgtgttatttttattaacctctttgcctgtgtaaatgtaggatgatggtgtttatcgacccccgaaatttgcccctatgtctatggaagataagacttcaaaacaagaaagagatgctgccagaaaagagaaacacttttttagacaagccactgaaaatacatacatgaaagatgtgttggacgatctggaggacaggcctgaagaggtgagttggaaggaaattaatttgcagttgatatgcgtggtagagattaatttgatgttggaactaaatgggtgaatgaatatgaacagattagagactattatggggttgagagcaatgagcagaagaggtttatggcacagtatgaaaggcaacaaaaggcagaagaagagctctttacccgggcacctcgcactaaagaggataagaa

SEQ ID NO: 8485 - DNA, 610 bp, Arabidopsis thaliana columbia
cttgcttattgccataagtacctgggggcacacacaagcacttgttacaacatttgttgcagaagaacaaacacggcttcttgtattgtgtattcgagcatctatctccacaccttggcccgcactctaataaaggtggaatagcggatttagtttcgcattcagcacaaacattaattaaaaactaggctagtcagtgggtttaccttggggttgaagactgccttgagtagtaccgtactgccaaaatcaacaagaagatgcaaaggatgttaaaaaggttttgtagattcgatgaaactctttttttgagtagtgatgaaccgagaaactcacttgagagttattgtgatgcggcagttgtggttgcgactgtggtggttgtggttgtcgagcaggagattccaagtatataggctgtgttttattcagggacgtataagataaagttgataaatgtgaacatagaggaatagagtgttgaacacttacatgcatatgggcagacagaagaagatgtacacaacaatggagaaaacaatgatgctaagttttgttccattttctgaaacagaaatgattgtaatgaaggctaggtagattatatatt

SEQ ID NO: 8486 - DNA, 528 bp, Arabidopsis thaliana columbia
tggtcgatgaacacaaaagggaaaaaacttagaccgttggtgcgcctacgcaaggctacaaaagaaaaacaagaaagatatgtgtcagatttctacttcatgattgattagaagaaagtccactttatgtaaagaagatacttacgttagacttgttcttcttgcaagaagcagcccaccatttggtaccagaaccatctataactccattcccttggaatacaactccttggagtttggaaaattgaagccaattccttgggaatttcgggtcccattggctaggctcatctggtgctatgattgttccatcaatctatcaaaatcaaaattaaaaaaaaataaaaatgcataagacaataaatggtaacatgttgttgtagcttaacgtgtaacaggaattaagaagttaaaagattacctgaatgatcaatttttcttgacatggaccatcgaatttcgtcgcatttactaaatagctacgtccttgtggaccaataaaacagagtttggtgcagacaggccatg

SEQ ID NO: 8487 - DNA, 169 bp, Arabidopsis thaliana columbia
cctgtatagtcagtcccagatactggggaggctgaggcaggaggatcgcttgagcctaggaagcagaggttgcactgagctgagatcatgccactgccctccacctgggcaacagagtgagaatatgaccctgtctcaaaaaatgaaaaagaaaaaaagaagacacggg

SEQ ID NO: 8488 - DNA, 588 bp, Arabidopsis thaliana columbia
tttttcatctgatttttcgcaagtctttaatttgagcatgagattgatgcagataacagcagcgacaacttctttcatggtgttcttctcagcaacaatgtctgcagtccagtacctgctactaggaatgcaaaacacagacacagcttatgtattttcctttatttgcttccttgcttcacttcttggactggttttggttcagaaagctgtagctcagtttggaagagcttccattatagttttctcggttggaaccgtgatgtctctgagcacagtccttatgacaagttttggagctcttgatgtctggactgattacgtggcaggcaaggacatgggtttcaagctgccatgttaagacatcatgcctttggatcatcgacaatagagatctaaagaaaatcatctgtttctttttatcatcttctttttcttgtttggcaacagaggctctgaattgacttctatgtaagagggagatttagagcaatatggcattgtaatgtttatatgttttgtaaattaatactttgggagtgtactatagtcagacgtcactggaacaacagttatgtgcgcagtaag

SEQ ID NO: 8489 - DNA, 423 bp, Arabidopsis thaliana columbia
agtgtgctctaaagccagatttcaccgttggcaatcaccggagttttctgccgctggcgatagatcgccaatcgcctgccagtcaatatgctccgcgcggtaaccctgctctttcgtccgcccatgcaccaccagctccgtagcgccagtcagttgaaccgcatcggcgatttcaaatttcttctcaccgctgtcccagcccagacgcactttcacgctgacgggcaaatgcgccggtacagcttcacgcatcgcttttgcaccctggtagatgagttcaggatctttgagtaacgtcgcctcgctggcgctaccgttaactgttttcgaagggcagtcgcaattgagatccacgccccaggaacctaactccacagcacgggctgcgttctctgcctaccattgtgggaactgacctaacaa

SEQ ID NO: 8490 - DNA, 475 bp, Arabidopsis thaliana columbia
tagaactctgtttcatcacgaaactaaaaaaaaacagaacccagcaaagaagtttggttatagagtttaatgacgtcatgagaattttaagacatttaagattgttcacgggataaccatgggagagaattaaaatattaaaaccaaaagcaaaaactttcgtcataccttagataaagtctcaacaatggtgtcaagaatatgtctggattgtctctgataatactcctctacagtcaatttccaaccaggatcgttatgagaatgaggaacaacgaagattttgagcttctctttctcccactcatcgtctttatacgtaactctccaaccttgtttccatggaccaccatctgtatcaagaaactcaatcctatcgtatagatctttagttgtgatatcaacgacggcgcctgaattggaatcgtttaagggtcggcgattaatattcttccgtggcttgacgatccgattg

SEQ ID NO: 8491 - DNA, 936 bp, Arabidopsis thaliana
tttgtactgaaaacttggctgattttgttgattctgtcttgctggtgaagtctcaagctacttcgtgattagaggaggagatctggatttctagttttagcaattcatttgacttccgagttttccagaatcattgaagtgttaggcttacttgattcagattcagaacatagctttagataacgttagaagcagaatcagaatctgcaaatcggctctttagattgctgctactagaaatttgaaattagcgtttggtagtgttaaggatgcagaataggattgtacagttggcagaaggaaaagaaaatggaatcacagttcgatcagggcattataaaggatttccatcgaaactgctacttctgctagggttgtttcttacattttctgttactgtcttcatcattagtgtatctactatcaagtatactggaatacaaagtgtagtaaccacagtcacttcaagctttgtgccatgccgtgagggggaaccgaatagtttgagtaaatggatacaacctcctgcggttttgatgcataacatgagcgatgaagagcttctttggcgtgcttctttttggcctcgtagaaaagaatatccgtttaaacgggttccaaaggttgcgtttatgttcttgactaaaggccccttaccgcttgcttcgctttgggagaggttcttgaagggtcacaaagggctttactcggtttaccttcatccacacccttcttttacagccaagtttccagctagctctgtttccaccggaggcaaattccaagccaggtctgcttctgcttcttctaatcatctttctgtttcattgacaccaattacatatagtatgagaaaatgaatctcttggatcaaatttggtttctttagaagcctttttggcatattgcattgacagcattgtcagatgtgatgta

SEQ ID NO: 8492 - DNA, 382 bp, Arabidopsis thaliana columbia
ggaactctacgatgatgggaagttgaaattcatatgtcttggtcctgacttgtttgaaggtgatcagaagcctcagtacacagaccctccaaacgtctggcttggttcgtttcctacaaaggatgttcatctatctcaagacggggctctgcttaaagctgaggctagagactctgagaaccatttctctcttgttggctgcacctgcgctcctgctttccagttcgaggactttcagctcgcgaaacgctctgatctcatatcaaggtttccgcaacacgagtcactcatcacaatgctatcttagctgcagtgaaagggcctacctagaggagactccttattggctcaatggtatctcggtactagtaagagaaggata

SEQ ID NO: 8493 - DNA, 606 bp, Arabidopsis thaliana columbia
attattttccctctttaacattccactagggagataccatagcttagttctgcggctataagcagcactttgaaggctcttaagaagatagggtaacttataagaataatgatttttgcataattgacttctccttctcagagcagactcggctactctttttgtttcctcaagcatattgtagtctaacatgcaagcacaaaaaaagaagagatatttccatcaatcaaacatagaagaatcaaatacaaacaaacactttaaaggtgaaaacttttgaaaatcacgaaacgaaaaaacagattcacataaaacccagattagaattataccagagaggaggagattgtcgtcgaacttggagaggggaacgacgtcggtgaacttcctttttccggtacaacatgttcgctgcttgtgggctttcacacagggaagggcacacgatcgaattgaacatcggggacatttgtacttccatggattttgtttgcactcttcgcagaccgaatctttcatattttgtccggcatcacaacatacgttaaggttttggaggagggcgagctcaaggtttatgaaactagagttgtgcaaaattagggt

SEQ ID NO: 8494 - DNA, 616 bp, Arabidopsis thaliana columbia
ttcagcctaaccaatgtcttgctcacaaagatctctgaaggcagaggataaaaagtcgagttggaaccaaaaccgcgagatgacgggatatgtagatcaatatctaacacaccacgtttcaacactttaggtatccattcaagcaccgagttttgatcaacaccttcacacttaacgtagaatctgttcaacgtagcattcgcttccgcttgcaaagtcaatacactacccacgaaaagcataaaactttcagaaccctttctcctctcttcacaagtcattagaggatcgaaatagaaggattcatcaaagtcaaggtttggcataaaagcaagcaaaggcttccatcttttggcaagaacagtagttgaagcagcttcttttgttggaaggaatgataagatgtggcaaatgagtgcgtctggtaaaccgctgattatatctctaggaccatcaaaacacttctttttcgaacccattttgtgaaagaaacagatcaacacttacaacctgaacaaagacatgtaagtcttgtaagaagaagcacgtgcccacaaaaccaaaatcgttggagagacatccaaatgagaagtgagacataagaatgaaaatggag

SEQ ID NO: 8495 - DNA, 592 bp, Arabidopsis thaliana columbia
ctaccactccatctgcaatgacctcgcggatcttgtggtatttgatgtcaatgtgctttgtcctgtcatggtgcacattgttctttgacagggctatggcgctttgagaatcacagaaaatctccaccgtcttctgttcatagccaaagtcctgtaacaaacctttaagccatatagcctcctttactgcttcagtgagagacatatacccggctttagtggatgacattaccactactttttgcagacatgatctcaagtttatggtgctcccaccaagtgtgaataccattccgcttattgatcgcctgttctccaggtttgcagcatagtcggagtcacaataccctctgagggttaagtctgctcccttcttctagcacaacttcatgttcagggttcctttaatgtacctaagtactcacttgacccctaactagtgctctttaactggtttgctcataaaccgactgatgatgccaacacaataagccaaatctggtcttgtatcgatcatagagtacataatgcttcctactgcgtttgaataaggcactgacttcatgtactcttcatcactgagcagttgttg

SEQ ID NO: 8496 - DNA, 531 bp, Arabidopsis thaliana columbia
cacatacatgaatatagagcagctactaggccttaaaggtaaaataaaaggaggaaagcaattacctctttctttgttgggtgaatattgatatcaacatgttcccgtggcaaattgattgacatttagacaaaaggttttgatgcttttggcaatgttgcagcataaacaatttcaatggctctttttaaggcagagcattccaccaatctatctgttgtaatcaataaattaaatgtcacataggcttatctagtgataaatcagatattactaacttttcatttctactaaggaaaaaaatcctcaccattaatgaaaagcaccaatatagtcttcttagcaacatagttagaattggatatgaaccctccatatcaaaagtacaaccagaggagtcacaggaggaaacttctactttcatcaagttctttgcaactgatactccatatacagacctaattgaatcaagccttgaaggtgacacgactgagtgaacatcagccttaacagctcgatgctggcgagaca

SEQ ID NO: 8497 - DNA, 527 bp, Arabidopsis thaliana columbia
cctgaatacattcaaaccggccgtctcacatcgaaaagcgatgtgtggggttatggagtcttcctctatgagcttatcactgggaggcgaccggtggacagaaacagacccaagggagagcagaagcttctagaatgggtgagaccttatttatctgacacaaggaagttcaagctcatattagatccaaggctggaagggaagtacccgatcaaatcggttcaaaagctagcagttgtggccaacagatgtttggttaggaactcaaaggcacgtcccaagatgagtgaggttttagagatggtgaacaaaattgtggaagcttcttcaggaaatggcagcccacagctagttccgctgaacagtgtaaaagcttcgagagacgcgagaggaaagaacaatggtggtggcggtgaaggaggttggtttggcaagttatggaatcccaagacaataagagcgttgttgactgcttatagaattaacctcttcttacagcgaaaaaaagagtcaagaaaggtttcatg

SEQ ID NO: 8498 - DNA, 537 bp, Arabidopsis thaliana columbia
ggtgagagtacaagctcgtgttagagctcgtcgtgtgaggatgactgttgaaggacaagctgttcaaaagcttttagatgaacatagaaccaaatctgatctcttgaaagaagtcgaggttcttgtctttacctttttagctcattggtttgatgattgtttattgttttgagatttgttatgttctcaggaagggtggtgtgataggaaaggtactgtggatgatattaagtcaaagttgcagcagagacaagaaggtgcttttaagagggaacgtgctttggcttatgctcttgctcaaaaggtaactaacttgtccacattcaacatcttgtttaagttcgtgtctgaagctgaatcgggaatcttgttttgtgtagcaatggaggtcaactactagctcaaaccttaagacgaatagttcgatttcgtatcttaaaagtcaagagtttgataagaatagttggggatggagttggttggagcgttggatggctgctaggccatgggagactagacttatggacactgttgata

SEQ ID NO: 8499 - DNA, 519 bp, Arabidopsis thaliana columbia
gcatcgggactcacccatcccgccattactagtacatcagtctcggctacgattgcatgaaccctaatttactgttccgcttccctctctagcattcactatcggaaaggctcttctttcatttccgtcttctgattttgtgattttgtgttttcctttccttcctctgtttctcaaaattttaattgtgtttagcgtatgtgaatttgaattactgacttcaagctcaaataatagtttaggtcttaatgagttcgaaaaggatggactctggttcgaaagatattatcagcaatctaccagacgctcttctttgtcacgtcctgtctttccttcccacaacagaagctgcttcgacatcagttctcgctaaaaggtggaggtttctcttggcgtttgtaccaaatcttgatttagacaacatgatctatgaccgtcctaaaatgggtagacgaaaaaggctagagctgcgtaaaagctttaagctttttgtggatagagttatggctttctaaggga

SEQ ID NO: 8500 - DNA, 542 bp, Arabidopsis thaliana columbia
taacttaattaatcatcaatgttctgtgcagcgatacaagtttacttatctgtgaatttttatgttaagactcgacaacaatagtgaaaagaaactgaatcagatcatgaatcaagcttaaaataacttgcgaaatgcttcaactatcttattactatattccttgtgttcatctacttgagctatctgaaccttcttctttctctccagagactcaatcagatcgttaagagatccatcagcatctgtttcacgattcttcttcatcaagttctcagcaacatcagccggcgcgatattcgtttccttcattaaagactcgatcttactgaacaggggatgagaatcaagatccagatagttcttggctagagtcttgaacgcctcgaaagtgcaataggacaactctatatgcatatccattctccctctcctgattagagcagggtcaagtttcgccaagtgattcgtggtgaagacaatgatcgctcttgtccacaagcagaccagatcccgtcaatgaagtcaaaaccccgagagtg

SEQ ID NO: 8501 - DNA, 640 bp, Arabidopsis thaliana
tagtaacggcccagagaatcaagtcgagaccatagcgacacattaaaaaacagaggagttccatttctatgggtgatacggccaaaggagaaggccgaaaacgttgacgttttggaagatatggttgaagaaggtcaaggagttgttattgaatggggtcaacaagagaagatactatgccatatggcgatctcttgttttgtcactcattgtggatggaactcgacgatcgagacggtggtgagtggtgttccgatggtggcgtatccgacttggtttgatcagccgcttgacgcgagattgcttgttgatgtgtttggaatcggagtacggatgaagaacgatgtcgtcgatggagagcttaaggttgctgaggtggagagatgcattgacgccgtgacaaagggtaccgacgctgcggatatgaggaggagagcggcggagttgaagcaagcgacgagatcggcgatggcgcctggtggatcctcgctcgtaatttggacttgttcatcaacgacatcaaaatcgttaaaaatgatgtaattttacaccagaatagtgtttagcttcgaaatacctatagacggactgtgattatctattaccggaaataccggatattaaatttgaaattgaccag

SEQ ID NO: 8502 - DNA, 632 bp, Arabidopsis thaliana
tactaagatggatggtcatgccaagggtggtgggactcttagcgcgtaagtatcttgtagctgctgagttgtcatgtactcgaaatggtgatatgaaaatcatgcaagcttttccaattgggcaagtggatctcatctattttccatcttgttagtgttgcagctacaaaaagtcctgtcatattcattggaacaggagagcatatggatgagtttgaagtttttgatgctaaaccgtttgtcagccgtctcttaggtaaatatcatggcattgactgattgtgaggagttgactcagaatcttgataatgtatatgtacaataggaaatggtgatatgtctggattcgtgaataaactacaagaggtggtacctaaagatcaacagcctgaacttctggaaatgctctctcatggtaaatttacattgagaattatgtacgaccagttccagaacatgctgaacatgggcccacttaaggaggtcagaatctctggtcaaatattagtaagctaaagagcacaacgtgatgctgataagacaaaaatatgaaaatacggtgttggtttgtaggtttctccatgctacctggaatgcgtgctgaaatgatgccagagggacatgagaaagaa

SEQ ID NO: 8503 - DNA, 250 bp, Arabidopsis thaliana columbia
catgcctgcacgtcagaggatcccccgaccggatactttcgtgcgggagaatcatctctctggatccggatctctccgccgccggacagctttatcagtccggtgctcgtctggcgatgagaacgctccttcgccatcggtggtgatggactccgatttcgacgccaaggtgttccgtaagaacttgacgagaagcgataattacaatcgtaaagggttcggtcataaggaggagacactcaagctcatg

SEQ ID NO: 8504 - DNA, 563 bp, Arabidopsis thaliana
gaatatttttcaaggcgcctaaataccgtctaatccgttttatgtctgcattgtccgccaaatctacttcaccgcttaatggatccgattttttaaaaaataaaacggtacaggagcgcctagcgtcttgacggacacctagtccgcttttaaagagttacttcactctgtgaatcaaaacagagaccttgagcccaaacatatgactgaaaacagttgtcttgtatagactctgaaatcgtgaaatggtacaaagactcttaatcatttagcgggtttaactattaaaagcctctagctcctctagaaggttctattgttccttccttggtaaacgtttcagtttcacacactctcatctgaaaaaaaaaaatacagatgagattgaccaaaacaagccctagcttaagctcaatctccgccgccgatattctcacgccggtatgattcgaacaacattcgcgaccgccatcgctcatttccacacgcattctcatggaggagctcaagctcgtcctctacagaacaacacacgagaagtaatccattgtcctgaagcttgg

SEQ ID NO: 8505 - DNA, 570 bp, Arabidopsis thaliana columbia
  unsure (1)..(570): unsure at all n locations
nnnnnnnnnnnnnnnnnnnnnnntaaagcaggataactgggaaacggctggggctattgccggcggggcagctgctgttgctggcctgacgatggggatcatcgctctatcgaaataactgaacagggcgcggagttccgcgtctttttaacgatacagtatctctccataagataaaatattgctatattctgctgggtaattccctgctgatttagcatgttacatcgcgttatttcgctgctttcgaaataacgcatcaatttaattttcacacttcccaccagaaatatactcacgctaacaatcattattctgcttagtaaaacacgcgtaaatattttgcgccaaaatgtggcgcatgtttcattttcgcaccattgcggggcgctgtttttattatttcctgtctacactcagcttattgcgacgcgaaatcgtgcgcaaaagctggcactacttttgcttataagaggatggccacagacaggtaaaagacgtttccaaacgtcctataacgataattttcgcctcacaggaagcattatgaaaaagatgatgatagcacac

SEQ ID NO: 8506 - DNA, 547 bp, Arabidopsis thaliana
ccgacttgtctcgccgtaattcttcttctgcttcatcttccccttctataagatcatcgcaccatctccgaccaaatcctcacgccgatcactccagaatcagtttcgcttacggcggaggagtcaacgattacactttcgcgtctgattcaaagcccttcgagatggcgattgatgttgatcggagtatcggagatcggaacagcgttaacaacggaaagagtgttgacgatgtttggaaagagattgtatctggagagcaaaagacgatcatcatgaaggaagaagaaccagaagatataatgacacttgaggatttcttagcgaaagatgaaatggacgagggagcttcagatgaaatcgatgtgaagattccaacggagagactcaacaacgacggtagctatacatttgattttccgatgcagcgacacagttcgttccagatggttgaaggatcaatgggtggaggagtaacgagaggaaagagacggagagtgatgatggaggcaatggataaagctgcagctcagagacagaagaggat

SEQ ID NO: 8507 - DNA, 322 bp, Arabidopsis thaliana columbia
actctagacagtgtgctctaaagcaaatcgtccagcgcctgggcaacgcgagtttctagctggcgcaacgacaccgtgctcagaattttgcgcgtttcttcgtcgttatcgacatcgctaagtgctgttaacgccgcggtcgcctagcgcattttaaccggcgcgtcagcgactttttgccgtagctgaactgtctcttcgtttatgctatcgatttgatcgagggtggctaatgtatcagtcagatcctgcagcaccagttagtcctgagcagcaagatctcagtgagaatttagtgagtcaagttgcccctgcaggtccg

SEQ ID NO: 8508 - DNA, 467 bp, Arabidopsis thaliana columbia
catttacaatcatctaagctaaagccaaaccaaagtggacaagcttaccggttcggttcagttcggtttgttgttaaaccgttggattttcactggtctgaatctgatctcatcactcactgcatctttaaagtaatcagctttactggagaagacattaggttaggtggtcacgtttgttcatctctctcttatatatttgtttaaaggcttcgtctttgttcatttgcttttgttgatctcattacttgttcatcaatggcaagtctttgtttccaatctccttccaaacccatttcctatttccaacccaaatccaatccatcgccaccgttattcgccaaagtctccgtctttcgatgcagagcttccgtacaaactctcgtcgccgttgagccggagccagttttcgtctccgtcaagacttttgcgccagcgaccgtcgctaatttgggaccagggtttga

SEQ ID NO: 8509 - DNA, 597 bp, Arabidopsis thaliana columbia
gacaaccaccacgaagaagctactacaacagagagtaaccagaagctgaaatattaacagaggcaagcaagcgtaatgatcaggtaggttcttgaatcattacagtgatctatttgtacataatttcagtgatgtatggttcctagttttgagtctagattcatatgaaactgttgtgaatctttagactggtgtatcatgcacgtgtcaatagagtctcacagatgcgtaacatagtatagattttgtattacaagacaagagtgtgttttattcaagttacaaatcatacatactacagactacagttgttgtcaaaatgctcgaggtgatgaatttaaatagtcatgaaagaaaaaatacagtacacagtatagacacacacactcatacaagattcttgttctgtttttctccactcacttgagtgaaaaaatccagagaaagaacaaataatcttgttcggccaagatttacaaggaagacgctgcgggtgtgaacttaagcgaaacgctgttcacgcaatggcgttcatcggttggagtagcgaaccttctcctttgaaacatgccaagatgccacacatgttgccagttg

SEQ ID NO: 8510 - DNA, 1191 bp, Arabidopsis thaliana
actctatcaaagggtctcacttgttcgtcaaagatctcaacagtttgcatatatcgattttttgaggtcttgtgttatcttctgtttctatttgcaattactgcgactacgctatttgtagttttggatttacttcaatgacagtaacagagggaaatgacatcaaaaagacgatatactggattagaactatcctctcgagcgtagtgtgatagcataatgtgctaatgctgacaggaaaaatgctaatttgtgattcgttgcagctacacagaatccgatcctgtgaaaattgctgttgagggagttgataggttcaagaaagaaaagtgtgatcttattattgttgacaccagtggtcgccataaacaagcagcttctctctttgaagaaatgcgtcaagttgctgaagcaacggtatgctctgttgtcttgaagtctgttttttgttcatggttgatgttgcaggctctgatcatggtaattttcactgttcaggaaccagatcttgttatatttgttatggatagcagtattggtcaagctgcatttgaacaagctgaagcttttaaggaaactgtatctgttggagctgtaattattactaagatggacggccatgccaagggaggtggtgctcttagcgcgtaagtatcttgtagctactgagtcttcatgtgtactcgaaatggttaatatgaaaatattgcaggctttggtagttgaacaagtgaacctgaaccattttcatgttgttagtgttgcagctacaaaaagtcctgtgatattcattggaacaggagagcatatggatgagtttgaagtgtttgacgttaaaccatttgtcagccgtctcttaggtaacttttatggagtttattgaagattagcagcattgttaggagtaatcagaggctacccaatgggccgggttattcactcataatcttgataattaatgtctatgtacatcaggaaagggtgattggtctggactcgtggataaactacaagaggtggtacctaaagatctacagaatgaacttgtagaaaatctctctcagggtaactttacgttgagaagtatgtacgaccagttccagtgctctctgcggattcccttaatcaggtcagaatctctagttcaatagtagtctgtaccatgtggtgatgattaacaacataatgtgt

SEQ ID NO: 8511 - DNA, 1284 bp, Arabidopsis thaliana
ttcgcctggctcctctcttggttgaccaaactatccacatttttagtttaaattttcctaatatattataggtttgattctaaaaattatgtacaagaaatgagaggtttttcatatttttatatgctgtgaattaaaccatagctaaattgttgttaatatgatataaatttttattgcagtcgtactaagagcatcttccttcttatttctggatttgaattgggtttatgcttgtttgatcctgagtttctgtatgtttggtattgatatagggtttgaggatggatactgatccctaccaagaattaaggatggatactgatcatatgacatacgaggtatgtttgtcaatatcgcaagagcagacaaaacattataaatttatcttatcatcttcattgagtgtgtttttttggctctgcacagcaacttctacagctgtgtaacaatatgggctatgagaactctggtgtaaaagcaagcaacatagaccgttgtcttcgaaacaccaaaccctccgaatttcaatctcttgccgataaaatatgttgcatctgtcaggttaaagtccagattgaatctttcagaaagattattatagaaatgagatgcgttcatatcctcactgtcaattgattacaggatgggtttcagaagagagctggggttggaaaattgaactgtgggcacaacttccatgtcaactgcgtgaaaccatggatattgacaaagaaatagtgtccggtgtgtcagaaaacagcagacgatgatgaacatcaaactcaatcatatcaagtagagacaattgaactgagcgatgatgatgaagaggacatgaacagtcgcgatcaccaacagtatgatccagagcaactgttgttgttctatgaaatccctaaaggaagaacacacggaccattctctctcacgagtctgaggaagtggtgggatcaggggtactttgatggcttcccaaatttgaaagtatggatgatgggtgagagcatcgaaactgctgtgttactcaccacaattctaacataaaggaccattttgcttttgttactcattaaattattctagctaaggcagttgaccagatgaaataaagtatctaacgtctcatatcaaaaccatttaatctgttgtatatagaacaggcaggatctacgttatatgaaacataatcttatataatgtgaatattatatgtgtatactcacacgcgtaatggagagggtttactgttgaccaaaggtgcggcggagaagcgaaaggaag

SEQ ID NO: 8512 - DNA, 607 bp, Arabidopsis thaliana
ctgtccgagataactcaacttcatgcaagtcgcctttcagatacattggtgcagaagcagaattagatacaatctcatccttcttctgtatgagctctctaagcttggggtagtcttccacattggtaagctccagctcccgaatgaaattctggggccgcattccagtatccacaaagttctgggaatagtcattttgctctcccctagaaggagctttaccaggaggtccaccacctcgaggaggaacccatccccctgaagtcttatcagatggcattccacgtcccatttgtccagaaatattggacccaggaaagttaggaggccctcctctatcagaacctggtggagtaaagaacatattcgggtttggtggtgtgccgattgaaggaaatcttgggcctgatggtccgggaggaagaggtgaaagaacaggaggaacaggtagcatattaccatcaacacctcgggccccaggccatataagagttggggcaaatggaggcatgaagacaggggtgacagaagtgcccggaattggcgacatgccaggagtaagagaatgaatgggactgggtggtggcattccaaggtttgcaaatgg

SEQ ID NO: 8513 - DNA, 559 bp, Arabidopsis thaliana columbia
  unsure (1)..(559): unsure at all n locations
nnnnnnnnnnnnnnnnnnnnnnctaaaggcacgaccacatcgggtgcgtacatgtcgatttcatgaatcaactcccggtcataggcttcacgactgtcaaacgcgctggcgatgagcgtatgcgttgcaatacccgcctggcggcgcgttcaaggccgaacgcgtcggcttattgctgaaaactgcccgtacggtgcctttaattttgttggttttacaggcgtcaataattgcctgtaaattacttccgttgccggaaataagcaccacaatattcattattcgataaccacgcgttgttcggaatcagaggctttgatgataccgatatcccacgcgttttcaccgttggcattgagcagggcgagggctttgtccacttccggagcaggcagggcaataatcatcccgacgccgcagttgaaggtgcgatacatttcatggtgctcaacgttacctgccgtttgcagccagttgaacacttccggccactgccaggaagattcatcaatcactgcctgagtattatctggcaatacgcgcggaatgtttcccagaa

SEQ ID NO: 8514 - DNA, 847 bp, Arabidopsis thaliana
catcatgacgcactattatgaagtccatcaactcacctccaatctgacaacaagagtacaaatcttcttatgtggctattgaaaacgcatctttaactctaacatgcatgtcttgaatggcacagatgaagtttacctgtgcaccccatccaagacctactgatagtatggcagatggagcagaccatgacccgtctggtctccgagatattaccagaccagtcccgagtttgtatgacagtaaagccccagccttggcaaccgttatgattgccaaacctttagctcgactaagaacagcatgcggtatggatttctcagggtctagtcttgctacctgtgtaattcggtaactaattaaacagacacttacaaacatggaatgtgcaccgtaacatttgatactcaattttctctactcgaacatctctacagaacaaatatgtacttgaaaaaacaaaggatgagaatcaaacctggcagtaacctctcaacgtattagcagccttgtatatctcatcttccatggatagaccaacagggagattcaaccatcctcttgagcaagtccaatcaacaacatcatgctttgcaacttgcacagcattactaatagagttaataagaacacattgcaaaggatcaagcctctcgtagcaagaatcacacactctctgaggattcctttcccgaagccgactaggcatcacacaccgcccatttcgaacagtttctacaaaatatccctccgcagaaccgacaatgatgcctaccacacgtaattgcagtaaaaggagtagaacactgcatgccagtactagctggactatcaggtaccactcaggag

SEQ ID NO: 8515 - DNA, 405 bp, Arabidopsis thaliana columbia
  unsure (1)..(405): unsure at all n locations
aatgatacatcttcttcatcagcaccagtagcgaaaccccatatcctagttaatctctctctttcattggataccaacttcatcaagaattctccaactccagcgtcacgtnttcttgaagcttctgttttcgcccagtcgatctgtacttccattgggacagagtttcttaacgataagacacttttgaagagcttgtagaaaatatcacaagcttgatgtagagccaacttttcctcacgcgataaacaaccccttaagagatctacaaacacttccttcgatattattcgattgagacattgcgtacacttttacgcatccgagatttcagcccgcaactcattcaccaatgcgagcaaggcaacacactgcaagacatatagctgttttctgagcaagaac

SEQ ID NO: 8516 - DNA, 639 bp, Arabidopsis thaliana
cgtcttgattcatggatctcttctcgtatcaatggcgttacggagctcgtgtacagtcgagtatacgattgggactcgttaccgtcaatggtcgtgtcgttgataaggttttaacttcaaaattcgattcttcaaaaaagtttcaattttgcaatcaagtttcaatctctctcactctcttccaggtttcacacaatgtcaaatctggtgatgaggttaattgtacgatatcagagcttcaacctttgaaagctgaagctgaagatataccattagatatagtttatgaagataaacatgttcttgttgttaacaaaccagctcacatggtaaacacattctctcaatatactaacatcatgacttagaatcatcactaagaatatctctccaattcttaggtcgttcatcctgcgcctgggaatcctaccggcacgcttgttaatggcatacttcatcattgtagtcttccttgtgttgattattcgaactcagaagaagatgatgattccgatgaagaaacattttcagatgatgaagagatgactacctctcctagttcatatgctgcttctgttcgtcctggtattgtcataggttggataaaggacaactggattgctcgtgtagcaaggttag

SEQ ID NO: 8517 - DNA, 961 bp, Arabidopsis thaliana columbia
tctagtaacggccgccagtactctgctgcaccatatatctctatgaacaggtgctctatcaagcgacaatttctcgtgagtaaacctaactgctcaagtggattatccctgcttcctgaaatactaaataatgcaaaaaaaagtaattaccataaggaatcagcagaatttaaagtgaacaggcattcaagttacaaaaacagttaaaagcatagacggaggcgcctccaggcaaagtaaagtaaagcaataatgaattggagaattcctgaatgatccaaaacagcttacagtccaacaatcttcaaatcagtgagatttaaacaagctgacaacacaggagataaggacccgcaatctatcattctgagatggtaaaggtgtaggcttctcaaatgacccctagttgaatggaaaacgatagtatcactcagaagatgaaatacagatgttaatttgaacaccaactattcaagtaacaaaactggtaaacccagtttctctatctagttgtttcagagagcacaaatcgcattaatgtaacaggtttggtacataaattttcacacgtatatatttgataatcaagcaaatacccagtaaaaccatggttaaaagttagtggagtaagacaggatcttgtcagcaaagatgtagtaggttcagctgaggaagaaatagaaccaagtttgagggatctgcaagcataaaacgaaacctgagagatgattacatagatacctagaccaaggtccaccaaaataagataacccggaaagagaaaatcttacctgagttcttttccagcccgatggatcattacgcacacaactccattatcaacatcttcggcagccgttgtcaggtcgatgtgggagtaacatacacgatccatggcacacttgttgaacattgtgcaacacgcagaagcttgcatgagagacttcgtatcaagcattga

SEQ ID NO: 8518 - DNA, 458 bp, Arabidopsis thaliana columbia
tagcctttacttcattaataaacctcaataaacaaggatacatcaatattttgtttttaccaaaccgaataactatcgaatattaagttttacaaaaattagatggcaaaaaacttcaacaaaaaggaatgacacaccactatttttcagacagcttttttagtctcagataggaactcaactccccatctttcttcacctcagggatttggatcagacatttgtatccaataatctgattctggaacctcgtcaaataactctgctgccagttttagcctctgatcacgcattgcacggtcacctagaccaacgaaattaattcctatggctaaatactcaatgtatttcatagcatacacaccacaatcaccttcttgaatgttttgcggtgcagttttaaccctatagaaactgaatgcaacaacactgatttcttttttcttctctggtgacgc

SEQ ID NO: 8519 - DNA, 475 bp, Arabidopsis thaliana columbia
tattttatgtaaatttaggctctgatattattcatccaccctttttttaatgcggactccagctaatttgataaggtatgtacctttcgatggttgcagcgaggctttcgacctcacgaagagaagcatatctgtcacacgtatcatctagaattatttgaatagtgtaaatcatagtcagaataatcctcacacgtgagtatttcggattgatgtatgctagcgtacatgagtgcagttccacgattctgtctctgtagtaaggtggcaacttggattcaaagtcttgttccttgtaccatcttgcatccaaacgtgaaaaacatgtcaagctccaaaatgtggatatatcaaacatgcatgtaaagtattgcatgaggagattatagctacatactttgtaagaagtttgagttcttgaaggtaatgtagctgtaggaatttgaggttaagcatggaaacctcgagtatagtc

SEQ ID NO: 8520 - DNA, 495 bp, Arabidopsis thaliana columbia
caattgaaagcatattctttagacatcaatagagtcttcatagactaatcacaatcataaacacctgtagtgttcccttattttacgaactttttaataaataaaaaagaagaagataaattaattaacctcattgcaaaagaggaaaaacctaaagccacagctttccataaatagacccactcaccatctctgcacatcacccacatcttctaacagtctctcactttctctcttctctctctctctttcttttttgagtccgtgaaggctaagtctgaaagaatgacgaaggatgagttgacggaggaagagtcgctctccggcaaggactacttagacccaccgcctgtgaagacgttcgaggtgagagagctcaagaagtggtccttctacagagctgtcatcgctgagttcatagctactttgctctttctatacgtgactgttttgacagtcatcggctttaagagccagactgatatcaacgccggc

SEQ ID NO: 8521 - DNA, 575 bp, Arabidopsis thaliana columbia
caaaataaaaccaaacagaacttgctttaaaatggcccagtagtaatctatccgtgccaaattttatggtcccgtctacctagcatagaaagaggtcatttctgtacttacgtcaggcacttcgcatttgaaacagtcattgatctagatcccccattttccaatataacaatggcacaatctgtgtatttcttggcaacagctcgatgaagcacagtttcaccttcatcatccactgcatttggatcggctccagctaccagcaattcctattgatagtaccaattagcagagaatagttattaacatgataatagatataagacaagcataatatctgatacacttcacataagtggaagatttgcgatcatgttgtggaagctttaaagtgactgatagcttcctcgggagcagagacttacacgcatacaatcaggttggccatggtacgaacacacgtgagctacagatgggccagatccttcccgcagtctggacctcacattagcccgctttttaatgagaacgtgacacattgtggagatccactgctaagcaaagacaagaggagg

SEQ ID NO: 8522 - DNA, 1035 bp, Arabidopsis thaliana
cataatttttcgtaattcttgtataaactcactggctcattatcacattttcaggtattgttgggattatactggagagatttccagagctagctaggaaaaatgcttgggaggttgaagacggctcgcgatcaacgttactgcattatgcgtgtgacaaaggtgaccttgaactgacaagtatattgttaggactcaatcaaggactagaagaagctcttaacagcaaaggtttatcacctctgcatctagcagtccaaagaggctcagttataatcctggaggagtttatggacaagtctccattgtctttctgcgtaaggacgccgtcaaaagagacagtctttcatctcgcggcacgaaacaagaataccgatgcctttgttttcatggcggagaatttgggaactagcagcccaattcttttgaagaaaaaagatcaacagggaaacactgtcttacatattgctgcttctgtgtcttgtggttctccggtgagtagttttctttgtccctctctagtctctcctttaagaaaccatgttttggtgtgtgtgtgtgtgtttcttctcatatattttcctggaaaaattgcagcttatacgttacattgttggtaagaaaataatagatatcagagacagaaacaatatgggttatcgagcttatcaccttctccctcgacaagctcaagactatgagtttatatcaagctacctgaggtgtgacaccaagacttcagaagaagtggactctaaaaaggctgagagaaatgaaccacacatagggcattctgaggtaataaggctgcttaagctaatcgaaataagcacatcagagatagcagagagaaagaaaagcaagaaacatcatgttaaaagaggtcataagagcttggaacatgagatgcatatagaagcattacaaaatgcaagaaatacgatcgcgatagtggcagtcttgattgcttcagtttcttatgccggtgggataaccctgccggcggtgtttactaagatgggccatggaaaggga

SEQ ID NO: 8523 - DNA, 449 bp, Arabidopsis thaliana columbia
gtttatcgccttttgcggattcacatgccctgctccaatcgcaatttttttgctggtttgttaccatcctttatcgctttcccttgacgatcgtacaaatccgctgttgtcatcaatgcggatttgattgcagctggagaccagttcgggtatgcagaccggataagagcagtgattccgctaacatgtggacaagacattgaagttcctgacattacagtgaagttaactcttcttgaatcataaggaagtccggttggtcctagattttgaggccaagccgcaatgatattgactcccggagcaatcatatccggttttagtatcgaaggattggctaaactcggtcctcgagctgaaaactgagccacctccggtgctcgtgaccgtccaatcaccgtaccaccaaaaattatccgcgcctttggtttcaccgtggcattaacata

SEQ ID NO: 8524 - DNA, 587 bp, Arabidopsis thaliana columbia
tggagtgatcttcttgcttaaccgcagctataagaataaaaaaccgcgtttggcggtggaaaccggaccatcaagtctacagaagaaaaccggcatccgagaagcagaccaaagtcgtagagacagaaagaaagccgaccaccggaaaggctcaggcactactaagaggatgggtgcagcagctggagtggagaacacaaagctttcattcttgagggaagatagggaaaaatttgacctgcaagatctgttgaaggcttcggccgagatacttggaagtggatgttttggagcatcttataaagcagtgctatcaagcggacaaatgatggtcgtgaagaggttcaagcagatgaacaatgcagggagggatgagtttcaagagcacatgaaaagattagggaggttaatgcaccataatctgctttccattgtggcttattactataggaaggaggaaaagcttttagtatgtgattttgctgagagaggaagcttggctattaatcttcatagtaagttttcgatatttctacacttataagtcgttagatttatcgatgcttacgagtcacatgtttgtaggt

SEQ ID NO: 8525 - DNA, 543 bp, Arabidopsis thaliana
catatcttgagtcggtaccgaaatgggatctccaatagctatagatctgatagacacatggctgttgtcacccattggaccatctctagccaaaccgaaatccgaaagctttgcgttgtagttctgcagatgcagagaaacattaagataaacttctctgactgcatccaaaaccaaagctacaaaaagtatcaatcatgtcataccgaatctagcaagatgttagatgctttgaagtctcggtatataacttgcggttgagcattgtgaagaaaagcaagtcctctagctgcaccaagagccatacgaacccgcgtgttccatgaaagtggctgatagaatgttcctcctattatgagaaaaaagaaagaaagattaaccattgtgtataacaagttcttccatgagcttctttatctttgaagatttgaacttacttctgaataagtgattctcaagactaccacgagtcataaactcgtaaacaagaagcctgtgctcctcttccaagcagtatccaatcagtttcacaaggttaggatg

SEQ ID NO: 8526 - DNA, 583 bp, Arabidopsis thaliana
gtgtaggtggttcggctctcgcatatgctcttgctaaggtatgtaaagtggcgtcatagctttgtgtccaaatattaaatctgcatcacacttttattaactactttcttgtactaaaatctccgtattaataataggataaaacctatacacattatgtatgttttttttttggccagatagatattgcaatattttgtttttgcatgacacaatcaaaatcggctctaagaattgaaaaacgcctaaggatataagaacaaattaaagcgcaataattaggaatctttaaaaggaaaactaatgagaattgagttaggagatgtgtaactctagaacttttttcgtccacgttataatacctctagcactagattacaagtctacgagaacattttagtcaaaaagggaccgaatgaatataggaaaaaataccttaaggcagagtcggctttgaatacaaatattatacacaatcattttcctatgctaatatccgactataggatgggcgtcgagtacatgtgatcgagagggacatgagagaaccagaaagaatgatgggtgagtttatgcaacctgg

SEQ ID NO: 8527 - DNA, 889 bp, Arabidopsis thaliana
taatggtaaaaagagtcaacaacacctcaacatctccgaaagcaaaaagctgatatgcaatagcaacacttggtgaaacacctgaaagggagacgtgaagtattccgttgggacgactagaatgtacagcaacacctacatcagtgagcatcggttggaaccatccactcaagtaaagtattctcccaataccctatatatagccaagcagaatcagagaaacaattggaaactaaaaaagcttctattgaatgattaagactaaaacacttaccatgcggtttcctcggattggtaacgacaccaagttggctcgtgaaacgcatcccctccctgacaagatgtagactgcctgacgagaagccctagaaatatatgccagtacactgacaatttcctgttggtcgaggttcaaaacatctcttttagaaaactcaagaggagaagaagttgtatggaaacagaactaatggaggaaaataaactacttacggctccatgcgggatcactaggattctgcgtgcggtgggtggtgacactacaaagaggtgaaaatgacattttcaagatccctcaaagaaaccctaattttgaagattggaaatatacttacgaggaggcggcatattacccaattgaatcacctgctctccttggccattaccattttctctgtgatgattgaagaaaaagagatcattatatatattgtttagattcaagactccaagattgataaatacaagaaaatataaattgtaaataagaaagaagaagaagaagaaaacagacgttgttggctgatccctgtaatcgaagagttctcgctcatgtttttcaaatcgttaacttaagcggaaagaaagagattgaagtatggaggaatgt

SEQ ID NO: 8528 - DNA, 558 bp, Arabidopsis thaliana columbia
aaacaatggcggatcagctcacagacgatcagatctcagaattcaaggaagccttcagcttattcgacaaggatggtgatggtatgcttcatcctccctttccctctatcatcgtaggtcttggccttataattctgatttagtttctgcttgatttggttcccttttgatatgtatcgattaccgtggtgacggatccattgttcgtatcctcgcattgactcttttcgttttcgatgttccaaatcattattgaattcaaggatttgtttgtgcctttgttcaaattaaagatctatgtagttcggatgaaatatttgtgaatcagccctgtggtgttagtgatgattcatgttttcaattcgtattttgaccagtttttattgatttgttctgattctggatttgcatcgtagtaacaccaatctttgattactttgtgtaggttgcattaccacaaaggagcttggtaccgtgatgcgtccctcggtcaaaaccaaccgaagctgagcttcaggacatgatcaacgaagtgatgcggatggtacggaacattga

SEQ ID NO: 8529 - DNA, 800 bp, Arabidopsis thaliana
gaaacaaacattcaacacaagctcagttcgtgaattggagaggtctctgactcaatgggagagatcacggactctttaataagttggagtcttttctttacaaatacaaaagatctattagatttcatcgttctgtgagttctctctctcaccacttgtcaaatgcatttccctgcgtgcagttaaaaatctcccatagttttaatcaaaagccatatagtttcacagaaggccaagcgtcttcagctgctggacatgctcagttggtaaagccgggggagaccattctgaccccgtcatttcgccatctacatcctcgaccacatactcctacaaacaccaaataaagaaggtataaagaaacattgaatgataaacaattagaaaccgtagaaggtaaataaaaatcttacctttgttagcattcttttggcgagaatgtggtaatggcgctgccaaatgcgctgtccaaccatggttgcaaccaatacgctatagaatataccgataactgtaaatagaccgagaattactaatgccgttatgaagagtaatggcaatccggcttcccctgcacctccaaggcaacctccacactcactaactgcacttgcacagccttcagtacatgcggtgcaatctgcccacatacaaatagttcctggtagatggcagtctgtgcatatcctgcatattgatgatatatatgtttattaaatgggagctgacaaaatattttcaatagtgtatgtacttttgttgtgttgtagtttggcagataataaactcgatcatagtag

SEQ ID NO: 8530 - DNA, 511 bp, Arabidopsis thaliana columbia
ttttttttttttttttttatcttcaacacctaatggacaaaattttatttttgtgtattgttttatgtctctctacaaaatcacatgactgattgaggaatttggatccgaaacgatgactagagtctagatatgacatgtattaagggataaccattagttactcgagttgtttagctaagtaagagtccgtgtacgtttttcggtttcttattggctcttcgaatcaaaaatagatgatgatacaatgtaacataggcaaggacaaagtcatcgttgtaaataaagtcaatgatgtaagaaatacaaatataaccgccatttattaatctcacttactctgtccccaccatcactcactgattttattatcatcaaaaacattgagatcttcacccttatcatttgatccaaccatggctcgactccttctcctcttcttcttcttccttattctactccattacgcttcttgttccagacacgaacaagaaaaagaccgaatctttca

SEQ ID NO: 8531 - DNA, 571 bp, Arabidopsis thaliana columbia
gataaattataacataatagctaaaacagtaatagaaaacactgcaaatttaaaatgctgattataacgttttgataacacttttgtgattagtaaatcaaactcattgttagttgttatagatgtacaaaattgagcaacaaaagtaagttaattacctgaagtagagtaatgacatttgcacttggaaatctgtacgaagaaagtgctgctttattgaacattactaataaaactgcaagtaattggattttggactcattatatatacaataaatataagtatgtgaaataaaagatttcaagaattactagaagaataaaaaataaaataagattaagatatataccagcagatgccatgtaagagatggcggcgaagactcccgtaaaggacatggctgacgaagaaggtctctcttttttcgtttcttctccaattgaaatgtctttcgtcgaaggatcaacaacaatcgcaaccttatatttctctggtgacatattttcactcaagtactacaactttttttgttactctagatattataaaaatagtaagataaatatatat

SEQ ID NO: 8532 - DNA, 553 bp, Arabidopsis thaliana
cgtattgttacgatcatatgaggtacaaggtggttttgtcggagtgtgttgtgaatccggctgaggctaagcgtctcagggtctatgatccggtcacgttcggtgggattcctcacggccaccgtcgtgggaagcatcggagcaggagccgattagctcgaactgagtcgatatgaatcggtgtatattgttcggctagagggcatttttggcattttctgtcttgtataggaatactatgaattatggactgaataatggaatgacaccgctatattttgatttcctccattttatgaacattatcgttttaacataataataaaatttcatttttctataagtaaacaaaatcgggattataattttagaatattttacgtatgagaaataatagaatgatgagaatactaaagtacattaaaaatataatgtataccgtgcatacaatgattcttttcttgcatcttcttcatctagctatgcatatatatatgttctctattattttggttttcacaaaattgagtaggtttgtttaccttgtcaaatg

SEQ ID NO: 8533 - DNA, 1439 bp, Arabidopsis thaliana
tcgatagtaatgatgtaccaccgtcacgatgtggcaaagaacataaatttgagattttcggtttgccgttatttaccacaagaaactgaaaactttgcagaaattagagaaaagcaataacaaacacgagaatagccgacgctagagagaccgacgccggccaaagtgatgaagttttgtgaagttgccttcaatggcagatcgcttgggagagagaacggttgtcgagtcgtttgcgtaacaaagtgatattgaagggaagttaaaatgagtaatttggctaacaaaatcggaacttttattagattttggaccttaatttttaaataatatattcaaatttgttgtgtgttttcaactttttatattatatattctaatataatataatatcaccggtgtgatatgctaatccagagacaaagtgacgagagagtaatagaatagacttcttattgtgttgtgtacttacaatgaactgaagagaaccaacgtatatatacaagagttgcttgaagagaaagttaaatttagataataggataagttttagttaattggaaaataagatacttaggaagtaagtgacaaaaataataatagtagtatttatctaatctcaacagtatctaaataatttgtgttaatcgtaaagttttatcacacaatttacgagaatatcacaaaaccataatcatacatttcacgcccggattcatcaatgagaccaaacataggtttcaaaaatcagtatttacacacaatcaataaatatgatctggatacatatatataactcaaaaaggatcaaacattgatttacatacacacgttttatatttgtatatatagaagatctacaaaaagaatctgttatatcgccattgttgaaataaaaacatcttagtaccaatctcttcgtgtgtgttgtgtgacactgattctgtcttcatgttatgttcactgccaaaaaccaaaaacatgaagaatgttatcggttacaagaggaaagtgatgaaaaatgaaaatatggattcagagtagaaacatataacactactgattgtctttttgagcagccatagaagaagagcaagttcgatgctgaagatcatacgcaaccatgttttatccaccaagaatccgtaaacagtgatccctgctctgttgttctctagataggtcactaaatatatacacaatagagaaaccaaatcagttaaaaaggtgaaaatgatttattccaatcatagtctaattcaagattttatttacctagagcttgacgtttctgagaagaaatggcgcgggcaaagattggatgtatctcaagatcattgtcatctccttctccttcttcatcatcatcagacgattgaccaacattacgacgacgcgatacaatctgggaatgttgtgtagttcgtggacatttagga

SEQ ID NO: 8534 - DNA, 665 bp, Arabidopsis thaliana columbia
tttttagtagtaaatgaatgaaggtgttaaaaaaaaaacccaactgggcatggcaaagaatgtcacgaggcccaaacggcccacagaaaggtaaagtaaaacgttggccagaaggaagtggagttcggatccgggtcaagtcaccggagacagcgactcacggcctctttggtggatcctcggtggctctctcagcctctttgctccgcccgcgaatctttcccgtgagtcgtcgtctgttcatcagagattaaaatgtgtaacctttttccattaaatcatctaattttctaatttgtcgctttgttgtagaattgtatctatggcggaaccaccaaagcttagggttttaatggtctctgatttcttcttcccaaactttggtggtgtcgagaatcacatctattacctctctcaatgcttgttaaagctcggtcacaaggtcagattcttctaagttctaaatcaacaaaagttcaaatctttttgcatttttagccataaagaaatcaaattctcaaaaccccgtttatgctagttcaatacgatgtgatcagattcaaagttttaaatcaaagttcaagctttatcacaatagctgtaacagattaaaagttcaggctttatcacaatagctgtaataactaatgtacatagtgtgatag

SEQ ID NO: 8535 - DNA, 533 bp, Arabidopsis thaliana columbia
tgcgtatatggcacatggtctgttgtagcagtacttaataccaaactttcttttatctcctaaccaaccggcaaaaaccaaatattgagctgatccattactgtttggactccaaacaacctgtccaacacttattgatctaggaattcctttgattggctcgacctctccactgttaacagaaaaagagaaacaaccatcataaaaagtactgggtagttgttcttttcttatggagagattgatggaaacctgtcaacattgataacaaacagtgcaggctgcctttttccggcgtatgcttctccccattcctcttcccaatccccttcacctttccagcttccaatacccttgtccaaagaattttctttcttgtaataaccaagatgatcaaatgtaggcttgggacgagatggctcctcggcgacatacgcaacatgagtctcatctgaatcccaagagatcccttcaaacctatcatacataagccttactcatttttatacttctacaagaacttgtctttaaaa

SEQ ID NO: 8536 - DNA, 548 bp, Arabidopsis thaliana columbia
tacttcattacttacctgatgtccattctccaaaggctgcaagaggtagagggaagaagtcaaacattttcttcaaaatattatacatgtaagtatgagagattgtaaatttaccggagcgcctgtaaatgacacctggggagacattctccgggaagcagaattaaccagcgcttgctgccggcgaatttgttctgctgtttccatgtcagaaaccttttcctcaagcctaaagagaaaaaataatcaagtaattcatatgtactaactaatgtgagtacaaatgtatttcagagaaaagataaaaagattgacactttggagaagaaaaaatgcaaatcgtcaaaacctttgcattgatgtcttcaaatcaattagccctgtctctgcgtctaaagcttgtttcagcctctcttcgcaaagtctacttgcttcctcgtatttcttttcagtttcatctattttcttttccaaggaacttaccaaatcctgttgaaaagttatcaaattaaggtagagatggagaccaaatcaaacaattacagaga

SEQ ID NO: 8537 - DNA, 389 bp, Arabidopsis thaliana
ggatgttgcacgatccaaagaaacgaccaattcagaggcaattaatttttccgtcaaaacgccatctgctcctcaagtagctgctgtatatgctcctaaacctcgagatcgttcatgcactcattgccatcgccaaggacatgatgtgacagattgcttcttggtccatgggtttccagaatggtattacgaacaaaagggtgggagtcgtgtctcatctgataacagagaagtcgtctctcgcttggagaacaaaccggcgaaacgcgaaggtcgttcgagcaaaggtaacggtcgcggtcgtggtagagtgaacagcgcacgtgctcctctttcatcttccaacggcagtgaccagataactcaacttatctctctactacaagctc

SEQ ID NO: 8538 - DNA, 541 bp, Arabidopsis thaliana
ggcacaaccgcggcaggcgaccactggtcaggaaccatcagaaaataagccgtcatcgctttcctgaatcttttcttgtattgctgcggcgatatcactgtgggagttgagttcttgggtcctccaaggagccctgaagtcttgacccaagtctccagatgtttgtcccaagtgtattgcctcatgaaatcgataattcctagaaccagctcgtttctttcctcatctaccccgactagtaaggagtaatccattacgtgaatcgacttcagccagaaacaaaccaagatcttgcatcagcattactatgtaaagctcaagaacaagttcggtatttcaaagcggtttaaaagaagagtaacaactggaaacttacagcaagaaatgatgtatcattccagactgctctttcaagaagccgttttgccttgctcccaacaaatattggagatgttggcattgcttcgacaagattctgatccagcaaaactgtattgctacacttgtatcgggattgtaacgacccgagtggagcctttta

SEQ ID NO: 8539 - DNA, 453 bp, Arabidopsis thaliana columbia
cagtgccatatgatctgagtatggaaggtagcaaggaagtgtgggctgaaaaatttctggagaggatgagttcaaggtgggaagaatgcaaacacatttggagatcattagatttgcaagtttctgaatgttatcctcaagcaattgtgctttgaggctttttacatttcagacagttgttcactgaacttggtaaagagtttttattcatcaaagttactcaaacgacaaaaaaccttgcaattggaataaaacgagattcataacagaatagaacggttctacaagaacacagagccaaaagcaggggacaataaaacacaaagccaagacaaggtaaaacttgaagtcctaaaaatccagacattgtgaaatcagtttcctttcaggaggctctgaacttcagactctgtagggagagctggaatagctcctttctttgttgttgtgatg

SEQ ID NO: 8540 - DNA, 563 bp, Arabidopsis thaliana columbia
ccacgtccaacggatgagagggttgtgattaaggaggaaggagggaggaagtatggtgtgattaagtttagtggtatagcgtcggagagtgtggtgagtgagaaggtgaagaagctgagtagtcatcttgagaaagatgggtttaagatcaccggagatttcgttcttgctaggtataatcctccatggacgttaccaccgtttaggaccaatgaggtcatgattcctgttgaatgaatttgattcaaagtttcctgcttttggtttcaaagaacttgtttttattttgtttcactgtgtttgtagttgtaagaagcataacaataatgtatacaaatctgagcttttgaagttaaatactataaaatgaattgctaaagaagttgcagaaatgtttggattgagtttattcaaaaacggggtttgatcattttaaccagagaaaagcttaaagacaatgacaattaagttaaagagcatgagaggaagcccatgtaatgacaggcgtggatgagaccaatgatttggcctttgagagagtttcttttgcccgtttggtggag

SEQ ID NO: 8541 - DNA, 536 bp, Arabidopsis thaliana
aacaaggctaagtatttaccctttgttgttgtttcaggagcaatttcatattcctgcactcataattatcgcctctttggcttgggaccccaagcgaaccatccccaccactacacattcaaattcattcagacacagtataagtgcatctggaactactaaaaaaaaagttgcatttcttgagcattttctaagaaaccaattaggatggatttgcatccccaataagacttacatgacccagcagtttctacaaacatctgggtcacattcccgatctgcagcaaagcatggacactggcggcttcgacactgacttttggcacaatgacaacctctaaacctattcttgcagctctttgggcaactacacagaaaatatagtttgttggtaatgagattcaaagctaagaaatacagatgtggataatcatagattacattacccgcagtacttctcgcagcaagtcccgtttagcaaacaaggacattccttcccacaagcaattttgcagttacatggattaaactgacgg

SEQ ID NO: 8542 - DNA, 1319 bp, Arabidopsis thaliana
tctgtcgtattctgggcttcgagcacgaccataatctggacttggacgcctaccctgaccagggcttggacgcctgccataatctggacttggacgcctacgatacacaggactaagagaccttctcgggctacgaccaccatttcgatcatctctttcatcgtcatctttcaacgcatactccacggaaacaaccctatccaatattttgctgaggaaacaaaaaggggatgtttttagagaggcaaatgtactaaaagtttgacggaaaaagtaactagaagaagtgttgttttaccttctttgagtagcttcaagggcttttgtagcatcctcttgtgtttcaaactgaacaaatgagaagttgcgtctgatacgcacgttggtgaccttaccatagggctcaaagtgtttttcaatgtcgtgctcttttgttctaatggggtcaaagttaatgacaaacagtgtctttgtaggcttcagatttgaaggggctttcgcgtcaccacgaggcctgccacgttcaccctgaaaaccgaaagaaactttaaaaggtttcttaaatatgcggcatagtgcaagcttcaataaaaaccagaaaaaaatttatacctttgcccattcaactgataacctgcgtttctcatatccaaaaggaaaattgtcgagtttgcgaatagcgtcttcagcatcacgttcatcctcaaagtacacaaaagcatatcctgcaacaaaagaaagcacaaggattacaaaacgcaacacaaagagtgacaatcctcctgtccattaacctgctgcatatctcgtttaccctagaaaataactaaatagatatacaacaccttcatataagtgaaggctggtgaatatgagagatgtagaggcattccatgatgtagtagaaaaacaagatttgtagcataacacaggaattcaggatttttatttttaaaaacaccaattttatattaaaaaatctgagtgatttgccaggcatgcttaaacattctgagtggaggagttcagatatggaaggcaaggcatggcaatgatggattcaatagacttccatctgaagcatcgatgattggtaatagacagacaaattccaaagtttctctagagtcagtgaagattggtaggcacaagatgataaaggcaggtatgaaaatgtagaaatgattttgcaggaagaagaagaagatggcaaatcttgttcctttgaagaaaagttcctgcgaacaaataaacactcaatacaaccatcctctctactgcataaaccccctaccacacttaacacattcgggaaaaat

SEQ ID NO: 8543 - DNA, 594 bp, Arabidopsis thaliana columbia
tagtcacttcctctttgacattattattctgcatcggcttcatctctaagccatcataatattcagtctcctcatcatctggtatcacatcagaatttccctttcgctccttgaccccgggaaacttaacagcctggtaaaaattcctaaaatgctgtttgtacttggacaaaaaactcttctttgcagcaccaccactagtagtctccttcatagttctagtaggattggcagatgatgatgatgtatcgcttgtttctgcctcagaatcttcttcttcgtcttcttcctcgtcttcttcgtcctctggatcctgatccttccttttgtctttgggatctgaagataacagtgaaccaaggaatgcagagaaagaagaagtgtctggttcgtcaaccaaatccttaggctgctctgcagttgtagactctagctgatttctcttagactcatcttcctcatcctaattaagaaaaaaacaattgaaaattaacaagagctctcattaaatgatcacacaaattgaaactcccactagaaacactcaaaatcctgaaacaactaagcataaacacaaaagccaagagggtacga

SEQ ID NO: 8544 - DNA, 797 bp, Arabidopsis thaliana
taatcaaatgggattttggagactcttgtgatagctaataacaagcaaattcttcttagtcaaatttgactgataaaacaaaaatacgagaatagccaaaacatcattaatccaaaataagacatgcttaatgaggttcaacaacttaattaactcccaaaataacaatggttctcaaaagtaaaaatttcaaaaactacaaaagcttaaaagccatacccatcgacgccttcatgtttatatcattaagcatcaatcatgaagttggtgcttgattaacggtactgtagaaacgagaaaacaaaatcagaaacaacagtcttgtgtaatgatgttaacacaattcatagagtttggaatttaccttaatgaatccaatctccttagcgttgctacggaaacactgtctgcagcagttcaaaccatacttccggatcagaccgtgcgagttcccgcacacacggctacacacacaaacaatgattgcataatgcaaagtcagaatcataacttgacttccaaatataacacaactaatctcatatctaaaccaaatacaacaatctcatacataagctaatcactataatcagctacacacatacaagtattgcataatacaaagtcagaatcataacttgactgccaaatataacacaactaatctcatatataaacaaatatcacaatctcatacataagctaatcactctaatcagctacacacaatacaaagtcagaatcataacttgcctgccaaatataacacaactaatctcatctataaacgaaatata

SEQ ID NO: 8545 - DNA, 486 bp, Arabidopsis thaliana columbia
gatatttgtttgattctctatcattgacaactaacccggtcactggtaattataatggagacgacttcagtggtatttgtttaaattatttctttgtcttgaaagattctaaagatgttttgatccaacgagtttttgctgaaaaactgaatgatggaaacggatttctcgttggtgcgtaaggaggaggaagaagaagaagataacaggaatgggatgagttatttgtcaatggagatgatgaagaaggtgagctccatggcggctccaatggtggcagtttcggtttctcaattcctccttcaagtcatctccatggttatggctggtcatttggacgagctctcgctctcagctgtcgcaattgccacttccctcaccaatgtcactggtttcagcctcatcgttgggtttgcaggtgcgttagacactctttgcggtcaagcttttggagcagaacaatttggaaaaattggtgcatacact

SEQ ID NO: 8546 - DNA, 417 bp, Arabidopsis thaliana columbia
caatcggtaaacctgtgaataacaacaacacatattagaccaatatctagttctatgagctaatcatcgcagcgagaaccagccttgcacacttaggattagaagtagacaatccagtttacggttccgttacacgggtcagctttaggctaggattctcttaagaacattgtgtataacttttggttacgagaaatatatttaccttgaacaatggtccactctccattacggcaggttacggggaaggagtagataagtccagctggaacattgtaggatccatctgagtatactcccattgaaacaaatgtgccctgagaaatcaagtcgaagaacatattagttttacttagtacacaaaacaaccaattgattcgagataaaacagtagtaatgacgaacctcaggtgttca

SEQ ID NO: 8547 - DNA, 505 bp, Arabidopsis thaliana columbia
gtggatcacgccagcttagcaaagcttgtaccctctctccctgacttgccatgtcaccaaccactgtctgaaccctcccggcgatgctcctaactcgatcgtatctcattctcacaacatcaaatcctctgcttgtcggaaatgtgtcaaactcttcatcaagttcatcgggaaacacagtttctgcgtgagagatacgcgcgtccatgtgcggtggatatctagaccgccgcctgaaacgccaaacgccaaccgcagccgtgtaaagaagcaaacacggcaatagaagctccggaaacagaaccataaacaagaaagccaaaacaaaaaccgtcgagtaaaccggtttactccaacttctcataacttcaaccaacttagcaaccgcgaccaaaccggaaatcacgttaaccagtcggaaaaaattagctttgctccttctcatactccaaacatggaaatcatgatctagcatatattcacaacctcacgacccaatggtggc

SEQ ID NO: 8548 - DNA, 799 bp, Arabidopsis thaliana
ccagagatgggaaaaactcctggaaaatattgatatccctccacagctacactccatggaagtggaaaacaagattgaatggcttgcaagtacaattacagaggctacacatgaccgggataatctccaacagaagattgataaccttgaagtctattgtcaatcagtaactactgatttggaagtctcacaaaagcaagtaggtgatgtcgagggaaatcttcaatcatgtgttagtgagagggtgaatctttctgaaaggctggaaagtttgattggtgatcatgagagtctttctgcaaggggcattcaccttgaagttgagaatgagaaactgcagaatcaagtgaaagatttgcatgaaaaattggttgagaaacttgggaatgaagaacattttcagactattgaaggagacttgttaagtttgaggtacatgattgatgatgttatacaggaagatggcttgcaagatttggctttagcaagtaattctgagaacttggatggagtgctgagaaagctgatagactattataagaatttggtgaaatctagtttgccaggtgaaaccgatgacaacgtctgtgaaactcgtccatcagatgctgatgttagaagcggagagtcattgggtgcacatggagcaacttctcatgggcaacattttgaattgtctgattctaatgtagttgaagcaacaagtagagacatagcagtcgtagagacacctgatgtagcttccctaacaaaagatctggatcaggcactgcatgttcaaaagctgacaagggaagaa

SEQ ID NO: 8549 - DNA, 472 bp, Arabidopsis thaliana columbia
ctcatgtgaacattgtttctcttcttggtttctgcttcgaagggtctaagagagccattgtgtatgagtttttggagaatgggtctctcgatcagttcatgtctagaaataagtcattgacacaggatgtaacaacactatatggaatcgcgctaggcatcgctcggggattggagtatttgcattatggctgcaaaacaagaattgtgcatttcgacattaaacctcagaatattctgttagatggcaatctttgtcctaaagtctcagactttggccttgctaagctttgtgagaaaagagaaagtgtattgtcattgatggacacaagaggaactataggttacattgcaccagaggtcttctcaagaatgtatggcagagtctcacataagtctgatgtgtatagctttggaatgcttgtcatcgacatgattggagcaaggagcaaagaaatagtagaaactgttga

SEQ ID NO: 8550 - DNA, 513 bp, Arabidopsis thaliana columbia
cgagaaagaagtgtgtgttatgttttctttcttggttgtcctgtttaaatgttgctaagaggctaatgggtttaagattttttcaggtacgagaagctaagtgagaagattgtgtcatgggaagataagaagaggaaaaaggcaaagagaaaacttcatagaacagaggtgcctcttcttttctttttcctccactttcctttggttccaaaaactaatccttaaataactatacaaccaatcaatgtggtgaatgtgcagagaagtgtagagaaaacaaagttgaaggcgacccagaggttcagggacgaaaatgaacgtattgagattatcgttgcaagtgcaagagcacatgcgtatgagagtcgaataaaagaagagttgaaggttaaggagaaagcaaacctcatgagaacaactggtaggaaccctctacatgcctctgaatcctgcaagttgcaggaaatgtaaaccaaacattctttactgctgataactattgtcgaacatgta

SEQ ID NO: 8551 - DNA, 533 bp, Arabidopsis thaliana
tggctgagaacaatcctcagggtttaccactttcgccaaacggtgaaggtttgaagaaaggaacaaaggttggagaaggtgcattaagggaagtcgctgcatacattttggatcatcccaaaagtggaaacaaatctatgtttggtgaagagataggttttgctggtgtacctcccacagctatgattgaatgtttgcatccagggtttaaccatcccaaaggaatcaaaaccaagattggatcacttcagatgtttactgagaacgatggcagctgtgaagatatgggtccactttcatttccagtagaagaagttcataagatttctgtgttggatattagactggccaacgcagacagacatggtgggaacattttgatgaccaaggacgaaagcgggaagctcgttttggttcctatagaccatggatactgcttgcatgaaagcgtaagtgctcttactctttttctattctttcttggattcagttttgcctatagtgttcattgtcatgaaactaacttttgtttt

SEQ ID NO: 8552 - DNA, 1361 bp, Arabidopsis thaliana
caactttgagccgcaaaacatctgacttactagaaatctctctcttataagaaactaagatttgttacctaatgaatctaagccgttctctttttcttgaaccacttcttttagttgacacttgccaagaacctgcattttttaaaatagctttttgtttagtctcaactcctttataagattcatagttttctcaaatgggttttaagatttagacgtacctcccaaatctcagcatctgaatgctgacacaaaggatccagattaaatctcactgttccattgaagagagttggatcttgaggtataatcccaaaccttgatctcagatcatgaactccaattttggagatgtcaacaccgtcaacgacaatctttcctccaacaggctcaacaagtctgaacagagcactgatcagagttgtcttcccactaccggttcggccaacaattccaatcttgtgtcctccttcaaatgtgcagctgattccttttagaaccagtggggattctcttctgtatcttatctgtatatatgaacattaataaattaagaaacactcataatatggattagagagtgaaagtgtattaatcaaacttacctgcaaatccgagatttcgactcgacctgtgaccggccaattaaccggtggtcgagtctcttctattacttcaggagcctcaggtgttaaatgtgtgtactgattaagtctctcaaccgaaatgatccagttagctaagtaacattggttctgaacagagtaaacaagtcccatattcaaagataaaccataagatagcgccataccgatgaaccctgacacaagaaacaaacatcattaataaccaaaacagtgaatcacatctcaaggaacttgtattcttgataatgactcaccagagctaaatgttcctgtggaagcaaaatcatgcagaaagcagtggaggcgagaacaatggcgctaacggtttcaagccgctggatcagccattcgttcgctgcaaagctatgaaagaaaggactggcgtttgtatcaatgagtgtgagacttttcttgaaaaacctctcttcttcatcaaatgctcttattgttattgctcctgctactgattctgctaaatgattcgccacataagatcttgtcgtgccattgatccgcatcaactctttagctgtttggaagtagtacttctgtaaaacaatcaaaaactattgttggtttctttttcaagaaaacagaaaatctattaagaggaattcaagaaaaagaatctgacctgtaaacgaaaagctagataaaccatgggaacagatacaaacaagacttgccaagtaacaatagctaacactccaagac

SEQ ID NO: 8553 - DNA, 656 bp, Arabidopsis thaliana columbia
cagagtaggatgagagatgatcatatgtttgacactcgaaataccggtaagaaaatctcggataatatctctcttagtcaagtcctccggttccaaaggactgccgaggccaaacttgagattaaattcagtatcaaggtctatcttgaccaaggaactcaaattttttacaactattctatcagattgactatctctaaaactcatgtacttaagtcctggtgcatcaatctcgaccgaaaaatcgttactacccattccccaatcaaatgttaaacggaagttcttcaaagtttgagacatcacacgcagaaagttaagaaaatcctcatgattccttacaatggtaagatcttcaagaacaggacagcctgagatgaggttctccgcaatcaaaggactataaaaaatgtcttcaagatgcatgatcttaagacaaggtagagaaacaacaaactttggagtgtcaagccctacatttacgagctttaaagacaccaacgtcttgctcttgcaaatgttggcaggcataaaatcaatggtccatggaggacaatcagtggccgtaacatctagatgctgaatacctgcgatcacgactgtagcgatcacggcacaaatctgtccattagataatacaattactttcatagttt

SEQ ID NO: 8554 - DNA, 542 bp, Arabidopsis thaliana columbia
agaggatccctggaatgactgctggggaacatttcgagcttaacgaggacggttacaagatcgttgggttccatggcaaagctggtgatttggttcatcagatcggagtccatgccgtgcccattttcaccaattacagatgtgttttctagtttctttctctgatgattccgttaaataaggtccatggaccatggttatggatttgtgtgtgtttcactgttttagtgtcaatgctttatgcgatcatgtgatgttatgccttcatggtatttgatcactaataaaggatttttcttgtcaatctctttttagatttttgttaaattttcgcatatgaaaataaaaattaaaaaataactcatttttcaaaaacaatatttctaaaatttcaatgaaatattgcaaatcattttgtttgcattgacaactccaaacctctttgaacaagcgtgggtctatcacaagttatttgttgcgacgccatacataccaaacctatcaatatccagaagaggacgaaagccgggtgttgtgtgact

SEQ ID NO: 8555 - DNA, 548 bp, Arabidopsis thaliana columbia
  unsure (1)..(548): unsure at all n locations
gcnnnnnnnnnnnnnnnnnnnnnnnnnnnnntaaagtctttggtgagccgatgctggatatcaaagactggatgcgcaccgatgccaacggtaaaggcgttatcaatatcctcagcgccgagaaactttatcagatgccgaaactgtacgccgccagcctgctgtggatgctttcagagttgtatgaacaattgccggaagcgggcgatctggagaaaccaaaactggtgtttttcttcgacgaggcacatctgctgtttaacgatgccccgcaggtactgctggataagattgagcaggtgataaggcttattcgctcaaaaggcgtgggcgtctggttcgtttcgcaaaacccgtctgatattccggataatgtgctcgggcagctcggtaatcgcgttcaacatgctttgcgggcttttacgccaaaagatcagaaagcagtgaaggcagcggcgcaaaccatgcgggccaatccggcgtttgataccgaaaaggcgattcaggaactgggcaccggcgaggcgttgatctcttttctggatgcg

SEQ ID NO: 8556 - DNA, 599 bp, Arabidopsis thaliana columbia
cagaaaactttttccgcaagttgttcagagatcgtgaccaatctgttgaagattctgaactgtttggatcaaagaaacacaaggaggtttgttctcgtttgacttggtcttttgtgtttctgtcttattgcatatactggttgcatttgcactgttttgacattcagttttcatttgatccacatcttcagagtcatttatcaagattcttgtaggatacaatcatatgtctttccttcttttgaattttacttgacacaaatgttggctgaaacagggtggttgttcgacttcaattgattatttatctatgccagactttttttctttcatatgagcttgattatctcataccaatgtttcttattataaccattgcagaaacggccaggctcacctaaacagcgggatgatactccatctggtaagcccccgctaccaaacaatactgcatcacaattcaggaaaggggcttaccacgagtcgttggagtttgtacaagcgttatgtgaaacgtcatatggtttggtagatatctttcccatcgaagatcggaagattggtcttcgggaggtgaactgacttttcttattgataat

SEQ ID NO: 8557 - DNA, 559 bp, Arabidopsis thaliana columbia
tagctagaggatcccccatgacttgccgggacttcctgctggagtaaaatttgatccgacggatcaagaggtcttggagcatcttgaaggcaaggtaagagatgacgcaaaaaagcttcatcctctcattgatgagtttatccgtaccatcgatggtgaaaacggcatttgttatacccatcctgaaaaattgccaggtgattctatgttgcatgttcaatcatcaattaatcggttacaaattgagactatagttacaaattttccgtcttcaaatgatcttctagttatgcttattgaaaactacataaatacgttgaaaaaacaatttaatcatattttaatacgatggaaattgtcatatagaaaaagaaaatgtagctaatccaatttcttaattaaattaagtttgatgaatgctaattagtcgttgaatacatatataggagtgaacaaggacgggacggtgcgtcatttcttccaccgaccgtcgaaggcatacacgacgggaacaagaaagcgacgtaaagtcacactgattctgacgtcggtggagaga

SEQ ID NO: 8558 - DNA, 585 bp, Arabidopsis thaliana columbia
aggatccccgataacaacagcgatgatggtatacaagaggagattgagttgcttagttcggagaattacaatgtgagtcgacatgtttggccttggatcaagactcaagaagccggtttttcgcattgtgcggttagagcgaaagaagaatgcaattgggttggattcttcgatgtcgacgagttctactacttccctacgcatcgctctcaaggcttaccgagcaaaaacgctttgaagtcgcttgtatcgaactacacttcttgggatttggttggagagatcagaacggactgtcatagctacggtccatccggtctgacctcggttccatcacaaggcgtgaccgtaggttacacttgtagacaagcgaaccccgagagacacaagtcgataatccgccctgagttgctcacaagctcattgctcaatgaagtacatcattttcagttgaaagaaggagtggggcatatgagtttggtggagagtgttgcggtagtgaaccattacaagtaccaagtttgggacactttcaaagctaagttttacagaagagtggctactgtatgtgttgactggcaagag

SEQ ID NO: 8559 - DNA, 620 bp, Arabidopsis thaliana columbia
gactccatgcaccgagatgacctcccttcgatccataaaaggagaatggtttggagctcttctgaagatgccgagccgagttcaagtcaccacggtgatgcggcttcgtcgtctaatgcgcttgaagagccgagccctttcatggcccgggaagacactgttgctgatatagctcgggaactcgatcatctagaggatcacaagccatctcttgttcgaaggcttcatgttccaattgctgacgagtctggaacgtccaattgatgggatgtgcccgaacctttgttccctcaggtgaaggtcgaggatgatcttttcttcaggccgaacgaggcgagggcatctttcaggtggccgagcggattgcgatgtgcaaagctgacaaagggaaaaagaaaaagaaaaagaaaaagaaacaggttatgcccgacccgcctggttcaactctttgcattgagcagtcgcttcgggatctggcttctcggtttgactttggcgaagatgttatcctgcgtcttccgaccccgagcgaaagagtcgataacctccggaggtttcttcgcctcaacgagaggtttttctacattgtacctctggttccgatccgaggttgattttgg

SEQ ID NO: 8560 - DNA, 320 bp, Arabidopsis thaliana columbia
ctcgtaagctgtctcttcttccaattggacccgtccatgaaggacctcccggctaaagtagacatatttggttaaacgttatcaaaatggtctactgtaaccatttggatagcatagtagaagatgcataccaatacgatagattctttagctgcgatggcgagcatatcagcacatgatacggttctaggagatgctttctcgatggcagccttcatgttgtcgattagatcgaagacctcgagctgaattagcgttcccgaaacgcagtcatgtctccgtcctatacgatgttgtgttgtgtaacaatatcgatgcat

SEQ ID NO: 8561 - DNA, 494 bp, Arabidopsis thaliana columbia
gtgttacgcaccgaaaagtgttgtttgagctaccgacgagtgtgaatgacactatgaagcagatcatgagcctcgagaggctattagatactgagacgcatctcaaggctcttctactaggtgttaactcttgtagcgcagtgttacgatgtgctgcatgagttataatagcgtggtgggaatagacatcgcttcgtccaaatatggagtatggcgctattttgagcttatgacatctaccctcttctgacttctggtattagacaccttggcgatgcaaagctctattgtagcaatagttgctctgatttaggcacagttgggggatcctgcgaatcgttcacagagcttttcatttggctttgcatcactcttcgtttctctactctccatgtcatgggcattcgtttctggcttgcaggctacagttaagcaaaacactttgctcataaacttcatatccattatatctctgatcttctatggtgtgatga

SEQ ID NO: 8562 - DNA, 514 bp, Arabidopsis thaliana columbia
tgtctgaaccttcttctataagtcggaagcttcgatacgctccgtaccattcccatcatcctagaacattcaagataaataaaaccatcattgtcttaatgagattaattaacacaaacaagtttcaggcagaaccaaagaagccatacagattgaacttttctttgtaagagaagttttttcaatctttaccttctgctgattccttggatttgagcagttcgaaggttttcttgaggcgggttactgtgattatcccaagcttccatcctttgttcatggtttccaaagagaacaactttctctaagtatttaacttcactttctccaagtttaagagctcgaatctgatctttcaatacgattattggattaaagacccagtccaagaacttgtcttgtggtctattcaaatgtgtcacttccgagccatcaagcaaaagcacaccatgaacaccagcttttatagagctaagcaatgtatgcaacaaagcgtaagaaggaagccgacatt

SEQ ID NO: 8563 - DNA, 485 bp, Arabidopsis thaliana columbia
tgctaaagcttgtgactttggagaacataagcaaaaagtaccaaaaatgttgctgatatgtttgttgtttatgaaaggtacaatttttattgaataattaaaggaatatgatttgcaggaaggtggagttggcttttagttttgttaaaggttatggaggagaaaatgggactaatgaggatgaagaatgtcaagcggttaagatatcgcggctgattatatttctcagcgactggatccagtctcttttgattccttcagagaagaatattaaagttaagtgtgatttagattctgaaccatgtttggacttcaggtgttgggagatcttcagtttctgcttgaaggaggcgacaatcttgggagtctctttaaatttgtcaagaaacctattaaaggctattgggcttatcacgggaagatttttatctgccctgaacgaatccttggctacgggggttgatttctgcaatggtcaaggtttt

SEQ ID NO: 8564 - DNA, 548 bp, Arabidopsis thaliana columbia
tttgttgcaatgacaaaaattaaaagcgataactaaagtggttggtactaaatcgagatagtaatgcttttcaaacttgcttttgtcacagcggtttccggcgaaggattcttggcgagggatataatgataacaaacacagcaggacccgagaagcaccaagcggttgcactacgagtgaacgcggattttgtggccttataccgatgtgtcattgatggttaccaggacacactttacacccactcattccgacaattctaccgtgaatgcgatatttatggaaccattgattatatctttggaaacgcagccgttgtcttccaaggctgtaacatcgtttcaaagttgcctatgccaggacaattcacggtaattactgctcagtcacgagacactcaggacgaagataccgggatctcgatgcaaaactgctccatccttgcgtcggaggatttatttaatagctcaaataaagtgaagagctacttgggacgtccgtggagagaatttcaagaacagttgtaatggaatcttatattgatgag

SEQ ID NO: 8565 - DNA, 493 bp, Arabidopsis thaliana columbia
tcaagtgctctaccgatggcttccaattactccacttctcttctggtgttatctcctttagagcctttgacggacttcgattcagtatgtacactgcgtactgaaccgcttcaggccagaactttcttggtacaaacatctccatcagcatacatcgcgtcatgttcatcacactccgattctttctctctgcgacgccgttctgttgtggcgtgtaagctgctgtgagctgtctcttgattccaaattctttgcagtactcctcaaactcctttgagttatactctcctcctctatctgatctcaaacagaccaccttttgaccagattctctttcagtttcagctttaaattccttgaaggcctgaaatgcttccgacttttcggacaacagataggtccaacactttctactgaaatcatcaataaagttaaggatataccttttcccgctgggcgatacagggtttattggtccacatatgtctgtgtg

SEQ ID NO: 8566 - DNA, 437 bp, Arabidopsis thaliana columbia
gccagtgtgctctaaagggtaatgtaacgaccttgcgcacacaagccaacggacagggatgtcaatagtgcggacataataaaagacggatgaagtgctatcccgcggtgttgtccagtcaagaatctgcccgcgaaatctggcaagctagtaccagatgggttcagaaagcaggtgaaacccaacacaaccaaaatgagcaaatgcagaactatcaggcccgcccaaaagcctttggagagaaagatatcctcccccacaaaccatccaattcaccgtccacttaaacataaattgccttccaaattcgaacgcgcgctcaaaatagccactggggttcgtcttcaggaacggtatcgcaaggagaatctagccctgtcagtcctttgtgcgcagaatactccaccaagaacatgtcacagacctgaatgcccaaa

SEQ ID NO: 8567 - DNA, 480 bp, Arabidopsis thaliana columbia
gtgaccttgtggaaagtagtaaaccctagagtgaaggacagggatctggacggaggctccagcacaagcgcgccagatcgtcgggtctacttcacggtggttgatgtcaccggcggttgccgacggcggtgacataggtatttgttttcagtgtaaacgaagtcagcgaatgaagaagaagaagaagaggtaggtactgtttttatagagagagaccgtgatgtcttagaaggaattgaaacgggcagagaagggaagcgaaagcggagggtgaggagataatagcgaattactgttacgatgctacgggattttgtgtttgattttattttttttgtttgtgagaaggaaattatagtttttgccacacgacaacaaacttttaatatctctcttcactaacctgattctattaaccgttcgatctttagcgcgtgcatcttactctctatctttttggtttttcttctcattattttt

SEQ ID NO: 8568 - DNA, 505 bp, Arabidopsis thaliana columbia
tgacggcgtacttagtcttctcactgattcttgcagatctcctaggtgtcccactagtcgtccaatcaaactctgcgatcgcggggtttccagggtgcgatttgagatactgctccagctgctttctgttactaatctcctcacccgttggagccacaaacacaacctctgttttcttcactgaacccactttgttggggtaaaactgcaaaaacaagtcagttaatgtaaacctctgaaaatatgaaaatttgaggttcaaaacgctgaaagattaaattctaaagaagaccttaatgtagcttaaacaatgtttacaagtggcttaaaatccataagaatcgggaaaagtaagaagtaaatcaaacatagtcaaaatgaggcattaagtcaagaacaaagaagtagaaatagtagatcaaacacaatcaaatgtggctttttctaagtctataacctttgaatcacctaatcaacataaagttatttacacttatactaacat

SEQ ID NO: 8569 - DNA, 509 bp, Arabidopsis thaliana columbia
aggatccccttcctcagtacccatactttctggggtactagctgccactatggccacacctggagccgctacatcaggctgtaaaaagttaatgttgctatgtgtgatgcaaaaaagaaatatcgataaatagagtttttttttcattattattattcgatcatttaaaattgggtaatatgttatcattatatggatcagaaaaatcaagtttaccttgagaacgtatggagatatggaattgggtcctctccctgaaaaatcagcaacctttgtggctacaagacgcccgttgagcgcgatggcagaacttatttttatggtgggcattctgtaattaagtggttattcaatcaatattaaacacaatgcaaatcatataataagaaaggtcaaaataagcagtatggttttaataactacctggtgatacttaggtacttccatatgggtagatccatgttcatagtcgaccatgataataggaagaccttcggaaactttgatga

SEQ ID NO: 8570 - DNA, 619 bp, Arabidopsis thaliana columbia
aaaacttaagaaagcaaacaagaaagtattatgatagagaaattattcagattcttaggaacagtgtttctacaatggatggtcatatacattttaatctcatgatcagatcaattgaggcgtgtcaccaatctaccaattcaaagtaaaaaaaaaaaaaaaaaaaggtaccgactatgaatggctcgagaactttgtactgtaaaactgaaaaggaactctgaaaagagaaggcagacagactttgtgaacgtgagatcaatcggagctggagtcgtagaagtcgctggggcaaggagtcataacttcggattcaagtaactggacgactctgtgcattgttggccgctcatctggacttgacgacacacactttgttgctattgatagaagtgcgtcgagactctctctctccactccttcacagcttagatcaacaatctcctttgcccggttttcgctgattaagaagtttagctgcaagattataaaaaacaaaatttaagcttttactagtcaatattatcatctaagctggatctcgatatgcttacccatccaacaatgttaaagcctttctcgatgaatgaggcatccgtgggaagtttccactcaagac

SEQ ID NO: 8571 - DNA, 573 bp, Arabidopsis thaliana columbia
agatcttcatcactagaacccgacgcgacggtggtggtagtagtagcagcagcagcatcggccgtggtttcggatttctcagcagcttcgacatgtctcttacagtactcaatcaccttcgaaaggatcttgcttgtgacattagggagagggataccattatcggtacagtcatcttcaatcatatgtttgatggtttgtgactctagcgccaccgcttcgtcaatttcgaagttttcgccatccgaactcttaagagtgatttttctcaccgtcgacattggtttttgctgagtttagagacgacgtggaggctgaggaagagaatcgtggaacagagagatgtgtgtatgggttaaatcaaaatgtttttaaagcccggctcacacattgaaccagtgagatctaacgattcccaattgactttttttacctataaattttcattttaaaacattttctctgtttttttctttcaaaggaaaacacctgaaaattaattcaactcttttcatcaacttttgattaatcagtagttgaacagatactaaactcacgtatttgtaggatggt

SEQ ID NO: 8572 - DNA, 638 bp, Arabidopsis thaliana columbia
ctaatgttataagtcgaaacaccgatattaacaccacgatctttcatcatcgccaacactttccctacttcatcactcttatcctctgcataaaacccagaaatcatcaaaccaaagcttgaactattcggttttatccctttcctctccatctccgcaacaatggagtacgacgaactcgctgaaccggattcacaaaacactttgatcatacgattataagtctcgagatcaggttcaattccatacatcttaggcatctcaatgtaaactcttttagcttctttgtaatccttagctactaaacaagcaaagagaagcgcgtttaaagacttcaccgtacgagagatttcgaatttctcgagatcacgaaaaactcttaaagagtgatcaagcatattagcttgagcatacaaaacaatggcgtgacgagcaaaacgttccgatttgagatctggtctgttttcgatgaatccgtcgaggagattcgatacagcggagaaatgtttcttctcggcgagattctcgacggcggcggagaaagcgattcgatctatgcggcaatctggagtaagagaagctgcacggcagatttcgaggatacgatctggatctttctcggatttgagaagagagag

SEQ ID NO: 8573 - DNA, 442 bp, Arabidopsis thaliana columbia
gtgctatcattttaaaattggtaaacatatttgtaaaaccgcagaaacaatgaagtttcgaatgaaaattccaattgagaacaatgataagtttgtattactacttcaaataaaatatactttatgtaaatgagcgagagaggaagagaaactgacctccattgagccaaaggacgagaggacgacgagaagagttttgttgagcttcgaagaaccaatagaaaagtgccttttgcttctgttcaggccccagattcacgtaaccggcgtagtgtttgaagttaaccggtggttggccgggcaaaccggttacaaggtcatcttccttcctcccagaggatgaaattgttaccttcttctccggtttcctaccacaggctatcgccggtaacaccagaatgcacagtagccaaagtgcgttcagtctcatcgccaaaactct

SEQ ID NO: 8574 - DNA, 469 bp, Arabidopsis thaliana columbia
agttgtgattttgtcagatgggtgaaatagtggatcttctggttcatatgtagcagcgataatggtgaaaactacgactccgattacgagtacagagaagcctatgcttccgattaaggatactgcgttttgccctagattctcaggtcggaaactccggttctggaaaatgcagatcttcctgacatctttgtcttcaagattcgatgaatgtcattctcagagattagagacagtgtcaagaatagttatggccatgtcaagcggaggaatcgaagagcttggaacatttcttgtaatgtgtgtgtgtatttttttgcctacacgtgtacatgtggaggtggagcgactctacttgcgtcgtcatcgagacatcgactatagcaaaaggacgttactttagtttataatctgaggtcagtgtgagctaaaacgacgtcagtttgtgaggtccgagatgccggtatga

SEQ ID NO: 8575 - DNA, 491 bp, Arabidopsis thaliana columbia
tatcctaactcaaaaaattacatgactaacattattagacaatatatagtgacctcgtcagttattttcatatacatacatataggcgatttttatgtaagcctaagttcaaataaagctttgagattataaggtctagtgacattaggcggcccgttccaaatcagctctgcgattttgtcgatgagccttttccgtcaaatgagaggaatcatagaacaaataatcggtaacgttttcgcataggccgtaaccttgcgacggtcctattctgtttccacacgtattgattcctctcagtggtccgcttccacaacatgccttcttcccttccttgaaccctaaaaattaacaaacataacacaaaatgttcttaaaggtaacctatagatcgatctcttacatatatgtaaatacgaagtttagtaaccatattttgaaggactgttgattctttcggaaagagaagtgtgatagtcatgaagggcgta

SEQ ID NO: 8576 - DNA, 596 bp, Arabidopsis thaliana columbia
  unsure (1)..(596): unsure at all n locations
attacatatctaagcagcaacataacatttttgggaaaggtttgatgtgtaagcaagaactagaaggaatggttgatggtataaactatatacaatcgaatcaattcattcagctcccacaactccaaagcccttctctcccgctgatgaaaagaccttcaagctcgatgtccataacatcaatggataacaattacaactataaactcccattagcggatgaagaaagcttcgagtcattcataagaggagaggatagaaggaagaagaaaaagcaagtaatgatgacgggaaattggagagagttagacaagtttgttgcttcacaacttatgagccaagaagacaatggaacttcaagtttcgcaggtcatcatatagttaatgaagataaaaacaacaatgatgtggagatggattcgtcaatgtttttgagcgacagagaagaagaaaacaggttcgtcagtgaattcttgagtacaaactcggattatgatattgggatttgcgtatttgataattgaatgaaactacatagatggcatgtgagatttgttggtacgtntcttcacttatatgaaatattacaatatact

SEQ ID NO: 8577 - DNA, 684 bp, Arabidopsis thaliana columbia
gagtttagtaagttccttcgttgatctgagttcaagatgattgcaattctacagaaccataaacccttaaatgttctttgagatgattcttagcttttttgtttgtctattagagattagtcaacgtagtgatgacatactgacatctttggattgtttcaaagtttacgtttttactatacattgactagtcttagagattttatattatgcatatagtgacatagacttttcctttcttatctattcctcttctctacctaatctgtgaatctctctctctcactctctctcttttccttgattgtgcagagatgggaggttgtttctctgtttcattgccatgtgatcaagtagtgagtcagttctctcagttgttatgtgtcaggggaagttatattcacaatctctccaagaatctggcttctctgcagaaggccatgcgaatgctcaaggctcggcaatatgatgtgataagaaggttggaaacagaagagtttacagggcgtcaacaaaggctttcccaagttcaggtatggcttactagtgtcctaatcattcaaaaccagtttaatgatctgcttcgtagtaatgaagttgagctcaaaggttgtgcattgtgggtctgctcaaagatttgaatgagctacgttagggaaagagtacatgatgtgaaggagtgag

SEQ ID NO: 8578 - DNA, 523 bp, Arabidopsis thaliana columbia
gaaatcatccctgttttatctagagagtaagctttcaaattcgagtagcaagttttggtttatagatggaatttgtcattttacataatatgaaagtgttgtgaatacagtcattgagcttcgggaattgcatcattttgattttagacaccaataatttctttttatcatgacaccattagtactttctattgaggtttatctttgtttgcagggcaaggatggtaaactggaaggtggatctcttttgtttgatagtgctccttgttttcatgttaccttattatcattgctatttgatgcttcgtaacactggtaagccttttccttgctatcgatgttcttcatctttccttttcttttcaggcttcctaggaattattaaaatggtttgtatgttatatgatggacgatctattgctttatcaatttatcttttagaaatagtatgaggcctgataattgacattctgttacattttgggattaaatttatttgctgatgaatatgtataagcaattt

SEQ ID NO: 8579 - DNA, 529 bp, Arabidopsis thaliana columbia
aatgatgtatgcaaatggagatagtgagagaggaactctatgcaaatgggactagaatgtaagtgaacgtttgatgtcattgcaaaatgcaacatttctcagcaagtaaatgcagagacagagaaaagctaagcactgtattatcagaagatatggactttcttgtattaaaacaatgaaataagaattagtccacacatggaaaatatcaaagtgagcatgcaacagaaaaatgttttaaagtaatcagtatggtataccttccacatcatcaaacaagccactgcatctggagcttgataagttcaaacttcgaacatcttcaaagggatgcaacaaagaaagatttaggagagaattatcttttaggctcagtccaccaaaggaaatctcggtcacccgtccgcttacacgattgcaagcaacgcccttccatcgacagcaatcgctcgttgtatcattggtccaagtagggagaacagactcggattcagttcttgagatcatgtgtttctgagctaaacaaagc

SEQ ID NO: 8580 - DNA, 545 bp, Arabidopsis thaliana
ccagctgcaaaagttcaaagtcatgaggtatacaggcagatggcttcaagaaagataagttaggtgaaaaattggggatagaaatataccggctggtgcattatgagcatttgatgaccgggtaaaggacattgttttgtatatgtgatcaaaatcagcatttctgcggtttacagcttctagatgagcagccaagtgacagttgatgaagcacataatccgatcaaagaccctaattctcaaacctacacctccctggtttgatatacaaaaataaatcaggtggaatgctgctatcagaacccagaatgatctacattgttggagagaatgaaacaaaaagctagatgcaatggtaactagagtatttagaaatggatggtcataaaacttaggtaaagggaataagctcaggttttaactttctttttcatcctgaagacaaagaaatatttaccttgtttcctattgcgcgtccaaaaccacatggaactgctgcaacatcaatatcgcctacatgggttctcagattcttcctcaccctg

SEQ ID NO: 8581 - DNA, 617 bp, Arabidopsis thaliana
cgccagtgtgctctaaagatgaactgattgccgcgtctgaacaatccggtgaccgcgcatggcgttaccgctgggtgacgagtatcaggaacaactggagtccaattttgccgatatggcgaacattggcggtcgtcctggtggggcgattaccgcaggttgcttcctgtcacgctttacccgtaagtacaactgggcgcacctggatatcgccggtaccgcctggcgttctggtaaagcaaaaggcgccaccggtcgtccggtagcgttgctggcacagttcctgttaaaccgcgctgggtttaacggcgaagagtaattgcgtcaggcaaggctgttattgccggatgcggcgtgaacgccttatccgacctacacagcactgaactcgtaggcctgataagacacaacagcgtcgcatcaggcgctgcggtgtatacctgatgcgtatttaaatccaccacaagaagccccatttatgaaaaacgcgacgttctaccttctggacaatgacaccaccgtcgatggcttaagcgccgttgagcaactggtgtgtgaaattgccgcagaacgttggcgcagcggtaagcgcgtgctcatcgcctgtgaagatgaaa

SEQ ID NO: 8582 - DNA, 973 bp, Arabidopsis thaliana
tagaggcgatgcatttcttcctttgctctgcttcttcttcatcggagaatcctaaaaagcttgacacgtcttcatgcggcgactttgagtttgacttctcgtcgaggttgtcttcaagcagtggtcctttaggcggtgtttccatgacttcagctgaagagcttttctctaatggccagattaagccaatggaagcttccttcgcatcttcagagacctcagatcttatctccgcttctagatctggagaacgaggaagaagacgacgatgatgagaccaaaccaaacggtgagatgaagcgtgggagagatctgaaactaagaagcagatctgttcaccggaaggccagatccctctctccgctccgaaacgcagcgtatcaatggaaccaagaagaaggagaagaagaagaagtcgccggagagagagaagttaaagagtgtataagaaagcttcaagaagacgaaaacgtgccttcagctgaaacgacaccgtcttgttctgcttcttcttcacgatcatcgtcttacggtagaaactctaagaaatggatctttcttaaagatctgcttcacagaagcaaaagcgaatgaagaggcaacgggaaagagaagttctggtccaacatttccttctctccttccaatttcaaagacaagaaactcaaatcatctcaacttgaagagaaaccgattcaagaaacagttgacgctgccgtggaatcaaagaagcagaagcagaaacaaccgccggcgaagaaagctccggttaacggaaaaccaaccaacgggatagcaaaacggagaggattgcagccgtctgctcacgagctacattacacaacgaacagagctcaagcagaggaaatgaagaagagaacatatttgtcttacaggcatggactctttggttgtttagggtttagtccaaaggttacagtgccttgaacggtttagccgtagcttaaaccag

SEQ ID NO: 8583 - DNA, 570 bp, Arabidopsis thaliana columbia
ccagagaagagtcctgatttcttcagttatttttgtccaacgatcatatgtgatagggacatgttcccgtaccaatgctccaacataagatgccatcttaacagagcctttaccataaggttctccaaggcaattgaactctacatgtactctagtatttggatccttggcgatgtctttcatgcatgttggtcctcgctgtctcttactctcaacgttgtcatgatcttcagtgaattgtatctcaccttcaggctcttcatcaatcagacctttctcagcttcaggcgtcacttcaccttgaacctcttcttcattgatttctagtgaaggaccagcttgtacttggggttccgtttctggctcaactggttcaggttcacgggtacccacatattctacctcatcatctttctgtttaggttttcttcctctctttttctttccatttcccatttcaaatcacttggaaaaagaaacaggaaaaatgttaatatatatatgatatacagagaaacaatcaactatcagacaataagctaagcaacataaaatatatgtgaacaaaca

SEQ ID NO: 8584 - DNA, 844 bp, Arabidopsis thaliana
ctggtttttcctcggaggtgcattaggaccagtcatagtgtggtcattgcacaaagcgttcccaaaacgttcttggattccacttgtaaatctccctgttcttctaggagcaaccgcaatgatgccacctgcgaccgcggtgaactacaactcgtggatattggtggggacgatattcaacttgtttgtgttccggtacaggaaaagttggtggcagaggtataactacgttctctcagccgctatggatgccggtgtagctttcatggcggttttgttgtacttctcggtggggatggaggaaaagagtttggactggtggggaacaagaggtgaacattgtgatctagctaaatgtccaaccgctagaggagtaattgttgatggttgtccggttaaataatcttaaaggatccattggtgtgtttcaacaatgtatgatacacaaagtaactaattaagaatttcaaaaaaaaatcaaacaaaaatccatctaaaatcgtaccgaacaaattattgttacattagcacagaaaaatagttgtatagaccttccaaaacaaccaggttttgataaggatccaatggatccgatccatatagttttcgttgaatacatacaaccggttttgagcagggacatcttgcaataaatacaggaggtcatggagcttgacacaacctcaatagcgttggattcagaaacaagatcatcgatatgaatgcaattacgctctttctggaggattttggaaccggtgagtatgagggaaatgcagcgttgcatcaatttgaaatacgccgtttccgaatgacagccaagaattcaaatcagtacttgtga

SEQ ID NO: 8585 - DNA, 556 bp, Arabidopsis thaliana columbia
cttcttcttgaatggtgttggaatgatattgtgatgtgatttgatctgactggtaattttgtttgtgcagactgtacatgagggtcggatttatcagttgaagctcttctgtgacaaagattaccctgagaaacctccgactgttcggttccattcgcgtatcaacatgacttgtgtcaaccatgataccggcgtggtaagagtgtgaattttttgagatttgttgcttttgaattaggtgactgacatgtgaatttgcatatacgtaggtggattcaaagaagtttggggttcttgcaaactggcaaagacagtacacaatggaggacatactgactcaattgaagaaggagatggctgcatcgcataaccggaagcttgttcaacctcccgaaggaactttcttctaatactctcaaagcctacctttgaggggcttctccattgttggtcttcaagcttttctttcgtaccttaaagtaaaaacaatggtgtctgtcgatgaatgatgatgttcgattgatcatctggagtttaaatccttgtgtgcaaatat

SEQ ID NO: 8586 - DNA, 566 bp, Arabidopsis thaliana columbia
cacgccccttcaccgcctccccaaatccaggcgcctcccggtcagctgcctcacccccatggcaggaagagggccgtgatctgtggcatctcgtatcggttctctcgccacgagctcaaaggctgcatcaacgacgccaagtgcatgcgtcaccttctcatcaacaaattcaaattctccccagattcaattctcatgcttaccggtacagagtatttctatcttttcaaatgcctatgtttgctactatactactattccttggattttgaatacaattttccttggcctcttcaatctgataaacacacattccaagttaccatttcgaaccactttgataaaaatgtgttgcattccatagctgactaactaattgttcatcatggatggttttcattctcagaggaagaaactgatccatatcgtatcccgaccaagcaaaacatgaggatggcattgtattggctcgtacagggatgcacagcaggcgactcacttgtcttccactactctggtcatggttcgcgtaaagaactaaacggtgatgaagtgatggctatgat

SEQ ID NO: 8587 - DNA, 492 bp, Arabidopsis thaliana columbia
gtttaagatagaaaccaaaaccaagcttaataaagttagattgattcctaacgttagaaaaaaaaagttagattgattcctcacgtttcaaaaggggatcgttggttcttggcctcacacatacttttccttgactctttcaaaaaagacaacctttgacaaatcgcttataaactgcatttaattttacatagataactgcactcactgtcacatgcatgttcacaatatcttgactatataataattacatttataaaatactagcctatgtgatcaaaaattgttgtatcaagattttctctcaggtgactgaacaacagagaaaaacatggcgaaaaaaggagaagaagtgttgaacgctttggacgcagccaaaacgcagatgtaccatttcacagcgattgtaatcgcgggtatgggttttttcactgatgcttacgatctattcagcatctccctcgtcacgaagctcctaggccgcatatacta

SEQ ID NO: 8588 - DNA, 519 bp, Arabidopsis thaliana columbia
gaggatctagaggatcacctatcattgaattcacgaaatctgcattttatcatggaatgaatatcagccgttcatctatttcaactcttcagaatccaacggctgcgattcaagagagagttttaggccacacgaacgtgacaaacacatcggtacagatacgccactcacttatagatccctttggaactaatcaaaagagttcaccaaaatctcttctctctcgtccattgtcttcctctaatggaaccaaccgagaactctatgttactagaaactactagtaccacgaagatggagaccaaatacgaagatatgttaccagttatggcggcgaagatggatgctgaagagtttgtatcagagttatgcccaggtttcagtttgcctgaggatccagagagacatctcatcacagctgagtctctacgacgatactcagggatacttggaattgaaggtatgagcaaggaagatgctcaaggcatggttagagaaggagacctcgatggagatggt

SEQ ID NO: 8589 - DNA, 618 bp, Arabidopsis thaliana columbia
caacaaagtaatatatgtatttggtaacgtgacccaaagaatcttaaaaagcgtataatcttattaaattccacgattggtgaattaaaatgaaggaagcataatgtagggttacaatgatcatatgtgtgtttatgagactggaactggtcgtttggaaagagcaagggatgagaaaacggataaaacggcaagagagacgaatgcgaagagaagaagactggccgatgcatatcctttactaaagaacttatccactggatcagtcgaatcaaattctattaatgctatgtatgtgtctttcaaatctttgctcactccaaatcctgccgccgaacccgttgcaagtaaatatgatattacctgtccaaatttgaaccagattttgttatatatcaatatacagtatgacttataattttaatgtatttaaagatagtatttcctcaaaaatgatataaataccttatcaccgtagaaatcgaactgataagtaagaggatgtgttttccggtggcaaattgggagattgttaagaacagttgtacaacggcgtaaactagtccgatgacggcagcggacagcatgtatcttcatgaatgatgaatcaaacatata

SEQ ID NO: 8590 - DNA, 603 bp, Arabidopsis thaliana columbia
ctagtatctgatttgggcgtacaactttgtcacattaaccatgagaggtccagatggatcacattctaccattgattcataaatgggggaatctttggttccggtatatgaatggtcgaccttcctagctgcagcctctctgggtgaaggaatgtgctttaccaacatatcagtgaaccctgatgccgaaccaaacactgaactacaggctaacctaagtagaggtctgacgttcagcttatatgcactattactcagagtcactcctaattctgcaagggtggtctctacactcttcttatgttcacctatcacttggctgtatatcttgtataggggctccagaataaactgaacaaatgctctttctccaccacctactggaggacttctcttgaataccctagtatcagagtgataatatacatctccccaaagtcgagatgcaaacttatccacgtccatggccacaccatgaagcttggcatacattttagcaaaagattgtaatgtgaaggacatccggctgtccactggcaaaacatcatttccactgcagggtctataagaggtaagtctccacagttgttgaacagcagatat

SEQ ID NO: 8591 - DNA, 523 bp, Arabidopsis thaliana columbia
ggtgtagtaacccaagaggtaaattctcagcaaagaacaaataataatggcaatgtggtcaaagtgtattgaacttttgtaatgctgttggttcttcagtgtgatccatactttgacaatactggttgctctcacccgggatgtgaacccacttaccctacaccaaaatgtgagaggaaatgtgtaagcagaaaccagctatggggtgaatcaaaacactatggtgtcggcgcatacagaatcaatcctgaccctcaagacattatggctgaggtttacaagcatggtcctgtcgaggttgcttttaccgtttacgaggtaatgaaaaagatttttgattgatcaaaccatattgattatatcttggtgaagtcccattttcatgtatctttttgttcttcaggactttgcacattacaaatcaggagtatacaagtacataacgggtactaagattggaggtcatgcagttaagctcattggctggggaacttctgatgacggcgaagattattgggtatga

SEQ ID NO: 8592 - DNA, 516 bp, Arabidopsis thaliana columbia
gagatacgtgaccataccatgcaaagtatattaggtttggcagagaagaaatgtgaaaatatcctaccgttgaaagcgttagttcataggtaaacccaaatattctgtaaacatagtcaatgaaatccaacacacccttcacttcttcctcaacctgcaaatagataagaatatttctataaaataagaaactgggaggataaggagctccaacgttgctgcataagaaacaaatatcacaaacctgatccactctacagaatatgtgtgcatcatcctgaaaacaagtatgcacaatgttatttaattaagcaacacgcgcacaaaagggttaaaatcaaattgacaaactactaagtaaagtaaagtaaaggggtaacttcttcacttcaacatggcaaataagctgcttaactaatcatgatatcattttgaatgtcgctagtctttatataaagcaatcaatttttaagttttaaacattttaccacgagaaaagtccagaaagatgcaaca

SEQ ID NO: 8593 - DNA, 549 bp, Arabidopsis thaliana
tcgggttttagtagagacatctatcaaagcaaaaagaccctttaagttcttcaattaccttctcaaaaacctagatttcttgaacttggttagggacaactggtttacccttaatgttgtcggctcctctatgttcagggtttccaagaagctgaaggccctaaaagaacctatcaaggacttcagcaggcttaattactctgaattggaaaaaagaaccaaagaagctcacgattttcttattggctgtcaagatcgcaccctcgctgaccccactcctatcaatgctagttttgagcttgaagctgagcgtaaatggcacattctaactgctgctgaggaaagtttctttcgccaaaagtcgagaatctcttggtttgctgaaggtgatggaaatacgaaatactttcacaggatggctgatgctagaaattcctctaactccatttctgctttgtatgatggaaatggtaagctggttgattctcaagagggaatacttgacctttgtgctagttactttggaagtttgttgggtgatgaagttga

SEQ ID NO: 8594 - DNA, 526 bp, Arabidopsis thaliana columbia
tctgactctcaatcacaagctcctcctcatcctccttcttccagaaccaaacctgagcaagttgacacggttagaagatcacgtgagcatatgagaagccgagaagagagcgagttgaaacagtttggtgatgctggtggttcatcaaatgaagctgctaacaaaagacaaggaagagcttctcagaacaatagttatgacaacaagtcacctttgcataagaattcttatgatggtactggaaaatctaggcctaaacctaccaaccttatgagctgatgaaagtgtaagaatctcactttaaacctctaaagtgagaatatctctgtatgtagcttatgtgttgtcatctgtatatatatagcctgaaaaagtcacagtggtgcctaacttcggtgactgggacgagaacaacccgtcatcagctgacggatacacgcatatctctcataaagtccgtgaagagagacgttctggagcaaatgtgagtggcacttcaagaacgccgactcatcaaagctcccgt

SEQ ID NO: 8595 - DNA, 578 bp, Arabidopsis thaliana columbia
atcatatctttaatagtagagatgccgaggagaaaattacgtatcatagttctctttggtagatcatctggattaaacttattcacggaactcaagttaaacacaatatcgatatccgctttgacaagcttaccgggtttattaagtataaaacttgcaactcgatgatcacttagcctcaaatactcaagcttgggagcatcaattgaaacaacaagatcttcaaccacaccctcatcactatccgcaacatgagtgaacctcaacagagactgagaccgcacacgtaaaacttcaatctcatcacaaaaagacctctcaatagtcaagctttcaagaaccgggcatttcgtaatcagcgtttctaaccccatatcgtcagcaaacttagttataatcagatccataactttgagtgaaggtaaagaaacaaactcgggactagccaaagttaatcacaaagctttaaagatccaaactctcacaagtgtaaatgcttgaaggtaactgaaccgtccaactcccatacgaatcatcgaaacatcgatatgttgactttacgcgtgacgatagtgttg

SEQ ID NO: 8596 - DNA, 369 bp, Arabidopsis thaliana columbia
tggaggttcgccagggacgcgagcgtcgctgggatggcgccctccagctggttctgccaggcgaagagcacctgcaagccagagaggcgaccaagctcgggcgggatgaggccggagatctcgttggtgtcgacctgcagctgcaccagcgacgtggcgttggcgagcaacggcgggatggtgccggtgatgttgttgtcgctgagcatgaggtcctgcagcgccggcagccgcccgagcgacgccgggatggtgccggagatggagttgatggagaggtcgagcgagacgagcgaagtgagggttgccgaaggactccgggtatggagcccgtgagcgcgttcatgccacacagcagcttctgcagcc

SEQ ID NO: 8597 - DNA, 510 bp, Arabidopsis thaliana columbia
cactagttccaacctctaaattcgacagtctcctcgtcatcaccattaatggaactggtcttttcatggaactcgtttacgtcaccatcttctttgtcttcgctacctcccctgtccgcgtaacctttaaaacctctaatttcaacacgaatgataaaaatatgtatatgcattctaaattattcaatttatataaacttttcagacataggtttgatagcctttaaaccaattgaaaattagtgaattagtggttgatgtttgttttagtttgttacttcaaatgtagatcgatatagattttgatatgtgaagttatgatatatatatatgtgtacagagaaagatcacaatagctatggttatcgaggtaatattcatggcggtggtgatcttctgcacaatgtattttttgcatacaacaaagcagagatcaatgcttattgggatcttgtgcattgttttcaacgtcatcatgtatgctgctcctctcaccggcatggtatgatg

SEQ ID NO: 8598 - DNA, 597 bp, Arabidopsis thaliana columbia
tcatttcctctgccgcaccgactccatcatattcatcggttatctccaccgttgtaatattgtccggaagatgatccgaagctgagcccgagtctcaggtccgtgcttaggttccgagtattactcgaagacacaccaaatgggttgcttttgcagctgctctctatcgatgaagacgatgagcttctccctcttcccatttttttttatttcttttactatttctctctctctatgattttatctaaaacaggtgattaatgatttgaacgtgtgtgtattatatatagagaatggaaatttttatttaattgttagagcttaaaaggaagaagtaataatattggaatggtctttctgatatgttttttttttaattaaagaaaatggtggaatgatgagacagtgttgttaaagatgttgtccatgtagcagacaaatacacgtgtcatgcagacacttggtcaaagtgttggttttgactttgtgctcggatttttttgctgggtgtgtctaattaaattttgtctgttcaatgtaaatataccgaccctagtactactttcgtttacaaaaaaaaaagataaagattgttga

SEQ ID NO: 8599 - DNA, 494 bp, Arabidopsis thaliana
ccaccacgtcctctgctaccatgataatctcggtttgaatctgaactagcatacatcaacttgctttgatcatcttgagtctcatcttcttcatcccatactctttcttcataaaccttaatccgtccaacaatgtcttcaaagcttgtattcttcaaatccaaaacttgttcaagagaagccactatttgtatgtatttcttgcgtgggagactcttaagaaactttttgacaagtttctctgtttcaatattttctcctaaggcagcagactttgatgctatctcagccaacctcccggagaaagcttcaatattctctgagtctttcatcttgaggcggtcgaactcattcattaaggtttgtaaccttgcttcttttactctctctgctccaacgttcttttctttgattgcttcccatactttcttcgctgtatctaactctccaatgtgcagcaccatagactctggtattgcttggaaaagtagatg

SEQ ID NO: 8600 - DNA, 610 bp, Arabidopsis thaliana columbia
ctcttccacttgtatactgtccccttcaaagataactttgcgataccttggctccaagcatgttgcattgctataatcaaagcctgaaattcactctccaatgagtctgatgttgttgatcctattgcttgacccgaacccatgtatactccattctcatctctcattagccagccagctttcgcatttcgtgtttggtggttgaaagctccatcataattgtactttatccaagtgcttggcggccgttgccacttcgtacgtgccatagttggttgttgatgtcttgatgaatgcacttgttggttgagactctgaacataagtgtttgtgtcttcccactcttgaacatcattccgtgcacgttgtagggtgttttgccatgatatgcttttttgttgaaacaccaattgatttctgctcttccatagtctccataagatccagatggccaaattaaaaagttgtggttgtctgttggctaaacaactcgataacagcagctccatctttgtctccattgtaattcctgtagttcgtaactcttggtgtggtatcctgaagctcgcaaacctgttgggcataaaacaatcaaagaataagtgttgag

SEQ ID NO: 8601 - DNA, 580 bp, Arabidopsis thaliana columbia
caactagattgagaaatggagaaattcaccatacataggatcttagtcttgaattaatttcatattttgaagaaaataattaaacaaaattttgcatgtcacattaatatctaagccaaaaaaaaagaatcttaaggcaaagtatatatttacaataacggattgctattaaatttgaatcacgaataatataatcaattcgttggacactatgtgtacctggtgtctgtagtttccatatccagaagaaccagcgacgagaaccgcccatcttgtaccgacaccatcttcgtcttggtcagccgggttagcttcctctgtcggcataagaatctttggctcgaaccgaccgcgtgactcggcatgaaccaaaagaactaacagaagaagaagagctggtctgaaatagcaagacttagccatggcagcgagaaacaaaagagagagaaagagaggctttttgagagaataaagagaactataaaagcaaaggatggttagacaatggtgttaataatttatttgtcccaaaatataacagacaaatcaattgtctaattatatttaatgcacctgatta

SEQ ID NO: 8602 - DNA, 586 bp, Arabidopsis thaliana columbia
atgtcttttgctgctcttactcagccgcatgttgcgtaaatggttgaagcagctgcgttgctttgtccaatatcatatttggatcatgtcacagctcctcttgttgaaagaatggtttttatgcatctcgatcaggtattcttggctctcgagcatcattaaagcgatttcaaagaatcaagttaacacgtgtgctactgtttacagatggtagttgctcttgggctgcatcaaataaactttagaaggttgtgacttctgtctcatctagttatcgtgtgttgatataatgtgacgtttctttactaaccatctgatggatttattctgtgttttcagtgatatgttagttaaacttgttgattcgttatgcgaagggcatatggattgcactgatttcctcacatccataacaggtttttctcttcctctaatctccctgtagtgaactgttgacaaaaaatattctcttttatatatcggttcggtaagtgtgagaagaagaacatagaattacataaatcaatgtgaaatggtggtttttttggaactgaagaaacaaaggtttttaagattatgtaatgag

SEQ ID NO: 8603 - DNA, 586 bp, Arabidopsis thaliana columbia
tcatgtacaccgtcttgttcgcaaaataatagtccggataggttcatccgccaaaagggtccccgcattgcaaaggtcgtgaggagaatcaattgcaatgtagagcctttaagttatggatgtgtgctgtctggaaaatcatggtgcagccggcgagcaatttttcctaaaggtgacatgtggtcaagtatttttgctacttgagaacattaacagttatacatattgcaagtgcttattgtctattcttctttggtgcaggatttcgtagccgggttaagtacataaacattttggatccaacaaatatgtgcttctacatttcagaaattctggatgctggacgcaacagtccattgttcatggttagttggtagatagatgctgatctaatttaactaaccttaaaaatatgtctgagtagtgtttcattttcaaattaaatattgccatatgaataaatctgatgacatgaatctgaaccggaaatatgatccattatttggctgtcaaagacgtagagtccatcatgctaacataaactttagaagttttgaactgagtatgaaaccggaattaacctatt

SEQ ID NO: 8604 - DNA, 443 bp, Arabidopsis thaliana columbia
tatctttagaggttgtcgaagtttcaatgtttcatgtttgtcttaattctctattagtagttgtaatcagtggacaagctaaagtaatctctacaagaataaccaacttggtagtttttatccgtgatgttctattgaatgttttaatccatttattaatcttgttcaacttttaaatctaaaaatgacagtggagaagtgactctggcaaccaatggaatggaggatattcaataggtcaaggatacaacaatggatatgccaatcaggactcaaacatgtacgctactgtagcggctgcagtcccgggagcttcttgaaagtgttggtatgtctctattatcagaaaccctgtgagtcctgtacttactggtattgggataaaaacaaaccgttgggtgatcaaagtgatccatccgatgatagttgttggttcagaggtt

SEQ ID NO: 8605 - DNA, 558 bp, Arabidopsis thaliana columbia
catttgccaagaatttaatagaaatattagtgcaaaatgcacaaaacaaatggtcgtataaggctaatgtaaagggtctgctagatctaatgtaaaggctaataagcagctaatttccctttttgcacgattaataagcctaatgttagtattgttgatgttcctgattcttgtcttcaagtactctccaaactttcaagcctaatgttacttgttctcagaaaacggttccttacaccatagagtactcttgtcattgtgcataatcatcatcgacgcccttagctgcggagatagctctcgttatcgacgtgaactccgagaagaatacaaagaagatgtttggaaatctacaatgatcagagaggatttagcgagaaaagcggagaagttatgcgatctgttaaacttagcagtattgagagtggttttaagacgaagaaaaaggaggaaatgttgtagattttgaaacgtatgattagagatttacaagtggagactgtggagaagaaataggttcagttgttagcaaaactgaaattagaaacagagaattag

SEQ ID NO: 8606 - DNA, 517 bp, Arabidopsis thaliana columbia
caaacttattagttcaccacacttggaaaaaaaaacttatcatatacatagtgacatcaattgattttgaaatctctacatcaatcattcatctcgagtatcaatcattttccgtaagaaaataatgttttcgtatgatggatgtgacaattgacgtacgtgtagattctgatctaatacttggattcttgtgcttggaagtactatgtttggaagacatctacagattttacgaatgaagtgataactacattattattatgattaacaaaaacgtcaaaatctagcctactacatagttgtaataaatttgtctgaatcataaatgttacaggggatggtggttctatggctaacggcgatgttgccgcaagtagtagcatcaccgtgtgtagcaacagccggaaccaactgcagtgtcgcgacatctactcaattggctctcttgtataccgcattcgcattaatatcgattggatcaggaggaatcaggccatgttctttagcctttggtgct

SEQ ID NO: 8607 - DNA, 580 bp, Arabidopsis thaliana columbia
ccccctaaaagaaattgtgtgctattttagcgaagagatgacgcaaatggacgcatcaaggaaagagagcatccaagaagaagcacgaagagcgaaacagttgctgtggagaagtataatgcgggtgatcttgttggagccaaagaatttgctgtcaaggcacacagtcttgatacagaacttggtggtcttcgctgtctcaatacaattcttgatgtgcatatggcttatgagaagaaaatcaatggtgaaggtaattggtatactgttttatcggcagacccaactgaggatcttggaaccatctcggtacgttataaaaaattagttaggaacatgatctatgaccgtgacgactctgttggtggggttgatgaaacacaaaagatattggttgatgcatggcgctacttgagcaaagaaaagttggagcaggccaaggcacgcaaagtaattccaccttcacgaagatgtgttaggtttaattatgttgaaactccattgaatgcttcaggtcctgtaaaccaatcaagtagcattagcgcaggagaaagcaaaagaaagggacctccacaacaga

SEQ ID NO: 8608 - DNA, 506 bp, Arabidopsis thaliana columbia
tgtttttccatgtttgttggttgacatgattacacccggatttcgaatactgaaactccaactttgaagtctctctagcacactcttggtattcttgatggtgatatcacgaatgaaccaagaaaatggcggtagattaaaaggaggatatggctgaaaatattggtccattgtcactttcgatgcaatctttccttgtccgccactacatttcttgtattcatctacactcttcggcttcttgttcttgcataagcgtactgaatctacgtatacaggctccactttatagctaccctcgaatactttcatgaacatcattttctcttttttatatttcgcctgtccacaataagcaagaaaaaccgaagttaaattttgcctatacaaaacaaaagatcttgattattgttaggggttatagagaagcttcttactgtaagatctcttctgttttcatcgacaattagacttatggggatacaatagacctccactgaagtcca

SEQ ID NO: 8609 - DNA, 532 bp, Arabidopsis thaliana columbia
  unsure (1)..(532): unsure at all n locations
aagccaacaatatccagacaccaaacttatcatttttaccaagcttaaacatattttagagttaagcttatggagttgataatggtgaagtttggagttgagaaaatatgaataccaaggaataaaaaagatacaattaaacagtagacctatgttatatcctgaagtggctaagaaaacaaccagaatgagaatcaaagtggagaaccaatttgggtaaatggaccaacatacctgcattctcgctgaaagatgcacctccgacgagccaacagatgttccctgctttactgtctcatagtcttgttttccaattctagataaccgaggaacaggttgcacagctgacatatgggagggtgggaaggtctctatcgcagaatttgcattattgacattatgagaaacccataagaaaaatttaaagaagaagcttagggttagagatttccgaaactccaccgatccccncaggagcatcttccttaatcacgacatcgctctgtatgaccttaagcgcatcctgcagaag

SEQ ID NO: 8610 - DNA, 552 bp, Arabidopsis thaliana columbia
ccttccagaggatatcgtggaggagatacgatctacttgcaaaacatggaaccatttattcaacgatacaagattcgcaaaaaagcacttcgataaagccgtaagacaatatctagctctcacgatcacaaaggaatttagggtttatttgttgaactttaatctctatggatgtaacaggtgaacttagcataatcaattctcattcttatttaaacttagctgatatagaggaagttttgcactacgatggcttattgttatgtaccattatgagaggttgccctagactcgtagtttggaacccgtgtactggtcaaaccaagtggattcaaatcaattcaagttgctactacggatatgctcttggatcttggcaagacaaggaattcagaaataataatagctacaaaatattgagctataattattttgatattcacaagcaaaacttcgctgtgacataaagtctaattcatggaggaatcttgacgtcactccggactgtcgcttagtgaatgctagtctttacagcgtatctttgaaaggaag

SEQ ID NO: 8611 - DNA, 518 bp, Arabidopsis thaliana columbia
  unsure (1)..(518): unsure at all n locations
gctctaaaggagcatatccctttacctgaaggggactggcggaacagaacctgaagctgaatatggccctgaattaaagcagtaccggcaatcattctgtggtgcctggagggcataataacgaaatgaccttaaccagcaactggccgcatcccngtgtaaaaggtgattttataccagccaaacgggaagttagcgagtccggttttcaggcgcactggcaaagcagctggattgctnataatctcggtgagcgttttgcttcaggccatgataccggctgggaacacttcccggcgtttagcgtcgcagtaacgacgcccgccgatcaaatccaattaactgnccggagcgctaagatcgccattctgctgattgcactgacttttatggcgttctttgtttttgaccgctcaccgcgcacccgtttccccaatgccgtatttgctggtggggctttcattggtgntgttttctttgctcttgctggcgctttctgaacatccggttttccgtgg

SEQ ID NO: 8612 - DNA, 526 bp, Arabidopsis thaliana columbia
  unsure (1)..(526): unsure at all n locations
agtagggcgattacaagtacggttggtttgttcacaagagatggaaacagatgcctcaggttgatatcgaaccaactactgggaaaccatataaactgcgcagaccagaaggtcttgatgtccaaaagggaagcgttttgtcaaaagtacctttgttacatctccattgccgggaaatggtacttccaaacattgccaagttcctacatgtcatgaaccaacaggaaacagagccgcttcacacaggaatcattgataaaccggatctcttgcggtttgtagcttcaatgcccagccatatgaagatcagttggaacttaatgtcttcatatttggtgtagncgttttactacctttttattattagataacagttcctgaacttcttggttctgtggcttcatattgggaatatttgtattgtacagttgtctcacagatgaatctgactcatattagtaactcacaggcccatgtgcatgtatatttatatacacagaatcagatagtgatcatagtttggagt

SEQ ID NO: 8613 - DNA, 566 bp, Arabidopsis thaliana columbia
ttatattaaaaatgaacaaatcatccacttttttggtttttctaatttcacaatcaaagctacatttcatggaagaaactaaagttttggaactattcaaagattttaatattacttaccaaaaaagaaggttatctattttcggctgttagtgttttcatgtgtaatatttttacttttctttttttcttggcatatgatgggtattagtacttcataaggtaaaatattgaccgagtaaaatgtaaaaggaaaattaccagattgctagagaatccaaagcaagttcagggtctttaagaagtccggcgaggagaacaagaatctgagagtaccaagattcaaggcagagcatgacggcggaacgtgcggataactggaaaaagtccaaagaccatcaaaagctttccaactaaaaccatcccaagtccggcgacatcttggacttatcttaatgtaaataatctgagcgaggacaatgatcaccacgagagactatgaacaacggagagaccaagtaagcctcaccaaacttaaagacagagagcaagagaggattagtggat

SEQ ID NO: 8614 - DNA, 478 bp, Arabidopsis thaliana columbia
caatcttaagcttcctaatctttgtcctcgtccctcccattcttccaggcatcttcttccctttataaactcttcccggagtagtaccagcaccaatcgaacccaaagctcgatgactcttggaaccatgagtcatctgacctctcttgaaatgatgccttttgattcctccttgaaaccctttaccaattgtggttccagctacatcaacgagatcaccttctttgaatatctcatcgaacacaagcttctggttcggttcgaatccttcgatgtttgttaatctgaactcttggagatgtctcattgggattgtaccggctttttggagatgaccggtttccggtttagttagctttttgtcgcgtacacgacggtaaccgatttgaaccgcgtcgtaaccgtctgtggctagggttttgatttgggttacgatgttaccttcgcggaatccgacgactgttactggaactactgt

SEQ ID NO: 8615 - DNA, 560 bp, Arabidopsis thaliana columbia
cctaattttcttcaactctttaaggtttgaaaggaagtaaagttgaactctcgtgctcaaagatctgcacaggtaaaagtttctcgacttgagctagtgaatccgaccatttattcattttcattttttataaggaaatgagtgaattttgtttccctatagactaaaaatgcactatccatattttattctttaataaggccaaagcatacaaactatttggagcgttaaaacaacaatagtagcaaaaacaggggagagaaatgggtgattggtcaaagctaccagaggagcttcttggtttaattgctctcagactttactccgtcatcgaactcatccgtttccggagcatatgcaagtcatggcgctcctctgcttccggcgtcaacaagaaccattccctgagctcccctctcatctacttcaagccgctccaaatcattctcgctcgcgcacaagcaaacggacaaattttgagcaagtatcatggcacggtcctctcacgtgccacattctttcgcgtcacactcgcctcctctccggaccaagggtggttg

SEQ ID NO: 8616 - DNA, 559 bp, Arabidopsis thaliana columbia
gttgaatctgatgtagagcttgaaggagacactgttgagcctgataatgatcctcctcagaaggtaccatgatgactaagcaaaaccttagcttttgattttactaatttctgtctgattgtgtgtttctgactctcttggtttcgatacagatgggggattcatcagtggaggtgactgatgagaatcgtgaagctgctcaagaagctaagggcaaagcatggaggccctttctgaaggaaactttgatgaagcaattgagcatttaactcgggcaataacgttgaacccgacttcagctattatgtatggaaacagaggtcagtacaagttgattttgtttattttaacttccatcagatgggtttctttgcctaagtgtctacatttgtgtttcagctagtgtctacattaagttgaagaagccaaacgctgctattcgagatgcaaacgcagcattggaggtacagtggtctacaattttccttgagaattttgttttatggtgatgatatcaatcgtgttgtgtttatgatacagattaccgtgatctgcaagg

SEQ ID NO: 8617 - DNA, 495 bp, Arabidopsis thaliana columbia
tggagaaatttgataggtacggaaattcggggtgtttgcttcatttacgctacttggtttgctcttggaggcctagcagcagctggtgaaacttacaacgattgtttagctatgcgcaatggtgtccactttttgctcacgacacaaagagatgatggaggttggggtgaaagctatttatcatgctccgaacaggtatgtcgagacataaatgcaaaatctttgtccaatcaattcatctaacttatcatgaaaaatgttatcacattttttaacatgatttttatgcagagatatataccatcagaaggagaaagatcaaaccttgtgcaaacatcatgggctatgatggctctaattcatacgggacaggttcaaacactttaatctatatttgcattttttttctaatttcaaatacacgagttggtctcgaaaccgatactcgcttacactttcgtatatatatcacacatataggctgagagagatttg

SEQ ID NO: 8618 - DNA, 486 bp, Arabidopsis thaliana columbia
aaccccctgtaatacaaagaaccaagtaacttcccaagtaggcgtctcacggtttatgtagaagtataccagctcgtgaatcaatccagagacgaagaatgtggtccaacaccccatgaaccttgcccaatcagacctcatttggggttggcataccgaacgcatgggatggtagacgcctggccggaaaatggccgggaccataaggttccaacggcgaccccaaaagtcttgaagagacgtggctaagtatggttcgttgaaatgtggctccaggtcgcatccaagaatgattgtaagcaaagcgttgacgatggttaaaagaacgtcaagcacaaggtatagatgcaatggatagagagatattagaagaattggaggcaacgaacttttatagttatggacgtttaacaacaccccaaaaattgcagctttacaaaagaaaacccatttaggtagatgattttgagagttagggtttttttg

SEQ ID NO: 8619 - DNA, 499 bp, Arabidopsis thaliana columbia
gctttcttttggtttagaatctaaaggtgattgttttgatttcactctaaaggtccctggaagtaagccggagctgaatgctgttgagatagctgctgcttactcgtcactttctttcggcgtgggatactatgggaactctatagagaagccaaaggtatagccttcctcttagatacacacagaaaaacttgtcgtcgttaatggtggagcttaagtttaggatcattgggtctcttgtttatccttggacagatttcgattctcaggacgaggagacagatgagtgaggctggggtagaccattttgaagcccggattgatctccgcccaacctgttgctgattaatttctgaagttttggtattttgtggagaaaagtttcagaatctgtaacataggagtcatgggacacaccaaaatgacttccaacatcaatcgtaatgacttcatccttaagctatcttccaagacttacattacgttaaaagatacattt

SEQ ID NO: 8620 - DNA, 456 bp, Arabidopsis thaliana columbia
tctttcaagatatccaagcatattgcaccgctttggctactaatattcggatgcctttgattttgatcagatcaatcaacagaaataaactccttattagcgcacaatgcagtttcaaagatattgtcataaatggtaaaatgtctatcaagagaaagttaaagagaaccgtaaaacaacttcaacgaagattaaaacttttcaccatatatagagatcatcaaacaaatacacactaccaaaacattcatcccatgaaatagtagtacaaaacactgatttaagctccacgatagatatataaccagttcttatgttatgataaatactaggcttaagttgtttcacataaacaatctcgaaaactacagatacataataagtttgcagtgatgaacataagaatcagagtcatcatcttccttaccaaactttagttgaaaactgcatctttgg

SEQ ID NO: 8621 - DNA, 594 bp, Arabidopsis thaliana columbia
ctgttagatcatttctctgatgaaattcgtgttccttggtcttgactcagttattcaggtcctgagtttccgagttcggtttatctcctctctcgtaggagcttttcattgaatgattaatctcagatcgttttggctttttttttttaataagaacttcagatctttttggtttcttaagctttatcgattttgaagtgagtcttgtgtgcttactgcagggttactgtgtgaggaaggacgtgcaaatttgtttggaagttgtgttaagttaaagcagagtattggagatcgtctgatagagaagagaatagttcttgtgtaaggttatgggttcagtttgttgtgtagctgtgaaagacagaaaggttcctcctagtggtggacctgcgagttcatctgttcatcggaattcagcatgttcgccacaatggagttttcgacgtgataataggaggcgagtggctgatgagattgagggttcacttattacagtccttatgttgcgagtagaggtattagtatggataagatgtcattaggctctgagagaggaactttatctgaaggaggacccctcctgatggacattta

SEQ ID NO: 8622 - DNA, 565 bp, Arabidopsis thaliana columbia
gccagtgtgctctaaagacgtcgttactgatccgcacgtttatgatatgctatcgtactctttagcgagtacaaccgggggaggcattttgcttcccccgctaacaatggcgacatattatggcccaacaatcaccctattcagcagcgatggcagaacagcgtcaccaggagtggttacgttttgtcgacctgcttaagaatgcctaccaaaacgatctccatttaccgttgttaaacctgatgctgacgccagatgagcgcgaacgtctggggactcgcgtgcgtattgtcgaagagctgttgcgcggcgaaatgagccagcgtgagttaaaaaatgaactcggcgcaggcatcgcgacgattacgcgtggatctaacagcctgaaagccgcgcccgtcgagctgcgccagtggctggaagaggtgttgctgaaaagcgattgattttgtaggcctgataagacgtggcgcatcaggcatcgtgcaccgaatgccggatgcggcgtgaacgcattatccgtcctacaaatacccgtaatttcaatatgtttggtaggcatgat

SEQ ID NO: 8623 - DNA, 932 bp, Arabidopsis thaliana
acacctctcttatctgaccaaggtgcatgtctgtttccatcccgcagctttgcgatttcggacatgcatcaagcttcttaacttcttcctgaatagacaacagtcattaatacaagcatgaatcttttcataccccatatcaaacgacttaagaaatttcttcacatcatacattgatgtatgtaaaacgttgtcagcaggcaacatttttggcaaagtctccagcagatcattgaagcttttatctgaccatccattctgagtctttattctatacaatgaaacaatggctgaaagcttgctatggtttgcacaactaggatataaaggagtttcagcatctgctacgttcgctagaaactcatcttctttcttatcctcagcctcaccctctacatcatcagccaactcatcatctaaacattcagcagctctatacaactctaaaatctcttcattgcactcattaacagtgttgtcttctgcatcccctgaaataatttccccatgatgataccaatccattcttttcttgtaagcctcatccattccctttcttactagatgatctactactacactgcctaaatgacgatctacatttcgacaatcagaacatggacatataaccatgtcactgccgccctacagcagcagcaaccaattgaacgctattccaagccccaatctcatacgcaggatccgttctttagtacatgtcaattgaaagagaccaactacatcagataaaaaccagggaataagaaccaaacaagctaaccagtacattcagataattatacatgtagaaaagacatacctgcatagatggacccatgtcttgtccagcattttatctgctacccttgtttaaaaccgttcacagagtaattcaatccaccacaattcaggcagcaacacagtacatgtgt

SEQ ID NO: 8624 - DNA, 647 bp, Arabidopsis thaliana
tttttcatcacaatttttcattctaactaatagttgggacttttagaaacatatatatctattttaatgtttaaatttcttgaactatatatatttttccttttcctagataactactaaattttaatatgcatcatattgagtttgaatttctttttttagtttagttataggaagtttgtattaaactaaatccccggattgtattaatattaaactaaaacagctcaaacacggacttgtcgtggaaacgtagttccgtcgacatcatccctcataatcgtcttaacacaaagcagaacagaaaaaaaaatatgaactcctaacagaagtgaaaacacatagttagctaacacatcggcaagagagttagcttccctatacacatgacaaattcggactgtccagtccttaaccaaaaagccatagcacaaccgcaccaggaatgacaacggatgagcctctcctatccccgtccttataaaccctaccaccatctctgaatctacttccaactttagtcgtgtgacccgtttctccaattctgtgtacatcccatagtagacaccccacaactcagccaacggtaaagaatatcgcccaatattaaccccaaacccgccacatcactccccattactatcccg

SEQ ID NO: 8625 - DNA, 565 bp, Arabidopsis thaliana columbia
tgctgaagcaagctcctccatctgcacattagtcagctgagccatgcttccgaatgctacgtacaccaccgacccttgtggccttgtgtcgagccagttaatgcagaaggaatcatctttcgattcaaagagattaagatcatagccggtgtctgatttgatacgttggtctaagtaaattgatggaatagttggaccaattgtcaacacaggacaagctttcgaccacaattcattctcctgtaaacaaaaaaagagcagttagtacatgcacaagaacaagagatggtttaagaattgtaagaaagagatagagagagatctaacatgcagttccaactcttggaagctattaacgagaacgaaatcagctttttcgaaatttatgaactgttgaagcaccatctcaaagtaagcaggataagagccagaaacagagaagaaagaaggcaaatcttggagctcaagaaaaggcaattcctcaatgggaagttgcaagcttccattgtttatgtaagaaagataataaccatagttaacagcacaaagctgcgtaaagaaagga

SEQ ID NO: 8626 - DNA, 508 bp, Arabidopsis thaliana
aacacattgtgaaatagagtttactataaaggatagattgttatagaatcgcacaactcaaaatgtcaaagaagacattaaattccacggactcaattcggttaaattatcatttgcaataataaattaaaagtaatttgccgcctgctattatgacactctctgacgactacacattttcctttgtattgtcagaattaaaaattattcatatttctggacgaaacaaaaaaaataacatttaaaatctagcgttttcgaagccgtgcaagtcgctcttcttcatcatagctaacttagccagtttctcagccgctctccacgctgatgctggagtcaacggctcaccgttttcatccatcaacgtcatcgtcgtcgtggtctctctctcgcttcctctccgccgttgattatgttgctgctggtgctgactttgatactccattagttgttgtcctctccattgaacttccaccagctctgcctccacgaccttttatgtactcag

SEQ ID NO: 8627 - DNA, 421 bp, Arabidopsis thaliana columbia
catttataatgtgcattaactgaaaaaaaacttgatagtcaagtatgaatttgaacatccaaagtataccagaatcaatatacataggaataaaaacaaacctgtatcaatgcgatgaagcgaaggcgggcaggggtgacgacggaaccaccgcaataagcgacggtgcgagcagaggttaagtatttggcgtcggtcaagagcaagaacgatgtagacgtcacgtattgcatgttgctctcacccatcttgaacaatagcccacctataaatatgtatacacatatatcgtgaattccttgaatttaacatttcaatgagaagatgagtggtgtgtatgcagaaacctggtgtgtgttgggaagaggatgctcccggtagagccgtgcgagtggagctatcagcatgctctttgtattct

SEQ ID NO: 8628 - DNA, 571 bp, Arabidopsis thaliana columbia
tgattcgatgtttgcagggatttgactggcaatcctgaattgtctggaccgcttccagcaaatatcggtaacctcaggaagttgactttcttgtaagcaaagtaaacaagatcttaacctaattccatcaatcgcattatcttatatatcgccttttcttttgttgttttcttctctaggagccttatgggatgtgcttttaatggtccaatccctgattccatagggaatcttgaacaacttacaagactgtaagatttgttgcttcttataatttataaacagtcactttttcaatgtaatctttaaaactcataataagtattactttgcgtttcctccatacagctctctgaatttaaataaatttagtggaacaattccggcttccatgggacggttatcgaaactatattggttcgacatagctgacaatcagttagaaggaaagcttccagtttctgatggggcttctttacctggacttgacatgcttcttcaaactgggcatttgtatatataatccaaatccttagttttcatttttatttaggtactctttatatatacc

SEQ ID NO: 8629 - DNA, 541 bp, Arabidopsis thaliana columbia
tttctctcatttaatctatttctcaatttatctatttctctgaaagatctctaagagagaaaaaaacaaaccttttttgcagattgagagagaaatttgaagtaatttaaggtaacaagaagagaacaattttgttctgttatggtgggggcgatggcaaacaatggaagaatccggtcagcttttccggtgactaatgggtcaaaagatctgacgccgaacagtgctccggcgagtacaaccggatctgaatatggtcctgttgagttcacaagagaagacgttgaaactcttccccatgaacgaatcaagtacaagagcaaattcaactacaaggtttctactttaaaacccacctcattaaattaatccaccttaaaaattaaccaactgaatctaaaattcttcttgtgttttcgtttagttggtgcagttttgaatttctcgtagctttctccctggctttcctcgttggatccgttgtgttccctcccctgaagacgaagatttgattgttgttgtttatcagacaatttgtggg

SEQ ID NO: 8630 - DNA, 181 bp, Arabidopsis thaliana columbia
taagaatattgagatgagacagttaattagttatgttgaaccaaccttgagatccacagtggtacgatgcgtgtatggtgaaaatgaaagctttttgatctcagtccatttccctactccatatttggacacaccttcgactagtttttcaacttcagagatagtccaagctcgatgaagc

SEQ ID NO: 8631 - DNA, 936 bp, Arabidopsis thaliana
tttactccatcaatctccagctctaatgtgttccccagacccaaatacctgtatgcaacaatgaagtggttccgaaccaaaaagttaacctttattagctagaaatatatatatgcagttgaaagatggtagtgtcctctagacattattgctataccttttgttttggtatcacgcatgtgtccaacaccaaaacctgatgaatttgaaaatattggaagtcaatgttgagtagcaaaaagtaagtaaaccgcagagcccgagtatatgagataagaagcaccttcataacaagaaagagaaagaagctgattgagtagaaatgattttccagaacgatatgggccaatcacctagtatttcaacaccaaaggaaataacaagcaaatcgtgagaaacaaagtaacaaatatcttggtccgagaaaaccaggttcagatagaaagaacatacgaagaattgataatgagtcaaacatcactgtcacataccgcaacagcagaaataggagttgtaattctgctaattgcttccagaccttctctgctaagctgaagctttgtatgacccggagcaggttcaacaataggaaaactgcataaaaaacaagcacaaatgatttccaaaaagtgtttgcccatcacaactgatcaatcatcaggagctgtttgctacagttgatgacaggaaattgctactggtatacagtggtaacattctctagcaacaatgtggcttataacaaacctaagacttgagaaacaactggcaatagacaatacattatcaagaagattcataggttctcatgtagacaaaaacaaaaaacctgtctttcaatcaaatatcagatccattgctacaatgttgtgtatttattcccattgccattactacaactacaagatgcggtactataatagtccagaaacaaag

SEQ ID NO: 8632 - DNA, 568 bp, Arabidopsis thaliana columbia
gtggacgtctgggagctgtttaagtcaattgtgatgaaattatgacaaaaggtctaaaatttacagggtttcaaatgccttagaaaactaaatcaatcacctttgctgcaatgcagctactgtcgaagactagtttagcgagacagaggatttggtcagcatggtctatcaaaacctgtgagtaccatttgagacagaatcttccatagaggccatcgtagtcacctccatcacagaagacaccggttccctgcggctgagaattgtaggagccggtgttatctgggcctcgagcccaaaacaggtgcccccttgattctgctgcctttctcaggctcttcgagagatacttgtcataacactgtaccggtgcaaaggaatggtcatcatgtggaagccaaaaaggtaagttagctggtgaagctcgagtatctcaagaatttagattgttgaaaggaaatatacctgacaactctcaacacctggatatcgccacccgtgttttatgggacaagaagggtacgtaactctcacaggggcctagtcaatttcaacatagatattacac

SEQ ID NO: 8633 - DNA, 623 bp, Arabidopsis thaliana columbia
  unsure (1)..(623): unsure at all n locations
tgattgaattgttgatgaggatgaatagtttagtttcagcctcatgtgagttttgattttgtcttctcctctttgtagtataaaggtttatagaataggatgttttggtatggcttcggaatgttttatgctgaattgttcatgtggtgaactctgtaggaggcagagagtgaatatgagcttgtggaagtgagtactggtgggaaacttgggaggcacaatgttcatgtgcagcagcttgggcctgatacgctcacagagctaaccacgtttcatatgtgtgtcaacgagcagactcttgatctccatagcaaaattatcttagaccatccacgaggcgcttcacgacagcttcacaagtgtattgttgctcattcctctggtcaagctgttttcgatggcaatgtccgagttaacaggtaaacttttcagtttggtttggtgtgcttagcatcggtttaacttctgtgtggtaatatgcagattcgctcaacagaccaacgcgggacaactaacacggagcctccttctgaaacccgagccaccgtgaacataaaaccgaatcttcagatcattgcagatgatgcaaatgnctcatggagtgctacagtgacttgaagaga

SEQ ID NO: 8634 - DNA, 724 bp, Arabidopsis thaliana
  unsure (1)..(724): unsure at all n locations
cgccagtgtgctctaaagttgcgtattgcggcgtatggcccgcatgccgccaatgttgttggactgaccgaccagaccgatctcttctacaccatgaaagccgctctggggctgaaataaaaccgcgcccggcagtgaattttcgctgccgggtgagtttttttgctgttagcaaccagacttaatggcagatcacgggcgcatacgctcatggttaaaacatgaagagggatggtgctatgaaaataacattactggttaccttgcttttcggtctggtttttttaaccaccgtcggcgctgccgagagaactttaaccccacaacaacagcgtatgacctcctgtaatcagcaggcgacggcgcaggcgttgaaaggggatgctcgtaagacctacatgagtgattgcctgaagaacagcaagtctgcgcctggcgaaaaaagtttgacgccacagcagcaaaagatgcgcgaatgcaataatcaagcaacacaacaatctctgaaaggtgatgatcgtaataagtttatgagtgcctgcctcaagaaagccgcctgatacctgatagtgctaacgggtgagctacgaaaatggctcacccgagatatcatacttctgcctttagctccgtctctataatttgggaaaattgtttctgaatgttcccacaaataatgaatgatganaactttttcaaaaaagcggcggcgcacggggaggaa

SEQ ID NO: 8635 - DNA, 602 bp, Arabidopsis thaliana columbia
taaaataattgctaacagtaagatctcatcggataaaacttgtataattatgtttattcatgaatcatccttgcacctacgtatccatcttttccatcatctcatctatatatatgtacatttgcaaagctgagaagaaaaaacatcatattgtcgattgagcctatctctttatattatattgggagatgctttccgaagacgagaaggagaagacaccaccttctgtgatgacgtcaattccagacgacgtgatcatggagtgtatagcgccacgtgtcccgaggtacaaccattcgatgctatccctcgtctctaagcaattccgatctctcgttgcgtcgcctcgactatacaagacacggtccctcctcggctgcaccgaagattgtgtgtatgttctcatcgaagattgtatactcgaagttgctcgttggtatagtcttaaccggagaaccataagaaacatgcccggcactgttgaaaaccggttggtccttatctcgtcactcccggcctatgtccacagcagcaagctatgttgttgtgggttcaacatctttgtaatgggtggaagatcgactggaatgttgaggagtggg

SEQ ID NO: 8636 - DNA, 575 bp, Arabidopsis thaliana columbia
tttgatggatttatttataaaattgatttggattttgaatatgatttgtagcattataagatccataactgttttcaagtttatattttggttttacaacctaaacaagattttgaagcatgtacaagaaaataccaccagcaacagagacgttaagagattcaaagtcacctgccatgggaatgctcactagcacgcatactttccgtgcctgctcagacaaaccattcccttcactacctaaaatcaagcataaaggcttctctgctaaagattgagcaaactctaccgaaagtttggagacaggtttcagtttctgagtagtcgttgctggatgaccagctaatagcttcatctggaactcattttctagaagcttaagatggttccaattcccggaaactataggtagctgaaacgaagcacctcggcttgctcgaagacgtttgtcgttgtacggatcgcaacaacccggaagtagaaatgcaccatcctgacaaaaacattagccagatagtgataatcatctcactagagatttctatcagatgccatttccaacgaattgagaagaa

SEQ ID NO: 8637 - DNA, 990 bp, Arabidopsis thaliana
gattaaaaaaaactaaactaccattacttgcttattcttatcatgtctttcgtacacataaatgtttatcatcaacgactcatttcaactgtttttttttttgtgtggaaattttgtttctttcaatataaattttgaatactaattagtttttttaacaaaacgtctacaacgaaaagaaatctcgaaatttctagttaatgactttcttctttttttcgttaccaaaagttttagcaagttaatgacaaaaaactagatgtctaattatagacaaatagtaaaacgaagaggtcttatacccctacttatagacaaagatgtccgattagtttatagaaccaataactctggaacatgattctaatacaaaaaaactgaaactaagaatctgaacctaacgtgtatgatttgtttgtggtatcatccaagttcaaaactaatgttttcagaattcaaattatatatgtctacgtaatcaatgcgacgctaaaagaattcaacaaaatgattattactgaaacagactttatatatatatatatacataataactcgaacaatataagatgtatatatctgtatctatacataacggtatataccgtaaagttgttatacaaaaaatactgaaagtctacaaaaatagaaattatcagaaaaaataaacttaccctacacaagtataccctaaaaagagaaacgaacaaaaatcagaaaataaacctcccaagctccaacttcaaatcttcgttctctaaaggcgtcaagttcaagtccaagcacaaaactctttttccattaccaccgcctgatttcttcatcgtcaccggcgctgtagccggcgccaaactccggccacctcctcctcctgatccacctctatgcttcctcatgtgaccacctaaggcctgccctaccgcgaactcagcaccacatatgggacactcgtgtttcaccggtttgactctcttaggagaaggaggtgcg

SEQ ID NO: 8638 - DNA, 562 bp, Arabidopsis thaliana
cataacccttcatctagaagtagctcactcgtaaattacggtaactagtaatgaatttgtataagatgcgtgacatgttgtatcatttgataggatatgggcaaacaggcagtctgctgcgaggtcaaaagaaaggaagatgagatacattgcagagctcgagagaaaagtacagactttacaaacagaggccacatctctctcagcccagttgactctcttacaggtttggagaccaaatttaactctagactaagatatttgtaagtttatggttgtaatcttgttctcttttcatccttgtgttcagagagatacaaatggcctgggtgttgaaaacaatgagcttaaactgcgagtacaaactatggagcaacaggtccacctacaggatggtgaggatcttttctcacatacttcctaggagctgatatttcttcatctctttactatcaatgcaaataaacattgtcaatgactgtcgaaggtgtagtatatatgacataccacattctggatctgtcagtgtaagattgtatgccatgtttgtggtcatcaaagc

SEQ ID NO: 8639 - DNA, 562 bp, Arabidopsis thaliana columbia
tagagactcaaagagttttccaaagagatgcacaactttgaaaggcttgcaatgtttgaaagatcttttgatgtcttgaaggatccaattatgaagacgagcttcgaaaaatccccgaccaacaagtggtcataaagagctcgcgcgaataacgccaaagagcttttgttaaggtgctccataaaggagactaagggtttgcaaggatggttttgcaaggatggtttctctatggtttgtaggagtcgccaaaagtaatcacaaggccaaaagaaggatagtaaagcgaggctagagtgtagtccacgtccattcaatccaaggcaatgaatatccgatttaagaggacttgagataaggttagattgaacataccgaggcggtttctccaaaatggttcgagagtgttgatatgcatcgcccaataagtatgaggcggaatgattaagcttgaacttgaaaaagttgttactcgaactatgagtcccactgagcaaaatggtgaccagaatcacgcaagctatgggtcgagtgtagcattaaccaagaagctcaaagataa

SEQ ID NO: 8640 - DNA, 537 bp, Arabidopsis thaliana columbia
tataaagatttaattaaaaacacaaaattctggtgagataacatcaaaactttaatcctcatttcataaatcttttcctaattaaattatatgcatgtttagacgagtactgaagaatatgtaactttagaagttaatttcatatcttaaataacccaaaagaattaatagtttcatcatgcttaatcttccatttttatcttctatgctttttataattttccggttcaagtctctatctaagtttcattataagtttagagtagagtagtgagatagtaaagtaaaagatttgtgtaccttggagttacaagagagtaacttgcggacgttgttgagatgggaattgattcttgctcttctctatcgctcagcctctttatggttcctcagagaagcaagagctttgtcttcataaaccgtggcaaaagggtcagacgacgacgtcacggttggtggcagtagacgaggcacataatcctccggtgaggcaggcataacatatttgatctgacacctctggctgcatttttttgt

SEQ ID NO: 8641 - DNA, 339 bp, Arabidopsis thaliana columbia
caggtacctgaatttatttatgtgtcatgtctaaactctcttctggagaatcttcatttgtaattatatcctctgtattacctatgccaataaaagccccttttctttttcgaggattttaatctttggaaccaataggtctaccacgctttaaacatgtcttagactcatttacagtttgaatttatccttctaggatatttatacttattggagcatttgcagccggtatatgtgatttgatcacactttttgggtcaatgaatgcatctggcagctgatttgctaaactctgtaaatgaattatcttttggacttctaattcacactctttagtcc

SEQ ID NO: 8642 - DNA, 506 bp, Arabidopsis thaliana columbia
ccactttaactgctgcaatcacaaaggtacttcttttgtgtatattggttacatgaaacttattgtcaaagaatctgttttttttttaagttgatattgtgatcttacttatgttgcaggttcttgctgaggagggcaaagctaaagctattgcctttgatgaaattgataaagctcctgaagagaagaagagaggaattactattgccacggtctgtgttatctttatgtatcattttctcatttttctaattagattttgttcgtttacttgatgttacttggttctgtaggctcatgtggagtatgaaactgcaaagcgtcactatgctcatgtggattgccctggacacgcagattatgttaaagtaagaaaccgatatacttttttactttcatataagataggtgttacaatagtcggattcttggaacttaaagtatgctgctccttggtgtatatcattttaacgctgcaaacattacatgttacacattttcttgaa

SEQ ID NO: 8643 - DNA, 725 bp, Arabidopsis thaliana
tgagtacgctattggtcagcttaaggaattcgagggaaagaaacttgtttctgcaaccaaggaaggtctgaaactggatgagaccgaagatgaaaagaagaagaaagaagagctcaaggagaagtttgaaggactctgcaaagtgatcaaagacgttttgggtgacaaggtcgagaaggttattgtttctgaccgtgttgtggactcaccgtgctgtcttgtaaccggcgaatacggctggactgcaaacatggagaggatcatgaaagctcaagccttgagagacagcagcatggctggttacatgtcgagtaagaagacaatggagattaatccagagaactcgatcatggatgagttgagaaagcgagctgacgcagacaagaacgataagtctgtgaaggaccttgtgcttcttctctttgagaccgctcttctcacttctggtttcagccttgatgagccaaacacttttggaagcagaatccacaggatgttgaagcttggattgagcattgatgacgatgatgctgttgaagctgatgctgagatgcctccgcttgaagatgatgctgatgctgaaggtagcaagatggaggaagtcgactaaatattgcacaaagtcgactaatattagcggtgttaagagttttggttctatcgttttacatatgtttgagaatttttttctgctgtagtttctttcttatcttgatctagggata

SEQ ID NO: 8644 - DNA, 850 bp, Arabidopsis thaliana
caccctctgacaaaacataaaataaattacttgaagactatgatttgatttgttttggggataaaggaaataggttattagaaagaaaataagataatggaaacgatgaagattaagaatactgaatatatatagagatcaaacaggtgatatttgttgtccataggatgaacacacaaatcaacactccatcattagcctcaaaatgggatacaaaattaaacactccgaaaatccaatttagttgcagtaacttagataacaagaaatcccaaaaggttcttccatagctcatacttatatatgatgaagaagcaatcaccattttaaggcgatgtagaccttgtggaaccatttccactacttgctaccggtaatctcgattcaatatcttcattactttcactcttgactttatggttttgttgtttcaccttctccctttcttcttccttctcactcacctctctgtctttcccccacaatacgccatagagaccaataaccacaagtgctgatcccataaacctaatatacatatatcatataaattcatcatcatcatctcgtttatataatgtttaaacacacagagagatagataaagatgtatagaaacatacgtgccggtgtagagtttctcttcaagaagagcccagctgaaaatggcgacaactacgagaagtaaagggctgaaaacagagacgtacagaggacctttcctctgcatagcccatgacattaggcagaaagctaacgcagacgccatcactccctgcatgatccgtgttttatctagtgcatatatttttagcttagattgtgactaatgacatagatatgtatgtgg

SEQ ID NO: 8645 - DNA, 566 bp, Arabidopsis thaliana columbia
tagtaacggtcgccagtgtgctctaaaggcaggagattttgaaagtcgcacccgaagcgttaactctgttggcgcgccaggcgtttcatgatgcgtcgttcatgctgcgtccggcgcaccaacaacaggtggccgacattctgcgtgacccggagccagcgaaaatgataaatatgtggcgctgcaattcctgcgtaactccgacatcgcggcgaaaggcgttctgccaacctgtcaggataccggcaccgcgattattgttggtaaaaaagggcagcgtgtatggaccggtggtggtgatgaagcggcgctggcgcgcggtgtctataacacttatatcgaagataatctgcgctactcgcaaaacgcgccgctggatatgtataaagaagtgaataccggcaccaatctgccagcgcagatcgatctttatgccgttgatggcgacgaatacaaattcctctgtatcgccaaaggtggtggttcggcaaacaagacgtatctctatcaggaaaccaaagcgttactgacgctggggaaactgaaaaattacctggttgagaaga

SEQ ID NO: 8646 - DNA, 1813 bp, Arabidopsis thaliana
catacttagttataggctacataaccaaaataagctagtagaggtaaggcacgattgagcggctagctgctctgtcattactagagagtctttcttagtatgagccgtgatagggaagatgtgtgctcgaagtctccataggtcttgatctaagtgtgacttcttacatccagcgagttacccgtcgttgtagcttggtgctcgacccggcgatgattcagtcgactgtgtgtgataatttagtcaacttcctccatcttgctaccttcagcatcggcatcatcttcaagtggaggcatgtcagcatcggcttcaacaacatcatcgtcatcaatgctcaatccaagcttcaacatcctgtgaatcctgctcccgaaagtgttgggctcatcgaggctgaaaccagaagtgagaagagcggtctcaaagagaagaagtacaaggtccttcacagacttgtcgttcttgtctgcatcagctctctttctcagctcatccatgatggagttctctgggttaatctccattgtcttcttgctcgacatgtagccacccatgctgctgtctctcaaggcttgagctttcatgatcctctccatgtttgcagtccagccatactcgcctgttacaagacagcagggtgagtccacaacacggtcagagacgataaccttctcaaccttgtctcccaaaacgtccttgatcactttgcagagtccctcaaacttctccttgagctcttctttcttcttcttctcgtcatcagtctcttccagcttcagaccttccttggttgcagagacaagcttctttccctcgaattccttgagctgaccaatagcatactcatcaatagcgtcaaccatgtagaggacttcgtaacccttcttcttgagcttctctaggaagggagagttctccacggcctttttgctctcaccggtgatgtagaagatctcgttctgaccttccttcatccttgtcacgtagtccttgagactggtcaattcatcaccgctcttggttgagtggtaacggagcaactcagcaatcttggttctgttttgggagtcctcgtggatgccgagcttcaggtttttagagaaagcctcatagaacttgttgtagtcctccttgttctcggcaatctcaaagaagagctcaagacacttcttcacaaggttcttgcggatgaccttgaggatcttgttctgctgcaatgtttctcttgagatgttgagaggaagatcttcagagtcaacgatacccttgacaaacccaaggtaatcagggatgatgtcttcacagttgtccatgatgaagacacgacggacatagagcttgatgttgttgggcttcttcttagtgtcaaagagatcaaaaggagctctcttgggaacaaagaggatagctttgaactcaagctgtccttcaactgagaaatgcttcacagccaaatgctcttcccagtcattgctcaaactcttgtagaaagcagcgtactcctccttgttgaactcctctggcttcctcatccaaatcggtttctgcttgtacaccaaatcccactcatgagaaacctccttaatcttcttctttatcttctcctccttttctttctcctcatcaacttcctcaaccttgccttcctcatccttcttctcttcctcctcttcatcatcagagatctccttctcaatggtcttctcaatccagagagagattgggtagctgatgaactcagagtgcttcttcaccaaatccttaagccttcgctcctcaatgtactccatctggtcttccttgaggtaaa

SEQ ID NO: 8647 - DNA, 586 bp, Arabidopsis thaliana columbia
tagtaaccgtttttttgttcggttgcttgagaatggtatgcgttgtggaatgttaaacatatgccaaaccatttatggagtattgagaacctagattaggatagtaaatgttttataacgttttgtctttattttgttctgcactttggatatcttaacacaaggagtataacatgcttatcaatatgacctgtggcaggcaattgtcaaagattttgagtcccgagctattatagcacaattcagggctcacactagtccaatctctgctctctgtttcgaccctagtggcactttactagtaacagcctcaatccacggtaacaatattaacgttttccggattatgccgacacctacaaagaatggaccgggtgctcaaagctatgattggagctcttcccatgtgcctctttacaaactacatcgtggcatgacatcagctgtatgtgtcttattcctttttctcatgtagctatagttcatttggatggttatgttactgtatacgcatgttgtgctagtattccacgaggtgatacaagatatttgctttagtagctacagtcagtggattgcaattgtt

SEQ ID NO: 8648 - DNA, 522 bp, Arabidopsis thaliana columbia
taacacttgtggcgagggtcagatcaaaaccacagaaacctctaaagaacagaaaccagtccaactaaccttatttgagagctctgctatgcaattttctaatgcatgctggaggtccgagttctgctttgttttatcaacagacacatctgattcagctgcattttgcaggcattttcgcaagtgcttaatcaagtcagctattacagcagtcatcgcgcctgaagcctgctgctttgcatgtagtgcaaggcatgtggctacattgaccatgttaatttgaagaccttgttgctttattacattcttatgatccaagtgcttgatcaaagaagataccaacacatgacaattttctcctgcttaaatacttctttagtcagttgcctcatagacaagttataaatatactgaaaatcaggaaagatcgcaaataatatatatcatctgacctgattcttccagacgagactgcagaaacaataaaacagaagaggcaacgccgttctgaggagaccagta

SEQ ID NO: 8649 - DNA, 541 bp, Arabidopsis thaliana columbia
gagtaaagtttggaaaatcttgtgtcttttgaagtaacagataaaagttttgtttttattacaatttcacatgaatcttagagtgagataataataaacgaagatgatttggcaatttgtttaaaatgggtctaaattccaaaaccaagaagactacaaagagtatgcaaactcaatttgatgcggtacaggcgtcaaacatacatcgctatagcctttgcgttattgaaccacataaaactgcggcaaacagaacttagctttagcatgcatcaagatcacggaattgtggtggcttaggctcaccaagcagtgtcttattccctccatctggtccacacttgatcctcttcgggttctgagttccatgctgaaaaacaaagattaacattataagaagttggatttggattttggatttggattttggcttagaggctacgttctccaatttggaaagttaaccgaaccagattgttttccccaccgatgtaatcaatagtaagagaagacatcaggaagtatcaaatgcaatgggttg

SEQ ID NO: 8650 - DNA, 463 bp, Arabidopsis thaliana columbia
aaatgacttgtttgtcaagctggacgtgaaggtttcaaagccttgcactgttgttatgttcattgtgaaactctagcagaagaaaaatagaaatagcataaattggtgactcaggaattctgtaggtgggaagctaataatgttccgcagtaaacaacataaataaattaaccataaagagcctaaggatacatacatacatcatacaccatagacctcccatttaatacgtaatgagtctaaatcgaacacatccgtttgggcaaatccatagactttttagtttccagtaaatatgatgtaaaaatggccattgaactagttttaacctcatcatgtagaaaacttacttcaagaactacgtcagggtttatttctgcaagggtttggacagcagcatcagtctttgtcataccaacctatagtcacaattatccggagatccgaaacaatacgaaaggga

SEQ ID NO: 8651 - DNA, 1008 bp, Arabidopsis thaliana
caaagccaataatgctcaagttcataagaattaagaaagacactattaatgctcaagtttaacaatgacaactatggacggaaaactcaaatgcctttgatcgtagcttttgttctcaatcgatcaactaaaatttctctgatacacttttaagtttctaacaaaatttcctttcaaaatagaataaaaaagtttaaacacacttatctcctctaacttcttcgaacgtgagcttcctttagcattgtctgccaaaggtctttgacacgatgacgaaactttttctgaaaccaaacttcaatctctgaataaagcacattcggattctgttcccaattctttctcaaactctccaaagtatcaatcttcttctctgtcaaaaccatcaccaaactcccaactctttctaaaccccaagcttctctttccaacaacgtttcaggtttcccagccaacaaagccctgaagcttttcaaacaagttaatacctctccttgaagcaaagcgcatccgaaagccgctgctcggtctctatcctctgttattgccacactgtgagccggaagttcccaattatgaggaccgaaactcggaacgacccagcacaaaactctatcctcctcacttgagtaatatggtttcgggtccttgagcggtgcagagaacacgcagagagactttgcgtgcttcaccagccattctggcctcacccgagtcgctccgtgcatgtatggtctgttggtgagtaggagctcgctgtagaccaataactccggagctgagtttatgagagacgaccaacggtgcaagaaaacaggttcttgaaccgcacatgcttggtattctgtcgctctggtctttctggctacacggtctgcccatcccgcacatatggcttctcctaacagttcttcttcgttctgtagaagaggggtttttgaggaagtcgatgtggtgattctccatgacttctctacgtcttgtatagtcccggggatcctctgatgt

SEQ ID NO: 8652 - DNA, 456 bp, Arabidopsis thaliana columbia
gggtaccagtgtgctctaaagcaaagacaggaatgaccaccggcaggtgccgataatcatcgtggaaacaggcgcgccagtacgttgaatggcactggcaaggaagaagtaatagatgaggttgcccatcatagtgagcatcaaggcggtaaccagtcgcgacgcccaactgacgcagacgcacgcgtcccagacaggcaatgggcagcgcaattaaccctaacgccagataacgccccatcgactgcaacatcgccgggaattccggcacgatcaacggcccgacaaaaataagcccccacatcaaccctgctaacagggcgtacagcacgccgctaatcattactggcatccattgatctgtcagaagaaagttcaggaagcagacatgattactcccggcatcccgtcattatcagagaggatgcgggaagatgccctttaattaactagtta

SEQ ID NO: 8653 - DNA, 543 bp, Arabidopsis thaliana columbia
tacttggtcagagattcaatcttgtgactcatgtattgttttgatttttcagttagggagatcttgtttgcaaagaggacaacacgagatgatacgaagccattgatctacgcatttgaggtgaaacctatgcgaacatggaagctttctcacttcttctttctctttgtactttgccaaacatatacaacattcctgcaataatgaaaccggtgggtttcagttttgatatcaagattgatttctgactatttgacctatttcagaattcaaattagtgcttaccggatcattgtttgcttgagaagaatcagaagtttcatcaatgagtttgtatttccaacttgggagactggagatctggtcatctgaagctcctttttccgaagatccaacgttcatgttgtagccgaggaagctactaacgagaggtacaacacaacagagcaggaggaagagaagaaatgggaaggagtaacagagagcgttccaacgagtagggagatgcagaggacatgaaggattggagcatagtggaaagac

SEQ ID NO: 8654 - DNA, 595 bp, Arabidopsis thaliana columbia
gtatgctatgtaaatataatcttcaaagaaatgtatttacctagagaccacattggttacaacagacttgcaggtgtcacaccagaatttaggcttcttacccttgttgtttactccattaacaccagcatgaatatgattcactttcttattacatgtcttgcagctgatgtaataccaagcccaatccgtatcaattgcatagattgtgcacaaaactctgactttaccaacctatataaaatatcagaacacattagatactgatgatagttagatttctaaactttgagataagttagctgaatataacctcagtcgagctaagcagatcttcaatggtattccttgtgtatacactgtagtcaatccttttgactgcaaccatctcaaaacgtgggactcttgtacggtacacacaaatagcaccatcatttggaagtctgcatttggataaaaagatgatcaatagcacataaagaagtcaactaaaagtagattgtgttgagagtagatgcatttacgtttgactgaaatggtgagcttcagggaagtctggattgacatgtacttgtgatgcacaaatgagttggat

SEQ ID NO: 8655 - DNA, 536 bp, Arabidopsis thaliana columbia
ccttaccaacccctaatctcttcttcttactctcaccggaatctccaccgttgcaactcaccggagtcgccgaatcatcctcacatgaagcattccatgaaacctcgactgcgatggggacagagacggcgacgggatcaaaagaatcaagaaccgatatagttttaatggaaaaatcccaagatcttagacatgagctcatctactggatctggaccaccggaaactgaacccgacccggaaacaagacgggtctcatcgatgtggtactggttagagtgttgatgagaaaggagaagctgaagctgagtagcgaattcatagccttcgacaagttggtcgacaacttttctctttatggatttcgtgttgttactattcgaatccatttttttctcacaaagatacaatgaatatgtaactttttttaggtttttagtatgatgatttgagaatgaagaaatgttgtaatatagtggacagagaagtaaatagattttttctcttgatcagaaaacaatcaaaggaagatgctt

SEQ ID NO: 8656 - DNA, 556 bp, Arabidopsis thaliana columbia
cttacatcaaggctctcgaagattctattgctgttcttgacaaaattgctatgtcaattgatatcaatgaccgtaagtccatttctaccttgtatttgttcatttggagttgaccttcagctactttggtttctgaagttagtttttctttcacgtttgtactgatggaagaatgtgtgagttgcaggttcacaagtgctaggattagtcaagagctgcatagggacaaagttcactagccaatttggagatcttattgcggtaagtaccgtaattacagtagcttcttacttatgcattaccagtccaggttttattgctccttaatatatattggatatgtctagacaagtaggtatagatacagcatacatcttgaagtgactttttaaatgtaagatgagtaaccatgaaataacttgaatttgatgactgctttcttcaattcttttggtggttttcgattgttgaaatacttgtagtatgaagttctacaagtttgattgtcgttggtcccacatgattttatatgactttatgtactgttttaggattt

SEQ ID NO: 8657 - DNA, 543 bp, Arabidopsis thaliana
  unsure (1)..(543): unsure at all n locations
tcccctgaaataagtcaccaatattgataatgagagctttaggattaggtttaacagcgatccatctattgtctttgataagttggagtcctccgacttgatcttgatacaagattgtgaggaaatcactgtccgtgtgtggcattaatccgtacacctccgatggtttgggacaaggtggatatcggttcatccttagataacatgtatttctcacacagttttctttgaagaaacttgaattttgtccagatttttctgcaagaacctctgccaacatatatgctaatgcctctgattccgaagcaaatttctccattgttgagctgtgaaacaaattagaagataagaacattataacatgcccataatataattaaggtgatcgaagcaaattgacatgtaaggaggtgaaatggcaggaagtttgagagacatgtgagatataatggagaagggcccaagagactanatcaaggacgagtagagaaggaaaaatgggtatgaatcaggttgagaggagatgtacgtgtacgtgtacga

SEQ ID NO: 8658 - DNA, 600 bp, Arabidopsis thaliana columbia
  unsure (1)..(600): unsure at all n locations
tttcagttacttgagcaaaacataacatcaataaaacagaatctcactgaagagcacattgttacctcatgaagtagtttcccaacaagaagagcagatagaggagtttgctcagcagttttgagaacaacggtgttaccgcaagctaaagctggtccaagtttccaagaaagcatgagaagagggaagttccatgggatgatttgtccagcgactcctataggctcatgtaaggtctgcacatggtgtggaccatctcctggcattgtcattccatgtatcttgtctgcccaacctgagaaactcatcgaagaacaacatacaaaaatccttacaaagatcatgaaaaagtcattaaggtatacaatatgcatcagtggtttcactcaccagcatagtaccggaacaccctagcaagcattggtacttcaatttgagcagattgttcataaggttcccattatcccaagtctcaagagcagcaatctcatcattatgtttctcgattaaatcagcgaaacgaaacagtatctttgatctctcctgaagaaattaacaaagctaagagtcatgtcaaaagcacaaatanaacacagaaga

SEQ ID NO: 8659 - DNA, 671 bp, Arabidopsis thaliana
tcaatacaaggaccggatcttgagagtccaaagtctgcaactttggctacatagttgttatctagtaagatattggtggatttgatatcccggtggatgattccttgcgaagaaccggtgtgaaggtaatgaagtcctctggctgcaccaatgcagacctcaagccgttgtttccaagataaaggcgggttggtggatccgtataagtgacttttgagtggtcctttatccatgtactcataaacaagaatcatctcagactgttcttcgcaatacccaacaagtgaaactagatggcgatgacggatcttagagagaatggttatctcagagagaaactctggtaagccctgtcttgaaccaggagagcctctcttcacagctactttggtgttgtctttaagagaccctctaaaaaccatcccgaatccgccaactccgataactaaacttctatcaaagttattggttccggattgtaactccgcgaacgagattctcagagtatggtagccactagaactaacagttctttcagttgttctactattggaactgcctctaaacctcctcaaaggtgtccatcccgtgctctctgaactcctcgtcttgttgttcttgcgcctgcacaagcacaaaacgctcaagaagaacagcgacaagaacacaaa

SEQ ID NO: 8660 - DNA, 298 bp, Arabidopsis thaliana columbia
tcaggacatgtttttgcatttcggggaatccagatccgtggcgatagaaatatggttcttgcgctgaaagaaattcaaatccgtggagatattaggactaacgttgactacacgatcgaccttctacatgtatgtttccttcttcctacatacaaaagttatactgtgactgtaatgtaccctgacaagatcatttcgttgataaaccaggcttctgattaccgggaaaacaaaatacacactggttggttggacagtaggattgctatgcgggtcagagcagagagacctccatggt

SEQ ID NO: 8661 - DNA, 461 bp, Arabidopsis thaliana columbia
tcatttacagaataataactacacatagaaaaatccagaggtgtatgtaataataccaattcgttgcctagatccacagcagcatcttggtaactactcttcttgccttggctgcttccacaaaacacacagattcttccaaactttgacttttgcatggtttcattgttgacctccattggttacgatgagagctcaagctatgaaaaaatctaaactttttacccagaaaaataaacaaaacagaacaagaagctttggtcctttgtatttttggtaatgaaatctctcaattgggttttgcttccttagagaacatatacgacaggtacaaaacgctcaagtgtcaaagaagaggaagaagttataccagaagagtaagctcgaaacttttctttgcctactgaaatgctttcgagagttggggattgttgtattaatatatagttagagagtgcgtt

SEQ ID NO: 8662 - DNA, 532 bp, Arabidopsis thaliana columbia
gctgaggcatcctaacagaaatcttttctgggaagacttgataggctctatcttggctgaagctggaatagacaatgccgtttcattttctgagagattggtagctaatgggatttgtcgagatggtgactctatcctggtgccaataatcagatattcttgtaaacataataacgtctcaggtgctcgaactttattcgagaaattcacaaaagatcttggtgtccaacccaaactcccgacttataatctgctaatcggcgggcttcttgaagctgatatgattgaaatagcacaggacgtgttcctacaggtgaagagcactggttgcatcccagatgtggcgacctacaacttcttgcttgatgcttatggaaaatcaggaaaaatcgacgaactgtttgagctatacaaagaaatgtctacccatgagtgcgacgaaacacaattactcacaacattgtcatctccgggcttgtgaaggcaggaaatgtggacgatgctcttgatttatactacgaccttatgagtg

SEQ ID NO: 8663 - DNA, 1576 bp, Arabidopsis thaliana
ctaaaggctgatgccgtcttacgtcaacatcggcgcatatgttgatgaaggcaccatggttgatacctgggcgaccgtcggttcttgtgcgcagattggtaaaaacgtccacctttccggtggcgtgggcatcggcggcgtgctggaaccgctgcaggctaacccaaccatcattgaagataattgcttcatcggcgcgcgctctgaagtggttgaaggggtgattgtcgaagaaggttccgtcatttccatgggcgtatacattggtcagagcacccgtatttacgaccgtgaaaccggcgaaatccactacggtcgcgttccggcggggtctgtggttgtttcaggtaatctgccgtcaaaagatggcaaatacagcctctactgtgcggttatcgttaagaaagttgacgcgaaaactcgcggcaaagtcggcattaacgaactgctgcgtaccatcgactaaaagtatgcacacgggcagcacgacgctgcccgatttttttgcagggatgagcgatgatttcacgccgccgatttttgcaggctactccgcgacgatagccacgagctcaggtttcggttatatgcattactgtgagccaggctggtttgaattaatccgtcaccgcctcgccttttttaaagacaacgcagcaccattcaaaattctttttctggccgatctccattactctcgttttgttcctttaagcctgatttctgacgcgattgctcttggcatagaacaaaagcccgatttgatattactgggcggcgattacgtattatttgatatgtcgctgaatttttcggcgtttagtgacgtactctccccccttgccgaatgtgcgccgacgtttgcctgcttcggcaaccacgatcgccctgttggtacagaaaaaaatcacttaattggcgagacgttgaaatcagcgggcatcacggtgttgtttaaccaggctacggtgatcgccacgccgaacaggcaattcgaactggtaggcactggtgacttatgggccggacaatgcaaaccgcctcccgccagcgaagccaatctgccaagactggtcgtggcgcataatcccgacagcaaagaagtcatgcgtgatgaaccctgggatctgatgctgtgcggccatactcacggcgggcaactgcgcgtaccgttggttggtgaaccttttgcccctgtcgaagataaacgttacgtcgccggattaaatgcctttggcgaaagacacatctacacaacccgtggcgtgggcagtttgtatggtttgcgtctgaactgccgcccggaagtaacgatgctggaactggtgtagatcgtgaattttatcaccagaataaagcaggtaattttttgatttttacgccatgatagaagtctggaagaaaaaggctttctgcgatcacagtcgagccgggcgggccaggccaaatgctaaaataagcacaatttactgactcattttgaggtaacgctatgtacgacaatctgaaaagtctgggtattccaatcctgaagacattgatcgttacagcctccgcgaggaagccaacaacgata

SEQ ID NO: 8664 - DNA, 526 bp, Arabidopsis thaliana columbia
  unsure (1)..(526): unsure at all n locations
tttctctactcagtcgtgttctctcttggtctcgtttccttcatcacatgtttcgcagccgagttcaagagaacacaggtacgacgtcgagttccttcaatttgtttttttatattgacaaatcgaaccaaagtttacttgtgtagaaagaagatattcgatgggacacagagaggaactgctatgtacccggaagccatgcgttcgggcttggatcagccgctgttctttgcttctgccttgctcagatcgttgggaacatagttgtgttccgaaatcaccggacaagaactaaaagagaagatggttacaagattactgatcttactttacctacggttctattgctcctgtcctggtaaaatatttttcctcttctcttttttttttttaatctcatctaactgtaaccaagaatccccttaaccacctaccgatatatcttactgaattttgtattgggtaattttgaatcagtgagtaattcggtttacggtttagttttccggttttcntaaaacttaaa

SEQ ID NO: 8665 - DNA, 542 bp, Arabidopsis thaliana columbia
gtgtggtcgaagatgtgaatcctgttaatttttctggtgaggttttgattgcaggtattgatatggaagaataatccactggggctcagaacgatctggaaaaggtgactaagatgacttatgcgcaagtggcagtgtacggattcagcgacaagataggattgctatcattcccacaacgggaagacgagttctccaagccgtacagcaacagaaccggtgcgatgatagatgaagaggtccgagaatggatggggaaagcttaccagcggacggttgagctgatacaggaacacaaagagcaagtggctcagatcgctgcgctcttgctagaaaaggaggtgttgcatccggatgatctcactaaagtattgggcgagcgtccgtttaagtcgcgtgcgacagcgaattacgacaggtgtaaatctggatttgaacagtcggagaaggacagccagaaggcgtctgtgccggtgaagcctgtggaagatgatggaattcgcctcttgagccacaggtagtccgacgtagctgttggagac

SEQ ID NO: 8666 - DNA, 498 bp, Arabidopsis thaliana
ctaaagggcagcacacaatctactgcctgcgtaaggaatgggtaagatgaaccatcaggatgaattgccgttagcgaaagtcagcgaagttgacgaggcgaacgggcaatggttgcaggggatgcgtcaccccgttgatacggtaaccgaaccagaacctgctgaaatcctggctgagttcattcgccagcattctgcggctgggcagctggtggcgcgcgccgtgtttctctcgccaccctatttggttgcagaagaggaactgtcagttttgctggaaagcattaagcagaacggagactacgcggatatcgcttgtttgacgggaagcaaggatgattactattactcaacgcaggccatgagtgaaaactacgcggcgatgtctttgcaagttgtggagcaggacatttgtcgcgccattgcacacgccgttcgttttgagtgccagacgtatcctcgtccttacaaagtcgccatgctgatgcaagcgccata

SEQ ID NO: 8667 - DNA, 410 bp, Arabidopsis thaliana columbia
ggtctctggattcggcgctcggttagctggtaagaacactgaattctctactccatcacctctactcagttaaacagaagcagtcactcatcaaattgttttggttttaatctccataggtcttccagatgacgtactccagagagccgtgatatagtcccaagaattcgaggctttggacggtaaaaaccatagaaaaaccgatcatacattagcagcaatgataaagcagatcatcatcagtgttgcatcagattctgattactcagcttcaaaggagtcattgtgtgagctacactccatggccaatacattgctccggttaaccaactagtttaacagctctacgcctttccgggttgtcgatcgtggtgtaactctttaaccaaggtcattccacgagcttcgtc

SEQ ID NO: 8668 - DNA, 514 bp, Arabidopsis thaliana columbia
tcagcctgagcaagtaaaggtgcaactctgtgatttcatttcatttgactatacgtaccagctttataatcttatcgagttttaaatcggtttcttggcataagggctcaaaggaaaatagattgaactcctttcaagcagggaatgaagtaagttattgattcaagcttgcttctgctactagacagtcacagtttcttttatcattgattgatagtagatacattacagagaacaagcaagtttatgggaaaaccgatggtacaacccggtgtagttcctgaaactagccggcaatggacttctcggagtggtaagctcgaagcagcggtgcaactaaattaacaggtaatatacaaaagaagactagtattttccttcctatattagtgcttcttttatagccttggggatcatttttgttttcgatttcgcaggagcttaggtgttctagctgatcgtagaaaaggaaaaccttagttatatgagtcactccattgttgggacattaaga

SEQ ID NO: 8669 - DNA, 616 bp, Arabidopsis thaliana columbia
ctagaggatcccctgatatggttgttcgtggcacacagcgcacagagagaaatacgagagcgacaccattacacagtagactgtattgtggcgatatatgttggtatccttctctggaaaatgacgggttttatctggtcagccgagagaaaaacgaagcagacgaaactagagaagattcagaatagtctgattcacgctgcaaaggatggagacatagagactgtaaggagacttgtggaggagatagaggtaagctctagggtggagaagcagagtaaagtcatctcgaaccggacaatgactgtgtttgcgtgtgccacagtgatcacaacactcactatagtgattctggcattgactttgacaagcgacggctaaaagagaccttcgagggtttagtcataagcttaactaaatggattgttgtctttccacgtttttctacaatcttgttttcgtggtttattgtttgtaatgtactaaagtgtcataaaagtttttgtgctacttcaatttcaaccgatccgagagcaccaaaagctccaaaccacctaacgaaagccagtgaacgatgagacgctatgtatgcactcctaatatggtacatgtgcat

SEQ ID NO: 8670 - DNA, 507 bp, Arabidopsis thaliana
ttagggaatgttgctggtgattctccacggtgcagagatcttgtccttggtcaaggagctttgataccattactctctcagttgaatgagcatgctaaactctcgatgctgagaaatgctacttggaccctctctaatttctgcaggggcaagccacagcctccctttgaccaggtttgtctctcattcctatcttaatctctgcccaaagatgaaggagtttttctttttaattcttgtgatctcttaataacaggtccgtccagcactcccagcccttgaacgcctgattcattcgactgatgaggaagtgttaacggatgcatgttgggctctctcttacctttccgatggcacaaatgacaaaatccaatctgtcattgaggcaggtgttgttcctcgactcgtcgagcttctccagtgagtttcaaatcccatgatttcaccgtgcttttgtataatgaatgttatgtgttaatgaatattatcaattttattttgctgtag

SEQ ID NO: 8671 - DNA, 512 bp, Arabidopsis thaliana columbia
gactctagagctacaggatcccaaagcttctccttcgatgatctccttttcatcgaatatacgcctgcatagtgatgctaagcctttcaattacttaagccattcgtcgtacgcacgagctttcagctccaaatctgatgatttcggaagtattgtagcatctggtgttactgggtctggtgatgggaatgggaatgattgggttgagaaagctaaagatgtggtgcagactagtgtcaatgctgttgctgagactgcaaagaagactaaagatgtctctgatgagatgattcctcatgttcagcagttccttgactctaacccgtatctcacagatgttatagttcctgttagtctcactgtgactggtactttatttgcttggatagtgatgcctaggattcttagaaggtttcacacttatgctatgcaaagttccgctaaactgcttcccgttggcttctctaatgaagacattccttatgagacaagcttttggggagctttagagg

SEQ ID NO: 8672 - DNA, 629 bp, Arabidopsis thaliana columbia
gctaaaacaatctcacggtggtcgtgatctatgtagataatgtacggtggagatcttccttgggttttttcgtgtgtcacacgtttgatgacccattcagggtttagatcgaaagttcctaacgaaggtgagattttagggtttctgagatcgggttcgtagacggcgaggattactcggctgattcttgggattggttcgaattcttccggtgttgctgatgtccacgtggcgctatcgtctgagcctacgtgtgtgcatcgtttccatgcccatctactgaatcctacacagaagacacattctagtccacaagctactgacatttttgacccaaaggtgagattttttttttttgaaattagagatttttggtttcagaaatcagaggaaagattgaaactttttggctcaaagatgagattagagaatttggtttcagaaatcagatgaaagattaaaaatttgagataaaggtgagatttttagaactatgaattggtttgagagaagacaaaattttgactcaaagttgagatttttaggagatgggtacagagaggagatggaattagaagacttggtttttgattttttcagaggaagagaactgaaatttgagcaagaga

SEQ ID NO: 8673 - DNA, 1307 bp, Arabidopsis thaliana
tggaaacaaatcagaatagattttgaattggatcctaaaaaatcaatcctacttaagatagtaataataataataaatactgccttattataaaattaagttatagttgaataacacactctctgatgataaattgtttacacgtaggttaactaaaaaagttttgttacacgaatttagccacacacacgtgtattatataaacacgaatacaaaggacgaagaatcatagataaaacagcaaagagaagtagagaacaaactgaaaatggagatatggttacttatcttgggctctctcttcctctctctccttctcaatttactcctctttcgccgccgtgactcctcctctcttccgttaccacctgaccctaacttcttccctttccttggaaccctccaatggctccggcaaggcttaggtggactcaacaactatctccgctccgtccaccaccgtctcggtcccatcatcacccttcgcatcacttcccgccccgctatcttcgtcgccgatcgttctcttgctcaccaggctctcgttttgaacggtgccgttttcgctgatcgtccaccggctgctccgatcagtaagattatttcgagtaaccaacataacatcagctctagtttatatggagccacgtggcgtcttcttcgccggaatctcacttctgagattcttcacccctcgcgcgtgagatcttactctcacgcgcggcgttgggttcttgagattctttttgatcgatttggtaaaagcagaggtgaagaaccgattgttgttgttgatcatcttcactatgcaatgtttgcgcttcttgttctcatgtgttttggagataagcttgacgagaaacaaatcaaacaggtggaatatgttcagagacgacagcttcttggcttttccagattcaatattctcaatctctggcctaagtttactaaattgattttgcgaaagagatgggaagagtttttccagatgcggagagagcagcatgacgttttgcttccgttgattcgtgctcggagaaagattgttgaagagagaaagaatagatcatcagaggaagaagaagacaacaaagtgtatgtacaatcatacgttgatactctgcttgagctggagcttccagatgagaagaggaagctgaacgaagatgagattgttagtttgtgttcggagtttctcaacggtgggactgatacaacggccaccgcgtgcaatggatcatggcgaacttggtgaaaaaccctgagattcagaagaggtatacgagggatcaaaagcgtacgttggg

SEQ ID NO: 8674 - DNA, 494 bp, Arabidopsis thaliana columbia
atataattattaatatcctcagggtgaagaattaaatgggtatggagaaatgtacgtaaggaggcatccaaagctaaagataaggatagtggacggaggcagtcttgcagctgaggtggtgcttcatagcattcctgttgggaccaaagaggttctctttagaggccaaatcacaaaagttgctcgtgccattgtcttttctctttgccaaaatgccatcaaggtaccttctttttctacaaatggagagagtgaaacaaaaggattcaatttggatggaccgtttttataaaaaagaaaatataaatatatgttaattcttctctagctagtgtcaatatacaaagccaatttgcgcgtgaaaataggatcgaacgtaaatagagtcaatggagtttccatatataaacgttacgccactaactatctacagtcacgtggcctactttttaagtccaacacaattttggcatatcattttatgatttggtttg

SEQ ID NO: 8675 - DNA, 814 bp, Arabidopsis thaliana
aagcgtcttggcctgcgtagaccacagacccaaaaacaactcatttctggggcctatcgctaattggggttttgttgctgctgtatgttttctctttccatgtctttttttattctatccatctttttgggtgattcattatagttttcgaattgatttcactatagggtttggtggatatgcaaaagccccctgaaatgatttctggaaacatgtcgtcaggtatgataaaagagactgctcttatatgcaacattattagctaagcctctcacgtcatcttttgaatttctttgtacagctatgtgcgtttactctgcattgttcatgaggtttgcctggatggtgcaaccacgtaactatttgctacttgcgtgccatgcatcaaacgagactgtacaactctatcagctctcacgttgggctagagcccaggggtagagttctctatctcagagagtcatatgtccgagtgtagattatatatagtacgtgaacaaatgcaccgtaaaatgaatcactagcctttggaaacaagttcgcttttagattactgttttgaattaaaaagcttaacagataaaaccaggtttctgaatcctatgtacactatttatgcaattgcttcttaagtctagctttaacctgttttcgttgctcactcgtgaaattccacaaatgtgcttaaatgacaggtatttatcctccaagaaagaagaggagaaaccatctcagtaaaccaaaatgaggaaaggtttcttcaacgctgcttcagaatttgttcgtgggaattactgaatccatccatttgatt

SEQ ID NO: 8676 - DNA, 524 bp, Arabidopsis thaliana columbia
taacctgattgacagcttctccaaaagcaacaaacgcgaattctccacctggagccagaagaagaccgaccctcacggcagatatgattgaaatgccaaacaatttgcctatgatcaccactaatatagtcttgccaactaataagagtcctaaggtccccattatgagagggaagttggcgagaagaagttttggatcaatggacatgcccacctgattttatgcagctcgtcccattagtttcatgaacgagataaattgtactttaagagctggaaacaaaattagaatcttacaagagcatttaagcaggccataacacattacatatcctatatattccttaatatcctatttataataacttctgaccatctccaaggaaaacagtaaacttatcgatcagctattttcaagacctagttcacaaattaccgtcatgaagaagagtccaacagaagacacggtatggagcgatatctgatcaacttgcaaggaaaattcagtctctgcaagtagtaga

SEQ ID NO: 8677 - DNA, 866 bp, Arabidopsis thaliana
ctcatctggaagctccacatcgagcagagtatcaacatatgattgtacatactctttgttgtctttttcttcctctgatgatctcttcttcctctcatcaacgatcttcctccgagcacgaatcagcggaacaaaacatcctgctgttcgctctgcatctggaagaactcttcccatctctttcgataaatcaatttagtgaacttaggccaaagggtaaggatgttaaatctggaaaatccaagaagctgtcgtctctgaacatattccacttgttttatttgcttctcgtcaagcttatctccaaaacacatgagaacaagaagcgcaaacatcgcatagtgaagatgatcaacaacaacaatcggttcttcacctctgtttttaccaaatcgaccaaaaagaatctcaagaacccaacgccgcgcatgagagtaagatctcaggcgcgaggggtgaagaatctcagaagtgagattccggcgaagaagacgccacgtagctccatataaacaagagctgatgttatgttggttactcgaaataatcttactgatcgattccgccggtggacgatcggcgaaaacggcaccgttcaaaacgagagcctggtgagcaagagaacgatcggtgacgaagatggcggggcgggaagtgatacggagggtgatgatgggaccgagatggtggtggacggagcggaggtagttgtcgagaccacctaaacctttccggagccatttgagggtccaatgaaagggaaaaagttagggtcaggtggtaatggaagagaggagaaggagtcacggcggcgaaagaggagggtgatgcgaaggagagagaggaagaactagcccaagataagt

SEQ ID NO: 8678 - DNA, 593 bp, Arabidopsis thaliana columbia
ctcagaccttagatcatgccccagtatatgtacaactgagtccggagatgagaggtaatccaagtagaaggccatttcgttttgaggcagcttggttatctcacgatagctttaaggagatgctgacaacttcttggcagaaggacttaacgacccctgaagcactgaaggcgttgcgggtgaaattgaagaagtggaataatgaggtctttggagatgtgcagaaacggaaagactcattagcaaaagaaatcaaagaggttcaggactcgttggaaatctcacaaactgacgctatgctcgagatgaagcctttcttctgaaggattttgagttggtgctagagcaggaggaagtgctttggttccaaaagtcccgagagaaatggattgcattaggagatagaaatactacgtatctccatacctcaacaattatccggcgtcgtcgaaacaggatagaagctctgccagatgatgatggtagatggattcaagattctcaggagctagaaaccttggcagtaagttattcagacgattgtctctatggatgatattgatttggttgttgagaactgcctagtgagggtt

SEQ ID NO: 8679 - DNA, 1238 bp, Arabidopsis thaliana
caaagttttgaaattagattttttttccaaaataattatgcttgaatggcacgtttttgaaagaaaaaatatatatataaccggtacgtataagcctaaagaatttggctacaccacacgtctagaaatgtacgaatagagagtgaagtgaacgacacataataaaaccaaagaatggagatatggttactcatattggcctctctctccggatctctccttctccatctcctcctccgccgccgtaactcctcctcccctccgttacctcctgaccctaacttcttacctttcctcggaaccctccagtggctccgggaaggcttaggtggcctcgaatcctatctccgctctgtccaccaccgtctaggccccatcgtcaccctccgcatcacttcccgccccgccatattcgttgccgatcgttccctaactcacgaggctctcgtcctgaacggcgccgtctatgcggaccgtccaccacctgctgtaattagcaagatagttgacgaacacaacatcagctccgggtcatacggagccacgtggcggcttctccgtcgaaacatcacctctgagattcttcacccctcgcgcgtgagatcttactcccacgctcgtcactgggttcttgagatcctctttgaacggttccgtaaccatggaggcgaagaaccgatcgtcctcatccaccatctccactatgcaatgtttgcgcttcttgtccttatgtgttttggagataagcttgatgagaagcaaatcaaagaagtggagttcattcaaagactacagctccttagcttgaccaaatttaacatcttcaacatctggcctaagttcaccaaactgattctgcgtaagagatggcaagaatttctccagatacggagacagcagcgggatgttttgcttcccctgattcgtgcccggaggaagatcgttgaagagagaaagagatcggagcaagaagacaagaaagactatgtgcaatcatatgttgatactctactcgatctagagcttccagaggaaaataggaagttgaacgaggaagatattatgaacttgtgctcggagtttctcacggccgggactgacacgacggccacggcgctgcaatggatcatggccaacctagtgaaatatccagaaatccaggagagattacacgaggagatcaagagcgtggttggggaagaagcaaaggaggtggaggaagaagatgtggagaagat

SEQ ID NO: 8680 - DNA, 1054 bp, Arabidopsis thaliana
tatttctttttgttgtttaaactttaaaataattaagccatacacgtgtatcattattatataaacacgaaaagaaggaagaagacgcaaagaacaaaccagtgaaggaaaaatggagatatggttacttatcttgggctctctcttcctctctctccttctcaatctcctcttctttcgcctccgtgactcctcctctcttccgttaccacctgaccctaactatttccctttcattggaaccatccaatggctccggcaaggcttaggtggactcaacaactatctccgctccgtccaccaccgtctcggtcccatcatcacccttcgcatcacttcccgcccctctatattcgtcgccgatcgttctcttgctcaccaggctctcgttttgaacggtgccgttttcgccgatcgtccaccggcagctccgatcagtaagattatttcgagtaaccaacataacatcagctcttgtttatatggagccacgtggcgtcttcttcgccggaatctcacttctgagattcttcacccctcgcgcgtgagatcttactctcacgcgcggcgttgggttcttgagattctttttgatcgatttggtaaaaacagaggagaagaaccgattgttgttgttgatcatcttcactatgcgatgtttgcgcttcttgttctcatgtgttttggagataagcttgatgagaagcaaatcaaacaagtggaatatgttcagagacgacagcttcttggcttctcgagattcaatattctcaatctctggcctaagtttactaaattgattttgcgaaagagatgggaagagtttttccagatgcggagagagcagcatgacgttttgcttccgttgattcgtgctcggagaaagattgttgaagagagaaagaatagatcatcagaggaagaagaagacaacaaagagtatgtacaatcatacgttgatactctgcttgagctggagcttccagatgagaagaggaagctgaacgaggatgagattgtgagtttgtgttcggagtttctcaacggtgggact

SEQ ID NO: 8681 - DNA, 564 bp, Arabidopsis thaliana columbia
agagcaccggatatgcttaggaagcggcatttttttggttgttgtgttataaacaattgtttatatgtagcgggtggggagtgtgaaggaattcaaaggacacttcgctcagctgaggtttatgatccaaacaagaacaggtggagttttattgctgatatgagtacagcaatggtgcctctgatcggtgtggtttatgacaaaaagtggtttctcaagggtcttgggtctcaccaactagtaatgagtgaagcttatgacccagaagttaattcatggagcccggttagtgacgggatggttgctggttggcgtaatccgtgtacttctctaaacggtcgtctttacggattggattgtagggacggatgcaaactcagggtatttgatgaatccacggattcatggaacaaattcatggacagtaaagctcatttgggaaactcgaagtcgcttgaagctgcagctcttgttcctctacacaataagctttgtataatccggaacaacatgagcatgagtctggttgatgtctcgaatcctgcaaaaacaacctcgactgtg

SEQ ID NO: 8682 - DNA, 206 bp, Arabidopsis thaliana columbia
ggaccgtcagaagcacaactaactctaatgacaaacacaggaaggaaaacaaagcacagaaagaaaagcaagaccagaataaactaagccagcagatacatgtacacttccttattgatgacgcgcgctatcgtgtctgcgacgcaggcggatttccagtaagtagtagtccgctacatcgccatgatcatctaacaaaaataggg

SEQ ID NO: 8683 - DNA, 373 bp, Arabidopsis thaliana columbia
acaagcacacgctgcctcaccatggctactcgatagtggagcgacgcaccacatcacatctaatttccaacatctctttcaacatcaaccctacaatggtcatgacgcagttaccatagctgatggttcaggattatcaatcactcacataggctctacgacgctgccatcatgtgacaaacctcttcttctaagacaagttctttgtgtccccaatattcacaagaaacttgtctcggtttacagactttgtaatactaacaaagtctaagtggagttcttccctgctcactttcaagtcaaggatctcgctaccggtacaaaattgcttcaaggcagaactcaaaataaattatatgagtggccaatgtca

SEQ ID NO: 8684 - DNA, 472 bp, Arabidopsis thaliana
  unsure (1)..(472): unsure at all n locations
ttattttttcctttccagcaatggtatgtactttctaagactttggccgaagatgcagcatggcgatttgccaaggacaatgagatcgacttgatcgtactgaatccgggacttgtgactggaccaatcttgcagccaactcttaatttctcggtagctgtgattgtggaacttatgaaaggcaagaatccttttaatactacacatcataggttcgtggacgtgagagatgttgctctagctcatgtaaaggcactcgagactccttcagccaatggcagatatatcattgatggtccggttgtgacaataaaagacattgaaaacgttttgcgcgaattctttcctgatttgtgtattgctgataggtgagagagttttctttttctttgatcatttatttataagtctttatcatgttttgactctacaaacctaacaaagaatttctcttgatctantattaggaatg

SEQ ID NO: 8685 - DNA, 471 bp, Arabidopsis thaliana columbia
gactctagacagtgtgctctaaagtaattaaatcgtaacagtccagtggctcacgccgtcggcttttgggattaccgatcattcattactgcggctgccgagtaccagcctcttggtttcggtactgctggtgagaaacttcaagggatgaaggaagtcgctgcgtttcttggccacgttgggagcaaaacctcatgtaagtttaattttagagcgatccaaaccggtttatttattattaaccgggaattgaaatcactaataaccgttacgattattcggtttaaaggcgggtacggggttgcaacaggcggaccattagcttggggattgtgttacaacaaggagatgagtcctgatcagctttattgcgatgattactacaaattgacatatccttgtactcctggtgtctcgtaccacggtcgaggagctttcctggtttactggtacgttgtttagattaaacag

SEQ ID NO: 8686 - DNA, 409 bp, Arabidopsis thaliana columbia
caagcgtgactcaggagaagacatggacgccaacagtttggctgcagagagtctagtgaaagatgagatagtcgggaggacatggactcatagcttgcaagttgaaatagatgactttgggattgaaattgaaaagagattgttgcaagagctagtagaggaagccgttatcgatcttacacgatgagatgagacaggagcaatatatatactacgttcaataaaaatgtaagatagtgctaagttcatttttttttggtctatgggaagatttgtgtctcgatttttttgtaatgattgagagagaaaacagaatgctgtgtagccattgttgaagcagagcaataagcagttgttccatttcaacacaaatctcgtaactcttttgtacccaaaatgaaaggtatgt

SEQ ID NO: 8687 - DNA, 515 bp, Arabidopsis thaliana columbia
ctttctctgttaccatactttgtcccacaacatttatctcacttgttgtagtcacaactatttcgtcctcccttatgtcctcctgaacactaagaggagcataaggattcgataataatgagacttccccaaattttaaaacctcactgtttttcatcggactctttgtggtcttcagcggagatatccaaccttgatctgtttttgtattggactgtaccttagtttccagagcaacactcaccccagactgagatgggagattgttaaacaattcctcaaccacctttgttgacacatgcgcttcctcaacaacaattttttgtggctccttctcagacactggagaattgttcagagtcgatgtaggcttctgcttttccagaagacatgaatctcgtaaatgtcccacttcttacaaacctgacaatgtggcgaaacacagggtaggaatagtgtatcacagcatccagctctccttcctcttcaccggacaagatatactcctttggtag

SEQ ID NO: 8688 - DNA, 517 bp, Arabidopsis thaliana columbia
cggtttgaattctgttttgctatcaggaaatgagtttcaacaaagttcccaacattcctggagctcctgctctctctgcccttcttaaggtcagcgttattggtgggctcggtgtctatgcccttactaatagtctctacaatgtcgatggaggacaccgtgctgtcatgttcaaccgattaactggtatcaaggaaaaggtttgtatttctcaaactaacaagatgtacttttatatctgaggctttgaattctaagaaagcgttacttttacttggatttgtgttttcaggtgtacccagaaggcacacattttatggtgccatggtttgaaaggccaatcatctatgacgttcgtgcacgaccttaccttgtagagagcaccactggtagtcatgatcttcagatggtgcgttttggtttcttcttcttttggcttcttttctgtgtgtgtttgtacaatatttagcccagggatttaattttaaatgatgttactgaatgtggtgctatatag

SEQ ID NO: 8689 - DNA, 493 bp, Arabidopsis thaliana columbia
caattcttgaggcaagacttgctgatcttatcgctctctgaagctccttcaaagagagccatggtctttcagcctcctcttcacatagaaaacgcaagaagtcttccaaatatatgtacctaaattaaaccagaaaaatcctatcaagattttgagctgaaaccaaacaaatcaagaactttgagaaatatgatcaaattcaaggtatatacctagaacctggctcggtgacgttgtgaaaaatcttcctagctgcgcatttagcttcgtactcgcttcttatatgcgtacgtcctcatcctcctgagtagtgtcctgcatattttgatccaaagtagaaatagcgccttttagtattatattcatcaatctcttcatgttccaagcagacacattctttgtgttcattctcttcaactgatcaatcctaatcccttcgccatcttctcctctcttagaaccaatccgattcagtcccggacttttcccgact

SEQ ID NO: 8690 - DNA, 605 bp, Arabidopsis thaliana columbia
  unsure (1)..(605): unsure at all n locations
nnnnnnnnnnnnnnnnnnnnctaaagaaaccaacgacactactgcttattttcacttttttcgctatgccaggcatcgtatacgccgagtcgccttttagctcactgcagtccgcaaaagagaaaaccacggtattacaagatttacgtaaaatttgcacgccacagggtgcattatcagatgaagcgtgggaaaagttaatgttgtcagatgaaaacaataaacaacatatacgcgaggccatcgtggcgatggaacgtaataatcagagcaattattgggaagcgttgggtaaggtagaatgcccggatatgtaagaacagcaacaactactgaccaacgcttctttacctgatatcaggatttcttcattttcacctttgcagtaaccaacaatgcagtcagcaacatcaatgtgccggacaacatcaacggcgaagtcagaccaatattatccagcgcataaccgccgattgccgcgccacaggtattagcaagctgaataaccgccacctgaatagacccggctttttctgcctgatcggccagcgagcgggtgatcacgttgcccagngacgggaacaatgcaaaagttacccccagat

SEQ ID NO: 8691 - DNA, 605 bp, Arabidopsis thaliana columbia
tgagatcttaagaaaacgttaaactcacttgctccttttcttagaccgtcatgtgttttctcaaaagctgctttagttatcagcctaaatgctgatgttagagctccagctacagccaaacccgctacgaatgactacaaagaagcaagaagttatatatactacaaggtagtcaacctaaaccgatatcttatatctttataatttataaacctgaatgagttcagggcacatcaacgataagtctccgatcattcctcctcgtacagaagcatccgcgaacgcaaatgaaccaacgattgcgcataaaacaatataaggtccgatcccaccgtgtccttttgttgccaaatccaactgtttcgagttttagaatcagaatccagtttcataaaaaataacaataaaacaaaatatgagagattagacttgaacttacaatgatgagcaagaatatggatgttgtaaatacaatgtaaccaatcaggttacgttttcgagtattgattttcgattcattgtaagcgaaaatcacgattggtccaatcgaaaatggttggtatcgaatgtgagtaccttgaaggatggtatcctatgaagatggg

SEQ ID NO: 8692 - DNA, 530 bp, Arabidopsis thaliana columbia
gtccatgaaatatttcttgtgctagcataatgttatctataataagtctacctgaaacaaatgtcgactgtgtttcagagactagccgaagtaaatatttttaagcctcaaacaaagaatttttgaaataaacttataactcacattacaaagacttattggcctaaactctgtcatcctctgtggcttttccgtctttagaattaaaaaaatatttgtttcatttattctcttatcaaaagatcttgttcggaaaaaatctctaaccaaaccaaccaaatcttcttttaaagagtgccaaaacctttgataaaacaaagccgtcagaccatatgggccttgtgtattttttacgtgcatacaaaataaagctttactaatgataataggttttttagatcaattaatcctaaagcactatcatgtcgttgtagtattttaggttgtcaatccaaatgggtgtgatgctaacaatcaagatgtgatcagaagtcattaagtcaagccaagcattaacaggttttggtgtg

SEQ ID NO: 8693 - DNA, 618 bp, Arabidopsis thaliana columbia
  unsure (1)..(618): unsure at all n locations
tgataaagacagtacacaagtcctttgtctttctcgtttgatattttccaattccgcgtctttctctgttgaaatcgaaaaaattttcaaaacaaaatctaaggaaaaaagagcaacaagtttcaaatctcatttgggtttttcattttgaaaagaaggacccatttttatctctctctttgttttgttttctcgaatctgaaggagtaaagttaaaagctttgaaggagagaatcaatggcgggttacagagcagatgatgaatacgattacctattcaaggttgttctgataggtgattcaggtgtgggcaaatccaatttgctttcacgattcacgaagaacgagtttagtctcgagtcaaaatccacgatcggggtcgagttcgcgactcggagtttgaatgttgatgataaagtcatcaaagctcagatttgggatactgctggtcaagaaaggtctcatctttttcaaccacattgttcatttctcgatctggtttcttatattagaacattttgattgaagttttggggtttatggttttgtntggttgcanagacagtaaattttcacttaggttagatctgtacgaattgatttagatccatggtattg

SEQ ID NO: 8694 - DNA, 515 bp, Arabidopsis thaliana columbia
  unsure (1)..(515): unsure at all n locations
nnnnnnnnnnnnnnnnnnnnnnctaaagttcaaccataatcactggtctctccagcccgtaactttcacaaacgttgagcgcttttattccactcggctcacataattttttatttgttcagctttgcgcgttttcacgtgaacgttctcacaattattcgaccagtctgcgcctataaaacgctcaacgagtgattgttttacggtctacggagatagctatgtcattttctgtgcaggaaaccctgttctcgcttttgcagcacaatgcgatttcaggacacgaaaacgctgtcgctgacgtcatgctgtgcgaattcaggcgtcaggcaaaagaggtctggcgagacaggcttgggaatgtcgtcgcgcgctacggtagtgataaacccgatgcgctgcgactgatgatttttgcgcatatggatgaagtcggttttatggtgcgcaaaatagagccgtctggatttttacgctttgaacgcgtaggcgtcctgcgcaggtcactatggctg

SEQ ID NO: 8695 - DNA, 514 bp, Arabidopsis thaliana columbia
agaagactctgtttcatcaaaaccaaatcttccattgggattgaaagagagtatagggttttggctgagagtaagagagagcgtaaagatgaaacaaaagctcagaacgaggagggaattagaattatataattcctaattagtgataagtaatatcattaatgaaattatgaatttgttttttaaattttcgtcaatgttgtgttaaatatgaatatagttttatattgtagtcgaaagaaagtgattaaacatacaaaggcacatgttaattatttttgaatgcaaacaatataaaaaactcatcactacttcattagaaaggaggaggaggaacatcgatggtggttccagccataatctgacccttaccaattagacgccaatgcctatcgacacgtcggcttaaagcaaccttctctcctatggtggtacacaccggagacgtcagttggagtttcccatatctttcttgactccaataaccttagctcccgtagacatagacccgatg

SEQ ID NO: 8696 - DNA, 400 bp, Arabidopsis thaliana columbia
  unsure (1)..(400): unsure at all n locations
nnnnnnnnnnnnnnnnnnnnnnctaaagcgtcacaactggaagaagagattgtcaaattcgaacatttatcgccgcattaccaactggaggtgaaccgccgggggcatctgagatccactttctgtgaaagtggcgttggtcgaaagtagcctgacattgacgcatgagcagcgttgccaggtatgccaccagctgcgccatcggattaagtcgatggtggagatctctaccgatgtgatgatcgtaaaccgtggcagtatcccgcgttcagaacgcaaggcgtgtcgcgtggatgatctgcgcaacactggtggctgcctgacgtatcgtctggccctgattgggtaaagcgccagggccagaagtcgatacgacctgtgctatgactcactcatcaca

SEQ ID NO: 8697 - DNA, 1567 bp, Arabidopsis thaliana
gtgaacacccagctattgaacattcctttgaacacatttatcttctctatttcccggctattgatctcattgaacacctgtttgtacaccgtttgattctcttgttacttatcttttatataagagttgggttggtttttgtttgcgaatggtacctggcaaaagacgaaggagttgaagatgactgtgttaagaacggctgtggagtcagggccatctagtttgagaagtgatttgcctgcgaaattgagaattcctaagacaatcaactggtaaacgctttgaccagcgatgtttctccacatggttttggtgataaagctggcggttctagctattggtgcacgtttcattaaaccttcattgggaggttctgttgctagagccaatgcaccaagtgtgtccatgatcatgttgacccaaagcagttgcacagcagtgagtggagcagatcctggaaaagaaaccaaaagaaatggttactatatttgaccaaacgctagaagaaagatggtgtttgattggtttttctgtcgtacctgtgatgcaagcagagacaaagttgatgatcagagcaaccacattaacagttagctggaactgaacaaacttctgaatgtttatatatacagcacgtccccatctagccacatttactattgttttgaagttatcgtccattatgatcacatcagcattctctttcgcaacctgcatatcgggaattagcaccaaacgaaaatgttaatctcgagatttttttattaaccaaaccaataacagagaataactatagcttacctctgttccagctattcccattgctagtccaatgtctgcctcatgcaacgcaggggcatcgtttgtcccatcccctgtcactgcaactacctctccaattttcctcaagttgctgactaaagtatgtttgtccaatggcagagaccgagccattacctaaaggcagaaacaaggaattttagagatacttaaacattttcaatagacagataaacaataacaattcattctatctatcatatatcaaaggacctgaattttggggataatggccctcatttcgtgaggagacaagtcccggaattctgaaccttctatagctaagcctccttcggtatatatgccacattccttagcaattgctttggctgtgcttatgttatctccagtgaccatacggacggtgattccggcagcttgacaagtctgaacggcttccctaacacccggacgtactggatccttgattccaacaactgctaccattgtatagcctccatcagggagctctccactgggagcttcatctagatctttgtaaaccaagcagagagtcctcagagcctctgaggcaaaaccctctatgatatcagagatactcgtaatccgttcttcagttagcggaaccgattctccgtttgaatccacaacattctcacacattttcaacactatttcagatgcccctttgcagaaagcccgtgcaccacctccaggaagagctataagaacagacattttcttcttgtctgaattgaacggctca

SEQ ID NO: 8698 - DNA, 601 bp, Arabidopsis thaliana columbia
agaggttcccgatggagtaaaattgttacgattttgaaaaggagaagcgtggtggaagaatttcgaattaggattttgatagtgtgtaaacgacggtggtcaatccatgagctccggcgacggcgaacttcactggcaacgttgagagtttgtgtgattcgaaaacgtaaggatagcatagtttaattggatatagtgcccatttaatcaggcccaataaatttttatttggcccacttctttgttcattaagcgatgttgcatgagaagaaacatgcatgcgctatatatagcacaaaaagtggtccaaaatatttgatttcagtttacaagtaatttacatctaactattatagattgatcgagtttgtacgggatatcaagacctgataaaagtaaatttgaaaaatatttatgtatatataatcgggaaaaaacccgaaaaaaccgccatctatttaatttttggccgtttaatacccgtgtttttaaatttggaataataatacctcgtttagtttccgcgccctattaaaacattcatctaatttaaagtggtgaaattgtactcccgcgttaacggtgattaactttgcttacg

SEQ ID NO: 8699 - DNA, 563 bp, Arabidopsis thaliana columbia
atatcaatcaaaatacacacataaatatgtggatttaaattcggatattatagtgttcaaattttttaaaaatatggaatatcgatggtcaagttatttatatatttgacccgtaaaatgtacagtaattaatttaaacgcagagagacaataaaaattaaataaaaaaaagttttgcaggtttatgtttaatttataaattgaccatcccagtaatcatttacatgatatctctctgattcttcgatttctctttctctctctctcgctctatccttctcctatctctaatctcttgtcttctctctctttctctatcgggaaaccaagcggctcttctttggatcaaaggcgaagtcaaggcggagaaagaaaagagagggtcgtgagatatggttgagacgagacgtagctcttccgcttccaagcgtttctgtgcttcttcttcttcccctgaagcatcttcttctcaaaggcctaacaagcgatctaaggttaagatcgatgccgctgcttcttctctcgaacctgtgcgttctttttcctccaattccagtttttga

SEQ ID NO: 8700 - DNA, 595 bp, Arabidopsis thaliana columbia
cacgtcctcatttatggaaatatgagcagaaacagaaggaaatttctaattatttggagaattaagggccagattaaccgcgtaatcactctctcttttgggccactcgtctttatctttttacatttgtctataggaggactatggtcttcttctagtcccaaacttgaggttttaagaataaaacagatcagattttagtctatgtactatattcctttgaagagaggagacttgcaaacgtattgcatcaaatatggagtttggaagcactgaagatggaaggcatgacaagtttcctgtaggaatgagggttcttgctgtggatgacaatccaacctgccttcggaaactcgaagagttgctgcttcgttgcaagtatcatggtactacatattctttgcttttgtttttttttacctgtctgcttcggaattggggtgcatggtcaatgatgtttgattgattacgccagtgacaaagacaatggagtcgaggaaagctctggaaatgctgagagaaaacagcaacatgtttgatctggtgataagcgatgtagagatccagacacggatggtttaagttgcttgaaatt

SEQ ID NO: 8701 - DNA, 531 bp, Arabidopsis thaliana
gaggagaaccaaaggctacctctgttccagctattcccatggcaagtccaatgtcagcctcatgcaatgcaggagcatcatttgttccatccccagtcactgcaactacctctcccattttcctcaagttgttgactaatgtatgtttgtccaatggcaaagaccgagccatcacctgaaattagttataacgaatactataagatgctttgaaacatttgaagaatccattgtaataatctaaatcagaacctggattttcggtagaatggccctcatttcatgtggaggcaaattacggaagtctgaaccttctatagctacacctcctgctgtaagtataccacattcctttgcaatcgctttggcagtgctaatgttatcaccagtgaccatacgaacagtgattccagcagcttgacaagtctgaacggcttccctaacaccaggccgaaccgggtccttgattccaacaactgctaccaatgtgtaccaccattaggaagatccctctgggagcttcatcaagat

SEQ ID NO: 8702 - DNA, 574 bp, Arabidopsis thaliana columbia
tctatttagattctcatattttctcttgtatcttggtttgtaacagatatgagaaagatattcccatttgagcttttccacttgggtggtgatgaagttaatacaggttagttgtttaacacctgaaatccctgcttccatttctcatttgtgtttgcatctcttaagttcttcactagtcggtctcttgtctggcagattgctggaaaaacacaactcatgttaaagaatggtacactcatgactctcccactgttatcttgttgatcattatatgagctaatactatttgagttagttaattgatatgaaaactcttgcttctttatcaccttttgcttgatatgttcatcattctcaactgcaggcttcagggtcgcaacttcacgactaaggacgcatataaatactttgtactccgagcgcaacagatagctatatcgaaaaattggacacctgtcaactggtacaatctttgacaaagattgcattatctgtcaagttctctagttcctttaacaaactgttgcaaagggtttcagttctatattctcttgttgtttggctttgaaga

SEQ ID NO: 8703 - DNA, 545 bp, Arabidopsis thaliana columbia
  unsure (1)..(545): unsure at all n locations
ctnnnnnnnnnnnnnnnnnnnnnnnctaaaggagaacttgccatcgaattttcccgcgtcaccgaatcagcggcgctggctggctacaaatggttaggacgcggcgataaaaacaccgcggacggcgcggcggtaaacgccatgcgtattatgctcaaccaggtcaacattgacggcaccatcgtcattggtgaaggtgaaatcgacgaagcaccgatgctctacattggtgaaaaagtcggtactggtcgcggcgacgcggtagatattgctgttgatccgattgaaggcacgcgcatgacggcgatgggccaggctaacgcgctggcggtgctggcagtaggcgataaaggctgcttcctcaatgcgccggatatgtatatggagaagctgattgtcgggccgggagccaaaggaccgattgatctgaacctgccgctggcggataacctgcgcaatgtagcggcggcctcggcaaaccgttgagcgaactgacggtaacgattctggctaaaccacgccacgatgccgttatcgctgaaatg

SEQ ID NO: 8704 - DNA, 511 bp, Arabidopsis thaliana
ttaagaatccgtgtcaatgctcaagacaatgctccagatctttccaactgttctattcagtggtatcgtgcagcatgtgaaactagtcgcagggaagctatatctggtaaatggacctatctgtttgtttgcttcatcatttggtttttagtaaatgaattttagcttgagcagttcatattcttgctcttaggtgccatccaatcgatgtatgctccagaaccatttgatgttgggaggatattacaggcagacattctttcaaatggtcaaaagttcacagttacaaccgatgatccagttgatcctggttggtattacggaaactttagacgatacaaagatttttaagtggactataagtgaatgtttggcttactgaaatgcagattctggcttgccatccgcgtagagtcgctgatgcgaaagtctaacagtgaattcagtgtatgttcaacgttcttcaagatttcagaacttattcttgttttcttggaaatgtttggattga

SEQ ID NO: 8705 - DNA, 603 bp, Arabidopsis thaliana columbia
  unsure (1)..(603): unsure at all n locations
tgaaggtgtgccgttggggtttactaatgatcttgacattgctgatgatggaactgtttactttacagatagcagcattagttaccagaggaggtctgtgatctcttgattttgaatgtgtggatgttgctactgattattttatgtccacaagttctgatttttaactgtgattctctttcaggaacttcttgcagctcgttttctctggagacaatactgggagggttctaaagtatgatccagtagctaagaaagctgttgttttggtctcaaatcttcagtttccgaatggtgtctctatcagcagagacggttctttctttgtattctgcgaaggagatattggaaggtgagtgtagtgacctagtgatggggttatcttgaactgtatatagatagaccttgaatcaattgcctcactagtagaaagaggaattagggaagtcctaataactgattgttttaggagaattgaaaacatctgtctgtgtgtatgcatcacaggattcatttctttgtagtattgaagggtctttttgtntggatgcacctacgaagatactggttgaaaggcgagaaagctggaacgacagatgtgtt

SEQ ID NO: 8706 - DNA, 750 bp, Arabidopsis thaliana
attatccaggtttatttaaattatataagctatatttcatttagtactttgtatgaattataaggaactaatacttaaagttataaatcagctgaaagaatttatgatgatataagcaattgaaatggtttgatgtttattcatgaagcttgaagaagaattttcgcttcatcaaaagaaaaaaaaagtgttgatgtcgaaagaaaaaagaaaaagatgttgatatgtatatatgtactgtacaagttattgaacttaccaaaagtttctgaatgtccaacactaacttgtgttttgtacttttgatttctctgccttatgcttatgtacatgaattcttttttttataggttagcacaacatagagcaaaataagctctatttcatcgatataccgagatggaaatacctagtcaagaaattcacatcatgattgataacacaatatcgaggcgcaaagagagaaagactaacctcgcagatgccgaacccattgtcctgatgtctgttttgagtagtctccatgcgggatatttcagaataagcctttctctatgtagccaagcattgttgtggaagattatggtgcatttgcatagcgaactcccgtctatggcgtattatctcctgtggtacctagcacttgcaacacaagtatcactctgttttttgtatgccttcaagtgtatttttctctttgacatggtgaaggaagagttctcgcactatattggagtgaactatctttac

SEQ ID NO: 8707 - DNA, 518 bp, Arabidopsis thaliana columbia
taacgaagctaaagaaaagtaatgcaaatagcttacaagaatgaagaacttgatctgattcatagtcaatctgagttcggcttttgggtcattatacgtgtccaacaagatatcgacgatatctttatctttctcttcttcctcattgctcttatcgttttcatattccttcagtatcttctcaaccaactcatcataccgccaaatagaggatctaagcttcttaccattcccaaacaaatccagatcccgcaatggtccaaatagctccatgaatccaaaccttgtggcgcaacactaatatcactcactatcttcctgatctctttgggaatattcgagttttggcggcaccttttccccataaccatctttgataagatctttgtggtcaaagcagtgaactccaaaccgagatcgcaagcctctccgtttcgcgacctctcaaccagcgtgctcagtaaagctaacgtttcctcttctcttatgtcgacaaatcgatcaagctgatacccgcg

SEQ ID NO: 8708 - DNA, 338 bp, Arabidopsis thaliana columbia
cacagcgtacttagatgaccggatgtatctcaaggaacctgaaggaagagctatgaagacgactagtaccttgtcctctgaacttactgctgaattaaatcagccgaactacaatcagaattaccagaggaatgattacagaaactactattgatttgatgttgtaacatttcgtcggatagaaaaacccatctcaattttcatcaatgttgtaacactatagttgtctcacaagaagcattcttttgcttttatttcaattcttgtttcatttttaaccatttctttgtttgataatgttaactaatcctacctgttatttaatttaagcatatgat

SEQ ID NO: 8709 - DNA, 488 bp, Arabidopsis thaliana columbia
catatgctgaagctttgtgttacaaaaatattggtcgtttgctggatgtgcagtgatgctaaatgtcccgtctcttctgcaacaaacgaagacagaagaaaccgtgctgatattgccgcttctttccaggtacaaatttatctccggttttaatgttctagtgaaatgctgatttctaaacattttcagtttgtatgaaccagcgagtagctgtcttgcatctggaagaaaaatgtgagcgagcaatagactgggcattagaactagagccttctattaaacatatggtgaggtttagaacaagataaagaaacctctgttttgcttgacaaatgcttctagactaatattgactaagcttcaggtaatctctggtggtgttgcttcaaacaagtatgtacgactccgacttaataacattgtcgaaatcaagaacctgaaacttgtatgcctcctcctagcctctgcacatacaatggtacatagag

SEQ ID NO: 8710 - DNA, 719 bp, Arabidopsis thaliana
gaacgcccagatatctggtatgaatccaagggtttccatatcactcagtagagcgtcaatgagatcaaattttttaactttacataaacccgagataaaccttgagtaagtgaaggggatgagagaaaaacccatgggcttcatatcccaatatattgcctcagcaagctcaaatctagactctctaaccaaaaccccgatgaaacgattataatcgaaggagaaaactcggtagcttgagtgacgcatttcatcgaacacctgaacagcgttgtcaatcatacctgatttaacgaggttagctatacgcgagcggtatgcaaggcgtactgcgcccagcgtctgatgcatatcagagctcgacgcatatgatcatatcaccgttgcctcttctttgtttcaatgcggcgacatcagatcgacgacgacggctggtcttgagcttaagctagagggaaaaaaaaaaaaaaagaagacgaaggctccaacattaattaatctgaggctttcttgatatgggcttaaatgggctttaaataaggcccaatcatattttactaaaacctctctgtgaacgagagtgttaggtttggctttcagtttctccccttctccttcttctccgtctttggagctcaacaggggtttaaggattttctccgaaagctcaaaacttgagtgaaatttctctcattttacttatctgaagttcgtctacg

SEQ ID NO: 8711 - DNA, 495 bp, Arabidopsis thaliana columbia
tatgaatataggtgattcgaccaacggagacacaggtgttggttagtataatggtggataataaactagcggaacagcagaactggtaagtcagttatggggtgctaagatcaacgcagagtatctagtgagcaagaggaaagaaaagcatttcaatcgtgcagaggggatcagggattccttggatggtgaaggtaggcgaaaaagaactcagtggaagttttgtgacattgaagaagctcgagaagggaagtgaagagaaagaagatcaaacatgtactaaggatcgtttcgtggaagaattgaagaaactactctgagtcgttgaaaagaaatgaaaggtacacacactcactccaggttcgatgcccagacaaaaggaatcacagtgttttgcattcaattttgctgtattccttggtttgtttgataatggtgttttgcatgactcatgattgtggagacaagaacttagagattttgatgttgatgaag

SEQ ID NO: 8712 - DNA, 492 bp, Arabidopsis thaliana columbia
tggcttatttggagactttggaaggcaaggaacaattccgtgttcaaaaaatacagtgaatgcccgtcgatggtcatttcccaatcaattgcaaatgtaaatgagtagatatttaacatgaatgcgcacaaggaacctctttccaacaagtgtatcgccgaccatcacgacatggacaaaaccaacggctccttttgtgaaatgtaactttgatgcaggttttcatattaatcactctctgagcacaggaggatggataatacgagaccaccaaggtagcgcacatgcatggggctcatcaattgtggatcatgtcaacactccttcagaagccgagaccaaagctcttctagtggcgatgcaacaaggttggactaaaggctataagatgatccagttcgaaggagattgtgaggttctcatcaatacaaataatggcaaaacttctcgaagtgaaatcgctagtttactacaggatatagactactgatc

SEQ ID NO: 8713 - DNA, 545 bp, Arabidopsis thaliana columbia
tgcatcaaaaattctaagtgaaactcaaatggaagaatgcaatgttgtagacataccaatgaacgcgaacttaaagctaagtaaagcacatgatgagaaaaacatcgatgagaaggagtatagaagaaatatcgggtgccttcgatatttacttcatacaagccctgatctttcttatagtgttggagtcttgagcaggtacatgcatgaaccaaaggagtctcatggtgcagctctaaaacaaatacttaggtactgacaaggtacacgggcttatggtctctccttcactcagaaaaacgaagccaagttgataggcttcagtgatagcagtcacaacgttgatgaggacgatggaaggaaaacaatatgtcacattttctatctcaacaagtgtctgatcacttggtgctcgcaaaagcaagataatgtggctttatcatcatgtgaggccgagtttatggccgctactgaggcagcaaaataagcactatgacatcaagagcttcttggagagatcaatggaaacatgcgagaagatgctg

SEQ ID NO: 8714 - DNA, 318 bp, Arabidopsis thaliana columbia
ttataccactttcggaccacatcaatgcctataccaagagattcagttgatgtaggataggcaataacactggcctcttggcgtcctccatcatctggtagcaaggggcgcactcggcagaacacgcgtatgtttcctttgagttcctggaataaaagctttgcttagcggccataaagaaagtcatactataactgaaaagtgtttccaaaacgacattttcttacaagaatggcgttatgaagcttttgccctaataagtctccttcaaaaagttgacgctccgtgtctgtaaggcgatcctgtagttcatgcata

SEQ ID NO: 8715 - DNA, 1037 bp, Arabidopsis thaliana
tttttatcattattaccccgttatttcacatttcttataaccttttgttattgtataatttttctttttattatcaatcggaacaaagaaatacagaagttaaaagcaaaagtagtaaatattattaaacaattattgcgtgtaaaaatagtgtatatgtgatcgtgtacaaaagtacatgcataacatgatcaatatagaatgcaatacaactatacaaatgtcaacaatctacaaacacgttttaactttgaaaagcaatctaaaattcatgaatctaaatatactctctggcagctttcttattaccatatcttaaagattgaaccaaataaataaatttacatcattaaccaaattaaaccatccacatttaatttaattacaacaagtaagtaaaagatcgtctctttcttctttcccggaaaatcctctcatttttgacttgctcaattttgcttccttaagacccaaaaatccaaacctaaccctaatcgacattttctccgatttctaaatcctcctccggtgaaaatgtctcaccttgatgatcttccttctactcccggaaagtacaaaaccgataaagttccaccgtacgggattctccaccaccaccgttacctccgtctctcaaaactcaccctttgggcttctctcttcctcgctctcttcctcttctacctcgttttatctcctcctccgtcaccatctcgccggaatctcaacgattcttcctccatttccgccgcgaaatacggcggctctcactgggagaaacaagtccgtaaatccgctcgtcctaggtctcacggcggtttaacggtattagtcaccggagcttccggattcgtcggtactcacgtctcgatcgcgttacgaagacgcggcgatggtgttctaggtctcgacaatttcaatcgatactacgatccaaagcttaaacgagcaagacaaggccttttagaaagatcaggtgttttcgtagtcgaaggcgatataaacgacgccgttttactcagaaagctctttgatgt

SEQ ID NO: 8716 - DNA, 924 bp, Arabidopsis thaliana
catatttcttgcggccatagctcccttcctcatcatcaccagaaccagaacggttcctacgctgctcatcatcatcatcgtcattgccacggccatagctaggctgcttcctgtaactcccctcttcctgttcctcagacctcccataactaggcttcctgtaacttccctcctcctgttcctcagatcttccatagctaggcttaatgtaactctccacctgatcatcagacctcccataactaggtttcctgtaacttccttcctcttgttcctcagatcttccatagctaggcttcctataaccttcctcttgttcctcctcagatcttccatagctaggctttctatatccttcttcctgctcctcagatcttccataacttggcttcctgtaaccttcctcttgttcttcagatcttccatagctaggcttcctataaccttcttcttgttcctcagaccttccatagctaggcttacgctcatactcagactccgatctcccaccataaccagatccaagccctgattcaggtctcctaccatactcaacctcagttcttccaccaccaccagatccatactccgattcagtctccgtccttccaccataaccagatccataactctgctcaggtctccgaccatactccacctccgtttgtccaccatagccagatccgtactcagattccggtttcctcccataaccggattcagatccataaccaggatttggtctttcaccttgaacatgaccaccaccacctgaatcgggtcgaaatgcgggtcgtggcttgggtcgagaatagctactgtactctgtgttaagagcttcatcaccgtaagcagaaggctcatggatctgagtaaattcaggtctctcgtattcgaaatcatcatcgacaccagatgagagag

SEQ ID NO: 8717 - DNA, 659 bp, Arabidopsis thaliana
acatcttcacaccctgtgtatcatttctatatctcttatgcatcttgtttatgacagaaactgaagctgggtcgagaaatggtgatggggctacattgtctacatgggatcagcttcctctgctgcaaacgctaatagagctcaaatactcataaacaccatgtttaaaaggttatacactgtttacatgaagtgcaaaatatacatttgttagtgttttgtggatttttgagacctttttatggtttggttttgtaggagagcaaacgatcttctccacacatataagcatggcttctcaggttttgcagctcgtttgacagcagaagaggccaaggtcatagccaagaaaccgggagtggtttcagtttttcctgacccacacttccagcttcatacaactcattcatgggactttctcaagtaccaaacatcagtaaaggtcgattccggtccaccttcatcagcctcagatggatcatatgatagcattgtcggaattcttgacacaggtaaggcctttcactcattggtctcatcatatcctttactttttcctaacttaaaaaaccaaagaaatatgagtttgatattgtgaaaacaaacaaacaaacagggatatggccagagtcagagagtttcaatgacaaagacatggg

SEQ ID NO: 8718 - DNA, 567 bp, Arabidopsis thaliana columbia
catccggagagtccgccaacaaggtgaagggatccccttcacacaacaagtcgggtcggagcggtgacaagaagaagaagatgaggaaggtggtctactacgagaccgactctttgtcgccatccacctccagctccgacacgccgtccgtaacttctaagcgccatgagccgaagaagtttagtaagattccactacgctatcctcgcatttccaaacgtactccattacgtgtcatcccattaggcaaaccacctatgtttgatggtgaagattacaatatgtggagtgataaaatgaggcatcatctaacctcactccacacaagtatttgggatgttgttgagattggagtgcaggtaccatcaccgggggatgaagactatgattcggacgaggtcgcccaaatccggcactttaactcccaagccaccactatactcctcgcctctctaagtcgagaggagtataacaaagtgcaaggattaaagagcgccaaggaaatttgggacgtactcaagaccgcgcacgaaggagatgaggtgacagaatcacaagcgagagacg

SEQ ID NO: 8719 - DNA, 538 bp, Arabidopsis thaliana columbia
ggtactgcatcccgacgcacttcatgtcctgggaacccctggcatagatgtcgccatggtggtccatgtgagcttggagcggatggtgagtccacttggagtcctcgaagggaacgacatcggtgtgggagttgaggagaaaggcaggtagggttgggtcggagccaacccatttgaggaggagaagcggctttccttttacaaattcgatcgtctgagattcgagggacagtggtttcgcctgagatattataaagtcaacggctttgtagtattccgggttgggctgaaccgtgttgattcggaggtactcctggaatctggagacgatggcgtcgtcgccggccaccgcagaaagatgaagaacaacaacaacgaggagaagacgaagaagactcattgaattggattcggattcttctgcaacaacaacaacaactacttccactacagagcagcaaatggattactaaattgaattgctcacaaatgggatgaagaaggccacgtggcagaaaggaatggcagttttgggtga

SEQ ID NO: 8720 - DNA, 562 bp, Arabidopsis thaliana columbia
gtttccgagtttactttccaatcccatcttaatcagtgttatcttatggagagacaaatgatctgattatggaaacagcatcatcgcatatcatatacttcaccagcttcaataacagaagaagccgagagaacaatgaaaagccataaacaacaacaacaaccaaaaacaaagactttttcaaattacataatccgaccactcggatatatgcgacgtctggtccatagtcaaaccaggaatcttgtcatgcgttttcggattatctttaccaccaagcaacctcgccggatttccaacagccgtcgtacgcggcggcacgtctttcaacaccaccgaccccgcaccaatcttagctccttcaccaatcgtgatattccccaaaatacaagtcccagctccaatcaaaaccccatcgccaatcttcgggtgcctatctccacactgtttccccgttcctccaagcgtaacgttatggagaatcgaaacattgtccccacaaccgccgtctcaccgatcacaatagccgtagcatggtctagcaaaatcccggtaccgattt

SEQ ID NO: 8721 - DNA, 473 bp, Arabidopsis thaliana columbia
catattctagtatcgggttaactgactgattgttttatgtatcatattaaaagctctgcagttcatggaatctgagacagtggccataattggccctcagagatctacgacagcccgtgtagtagctcatgttgcaacagaactataaattcctaaaatatccttcactgccacagacactactatgtctcctctgcagttcactttcttcatcagaacttcacaacatgatctctttcagatggccgacatagcagatattgttcaatactatggttgaagagaggtggtagcaatatacggcgatgatgattatggccgaaatggggtagctagcttgggagacaggttatcagagaagcgctacagaatctcatacaaagcagcatttgcccccgcacctaccagagagaatatcaccgatttgctgattaaggtagctttgaatgagtcaaggattatcgtcgttcacg

SEQ ID NO: 8722 - DNA, 526 bp, Arabidopsis thaliana
ccccgggtaccgagctcagaatctccatttctcctactttgaggacaagatgggtcctaaagcctcatataacatctttaagatggcgcaagcttttgatcctacgacaaccatgtttatgaatgaatacaatacgttagaggaatcaagcgattcagattctagtctagcaaggtatttacagaagcttagggagattagatctatccgagtttgtggtaacatatctctagggatcggtctcgagtctcatttcaagactcctaacattccgtacatgagatcagctcttgacactcttgccgctactggtttgcctatatggcttactgaggctgacgtcgaagctcctccaaatgtccaagtaattcatatcctccaccggctactgttctggttcttatgagcacttcttatctatatgtctaatgttgagttttcttgcaggccaagtattttgagcaggtcctaagggaaggccacgcacatccgcaagtgaaaggaatagtgacgtggtcaggttatc

SEQ ID NO: 8723 - DNA, 522 bp, Arabidopsis thaliana columbia
  unsure (1)..(522): unsure at all n locations
nnnnnnnnnnnnnnnnnnnnnnnnnnctaaagcatgatttcaatataaaaaagctacacaattttctgctaattcagctgtctctaaatttaacaactatgaacgaaacagagaataaaacaaaaagtaacgaagaaataagagaccaaaaaacttttgacaaagaaaaaaagttttcgctcggtcacgcggtttttttcacgagcagccaaaataagaaacttcttctacttgcgaggagaatgatcacgaacagttcttggattaaacgatgttctgttttcaatactcaatttcctagcgaaatctttcttcttcatcgcgtaagacggtgatgatcctctgtttccactctgttcttgaatcgttggaaccaagtaccaagcgatacaagtaaacataatcgctacagatcttccaaagaaagccaaaaacacaagaaccaagatcacagtcacaggcaagaaatgatccggtctagcgatcttcttcagattctcgtttataacacagctctgtttt

SEQ ID NO: 8724 - DNA, 553 bp, Arabidopsis thaliana columbia
aataccctctacttcctctctccaatgacaatccaatcttacaagagtgagacaagcaaaaaaataaccaaaaataaaaaacattctctccaaagaaaatagtaaaaatggaatcttcggtaccaaagagaggcttatacatggaaaatggaacaaaacgctcaagtggcagccaaaaggctttggaaagtggtccgcatcgtcttctgcgttttaaaaaccggtacggtcaaaaacaagctcatgcttgacttaaacctaatgcttaagagaggcaacaaagccataaccaacctccgccgtcgatctagctccaccggcagccatgacgtcagctcctcctcacgcgtccgtgactacgacccttttgcctttatctccaaacgcaaacgccgcgtccacggcggttatgacaacgaagaagatgcggtggaggcagcggtcaagaaagtttttgagttgttaggagagaatgataagaagacggtggcgacagaatcggccagagagtcgccgctgataatgtcccggcagtgagacagctcagggtgac

SEQ ID NO: 8725 - DNA, 559 bp, Arabidopsis thaliana columbia
tatagacatcaaaagaacggtaacaaaagaaacagatagaccataatagaaaattgggctctctggatcatatatgcgtcacagatataaaaggcttagaccttacctttcttattttgcataatggatttcttcagggcatctccagatgacgttgtaatcatcaaaataggtatagaaacatttaaggaggtatctttctcaccacaaaccatctcatcaagctcttaaaaaaagcaaagatagagaaacagttgtcagaggctcatcgaaacaaagaaccgcaaaacaagatgtatcaacatggaaaaacagttgaggtattaaacacaaaatctcaaccttctttgtcgttaattaacaccaaagctgcagctcctcctgcctgtgcaacttgagccttaaatgtgaaagcacactcgccacgtacagataacgctatagaccaagatagctgcaaaaggaaaacatcacgacaacgaaaaaactcatcttcacaactagtggtatttgagtcctagctaggactgtacgatataagatggaaaagaaaaaggaa

SEQ ID NO: 8726 - DNA, 539 bp, Arabidopsis thaliana
ctgtcggtgaaagagttgcagaggaagatactgaatgggttttggttgaatgatgataatgatgttgatctgagattggctcgtttggaagaactgatgaacagaagacctgcactggcaaacagtgtgctccttaggcagaatcctcacaatgttgagcaatggcatcgtagagtcaaaatatttgagggaaacgcagcaaagcagattctcacatacacagaagcagtgaggactgttgatcctatgaaagcagttgggaagcctcacaccttgtgggttgcttttgccaagttgtatgaaaaccacaaagacctggtcaatactagagtgatttttgacaaagcagtccaggtaaactacaaaaccgtagatcatctcgccagtgtgtggtgtgagtgggctgagatggagctgagacacaagaatttcaaaggagcattagagctgatgaggcgtgctacagctgtaccgacagtagaagtcagacggagagttgctgctgatggcaatgaaccagtccagatgaagctgcatag

SEQ ID NO: 8727 - DNA, 1062 bp, Arabidopsis thaliana
gtaccaacctggatgggtaattctctgtctgtaacgacctctacaacgctgtgaaacgaaggtttactcggttgtctcgcgatacaaaggacagcttttgggttgggatgttgtgaatgagaatcttcatttctccttctttgagagcaagttcggtcctaaagcctcttataacacctacacaatggcccatgccgtcgatccaaggacaccaatgttcatgaatgaatataatacgttagagcaacctaaggatttaacttctagtccagcaaggtatttgggaaagcttagggagcttcaatctattcgggttgccggaaagattccgttagcgataggtcttgagtctcatttcagcactcctaacattccgtatatgagatcagctcttgatacttttggtgccactggtttgcctatttggctcactgagattgacgttaaagctccttccagtgatcaggtaattcatattcttttataaaagtaggctataaaaatctcaggtccatctttttcccacaatatctggtctcgaattctctttttttcatccatataaatatatatattcttgaggttttgagcacttggaacgagtctaatattcatttcttgcaggccaagtattttgagcaagtcctaagagagggacatgcgcatccgcatgtgaaaggaatggtgacgtggacagcttatgcaccaaattgctaccacatgtgcctcaccgatggaaacttcaagaatctaccaactggagatgttgtggacaagcttatacgtgaatggggagggctacgcagccaaactactgaagtcaccgatgctgatggattctttgaagcttcactctttcatggtgactatgatctcaatatttctcatcctctcaccaattcaagcgtttcacacaactttacgttgacttctgatgactcctctttacatacccaaccatcaacttttgtctttcgtgtttgaggcgctaagtttaaactactttatgtatatgagtagtctgattcttagtgaaaagttgtggcagatatatagtctgtt

SEQ ID NO: 8728 - DNA, 453 bp, Arabidopsis thaliana
caaacattagacaagttacaaatgctcaaaactccaaatcaatagggttggataaacgggaattcgaaaattgtgacttttgccctacttgtataagaggatatgaattacctggacactgggaggagcttcaacgtcaatctcagttagccaaataagcaaaccggtggcagcaagaatatcaagagctgatctcatgtacggaatgttaggagtcttgaaatgagactcaagaccaatcgctaaccgaatatacccggaaatccgaatagattgaagctccttaagcatttgtaaataccttgctggagtagaaactggatccctaggttcctctaatgtattgaattcatttataaacagtgttgcccttggatcgatggcatgcgttatctcctagatgtcataagaagctttaggacccatcttgttctcaaagaaggagaaatggag

SEQ ID NO: 8729 - DNA, 326 bp, Arabidopsis thaliana columbia
agacgtcgctgccgtgatcgctctctctgcatctttattaacacaaaattccaaaagattaaatgttgtcgaagctccctacacagcgacacttgcacctctctccctcctctccctccatggaaaccgtcgggcgtccacgtggcagacctccacgttcccaacacaaacctagagctccaatctttgtcaccattgaccctcctatgagtccttacatcctcgaagtgccatccggaaacgatgtcgttgaagccctaaaccgtttctgccgcggtaaagccatcggcttttgcgtcctcagtggctcaggctcagatgctgat

SEQ ID NO: 8730 - DNA, 776 bp, Arabidopsis thaliana
gttcagattgttccgttgccacgttgtcgcctgcacctccgccaaacacgtcggagacggagaagcgcttgagctccaaacaaacatgtgaagctccttagcgtcatggctcgctttgctatctttctcttgcagttgctgttggttttctttaggaattttattcggtttagttgaaacacccgtaccggttgaaaactccgggttcggagccgggtacgaaccggccgccggaacagaactgttagtgttattgtaaaatccatatttaacggcgttgttctcttcgaagttcgaaggccgtggagtcggaccacgagaagattgaacggagtacaaatccgccggaccaaaattcgaaagcctcccgccgggaaaccccataacagagtaaaaatcagaatggttaaagttagaacctctcggagtcgaactaagactatagatctcagctccggtaagattcgaaggccgtggagtcatcatcagtgaccgtctcgatgcgtttgatttcctcacggtaacatgaagcttcccgtcgtttcctatctcagcatccgtctcaagaaaatcatgaccgtcgagagaaacgacgtcggattcaactttaaacgaaacaatagacgcaccagtctccgggaactgctccataataagaagcttagcgccacggtactcgaagaggaagagaaggagagtgtccaaatgatacactgaagacaacgacttggccattagagaactgcgtaggtccggtcatggcgatcacagaggga

SEQ ID NO: 8731 - DNA, 554 bp, Arabidopsis thaliana columbia
gataattagatttttgtttttatccaaagagcaacacagattttataaaaatatttttaagaaaaaaaagaaagagagacctggaaagtgagagtagagagtggggtacgcttgagaaaagtggtcttggcgtttggtaccgacgcatggatcatacaggccaacgattcccacatgtttaaactcagtgagtctccgacgaacatgactcgttttcctctgtatttcctcagaaatgccccaccgtcgaacctaattacgtaattaacaatccatcatcatgcattattgcatttgcatatactattatttaatttaaatacaacttgatggtatcttctccttttttttactattcttgatatcacataataatccacttaatcacttttgatattaatatactgatttaaacccctccatttcatttgtaaaaataatataaatgaaatgctctacaatccacgtttctttaaaacaaagtgcatgaaaaacatatcatcaccaacttctagttattatacaatatatactgtatatatatatatatatat

SEQ ID NO: 8732 - DNA, 529 bp, Arabidopsis thaliana
ctgggaacttgcggacgaggcaaagttccatgatgtagacatcattgttaaaccactagcatatcgtaaatctgcagcaggaaagctagacattccatatgcagtagaatgtccattatcaggttgaggatggtggaatttgcaagcaactccgaatctgcaagttcccgttcgcaggtaatatggacatggcttctcaccctggagaagaaattcaaataagtcttccacattcgactaaagaaaaagaatttagctacaacgatggaaattaccagacgcataggtaaaccgataacattgaacattacaggttgtgcaccgttcctgtcctttggatgatgatatttacaagttgggccgtacttacaagctcctgtcttcagaaaatactgcagcgaaaattgcatgtagaagaaaaagttgtttgtggaaaacatttggaggaaagactaaaccagatgaggaatatcttctgcagtttcaatgtatattcttgctacctctcttatgtgaagttcaaactaga

SEQ ID NO: 8733 - DNA, 524 bp, Arabidopsis thaliana columbia
tctttgtttctctgtttagtagtttcaagttccacttccagatcatcaacctgaacaggaaaaccaagattacatatatgacattcgcatgaagagtaaaggaagaagcgcagatttcattaccaacaaacttgaaaacagatgtactattatttttcaatcatgtacctttctgttcagatattccttcaccgctgtctcttgatttagtctcgctataagatcctccatgtctgtttttgaattgagaagtctctcattcatagttaatagaatcctatttaatttactatgcattttcagcgggagaactattcgtccattacccggtatctccaggttaccaacagatatatcatgattaacatccagctggctatgtacaatggagctcaagatactagaggttgatgtctcaccggctagtaacgaaacccgtcagcgctctcaagagaaagctttcgatcatgcatcactgagtgactagtttctgattcagagcgacaccgtaagtcgttgtttgc

SEQ ID NO: 8734 - DNA, 531 bp, Arabidopsis thaliana columbia
catagaatgtccaaagcccaaaaagagaaaattcggtgtgcgtttcccaaacaatatgtctaacatttctccgttacgttgaagaaaatgaagatccaagacgctgattttcccaaaaccctggttgaagcccctgtttctgattccgtaaaacctagatcggatactgcggaagatgagtcaaagactagggctttgggcggataattggtgataaaactacggaattgaagagcaagattgtgtttctgaagaagaaatttgatgatttcgatatggaactattacgtgtcttgttggaaaaatggggagagagttccatttgttttttgatcaagatatcagatgaaagtggtcggattgtgatcactgatattctctttaacatgtttagacatataattaacatatgttcaaagaaactttaagaaatactataaatgatgagcaagtactgtagcagagtcacatgcggagactcaatatattgacaatctgcatcagtaggttgattctgtttgtccactgtac

SEQ ID NO: 8735 - DNA, 326 bp, Arabidopsis thaliana columbia
tatgcattattatctttaacatcaaagacttgaaattctttttcaggtgaaatctgtgtacagtcctccagatggtatctcaccaaacacttggagagattgctgggtagttcgtgcaccgggtgctgatggctgctcaggcagatatgtcgtaactgcttctgctgggaataccttagaatctggcttttgttcatgggatttctacacgacagacattcaggcactccacatcgaggacggatcttcaagagtttcaagaacagctcttgctcctctacccaataacacatcacatggtaggccgactccggcttgtgcagtgg

SEQ ID NO: 8736 - DNA, 916 bp, Arabidopsis thaliana
tgatgataattgtcttcttcatcttttctttttctggttttcatcatctttctctactcttcttcttgtaacttgattttaaattaattagtgaactacatctaactattataaatttaaaaaccctttaaccaaatacacccaaaaaaaaaacgaaactatatgggtcatagtgtcagcgaggtcacgagactatagtgagaaaataatagtaagaatttttattttatttgtttgtgtcatcaaacgccatttgtgaactatatatacatatattgaatttgggtgtattcgataggaagactatatacctttgcttcttctatacatttttaatgaacttttgtaaacacatctctaactacaaagttgagataagaaaattatatatgaaattctgagagaaaaaaaaaacaaattggagcccaaaagtagtaaattgtatactcagctttcaccattagccagcagaataaaacaaaagcaaaaaaaattaagcaaacgatagaaaatatcaaatattcctcctcctcacattcacacacacatgaacctcaagaacaatccataaaataaccaagaaaactacaaaccctagatctttaatttgaatcacaagcatggatcaatccatacatatatataaagcattgatattatcatcaacaagcacaacctgagggaggaacatagttagttttccggtcatcggaggtattccggaaagtttggcttccgaacaacatgaaaccaacggcatgaccggccagagcgacgagaaacacaccggcgttaaacgacatgacggcgagcatgactagataggcgagccgatacggagggtatcacggcggtttggattacccggcggcacgattagccgaatctccggtggaccacggaggagagaggaatg

SEQ ID NO: 8737 - DNA, 647 bp, Arabidopsis thaliana columbia
ctgtaattcgatttggctgagtctgagaagtttgggaacagagtctccgtccaaaacgtggatgatgataagaacccatgaatgaacactacgttctcttgtgccttgttgtctgcacattcaatatttaatatttagttatgtctttaacctctcaaaaattagtttatatatttcttacaaaaattgtttctgacctagtgtagcacaagcaatatttgtttttttgttttttgaacaagcaatataatgtaaataatttatgatgtaatatggataaactactaagagattttttcactcagcttctgagtctaagtcttttcactccacattaggtctgcattgtctcataagttcttcacattgtttctgaatgatcactccacactagatgagaaacatccccatgcaattttgtctattccatggaagaatcaacggatctttgaaggcatttctttaaagtaatgtttaatcctagttaaaacgcgtctgttcatttaaaatgactggtttctcatcttagtaataaatgatttttgattgtactaatggctaatgcaaaaccccaactagctagaacccatacaacaaacattactttgttttttgttcaccacaaacatttctttattatgattaat

SEQ ID NO: 8738 - DNA, 477 bp, Arabidopsis thaliana columbia
tagaaaggaggggttgttattgatcagatctagaaggagcttgaccttttcaaatatgtcttcaaaggaatacattttcccaatctccaccagcataagctttaagcaataggaaagactcacagaccagaaaacttgaccagcaagttgcttgcctaaatcaccaacccaaccagaggtggaacatgcaataatctgagtcacgttacgcactccaacttcctcaacgatcccatttaccagcgaagttaaggcagtgacatcggtttttatatcagaaacatcagcggatttcagatacactgccccagctggacagtctgcaacgaaagtaaccagatcacgtcctttcgggccaatccaagcatcaaagaggatgctgcacccagtgatctcccacgaagctttaatctccttcacacgatcttgcaccttcttcaaagcttcttgaaacatccagccgtttaaatcacgaga

SEQ ID NO: 8739 - DNA, 1059 bp, Arabidopsis thaliana
tgtcccagaaatggtgacattgttgcatatgcaacttgttacgagtttaatattatacgtagagttatcgtactctttcgtgtttttgcagctcaaggagtttacaaaggagagattcttcgtctcggatgacccatcctaaactaactgtagcatatcttttagcaaataacctttttggttcgcttgcattcgaaaacggggagacgtcatctgttaagaaagcgactctgcattctagttttgtcgagtttccatgatcaaagctctctatgttgatgccgatcacttgtggagcctcagaatccagtagacctgcgatgcagcatccgttaccatcacagcttctttcatcttccccgttgttctttgtacaaagcgagctgtaatagggcaacttgttgtttgagcaaccagttttgtcgaaaaaaggaatgcttttacttggcaacgtctctttgcttgcagtgcaattcaactcgcatcccaccttgctcggattgatgttagtcaacgacgccttgctgttgcaaccaacagcaaccaggctgtttccaatcccaaagtaaaaaggactgtccgtaaaatttagaaccgatccagactcttttccatctctcgaacatccaatggatgttattgggattttgacacgaattgatccgtatgacacaggattattataaccatcgtcacctggaagagagatattcacaactgccatgcccatcttgaagaggaacgggtaagtagcgtttttgcattcgattttgtaccattcattgagataacaacctttttcaattccaaaaggatatgggatatttatatttccacatacggatttggattgacacgaagtcgaaagagagacaacttttgaatcaaggatgagtataagcagaagagagaaaagaatcgagaaggagtaattgttgtcgcacctcatgatgttgcttgtcttgttggcgcagaccttgttccttgctaaaccagcaaacctgcgagtgaagtaaaaaagttccggttacttgcaacaaaagttacagaacaattaac

SEQ ID NO: 8740 - DNA, 670 bp, Arabidopsis thaliana columbia
cctgatttctactctttctctatacatagctgcgaaaacgccaagagcttctttgcctttaccgtttctaaggaaacccgaaagcagagcattccatgagacgagatctttttcctcaacgctttcgaataccctaacggaatcaaccaagtgtccgtacttggagtacatgtcaataagcgcagttttggatatggttcctgtttcagcgccttgtttgatcatcaaggcgtgaacttggcgtcctgtttctgggtacgacaagagggaacaggccccgagaaccggagtgaaagtgtgcgagctgagatcagggctagccctatgaatctgaagaaagagagccaaggtgtcatttgggtttccactgcggaggtgagacgagagttgagagttaagtgaggagaggtctcgttgcggcaattcgtcgaacaggtggtcggcatgggtggcaaaatttcggataaagacacacctcagtaccaaattagtggatttaacggtaacgttacccagacgaataaagcgtccaatacgcaaacatgcgaacatgttttacttgttaccgctacagacgaaacttattgaagcagactatctttttatgggcaaaggtcaacctaaatgtctgtctgatcacaatttattagacgcataaaaggaagaaagg

SEQ ID NO: 8741 - DNA, 515 bp, Arabidopsis thaliana columbia
cagtgtgctctaaagaaccagacgttgcacttctttgttgaagtcctgcacgcccatgctcaggcgattaaagccttcgctgcgtaaatgatcgagtacatccagttcgatttcccgcggatcgacttcgatcgaaatctccgcatcggcattgaactggaagttttcgcgcagagcttcatcaggcggctgatttgcgctttattcagatacgtcggcgttccgccgccccagtgcaattggctgacgtgacgcccggcgaacagcggtgcacgatggacgatttcttgctccagcgcgtccagatactgatcggccttgtgctgctggcgagtaacaatcttattgcaaccgcagaagtaacaaagcttatggcagaacgggatatgtacgtagagagataatggacgctcaggatagcgcgccacggcttgtaaaaacgcctgttcgccgaagtcttctgaaaactccagcgcggtcgggtacgaggtgtatcgtggcccggaatagttata

SEQ ID NO: 8742 - DNA, 590 bp, Arabidopsis thaliana columbia
ttaagtactagtaatactgtgacatgaagttatgatactgaaaaagtgtaaacatgataggctaaaataaaagaagatgaaaatgacgcaaatggagtgggtgagatatgtgttaaaagcccatctttgttcaaggagtactggaatcttccagaggtgactaaagaatcatttacggaagatggatacttcaagacgggagatgctggaagagtggatgaggatggatattacgtgattctaggacgtaagcagaacctataagtacattcaaacacaatttaaaagtactttgtgttccttcatttaacatcttatcttatcttctctggtgtcgatcaggtaatagcgctgacattatgaaggttggaggatacaagttatctgccttagaaatcgaatcaacccttctcgaggtaacattaacatccatttgagtttttttttggctctgtgaagctatcagaagcttttatctccttgggaaataggctttagataactgaaccgagagaacttaatcgttgtatgatatctctgggggatgtgttatgcagcaccctactgttgcagaatgttgcgtgttgggg

SEQ ID NO: 8743 - DNA, 354 bp, Arabidopsis thaliana columbia
tgatcaaaatcaaggtgaatgtcgagctaagtttgtgtgccatttggattgtttttcttgggtgaaacgtgatagctatcttcctcagggaagccagggtctgaaggttcattcggtgtctttgtttgcgccattatttgtcggtggtggaggaattcatattatgattctgagtggtgcttggctcgtatctaaatgccaggctgttacaaatgtaaaactgggggacgatgcactggaagtgaatcctgatgacatggttcgggttgcaatggtagagccacaggtattgctgatgaattaatagaatgctatttctgtgtgacaaagttgtttagaatcagagcgagttgt

SEQ ID NO: 8744 - DNA, 598 bp, Arabidopsis thaliana columbia
  unsure (1)..(598): unsure at all n locations
ttgttctttgtttgcgtttacatttgagtgtatatacttccattgtgaaaatttcttacgtaacaaaaaatatacaatgttataaaactattgagtgagtaccgttgaaggtgtgtgttgatcccatttttcttctcattaccactggagtttccattgttgtaacttccatttctctggctctcctcagcctttgtaatcattatgtcgcctcccttgtgaacctgttctatcataaaactcatgatcatctctcactatatatacatcaagagagcttcgaatatatcatgagggtgtgatttaaacctggttagagtaagcattactgagactaaagattcctctaatgatatgtcctgttcctccagcaatagccttagcaacaacgttgttgtaatcttcaatcctcggcgcaaactcttgccagtcgattccattgttaaccttactcgaagccgtagacgagaaacaagaattctcactcaagaattggtcaagcaacttcagactgttcacgagggctacgtctctgtcatcgccagagaaagtgaccccgtagctaagtggatcacgtctttacncgggagagtgaaga

SEQ ID NO: 8745 - DNA, 515 bp, Arabidopsis thaliana
tgctcactgtctttcactttactagaaacaggccgactccttccttctgaattttctactggggacatctgtgaaccatggtgtctgtgaacagatcgcttctctgacaacttatcactgttaagaagttgaatagaccaacatttatcagaccttgatatttgaagtcaaacgaaaatcatttggaaaatgaaaagaaacaaaatgcacctctttctctcctgctccttataatgttctacacgcccaacttctagcaacttctctggtaattgtttcctcttgtcagtatcaggcactgaagttctctttaacagcttggaattttgaaccctgtcacaatgcgaaagagacagagggtcaaggagttaacaagtacagataagaagaagattatagtaaatggagtcatgaagaccatacctatcttgttcttcagatagacgcccaggagatcttctctctctctgatgtattcttccacgtggagaaggagatctatgaataacatgagg

SEQ ID NO: 8746 - DNA, 539 bp, Arabidopsis thaliana columbia
ctgaattcctaagtctttatatgttctaccacttacatatgactctgtttttggtctgataggtttgaattgctttgtcttttgagttgtgtcattttgtctgaattggtttttctgatttgcaggttgctccgaggaagaagggaaggatttatgtggttggttctctgcatcttgaagcatcctcagcccatacttgtctaccccttcctcgtgatgatccagttttactctctgagaagttggctgtcgctgaagcttgtattgcaaatcaggctgagaagatcaatagcttcggtgtctactttgactaccttgccgacaaggatccagtgtttgctgcaatctttcgaggcgcatcctctacaaggactaaacctactagcgccaatccaagacctgaggtggctaatctgagacctgaggtagctaacctgaggtgggcaacgagacaccaattgctgctgtgggcgctggccgtagaacagaagccggtacttgatcctctccatcagcaacattctaacttctaagttaat

SEQ ID NO: 8747 - DNA, 610 bp, Arabidopsis thaliana columbia
ttgagacgaatatagaagattctgactgcagatgtttcattgtttttgcagcctcatctggtgcttggattgatctcacaactcataaaggtccatacttgtttgctatgtgcactgtcttgtgtttgtgcttgatgatttactaaccaatgctggaaactgcagattcaactgcttgccgatcttagtttaaagaagatgcctcagcttgttgagttggtggaggacaacgaggtaacgatctgctaatctatttgtgaatatctgaccaaactataagcatgtcgtagatattaataacaagtttctgtctgttgcaggatatagaagaatttctgagattacccccagagaaagtcttgctcaaatggatgaacttccatctcaagaaaggtggttacaaaaaaactgttggaaatttttcatcggatctgaaggtatttccaaatagcaaatcttcttttttgtccttcaaaagcttcatcaagtagtttcaccaacacgctgacgcaatatcagtttgaatagaaaaaacaacagatcactcattagttatgaaaatgtttggtatttttcttaatgttgatggttgagattgttgactatgcag

SEQ ID NO: 8748 - DNA, 559 bp, Arabidopsis thaliana columbia
gagggcagggacacaaccgcgaagaggagagtagctcgtactgtatctgaatctgttttcggatctttcgagtctctggttcatattgaccttaagaagaaaggaaacgagtcaaaggccagcccggcaacgctacttgcttatgaattgaagaaccctgagaaggttgtgttcctgaattgaagacattgatttggcagattcccgcttcttgaaactccttgctgatcggtttgaggacaaacggaggattaaaaccggtatcgatcatcgccaagccatctttattttgacaaaggaggattcaaggaatgtgagaaacagagactctgttttgcaaattggtttggagatcacggcacagagtccagggaaaaagagaaaacccgaatcggatttatcgatcgagaatgggttttggatgaagaaggaagtgtgctctaggcaatcgagtttcaatagctcttacctcgacctgaacataaaagctgaagacgaagaagtagaaggtgagatcagtccaatttcaagcgatttaacaggagaggaggagacagag

SEQ ID NO: 8749 - DNA, 246 bp, Arabidopsis thaliana columbia
taggaagtcacctcaaccatcaaaagcatttcacaaagggtgccactccctttgcgtaaaacctcatcagggaccattggaatgatagttgcgagagaaaaaacgaacggatggacatatgtcatgtataggtagtaagttgcaacagcatcagagacagagtaggaggccattgtctgcaacaagattcccaacatgaaacagagataacatataagctccaaattccatgcagcatcttgcaca

SEQ ID NO: 8750 - DNA, 1098 bp, Arabidopsis thaliana
tcccccagtggagaaaacaccaataacgagatccagtggccttaatggtgaaagggtaggtgattttagtgcctctagatcaacaacgtgctctgattcttctgatgtgggcaaaccgctggcaagaatggatattaacctaaagtcacctgtaatccgtatttcactaacaagccacggttccagtgtctgaaagacgaagaacccatatgagacactaaacatttgatggaaaattgctaagagcagtagaaaaatatataagaagagtgatgatattacatcgcggaaagcaaatgaagttatatgtttcccatcaactgtcatctgcattccctctgttcccaccctaagtgtagcaaccgataagaaaccctgcttgaaaggaaagtatttttcatgtttagatgcttccctggctactggaactccccttgaagtgttggactgcaagctagttgaagaagttcggttaatttctccaccaaccatcttgttgcattcatccaagtcatccactgtgtattataatcatgtcaacacagacttattcatggaggatcaagtgactacatttatgtaagcgggtgaaactatacttgcattcacctttcttattcatatcaggatcaaattttggacagcgttcctcagctccccagtcctgagatgccgtccagctgttttgaacaatcacagggtcttccgtcgatttgtcaccaagaagcctaacattataatgcacaatgatgggtggatcaggctcccctggaagcggttgtcccgttagatcaatccgaaaactaccaacaagaccatctgggatgccaataactgtgatggaggaacctgagtcaaaccacaaggaatttgcaacttcagactactcccatcagcttcagtagcattcattttgcttagaaactgaggacaaagctcctcttttcctttcctcgtctgattttcattaacatcaactagtttcttagcttcaacagcagacacaagactctcccaaacaatgccagcttccttaatagcacaactccattaactaaactctgtgcattacaacaagactttcaaacggttcaagta

SEQ ID NO: 8751 - DNA, 936 bp, Arabidopsis thaliana
caacaaaatttccacccccaagacaatctgctgagacattattattacctcagccttcactaactgttctataaaccaactcacaacagctctaatctactacattcagtcctaggctagatacagtagacctatagctaagagtagagctgtagtgcttattcaaagcttatcgtaatcctaccccaacctcatgaccaaagagcttgaatttgatgttttcaaaaggataaaaaaaaaagtgagattataccatggcagcatcgaaaacagaaagcttctctccagtgggaatgtgaactgttttgggaccaacttctcctttcaagtgtttgttgacaatacggatatttgcaaaagtgcctctcgccataatctcatcattaccacggcgactcccgtatgagttgaagtctcttctatccacacctcgttccatcaagtacttagccgcaggactgtccttgtggatgctaccagctggtgagatgtgatcagtggtaatactgtctccaaaattgagtaaacagtatgcgtctttcacaccatgtggaccgggtggagacatggtcatgcccttgaaataaggcggctcgtgaatgtaagttgatttcgggtcccactcatagagagtacctgacgccacagataactgattccacatggaatttcctttggtgattgcttcatatgtagctttgaacatatcaggaaggacactagattgaacaacctgaaaaatcgaaacagagaatttggcatcccctccacttataatatctcattgtttacgtattacacaagtagcccatatatatttacctcagcaacttctttgttagagggcaaatgtcctgaaaaatatctgtttccatcttcccagtccaatgggctgtgctcaaaacaatgcgacctacaagaatatcatgtgaatga

SEQ ID NO: 8752 - DNA, 561 bp, Arabidopsis thaliana columbia
ggtaccgagctcgaacactttttactcgaggatttgattggacaacgcttcaaaacttttttataaaaccttaaagttgttaaaaagtaaaatttcccacttttatgggtactttatttttaacttaaataaatgataattaataaagaaaaatcacttgtcgctatagctattctattggagaagcttcgttgaatctacgcacgaaagtagccatgaaagttattttattacttaattaaaagcaaatagacttttattttattttattaattctatcattatttttcttagattttgtagtataaataaacagtattactctaacaatatctgtccctcctcttagcttcaaccgccggaaaaactaaacaaccttcttggaaaaaaagagaaactaaaaatgaactatccttcaaaccctaaccctagctccacagatttcactgaatttttcaagttcgatgattttgacgatacttttgagaagatcatggaagaaatcggccgtgagaccactcgtcgtcacgactttgagttggagtctacggaaaagttagt

SEQ ID NO: 8753 - DNA, 508 bp, Arabidopsis thaliana
atcggttcctggattggacttagacccctacgcatcctcaaataccaatacaattgtgagttttgttgaaagtttttttgattcccacagggattcatggatacgcaaactccgtttagatttgggttatcatcatgataagtatgatctcatgtcatggattgatgctgcgactacgcgtaggattcagcatcttgatgttcattgttttcacgataataagatacccttgagcatatatacatgcacgacgttggtacacttacgactccgttgggctgtcttgactaatcccgagtttgtttccttaccttgtctgaagatcatgcattttgaaaatgttagctatcccaatgagaccacgttgcagaaacttatctcaggctctccagttctagaagaattaatactcttcagcactatgtatcctaagggaaacgttttacaattgcgctctgatacgctaaagagactcgatatcaatgagtttattgacgttgtgatttat

SEQ ID NO: 8754 - DNA, 492 bp, Arabidopsis thaliana columbia
gttccagcctcccgcaacgaaaactctgtcttgattctcgcactctgcttcctacagaccagatttttctcaaatcaagtaagatttctgtttctgtaggttcttcactagttttgtttggaaagtgtgctcaaaacactggttctggattctatttgtcataaaagtcaacatctttttggctcttattaatcgtccctacctgagacagtccatgtttcttggaatgttctccaaaaccatggaagacaaatcaaattccagcaggaacagaaccaacaacactccacttcctcaacagatccgaacagacatgggttccttatactctgcagatcttactgcttacaattcagcctgtagagaagatccagatttacaatccttcgattcctctcttcaccaacgcaccaaccgggtcatcaactcgctcgcctctggtgctcaaactcggtctttatcctttgacgcgctcattgaagtctcagggtg

SEQ ID NO: 8755 - DNA, 1290 bp, Arabidopsis thaliana
ttttgaatttgaaaacaagcgtacgacgagagttgagagagagatagagagatttggagatcgagaattcaggtgcgattctatgtcaaatctctattttcaaggacatgcttgatcaggttctactcttctccttcttcttcttcactggtatggtttctaggacatgcttgatcaggttctactcttctccttcttcttcttcactggtatggtttctcgtctttagcttaatttgagctgtgatcgaatgacactgatcaatcgggaaatcgaagtaaaacacaagagatgcttacgaaacaggaactggataatctttggttaaccaaattggaagtttaggaaatgaccaactcttctctcttctctttgaacaagcctttttgcataattttggatgtgatcttctcttttaagttttaacataatgaaataatctacgttgaagttagcaacattagaaaatttgatcctttggagaataattccaattctaaaattttccatcacacattgatgttcaacgtcctaggatcacagactctgtcatctcattgacagtgatcatcaaatcattagacggtggttcgtcatttcttgtgtgcactgcaaatgtgggttgttttggcagaggaagatctgatgttgtggtaagcatagacaacaactcaagtgtgtttggtctgtctgcaggttgatgttgaacacagagcaaaccaatctggacacaccttccaacttcggctggatgagaagaatcatcaagagcttggtccaagagattaactcctcgggtttcacaccaacattcccatacctgcattggtttcagatcttaacaatacaagagcaacaaaccttttacaaaatcggaaagtgcaagaaaacataaaggctgacttacatatgcaagaagtgcttttccttcctcaccatagctgaaccttgaaatcttctctccgctgatgatttctaacagaagaactccgaagctgtagatgtctgatttctcagagaatactccagtccatgcatactctggagacatatatcctctgtgcaaacatcacatagtttcacatatgactatcatgacaagggaattagtttatcatgttatcgaagaatggttcttacagagttcccacaaccctgcgagttttgtcctgatattggcttccctgaaacaaccgagccaacccaaaatctgatattttcgggttcattttctcgtccagaagaatgttgctaaccttcaggtctctgtgaattactctgaggcgtgag

SEQ ID NO: 8756 - DNA, 577 bp, Arabidopsis thaliana columbia
tgcccaaagaagctaagtttccccattttctttgagaaactgctcatgaatttgcgcgaatgagacctctgcatatctctcttcatacatatatgttctttctctaggtcgttgagtctcattctcaacctagctaactcgagcttcagttctcggttttctctcctcagagacgcatagttgtctttaggggacattgttgcacggagagctccgctattgattctccatgactgctgttgttgctgctttggctttggctcttcgtctgagtaagaagagcacaaggagcttcgaagcttgagttgctcacagtagagaacttgaactatggattgcagaggaagccgctcgttttgtgcagcgtgtgctccagcttcttgtgagagtttctggaagtcaataagttttgatagtttcttcttgtctgaatctgataacccttgatgtgcctaagagcataaaacctaataagtatcaagtcacaacaagagtaagtataattttcttgtagcaacataccttaagatagagatcaatggcgcggtataaccatcgtgaagggtgcgagcatgag

SEQ ID NO: 8757 - DNA, 577 bp, Arabidopsis thaliana
cctctgttcaaagatcaaatagtttcacccaatttaatatatgactaccaatctagtttaatatgttatcaagggatggttcttacagagttccgacaaccctgcgagttttttcctgatattgggttccctgaaacatccgagccaaaccaaaatctgatattttcgggttcattttctcatccagaagaatgttgctgaccttcaggtctcggtgaattactctgaggcgtgagtcacggtggagatagagaagtccacgtgcaataccttcaatgatctcaaatctctttggccaatcaagttcgagcttttttcttgcatctaagtatacaagctatcagataagaaattccagatataaaggggaaaactacacgaaaggggtaagaagtgacccaccaaagacaaaagtatccaggcttttgtttttcaagaacccataaatcaatagcttctctgttccttcgacgcagcatcccaaaacccggactaagtttctgtgttggagttttgatatcagtactatttcattcatgaactcctgtttgccctgcccagagctgctagaaagacg

SEQ ID NO: 8758 - DNA, 560 bp, Arabidopsis thaliana columbia
atcccctttcttattgttaatgattgcttgcatcggtatcgatacgctgcgaattggaccttcttcttcgatgtcgatgagtatatctatttgccgcatggtaatacactcgaatccgtgctcgatgagttctcggttaacacgcagtttacgattgagcagaatccaatgtctagtgttctttgcataaacgactcttctcaagattatccaaggtactaaacttcaacctctaaaacacttataatgcaattcagaatcgaaaagtttggtcataggactttggaataatgttggatggcttatgagcattgttctgtatttagcttagatgatactattaggatcgaatctagaaattagcttccattttgattcaattcttgtttttgtttgggatatttcaggcaatggggatttgagaaattgttatttaaggattcaaggacgaagatacgacgtgatagaaaatatgcaatccaagcgaagaacgcatttgctacaggagttcatatgtctgaaaacattgtaggcaaaacactacacaagacagagacaaa

SEQ ID NO: 8759 - DNA, 615 bp, Arabidopsis thaliana columbia
  unsure (1)..(615): unsure at all n locations
cgacaacagaattggatacaaagcaggagcattaaaggcaggaatgatgcacaactatgtgaaacaatgcgaattcgtcgccattttcgatgctgattttcagcctgatcctgactttcttgaacgaaccattccttttcttattcacaaccatgaaatctctcttgttcaatgccgttggaagtttggtaaagtcatatcttttttgaaaaataatagttattattttgttaagtcaaattggctaatggagagaatgtgttacatgtagtgaatgcaaacgagtgcttaatgacaagaatgcaagagatgtcactaaactaccattttgtggctgagcaagaatctggatcttcaatacatgctttctttggattcaatggaaccgcgggtgtatggagaatcgcagctttaaacgaagctggaggatggaaagatcgaacaaccgtagaagatatggatttagcagtaagagcttgtcttcatggttggaaatttgtctatgtccatgacgtcgaggtactactactataacccttttaaactcaagcaaaacataacaagatttcattcaagacattattaagtaatntaacatttcaggtgaaaatgaat

SEQ ID NO: 8760 - DNA, 303 bp, Arabidopsis thaliana columbia
gtatggtctgatatttgctctaaaagttatagcatcttcatggtagcttgtaagaatcacgatatatattcaggtaatttatatagcataggtagaacaatctgactgtgcatacaacatcctgtaacaacaggaatgctactcctccatctgctaagtagactattatcgtatcagacagttgcatcacaatgtacacatgtgtgatccgcatcaccttcatcattgtaacgcacgtgaaccggaaaatctgttaggaatggtgtgctaaattgcgcggcattaatcgagttgggttaatag

SEQ ID NO: 8761 - DNA, 708 bp, Arabidopsis thaliana
tcatagaaatacgttgatatacatgtaacctcaatactcataactgccttaaactagacaaataagcttaaacacataggaactaacaatttaacttttaagttttcgaactacatgtgttgaacaatgattaagaatttaagacctccaattagccaaacaaacatatctgaccactctagagacaatgtatatgctttgcagatgagctcattcaaatagcagttgatgttgatgaaattagatatgctatgaacaaaggaaacaaaagcttactcggattttgcgacaaagggttgtcaatgataaaattcggggaactatcttcatgtttgagtacatgtggatccatcaaaagtcttctcctgagaagagcatatctacataacaaaacattgcactacacattattgataaagaaccattgatcattaacaaccatgtttttttatatgaggtttagggttttatgaacacacttccacaaaaagaggaaaatttaccaaaattcagaaatgtttaccttcggcgagaattggctgctgctctgcgaaattcatcgattgaagaagccaaagacggaagaactccgagattcacacgccaacgaactcctcttagattagcgaaacgacgatcttctctactcaaaaccaatgatcccgacggttcttgcaaagctggttcgatctccgacggagccatata

SEQ ID NO: 8762 - DNA, 446 bp, Arabidopsis thaliana columbia
gattgtatcaagatggccagtgatatacaagcatatgacctgatattattttgcaccgttagtgtattcttgtttttctttttcttccttttaactataattcttgttacaaatgttaaggcggactatttgacacaaaaaatttgtgtcgaaacgctacatgttacttatgtaaacaattttccgcaattttggtttgtatgaaccctaaataatatctaatgacaaaaaaaagagggtacttaagtgtgcagcttacaaagggagcgttgaataacaggcaaccagagttttcagctaggccaatgtccatcatcagactgtaacgctgccatatagtgtatacctcgtctcagtgtgccatatttgcttcttcatatgttattttctcggcaatctcttattttcacccgcggaatgttttgtttgaactttttctccttaga

SEQ ID NO: 8763 - DNA, 492 bp, Arabidopsis thaliana columbia
tgccttccattcgttgatgagctcttttcttctttcaactccaacgttttccaaattctgaagcagcaatttttgttgatatctacctaaactttgaaaaaatgtatcctccttaaatatctcctggagaacacccaactcaaccacatcatcttcttcactcttgtctttcacaccatttttacctaaaccttgaaacgatatcccagaatcaagtgtgtcctccataacacctacctcatccacaccatcttcttcgctactcatctcttcctcaccattatcaatctcgatactcacccgctcttgctcctcacaaggcacatccttattctcttgctcctcacaaggtacatccttatcgcctttctcctcacaaagcacatccgtattctcttgctcctcacaatccttactcaaaacaagaaaccaagatcaataaatcatgttttgaggtggtaataagaagatcggtagaaacagaacaaacac

SEQ ID NO: 8764 - DNA, 1039 bp, Arabidopsis thaliana
ctaactttcccaatcatattgggattgagctcatcccaatatgtataaatagcgtactcaagagaccaatcatcaagtggctagtaatgtggctcaagacctaatttcgtagctagctacttttttatttgtattttgtatataacacattaaaggcttttttttcctttgattcaatgtaaatttcgttacctttcaaatttctgatttgtgatgatctgaattagtttttggactcattatgtgaaaatcagttagacaaatacaaaaacaagaaaaatatgacaagatcaccaaaatcaggacttgtttacatcatcaactaaacaaacacgtgaaacaagaacacacaaatatataaactaccgactatttaattcgacaaccaacttttaaataaataaaaaaaactcaacaatagagggaaataaataatcctcatttactttcccccaaaaaccataaataaaagattcacaaaaaaaaaaacatggaagaatagaagaaacgaagtgaaactatagaagccaagaagaagcaaacaagcagagcaagctcaccaccaaaccagccttagctcctccgatgatcctaaccgcaccagcatcatctgccgtcgcatcatcggcctctccgtcaggcccttcggcaggcgaatccgagtcaccaaaaggatcattatctggcgacggtgcagccttcttcttctttcctttcgctttccctttagccgcttttggagaatccgcaacatcaccatcctctggtgccggagcaggagccggagcttcaacagccgaagccttaaacaactctttaggcaacaaaaccttatcagtcgcatatatagctaaaggctgctcatcaataagagtatcaacgatcttgacagtgttgatccttgtcttgagggtaaccttctctccatcgttctgtacagtaagctcaaacttgttagctccatctgtcgcaagtgtgttcatcggaccattgttggatttgagcatcgcgattgagtaatatgtcgggacagcgagga

SEQ ID NO: 8765 - DNA, 561 bp, Arabidopsis thaliana columbia
tgtagaaacaaatataattaacagattaccttaatcaaatccaacattctttccataagttcttgatcttccgaggaagtaagattgccacaccaagtgaaaacagtagaatcaccgtgtaatatataacagtgcgaagaatttagtcctgcggaagcctgttggaaccagatacttatttgaattaccaagtataaactgatgaacaagaaagctatttgattacggtttataatacacataccgcttctatctgtatggcttgcatgttctcgggtccagaaccttgaacccgaaacagtgcaacaccttctgcttcgtaagtagtatcagggatgtcgttctcagctatgtactttttgaaagcatcacttacaccacccctgagacgaagataactttttttttagagattgtgataaagagtacttaaaagaaaatctgtagggaaaataaaaatattggaccttaaatgtgatgaagctttgcatgatcacaaaaaactgaattggctctttccctcattaatgcgagcctgcatggaatacgacataatgttat

SEQ ID NO: 8766 - DNA, 433 bp, Arabidopsis thaliana columbia
tccaatacctttctcacctctttcaagctcttccaacaatctaaagttcctcggaactacatcacaaaatcaagctcttataaatatcgcccccaaatcaaatcattttacagatcagatatatacctaatcgagaccatggatccgatcacattctcattaaaaaaatctcggaaacaaatcgaatcactacaacaacataaaaacccctagatctcaaaattcaatctacgagaaggaatgatgaaattgaaagagaaatcaaccggagacttaccaacgaccttggcttcctccgaactcatcgccgatgaatctcaggaataatgaataattagggttaggtgagagagagaattgagcaatagcgaagaagcaatctcagagataccagagagagagagaatgttcaaagtactgtttgagagcagaa

SEQ ID NO: 8767 - DNA, 583 bp, Arabidopsis thaliana columbia
tgcaactgcccaactaccaccacagccaccatcaccatcgtcacaaccatcgtagctggccaaccgcaaccacaaccacaaccaccacctggctgttaccaccacgaccactgcaaccataacaaccatcaccactaccacgtcattaccatcaccatgatcgcaacctccgcgcgcaaccagtacctccatcatcattaccactactactacaatcaagaccaccaccaaatcatcatgaaaaaagattttaacatggaaagaacccttttacttatcataattttttttcttgtttatatatgctttaaaatccaaatcatgataccagtagaaaaaaatataaatcctttttttagaagtattatgaacttcatttttttgaacacaaaaatgtaaggtaaataaataaaaaattaatgaagaaaaacctcacacatgtcaatattattttttctttcttggcatatacaccaacaaaggggaaagtagaattttcacacctccattcggtcttacgtgtgaagttgaccagcatcgactccttcatatgcatatgtgtccagtaagaaagtatgtatgt

SEQ ID NO: 8768 - DNA, 459 bp, Arabidopsis thaliana columbia
taaccatctaaacacttaaatctaattagtttagccacattttgtttttttgtaattaaatttcacattttttttattttaagaagaagttcagatttcaataatttgacgtctttcaatttgagccgaatcaaaccgaaccggattaattgttatttttctcaagcagcaacgataaaaaagatatctaaaaggcccaaataagaaattgagaaaaggcccaaatagaattcgtgcgactgtggaatttagggttttgcatcgaagttggtttttaggtattaagtgagcgaggcgtcgaagctaggggtttgggtagagtagtaagatggccaagtacaacgagattgcgaagaagaagagagaggctaaagccgatagaaaacgagccattcacggcgatcctctcaccaataaattgaagaccagaactccggtcccctccgtctccggcaaacg

SEQ ID NO: 8769 - DNA, 478 bp, Arabidopsis thaliana columbia
atcttaaaactgtcttttgtccatgcttgctatataaaatatcgattcttgttgctacatcgaatcggaatcctgataaactctatgaaggaggactccaaagagatctgttcctacctttcatttcaacattgaaggtcgtctaatctactatcattagtccacttttaagtaaccttttaaattcaaagactgcatcaagatttccattttcgcaggatcgagtgtggttcatgagatcggttcagcggttgattaccggaaactaacttcggtattgctcttaagcccattaaaaactccctaggctggcatcaaggtagagctgagttcaataactgggacacttcttcatttttgcaggcatgacagggattctacttcaatggtaaagatctttcgaagcttttgaaacagaagttccgacaattgattggagacaatgttgtagccggtaatcggtagtagaagtggtgat

SEQ ID NO: 8770 - DNA, 468 bp, Arabidopsis thaliana columbia
atctttcggtctcatacgagcttctatttctatgaatcaaacaaatatagaacgttccttatctagaaacatagacatatatatatattaactacttgttagttgtgatatttgtaattgtgactgtctttctcttactgcttaaattcattagaagggtaaatgaaataaatgcagtttttgggttttgttttcacttattaacttttttaccgtttgatttttaatttaagttttcattcaattaaaatatttgaggaaccaatcagatttcgaaagaattggttcgagttgtgtagatgacataataaagaaaagaagtaacatcacaacttgagagcagcaattgattcgggtttgaactcgacccggagacccaaaacccgtctaacctcagctggtgtgagtctccaagtcatgggtcctgagttttctcccaaaagccaaaatctctgagacctttccaag

SEQ ID NO: 8771 - DNA, 524 bp, Arabidopsis thaliana columbia
caaaattttcgctagtagaacaagctttccggtatcaatttcctgtagaaaatgctaaagctaaacctaaacactgagaatcgagaaaattccgaggacgaacattaactaaccggagaatttgtcttcgcggttagaagctaaagctctagaaccaaaggaacacttgacgacagagaaatcatcggaaagaggtgtctcagggacgaaaataggagtaaaagaagattccggcggttgcttctgcggtgtcggatctgaatccgatatcagtatcgcagagattggatattttcgagcccgtttcgacagtgatggaagtggagtagtctgatcctcaccgtcagagatgagaatgtgatcgttcatggaagagagagttttgaatttcgactgagcgcgggactatcgaggaagatgatgatgattcgaatttcgaaatcgccgataacgaacgcagaggttaagcaacgtttggctgcatggttatctgtattcaaaaaatatggagtgtttggatacag

SEQ ID NO: 8772 - DNA, 848 bp, Arabidopsis thaliana columbia
gtttttattagttaatataagcgttaattattgttctctcttttgcttaacatgtaaatattcccatggagaaagaagtacactttttgctttgagaaagaataaaaaaactctttattattactaaatcaagaaaaatataaaaccatgctgcatttatcatcattttacatattctatatataaggttctctaattcgtatacttttgtaaatagagaacaacgaattaaaagaccaaatcgatagcatcttacctttttgttgatatttattaagagaaaaaatcaacacattgttattcttcaagagaataaatttctggagacttagcagttaatgcaatctgacctcacgcgttttttttttttgacctcacgcggttttactaaaccgaccttcgtttacttcccttacctctctatatatatatctctatcttcatttgcatatttcaattcatttcataatcatacacctctctacatttgttactactttcttctaacttgttttcaaagagaaatcacaatctatctgttccaagatgagtcaatacagccaaaaccaatcttcaggtttgtattcttttcttcgtactaatttagcatcagaccatatgtttagtcaatattctcatggttataatcatatttgcagtttcatagtagtaagtacttttttaaatggtaataagactaatgtgaaatatgaataacttataggagcttatcctacgccgccagtgtctaccggcccttacgtggcaccgcaccggctagttacccaacgaacgacacaagtcatgccacggtggcaacggtggagacaaagtccaagggtgatgga

SEQ ID NO: 8773 - DNA, 594 bp, Arabidopsis thaliana columbia
cgactctagaccacaataacagtttttttaaagtcataatgtataacatttatattgagactaaccccacgtttgttgatacccaaaatgattcgcccaggtaaaagaccgatcggatcatctatcttgcgtacgctaaaaaaaactgaattcccgtatggcagtgccttcagtatccgtagaaattgttgtcttgcatcatctttggtcacgttctcctacatgcccacatacacatacgaaatatcattttaccatgccatcacttcaatgggtttttatttgccaaaggtatctagaaaggggaagacaatcaaaatgcatagaactattcctaccattgaacggtagcgagcaaggatatccaattcccattcacgctttgctcgggttattgctatttgtcttggcaaaaaccgctcaagaagtgatgtccaatcactgatatgtgatacattgagaaaggaaatgatattgttaagggaggaaaattggaaaaataaagtatcggacaactaaaataaagtcaatggcggcgttaagacaactaacatgcatgactctggactattgacaacccaatccaacaagaat

SEQ ID NO: 8774 - DNA, 506 bp, Arabidopsis thaliana columbia
tgcattcaagagaaaaaacttcccagaagcattcaaaagtgcaaaccaagcgaaaagccgtctaaagaggaaaaaggcaaagctgatggctttggtaactccatcaccaagaaggtactaaaaactgtaaaagtctctgtcatgtcaaaattctcattccctttgtcttcactcttcaatggttttattgttttcgtcaggtggaagcatacatcaaagaacatattagaccactgtgcaagagcggagtgataaacgtggaacaatacagatgggcagtgactaaaaccacagaaaaagtgatgaagtatcatagcaaagccaagagtgctaacttcttgatcaaagaaggagacaagatcaagaaacttgccgagcaatacgtcgaaaccgcttcctctggagctcacacaaggataagtgcaagtgagaaaatcagatggcgtaaataagaagatgaagtaacaagtagttcagtacaaaaacgtaaatagattttaactagt

SEQ ID NO: 8775 - DNA, 1382 bp, Arabidopsis thaliana
aagtgatccaatgtctccactgttatccatctagcagcaatgtaaattagtgaatactatatcaggaagccacgaaaagcaaagtctctattccaaagtttcccatacctcttagacgaaacacttgtcaacaatcaatttccatccagatattaatttccattttctagtcgtatgtaaatccatatctatgaaacaaaaccattttcttctcaggaaagaaaagagcatatttaaaaatgctaaaaatgtaaggccaatctcgcaaatcttaaccagaaaagggctaagcatctaaatataaggatggagtaagaagggacaataatgacgagcaaacagcaggtgtcaacaaaaaaccagtatatgctcaatcaacaagaactttgagcatcaacaatgacttttctaatcagattttcataaacttcacaggaaaatctaccgactaagtaatgttgcctggtgcattctgaaaaggaatcaaatcattaccttcttggagacggtgaccttgacttcgagcgggggccaggagatcttgatgtagattttgcaggggacctacgtgaagactttgccttgggacttctgctcctgctcctgcttctgctcctgcttcggctcacgcttcgtccacggctgcggctgcggctcttagaataggatcttccccggctaggactcctagaatccttccttgaatcatattctctaacctaaagagatatgaaacaaaatattaaacacaacaatgaaaagatcacaattcacaggaaagtcagcttcaactaacccggacatatccattcgaaaacgcatttcgaaactctgtgtcgtcgagctttttcagctggggaaattcaagagtgagagctaatcagtgattaaggatgagtagaacaaactctcaaccacagaagagaaacagggaaaatagcttaccgcatacttcatgtcctcatagcaggtgtaatcaacaactccagttgtccctacagtaagattgtccaagattaaaaccattcaacttggttttcgatggacaagattatatgggcacacttattacctctagcatcacggtacacttgcgagaaacagacatcgcctcctttacgcatgtgatcctaatgtaaaagtgattcatgttagaattcagaaactttaaagatacaaggggaagtaaggagttttgttgaccagtgtgaagtcaccttgagatcttgccaagaagcagatgaaggcaagcctgtgactagaactgtggtggacaaaagaaaaacaagtaaaattaggaacaattcctacaactttggacagaataatgcaaattatatgactacataccacgaaactctgatctcctagatggccacgac

SEQ ID NO: 8776 - DNA, 936 bp, Arabidopsis thaliana
tacagttgtagtgtcaggtttgccttcatctgcgtcctggcaagacctcaaggtgattacacagttgtggacagattcctcattgtcgttcctatattttctacgatttctgaatgttgacatatcactttgttttgaaggatcacatgcgtaaaggaggagaagtttgtttttctcaagtgtttcgtgatggtagaggtaaatcctcatgtcttacccaagaatagagatgtgtctaaagctgtttgggttttctgcctttaaatcctgttttaactagtctgtgcatgctttaaaaaatctatatcgtggactatttatttacaggtacaactggaattgtagattataccagctacgaggacatgaaatatgcggtgagatgtttttcttcctcttcatattatttgattttatgtgtgggactgtggctgagaatgtgttcatccttgattactcatgattatattctttattttgtccagataaaaaaagctcgatgacacagagtttcggaatgcgttttctcatgaatatgttcgggtatgttaaagacaagaattctgagagctgcattcgtttttattgcacttaacatttccctatgtcattacaggttagagaatatgattcaaggagggattcgaggagccccagccgtggaagatcctattctaagagccgcagccgtggacggagtccagccgtagtcgtagccgcagcagaagcaggagcaagagcagaagtccaaaggctaaatctttgcgtagatcgcctgcaaaatctacatcgagatctctcgctctcgctcccgctctaagtcgaggtcactgtctccacgagggtatgcttcatttcttctataatgtttatgctaaaatatccaacataaaacataacataggctctatttagctcttcccttgaagtttggtg

SEQ ID NO: 8777 - DNA, 501 bp, Arabidopsis thaliana columbia
tggtgttcactctaaggagtggaccaatgtggctaagaagagtcaagttgatgtaagtggtttttttagtttgtgtttggtttgatgaaatttgagcatgtaagctaggagctagggttttgtctggttttgaatgtgaaaatgagagaagatagtgtagagagtttgtggattttaaaagtttatttactaaacctagttgttgttggatctttgatgttgtttttgtagatgatggagtatcaggttaagaccttgatggatactgttatttccatacatgaggagatgtattatcttcgtgaaaggtaacagacaaagaacaaaccttttaagccttagtttttgtttggtcggaagagagagagatatatgatgaggttaattaatacttgttattgtgttttggttttgtgggagtagggaagaggaaatgcaagaactgaatagatcacaaactcgaagatggcgtggttgagtttcgggtcgcttgtggtttgt

SEQ ID NO: 8778 - DNA, 536 bp, Arabidopsis thaliana columbia
gtttttctgtgcttccacactcaacgcatcatcaccaggaacaaccaacagcctctcctgtagtttatcaacagcatcaacaatttcaacagggtgcatatctgaaattttgcgcaagtcaattttgaaagtcttctgcgcattccagatatgcctcttgatgttaacaggcaatggccaagtgctatcaccatttgttgcaatttctgtcccgagttggaatctgtcagtctcaagtttcgaatattccgcatcgaatacatcacgcaactcccgaatccccttcaagtcttcaagatgttcatcacttaggtaagtaggattccagttttcgtcgtcaatctcatacttaaaagtcctatcaaactctgatttcttcattttcaaggaatccagcttctgtgattctatccatacagcatccataccatcttctccatagagaaattgaataacatcacccaaagagtttctgactgtcccatcatacttaaccataatatcctccatagcctttaccaatcgcctctgaatgt

SEQ ID NO: 8779 - DNA, 595 bp, Arabidopsis thaliana columbia
cggcagattagctgagattttctttcctttccaaagaacgacgtaatctttgataaaaccttccattcccatcaattcaacctccggtacacgaaccacatggtaaactttcaacggaaccgtaaccctaaccctagctccaatcttctccttcgctttctcgtcttcctccgtctccaacgacgtagatgacgatagatcagcgtccgcgtctacagaagccgccgatttcacagcaatatcgcaacgaatcgtcgattttggattcttccgcgagattgagaaggcgcatttgcttcgaccgtaggaagtagataatgagataggtacgaaaatggacgaagatgaagagttgatcgatttgcgtccactaagagaagcagcaactagatagtcttgagatgccggaggacgaacggcggcgataatcgccggtgacagagcgtaactgttagtcatctgcgtccgagccgaagaaaaaaatcttaagaaagtgtgagagaaaacaaaaaagatcatatcatttagccctcatctatttatattagatggttaatttaatcaaggtgattactaattttgctaattatttggt

SEQ ID NO: 8780 - DNA, 450 bp, Arabidopsis thaliana
gcaaggatcccctctgttccaatttctaagcgacactggttcgccttttgctattaacccgtacccgttcttcgcgtaccaaagtgacccgagacccgaaacgctggcgttttgtctctttgagcctaacgccggacgagtcgactccaaaaccggaatcaaatacacgaacatgttcgatgctcaggtacattaatcaattaatttgtgttcggtaactaactaaatttctctaacaaaagttgctagtctctggttatgaatttggtggactattttatatctaaatgatttcaaagtagacgttaaaagcatagttgatctaggtcggttagtttctagtaatttattgttgttgacacaaaaatatgagaataataatagttggctgtattcacgtggacgaatctatagtttgaactttaggttattatatgttattttcaaaat

SEQ ID NO: 8781 - DNA, 598 bp, Arabidopsis thaliana columbia
ccatttgtatatttggtggaatctggcatatcttaaccaagccttttgcatgggctcgccgcgcacttgtatggtctggggaggcttacttgtcttatagtttagctgctttatctgtttgtggtttcattgcttgttgttttgtctggtttaataataccgcttaccctagtgagttttacggacctacggggccagaagcttctcaagctcaagcatttacttttctagttagagaccaacgtcttggagctaacgtggggtctgctcaaggacctacatgtttacgtaaatactgaatgcggtctcgacttgagcagttatggcttgagctttaatcgtgtcatcttctggtagatctgtaacgcaacgtgaggctttccctcatgaagataagcactaagagcaatgtcgaatagagctttagaaggtggaggtgatagatgaagattcgggtgaaggagagagttgcaaagagagagagatgcatcggaggtgcggatataggagacgagaagagacttggcgtcggcgaatttgtggtgagagagaagagaacggacgacggagataagtggaagaggtgatctgatggaaa

SEQ ID NO: 8782 - DNA, 341 bp, Arabidopsis thaliana
ggtcgactctcccctggtgaacaagtgtaaccttttctaacgcataaccattgagagaactgattcacaaactgatcacatgacaccgagaccgagatacaacctcccatcttggctcaagacaagagatgagattggattttcttccactcacgcaccgatctccaaaagtcaatttcattgaacgtttactttggacgaatataaaagacttatacaactatacaaccaacgacgaccacgacttcatcttcaaagaaaaaataagaatcaaactctttagttgtgggctttatgagtttagtgaggcccaaatataaatatatccaaattggcccatt

SEQ ID NO: 8783 - DNA, 507 bp, Arabidopsis thaliana
aataaattataacaaatgaaccatactatgagattgataccaaataaacaaatgcgttgtatcaaaatattaatgtttgagctggattgtgagttatatcaattagatattaaacggtccaccaatttcaaaaccaagacctatatattttgcaatatgaaaagcaagtttaacaaaatgtttagttgtagagaaaattcaaattataacgttataatagtatcgcattaactaatagtccagaaaccaacccgtgagagattatatattataactttagttaattacctgagcatcaaacatgttcatgtacttgattccagtgtttgagtctacccgtccagggttaggctggaaaagacaaaacgccagcgtttcgggtctcgggtcgctctgatatgcaaagaacgggtacgggttgatggcaaaaggcgacccggtatcgctaagaaactgtagaatgccctttaaaccggcctgataactaggagcaaacgaaccagctga

SEQ ID NO: 8784 - DNA, 888 bp, Arabidopsis thaliana
aaatttgaaaagggattgtgaattttgtgagactctgatgagtgttgaattttgttgcagcttggttctactgcaattggagtaaagacaaaagaaggagttgtgcttgctgtcgagaagcgtatcacgtcgccattgctggtttgcttgctaactttgaattctatgtttttcagaatttttcttgtgattcactattttggaacaatttgaattgaatctgatgatatgatcaagcagaagcatataagctttctatgttagttatggtgatattagctttctcagtatatgttaaatgctttttctttttccccaggaaccgagcagtgtggagaagattatggaaattgatgaccatattggttgtgctatgagcggtttaatatgtgacgcgcgcacacttgttgagcatgctagagttgaaactcaagtaaggtttctgtctctagggtcttttcttttagcttcaacaggtcttttatgtgttattgacggcttcttttgctcttgtacagaaccatagattctcgtatggtgagccgatgactgtagagtccacaacacaagcactgtgtgatctggctttacggtttggtgaaggagaggaagaatcaatggtaataatcaaaattggaattactgattagaacaaaaccttgataagttggatatccatatttagtcgttgtattgtgtgtactgattctctttgtcattaatgtgactacagtctcggccgtttggagtatctcttctcattgctggccatgatgaaaatggaccaagcttgtaagttctccttcagttggatttcttctactgaaatgggtcacctgtgtaagttagtttatcctcctgtaaatgactctgtcttgttacaggtac

SEQ ID NO: 8785 - DNA, 515 bp, Arabidopsis thaliana columbia
cactagttttacttaattttcaacacacaataacaaaaacaaaaaaatctctttgccccttttctctgaatcttacgtcctctggatctttcttctctctctctctctcttgtctatactttaagtgtctgtctgaagaagcttgaatctgtcgtgatcatcaagattcaagttctgtctttttgagtctttgtcttctacgtctattgagttactcttcctcaaatgtcggaatcagaatcttttcagatggaggagagagaaggaactaacatcaacaacatcccaaccagttttggtctgaaacaacatgaaactcctcttcctcctcctggttacccaccacggtctgaaaaccctaatctttttccggtgggtcaatccagcacttcctccgctgatgccgcggtgaaaccttctgagaatgttgctcctccttttagcttaacaatgccggtggagaattcttctactgagttgcagacgaagagagggagacaagaaagtataacctg

SEQ ID NO: 8786 - DNA, 662 bp, Arabidopsis thaliana columbia
ccgccttctcaaaaatgttgggagaaccattaaatgatagtcatgaatccagatataatcttcttcaagattaatcacacccattaccttatctgcaaatatcttgttggcagaaacatatgcctgccaaagaccacgatcaaaccgttcaccatgatcaggacacatgggtaacatgtaatggaaaagtggccatagttgctgtttacaaaagccaaggtagaattttttatgcacatcttgtgggaggaaagtcgctacacaattgaattcctcaaaaagattatgggaaacctcgtcttgctcactaacatcaacatgcgtcttgagcgatccaacataaatgacttcagtctctggagaaaaaccatccttgagatgtaacaggggagaatcattgtcgagactgaatttccactttccagtttctgaatcctttttaccattcaaaggaagaaaattggccacaatgattttccgctcacggcaaggtaatgaaatgacatctgaatcgccatcactaattccatatccatcaacgtcagagataatgccaggaacagtcacactcttggaagatactcggagtctgaggaatgtcaaaagatcccagagccaagtctaatagatttcaaatgattttgacccattgttggaccaaa

SEQ ID NO: 8787 - DNA, 552 bp, Arabidopsis thaliana columbia
aaattgcttgtcgatagtcaaggaattgtacctcatatctgcatcctaaggtccaccacgaagatttcaaagcacccctagctgcgtctttcgcttctaagttacgcccaagtctacaaaatatatagaggtcttagagttttctagaaaggacgtaagcatttacctgggggtcgttcacaagggagaaagagggatgatgagaaaggatcatacgaacttcagtaaaacttttgcgttgaaagcgaatggccgggcaaatccgggaaagttccctctctttgtataaaactcggtagccaccaaagctgaaaccttgtattagcacgtgaagatagtttaaaaagagaaaacacgtcaactacaacaggatagatataattactagccttacatggtctccattctcgatatgccgaataacttttcgttcaagagaatctggaaacaatccaacctgaattacaaagctaataatcatatcccagtatccatgtgcagaaaagattgtgatattaacaggctcaatatatgtcgctttcttaaaagata

SEQ ID NO: 8788 - DNA, 566 bp, Arabidopsis thaliana columbia
ctcaaggaaagaacagaagagtttaaaggtgtaacagaggacctgaaagtgaggtaagttaaacatttgtaatttgaatttacttaagagttatacacttgtatgtcaatggaagcttatgaatgaattggctattgcagaacgaaacaaacgactgaaaagctttacaagcaagctgatggtgtgtggactgaggctgaatctgcggccaaaaaggtatggttcttgttcacgagcctcgaattggcacgctatctgtcttcgcttgtttcgtagatttgatgcttcctatgttaagaatatgctttcttctcttttagttttggtaacaaaatagtttactgatgaaattgctttagtgaattagaagtcagtgtttatgtgtatgagtagccaaaattgtacattgtaaaaggctaacaatcgtcccttacaaaacagctttgacggtgcaggtctcttcaagtgtgaaagacaagctctcagcagccagtgaagaggtcaaggagtcattcaagctcgggaaggaggagaatgcagagtcagcgagttcatcaggcacaaga

SEQ ID NO: 8789 - DNA, 631 bp, Arabidopsis thaliana columbia
  unsure (1)..(631): unsure at all n locations
cnnnnnnnnnnnnnnnnnnnnnctaaaggatgagagagggaaggtcatggatcaggcgctactggacgggggttatcgctgttataccggcgaaaagatcgatgtctatttcaacactgcgatatgtcagcattctggcaattgcgtacgtggcaacggcaagttatttaatctcaaacgaaagccgtggatcatgccggatgaagtcgacgtcgccactgtggttaaagtgattgatacgtgcccgagcggcgcgctgaaataccgtcataaataagcgagggtaaaatggaaatacgcgaaggccacaataaattttacattaatgacaaacaaggcaagcaaatcgctgaaattgtctttgtgccgaccggagagaatttagcgattatcgaacataccgatgtcgatgaaagcctgaaagggcaagggattggtaaacagctggttgcgaaagtcgtggaaaaaatgcgtcgggaaaaacgaaaaattatcccattatgcccatttgcgaaacatgaatttgataaaacgcgggagtatgatgatattcgcagttgatgggagagtcagagtccgatattttcattctctcgcgatgtgatcaggagagcactgaagggtaggggga

SEQ ID NO: 8790 - DNA, 610 bp, Arabidopsis thaliana columbia
ttaaataaaagaaaaaattagttacaaaaatagagaattctgttttgccaaattttaggaaacaatttttctgaaaactttttgttttggtttaacttttaagggttacaaaaattgaaaaaagcaaagcttgtttggagtagttacagagggaaattaattgttaagttgttacaaaaggttatgtgtgattaaaatagttgtcaataaccaaaaatgtatccataaaatcagttcattcattgtctcaattctttcatacaaacttcattctgctttctttcataaagatccaatcaaacataattgaatgggagaactacaagactggtcggtaaccacttgtctcctccttttattgtttcaagcgtcacaaatccattgcacgagccaaacacatgttttaaaccgtcttttgtaccgctcgaagcgagggtttggttcgtcggttgacacgaaccatttaaatgccatccgtcacttaagcgtgtcttcccccaaaacaccagcggtgttaaccaacaagagcaaaaggagagagatctaattgagaatctgccggacagcttcagttagttttagcaatatggcggttatgtgacgtgaatga

SEQ ID NO: 8791 - DNA, 991 bp, Arabidopsis thaliana
atgactacaccacacttcctggccaacagattccaacaagaacaccttctctaagtctacccattctccaacctcaaacataggtccacttccaagtctgtggatctcctctccacaacccaggcaatccaaagaaagcaacccttacctctccatcagcatgaactgtggttatgatgcctcgtgaatcgggcttggctgctctccagccccatcttggttctgttattcccttctggaaatgcacaaactggcccactttgagagctggaatcttctctaaatctgtgtaatgagtactccatcttcctttccggaaacaacaagccaattctaagtaacctgtttcctgtatgctatgaacgacagcaatactctcccttcctacattagaccaatcatagcttggtctgtttcccaggctcggttttgagcgcacccaatcaccaacttcaaaacctgaaagcagctctgcatctccaggtgagaccctccacaacgtctgtctaccagtcacctgtgcctacaggagaacaaaaaaaaaaaagtccaaccctcgattttaaatatatgctgaaaacaaaaagctgaggacagcccaatgaatccaggggaaatgatccatttcagaaacttacactcagagtcccgtccatgtcgattctcattactttaccaatagttgctggagtctcatttgaccatccaagtcgtggttgggtgattgatggtgtcatatgaatctcttgtcccacatgaaagggcgtaaccttttcaacatctgtcacagaacatgaaaaaggtttactcctgaaacagaaagctatacccacatcaccatcttcatctaagctgtgcataacgccaatactatttcgagtaatgtcttcccatccatatttcggggaagacactgacgccttcactctgacccagtcaccaacctgctcgtggtacaaaggctcagtgttaaaagaatcaaagctcttgg

SEQ ID NO: 8792 - DNA, 485 bp, Arabidopsis thaliana columbia
taactcaagaatcaatcacttcacaatcattcgtgtaaaccaaatccaattaacaagtaaggattagggagaaaagaacctccaattcggcttgtagttcctctttctcgtgaccggttgcaataggcatcacatcttcaacacgcttcttcacagcagtatccgctggaacaaacacaaatcaaccccatcgtcatatttatgtctaaaactacagaaccaggttacacaattccacaacgtagtagtatcgtgtatgtcaaatccagagaccaaacccattcacaatcatagacacgcacaccataaatcatcaaatagcacatctggatctgtaaattacctgcagcggacgcgattaaacgagagaatatggaggaatatgcgggaattgtggatgcaagagtcgagagagaaaggtgagtggactctacgacggcgtgcctgcacgacggagccgctcaggacccgacggcggtgatgga

SEQ ID NO: 8793 - DNA, 481 bp, Arabidopsis thaliana columbia
ccgatcaatatcttgcatccaatcaatatcaaagtcgagatctggtatgcctaatttccatacaaagttatgtagtgccatagttgctaccatgatctttcttgttgttacaatgttataccatgcccggtcttgcatgatcctccattttcctttccacactccaaatgttctttcaatgacacaacgaataaagaatgacgccaattaaacttttctttatgattattgggtggtgcttgattttgaaactgattgtgatggtaccaagtttgcctaaatggtcccaaataccctcgacgtagcgcatatcctgaatcaacaaggtaatatttacctatatgtggatgcggaaaattaggatcgccttccatagctaaagaaagcacttttgtgtcatgagcagaaccaaaaacacctacatatatgtaagtaaataacatgtcaaagttacatactgctagaatattcatgctgcata

SEQ ID NO: 8794 - DNA, 569 bp, Arabidopsis thaliana columbia
ggttgataatggttcggatcatttgaagtatcgttggaccactccttttagtgtggctgagcttcataacataatggaagcagctaactctggagactcgttgaagttagttgtaggcaacacgggtacaggttactataaagacgaggaacggtttgatagatatattgatatcagtaacattccggagatgtcaatgatcaagaaagatgagaaaggaattgaaataggagcagctgttactatatcgaatgctattgatgctttggagaaggaaagcaaatcttcttatgttttcaagaaaatggccactcatatggagaaaattggcaaccgttctatccgaaactcgggtagtattggtggtaatctagtgatggcacagagcagaaagtttccttctgatgttaccactttgttgctcgctgtagatgcctcggtgtatatgttaaatggtaggaaaaccgagaaggttacgctacaggagtttcttgaattgtctccggtgttagactcaaacgcgttcttttaaaggttgagattccacatggactgctccttctggtgat

SEQ ID NO: 8795 - DNA, 412 bp, Arabidopsis thaliana columbia
  unsure (1)..(412): unsure at all n locations
nnnnnnnnnnnnnnnnnnnnnnctaaaggaaaggtgaagaggttctccagatgggaaagtacggtgtatacgaataatgatctagacatcaaacccgctggaaacacaccgtacaaaccccctgtccttcctgtccaccgaacctgaaccggggatactgcacttttccccacacaacgagcttcccactcccattgatctggatttcagcagaagtaaaccacttcacaatctcctcctcggtccaattacaacttgtcacaaccaagaatccgcccttgcgcacaaggcttcccgcaatccccggataccgctcacactcgctcttttcgaccatcaaactcacagcatcaaacgttcctttgtcaagcacgatatcgaagccacccttgtcatacgggaaccagggaac

SEQ ID NO: 8796 - DNA, 438 bp, Arabidopsis thaliana columbia
attcatctactgcttgacgatagaactcacttacgtggtttcaacactgttttagacgaacccaccaagctcgaagtagaatcgatattagatccatcttaggtttctctaatttctctcaaatcactccaaaattttgattataacttcttactagcaagtcaattatagtcatttgtaatccttgcttttgcgatcggaatcgtaaatatccgaacattcttttagatacgttttgattaagattccatatcggaacaatgggtaacataactgttagagcgactattgtttgcacggcgacggtttgtgcggtaactgttttagttattcgacgacgaatgcagagctcaggaaagtgaaagcgtgttttgactatcctcaagagctttgaagaggattgagcgactccgatctcaatacagagacaagtggctg

SEQ ID NO: 8797 - DNA, 1051 bp, Arabidopsis thaliana
atgcctgcatgtcaagatcccagatatcgcagccatcatcatgattttgcattgtgattgcaagaacttagcagttgggtaataacagtagggaacgaattcctgtaatatttaataaaagaacttcttaaataatgaactaggagagtcaactcactacaaataaagagagagagagagggacattgaaccttgctagatgtaacggtaccaaaaggagaaaagatctctttaagtttctcatctgaaatgctaggatccaaattcttaacatacaagtttgaactttgaaacttgtctgcagcttccttcaaattctgttcataacggacccttaattctgtttccctctctgacttcttctgggctctaccaacataccactccttatcatcaaatttgtgcccattgagagactccacagccctagcagcatcatcagcattttcaaagttgacaaacccaaagcccttggacttcccttctccatctttcatcacgacagcacttgttatctttccatactcgccaaaagcattcttcaagtcatcatcggtagtactttccgcgagattcttcacatacacattggtgaatttcgttttgttagcagtggagtctctttcttgtctcctcaggaaaggacccacatacacttgcttgtcattgagcaacatgccgttcagtttctctatagctttctgggcagattcttcattggcgtattgcacaaacccatagccttttgactggcctgaagaatcgacagctaccttgcacgacacaatgtttccaaacgatgaaaaagtatcatgcagtgctttgtggtcgatggactcgtccaaattctgcatattatagccaggtttagcatcagaaagagagaaagaacacccaataaaaaaacttacataactaaagaaatcaactacttttgccagacttttcaatgaataatacaagatacaaattttttcgcaacaatcatctcgtcttacagcaactcaaatgtcagaaggatagagacaagcgtaccttaatataaatgttg

SEQ ID NO: 8798 - DNA, 656 bp, Arabidopsis thaliana
tgttgaactacgtttaacaacatatagatatttcgaagtcaatgcagtcaaatatttcatacaaaacactttcgacgaacacaacttgtatctttttttctctttggtgtcaacaagacttgtatatatatcaacatcaatgaaaatacgcaaagatatatatgttcacgtgacaatttattacattaaattgtatatagtctctctatggttctatataatctcatactttctacctcatctctatagtaatcccataatcaacaagacactctaatagtaatatctcaacctccgtctcgttttcccattaacctacccgtttgttagattatgactaatactctctgtttaagcctcatcaccctaataacgctttttataagtttaaccccaaccttaatcaaatcagatgagggcattgatgttttcttacccatatcactcaaccttacggtcctaaccgatcccttctccatctctgccgcttctcacgacttcggtaacataaccgacgaaaatcccggcgccgtcctctgcccttcctccaccacggaggtggctcgtctcctccgtttcgctaacggaggattctcttacaataaaggctcaaccagccccgcgtctactttcaaagtggctgctcgaggccaagg

SEQ ID NO: 8799 - DNA, 624 bp, Arabidopsis thaliana
accttgttttgaaacctttagatttactactatcatgttctttgatacgtttgcctatcaggtagaatctgcatttcagggataaatcttaactttgattgctgtttcgttttgacaagctaacaaaattaagattttttttttaaatgtcaagaaattattacatagttaagaaacaatcccaagagtttttgtttaaaaaaaaaattttacccgtcgtttattttcttcaccatctcattatacctattgaggtttttgcttaaatcggctgataaaggcattaattttagcattaaattcatcttgtttcacacttctaactctcgggactttaaacgttgtaactttaggctctttaaccgcagccagcctcaacgacactgttgagctaccaggcagagtgtcgttgaggctgcttaagtaaacacttctatagactatctccctacctattttcttaagtaaaccttgccgtactatgataccatacggagatatgtttatgagagacttattggctaagacattgagcctagaactaatccccaagccagtgctagctataaggggtgccaagaaatcagcttcctcgccattcagatatgccatgtaaagtaataa

SEQ ID NO: 8800 - DNA, 1027 bp, Arabidopsis thaliana
ttcatagttcatttgtgcgtggaagagctggatcataaggaaaagaagcacagagcgtgtcgctctcattctcctaaaatcttccaaggttggagttttaatgatgtggaaggaggagaggctggaagcgtggctgagacaggcttcccatacttggtccaaatccgagagaagaagggatgtgccacactcatgcatttcccatccttctaaggcgtgcaatatgccggccactctagttgcactcatcgcctttctcggtaaccagttctgcagatgttttttttataataaggacctcttctaataaattagttggattgggtagctttgaatgcttacctcacaggagtggacattcaccagagattttggaactatcaatgctggtgtggtatgatagatacaatctctacgtaactgcttgagggggaactgtgagaatggtataaacaatgtcccttttgtggctttttcctgctcttctcttgttgttccttctcccaccagccataccttcacccaaaatcccttcattagttttctttatataagctctttgaatattttccttctgattctttgattaattgtgcttcttttgtatactgaattaccttgtttgatgagagtgcttcagaggttaaatagaccaaatggtctctgcattcttgtggaacgcatgatcttattttctcatactcgtctaggcgcagagtggagacctgcggatgacattcacatgaaaatgttacgagtcatgagcataaatacatgtagataaagcttggattttatttttctcctagagatcatcaatttgatatcacaacataggagcaaaaggaaaacaaaggacctgaacgcctctctggcagagagcagaggcgatggtgtaggcaactcttagtgagattgcctgtcatcacgacgcttgtagttgctttgggtacactgttgatcacacagctgctgctaatctactgccgtcgaccagtctactttcatatctggatggttgtggata

SEQ ID NO: 8801 - DNA, 556 bp, Arabidopsis thaliana columbia
tggagatatgtgtagcctaacaaggataaaaactccagaacctgaaggatccagtgtgcacaactcaagaacctagcaattcccaaagcaaatacgtaatgtgcagtgaatggttccacaatctgcgaaaaaagacataacattcaagaaagattcagactcagcactgtggtagcaaaaagctcaaggctttaaagcgcagtagtatcgagtaccttagtgttctgcatgactcttaattgaggaagaactgaaacagcttcaagataaacacagaatgcccaagaaatcctgtttatgatgtggtgacgtgttgatggatgaatgaagaaagacagaacagcacatgggattacctgaagcaaatcagagtaaagctctcaaaacaaacattacatcgccatgaagattctcaacaacaatcaatatacaagttccaaagttctttttatgatataaactaaccaagttgaaattgtgaactcatacattattctattcacaagtcaacactcaaaaacacatttaagataatctatcacaaagagtttggtaa

SEQ ID NO: 8802 - DNA, 566 bp, Arabidopsis thaliana columbia
aaatattgttcctttcgcttgggaaaagtaggatgcaagccttaaatcttaaagatgaagaacaaacattttcatcttctagatggatggtcaaggaacctcctctggcacggtgactgaactccagaggaacctctttgccaggtaagcatgctctcttgtaaacccattgctgcgtgattactcgtcgtgcttctccatcgaaattcatggatttgctgaactcgactttcgcatttggacagtcgaaagatgaagatattctctcaagtgattcacaatttattgctgatagaatcttgatcgaacttggaagctctggcagtgacacaagttttctacaattatcgacgtataagtagtgtagccaagtgagatctttgatacaatctggaagcctttcaataccgctatccgttaggtatatatacactacactcttggggacatgtgaaaatatcttgaggtttaggcagccactaatatcaagggattcaaggcgagaccattgactaattgatggaggtattcttctaccctgtgttttcataaagatctttcgatgt

SEQ ID NO: 8803 - DNA, 926 bp, Arabidopsis thaliana
tcctggtctaagcaacccgggtcgagcttctccttgtgattagtagtgaaaattatgattttctcttctccacaacttgaccaaagtccatcaacaaagttcaatagaccagacaaagatatctgtaccacaagaaagaaagattcataagactaaagaaactaacaaaacagaggaaattttcattaaacttaccccaacttcaaacttcttcttcctcttttgtggctcaccatcatcttctccaccatcttcttccttcttcttactctgacgtctacgagaagcatcagctccacaatcaatatcttcaataagaagaatcgaccggttcttggtcgaagtaagaatctcccgcaactcaccatcatctctaacactttgaatctgaagatcatagatatgatacttcatatgattagcaatggcagctaccatagaagacttcccggttcccggtggaccgtaaagaagatatcctcgcttccaagcacgtcctacgctcttgaagaagtcttttcctttagagaaagcatcaagatcgtcaatcaaagtcttctttaggtctggctcaacagctaacgtctcaaaggtcgtgtgatgctcgaagatagcagattcccatttagaccggtcttggttataagtatagatcttgagattctcgcgatggctcattatcttctccgctgatttcgctaagtaagtgaagtaatccgtcattatcttctcacgaaactccttcttacatgtcaaatgaaagtacctgaacacacaaaacatgtcagatcaaagaagaatagagtctaagagataaaagacaacagagtttttttagggttacgtttgtcgggtagatacttcttagtttcaacagagtgaagagccattctagatgaatccttcaaagttacaatgacttagtg

SEQ ID NO: 8804 - DNA, 547 bp, Arabidopsis thaliana
aaacggatgctttccaattgaagaatggtcataaatctagttggtttgattgtcatcaaagatatttacctctagatcatgtttttcgccaaaacgaaaagtcttttcgaaagggtcatattgtcaacgatgacccaccatattttatatcaggaaaacagtggaatgtggtgaagaaaacagtggaatgtggtggaaacaatcatataaatagtggcatcgaaggatatggcgagacgcaccactggcacaagcatagtgaaacaacccgacccatgttttttttaaaaaaaatataattaaatattctcataaatatctaattaaaccaaccaataacataataattaaaccgcaagtcagaaatactattttatgaataaataaataattcgatcaacaaaaccaagaataactgacaatcctaaccgggttccaataaccaaaaacaccaaacataaaacaaacgagttcctagatcatcctctcttccttgccatgattcccaatcacactttatctttacctcatcacaacacaatgagat

SEQ ID NO: 8805 - DNA, 731 bp, Arabidopsis thaliana
actcttcaaagtgtcgtgttcttcttccactttggttctgccatgtttccatcattgttccgacttgaagcaaaatctttttccaatttcaaacatttcataaataaaaatcattgtagaccaggttcttcaagagggaaacaaatagagactgtcggtgaatcttttcaacgaactgttaatttgtaatctttgttcaagtaaaaaagatgacagaattatattaaagaaacatatggtaaaaaagtttgtacaacaacaaatctgattgtatcctatggtttgatgcacagaacaatcgaatagaatacagagtaacgaaacaaattccaaccaaaagttggtaaaatcaaaagagagaagaaagaatgtttttttttttgtcaaaggagatgagagaatttaccagctgagactgagactataataatatgtaataacagagatcatcaatcatcatcagcgagagtagtgtccatacaaatcataaggtgcccaaagagtatcaagtggacaaggccgtctcgaatctaaccgaaaccacggtttaccactaccggaccaatgaagcaagctaaccggaccgggatgtaaatctctacagcttcctctcacgttatctccaccaagcccatgctggttccaccgatgctctatcggagctacttctccggcgaacaccaacaagaacggcggcaatgatccagctcgtaaatcctatcactcttctg

SEQ ID NO: 8806 - DNA, 731 bp, Arabidopsis thaliana
ctattttgtcttattctctaccaactaacttaattatatattaagcaaaaaactcagttcctttctttctctaagcctgtcatcatcttgagatcttcatcaagaagctgcctctctctttccataaactcacatcagccacacataaatacatcttaacactcctaagcatttcactagcccactcccgtctttcaagatattttctttttgttaagacactttcttatcgtcagttcagtgtttttcaagttcagcttcgtacctgagccaaagagtgtttcaggatggagctaaggtcgagaatgctcaaagactgtctcttggaagattccaactcatgttcctcaaacgggttcaaatcgattcccagacggcatcctctcaaccctttcccaatgataccaaagaggaaacaatccaatgcattgcaggctgtgattaacgccatcaagaacctccattccaacaccatcaaatccgctccatcggggatcttaccaaggagcctttctcggcggttagcaaccaagaacaaagcagaaaaccaagcaagcatcaccgttattcgagtcaaagacatcgtgcgatggcactcgtctaaggacctgcatgaggacatatcacattttgaacctcatcagtacacaaccaagaacacgacaacaaccacaggatcctccaccaccagcggcacatcctgcagcagttggtctgacttggattttaca

SEQ ID NO: 8807 - DNA, 578 bp, Arabidopsis thaliana
ctgattcgtctcgtagacgccagaccaaaaatgaagaagatgataaggtcaaaaagaaaaaaaaaaagcctgaccttggggtaagttgaaatgattcctctgtttctaattttattaacctctctgtttttgaacctaatgaatcttctttcttgtggacagatatctttgtctggtctattgaactttgtagacggtctttggtcgagctgtggagaagaaagaatcataattttcacaaccaattacaaggagaagctcgacccggcattgctgaggcccggaagaatggatgttcacattctcatggactattgcactccatttgtcttgaagaagcttgtggctatgtacctcaaaattgatgaccatgtcctgtttgatcccattgagaagcttgtccttgaggtgagtgtactcctgctgaagtcgcgcacgagctcatggtgagtaagaacactgatattgcgctcaaaggtctcatcgaattcatcgaaaaaaagaagatagaaaaggaagaagttacaaagttgaggaagagggtgagattgaagatgctgagaactacgaataaaaga

SEQ ID NO: 8808 - DNA, 567 bp, Arabidopsis thaliana columbia
ccatccattttcggggctagttgattcggcagtgtttaatcagttgacatatttggattatatatctttgcctatagctagtcaaacaaaacttatttttgataaaaaaaaatttagtttaatttttacgaataaaatattggagaaatatatttcagagtaaaatttaaaacaacttttattgatgtaggaaaataaacttaaaaagggttaacaacataaaaacatagaacatgttttattagtcggaaaacagaaagaaaagaaagcatgtttctttttattatttgtttatctcaactagtcacccaaatctaggtacgcttcatagattctagggtcacttggtggaaatcgacaagttacttggctggagctaggaacatatagtgaatctttttgtgaccaccaagtgcttgaccagatgcaaacattctgttacaaatttgacactcgtattgtcgtcgaactattggcccatcttccccgaaataattcttgtcggaaacgttcaatcgcttgtatttgtggctcgttcgatgccacctaatgcctgatacgaacgta

SEQ ID NO: 8809 - DNA, 620 bp, Arabidopsis thaliana columbia
ctgaagtctctcatgaagaagagacacatccactacattccctttctcctcctttgccgccaactccgccaccggaatcgccgccaaaaagctctttatatattctctacaacactttttaccctcacaaaccaacttctccgacgattcctctttctcatacatcaaactcgaatcatcaaacttaagaatgtaagcttgcttgcatccttcaaacaatctctcccctaacgaatcaataacgcaaaaaccatctaaatctgcctttaccacgaagaaatgatcgttccagctaacaatataaaccctagtttcaccattacttgaggctaacgctacttctttctctacctcgtcccgaaatctgatcaaacgacatcagaccatccaacgaagcaaatctctccgggctgaataacccggtaaacgatttatcggtacaaaccctaaccggtcgtaaatttgcggaaacgatcgtttccagatcgaaatgcctgtttggaacaatcttagatacgattctttgtcgcaaagagattgccataaagaagacccttgcgtgattagtgaatcgacgctgtcctgaaggattgatgagctaggatcgcgtggaccaatga

SEQ ID NO: 8810 - DNA, 589 bp, Arabidopsis thaliana columbia
tttgctcgatatacttctcaggttgtatacgtctaaatcttgaggaaaattcatatcttgcagaaatataattctcgtaccagaatacgtgggcacccacaaacactgtggaacaacagtagaagtttttgatcgtcattgttccactatggatgcaagtggtggacatatatagttatgtgtatatatatactagtaaatgcacacaatcgatataacaagttattctaaaatttaacccaaaaaaaaaaaaagagaagaaaaagactcaacatggttcatgctgatggtcataattttcccggttcggatccaaaccctcatatgaacaagttcgctttcgggtgtgccattgttgcttccatcatttctatcatctttggatatggtaacatactaacattctctacatatcaaacaaaagttttctacatatatcatataaagatatattcaatggaattatattaatgattttatattaacgaatattttcttttttgtaatggtgtgttgccttagatacgggagttatgagcggcgtcagatatttataagagatgatctaaaataacgacctcagattgaa

SEQ ID NO: 8811 - DNA, 1081 bp, Arabidopsis thaliana
ctaccacagtatgaacaacaaatcttagaactaagacccagtagatttggtgcaaaagatagatatgtatggcttcttactaagtcaggagagtacagtgcaaaaagcggctaccatgcagcttcatcatccaaaacttctttgccacacctgcctagctcacctcttgttttcaactggaacaaggaaatctggaataaacattgctcaccaaaagtcaagttttttctctggaaagctatgaaaaatgcattacctgtgggagcaaatttgagagctcggtggatcaatcctgacgctttctgccctcactgtggcgacgaagagacttgcctccatatgttgtttcattgtcagttcgctcagcaagtttggcttcaaacacccttcaagataagcctctctccctcccgaatctcaagtttgaagcaggggcttgaagcgtctaaccatctcaaagttctcccgctatcgggctaaaccacggtcctcttttcccctggattctatggatgatctggatctgcaggaataagatgatttttgagaaaaagcagcaatcaagtggagacctaatcacccaagcaattacctatgctaaagaatggaatgaggctcagatccaacccatccgaaacccactcttaccgccaagccctctatcctcgcctcttggtgtggagcctgttgacatcgaaacaacgatctgttttacagatgcagcttggagggattcaggagatgcgggatatggctggacttttgtgaacttctccactcaattcgaatcgcagggacaagccacgggaaagaagatctgctcacctctaatggcagaagcctctgcgctcttccttgcaattcatcaggctgtggattttggtttcaaaaaactctcactagcttcagactcgcaacagctggtcaaagcacttaatggggagccccaaccggaggagctccgagggattcttcacgacatccttaccctttctctctattttgatgagatctgttttcgttatgttaaaagagcgagcaatgtttcggcagatactatagccaaagcagcattaaactc

SEQ ID NO: 8812 - DNA, 927 bp, Arabidopsis thaliana
aagagaattaaggtgtgagtcggcaaaaccatggaaaccaatgatcttcttttcattaacttgaagtgaaaattgtgtaccatctccataatattcatatccaaagtactgagaagtgtgtttgttggattgaaactggattccttgaatgatattggaagagtcgtacaacccctcgacggaaacaagatactcgtccggatggctaatctcaatctgcagaatcatgaagatcaataatcttgaattaacacttattcgaaaaacgtaattgagccataataataaaaatttacgcaccgttgaagtgccacctcttcctttgacaccgtggaagggtccttccttcaactgtccgttcttgacataatcaaatctaatttgctcaattcctagaccaccaactgcaacatgtatcttcatcacaccatcatgatcggttccgtcgtcccattgatttcctccattgcctccttgtgcttccaacttttgtggactagaattggtgttggattcacttccggtgttagattctttgcctcccgtgttagtttttgtgccgtcagcgttactttcggtaccttcggggctagttccagtgctaccatcactatttccaatgccactagcaccagggttagtttccttgccaccaacgttattttcagtaccttcgatgtttgaatctgttcctccaccagcaccagggttagttccagtgctaccatcattacttccaataccactagcaccatcgttagttccgccgtttccagagttagttttggagccaccagcatcactttccgtatctccaattccccggtgccaccagcaccaaagttagttccagtgctaccagcattacctccaatgccactagcaccattgttagcaccatcattacttttcgagccaccagcgtta

SEQ ID NO: 8813 - DNA, 420 bp, Arabidopsis thaliana columbia
tgagatcagtctcttactggaaaatgcatttatgattgtaaatctgctttctacttagttgaatctcttactggtgatgtttattttatacaaagagatgcatgaaaaaatgcagacttcatttgtcggtttagttactaacgtgacagactaacgtgtcattcttactaggtggctgtcggtgtagacgggaagaagatggaacctgaaagtaatgttcttctcgcatctattgaaaacatgcagtatgcagtaaccttggatgttttacacatggtaatactggctctctattctaaaacctcgttgaaactttggttctgaaaatattgattctcttctcttgtatattgacgagtaggtttttgcggcttttggggaagttcaaaagattgccatgtttgacaagaatggtggggt

SEQ ID NO: 8814 - DNA, 591 bp, Arabidopsis thaliana columbia
attattctggcttagaaaatagtgagaaatttccataatgtttgtcagtttgcagaaagaattatatagactaattggacatggatctctaaagcgcatatgaagcctatctacattgcctttgagtcaatttagatgtcaaaacaagtctgctaacaagcacacgaagcctgttagctccaggaccgggcttgatcttcgacggatcaccaaccctcgagcattttggttcccctgcacaccaaccaccaggcgtgaagtttccgttacctctaccgagcagctctttatcgatcttatccaaggcaggatcattgtgtctgaacttgcgggaaaacgcacttccacttgcaatcatcctctctgtatcgttgatggtgagcgcccgaggatgctgtttaggagggcggtcccatgagatgaaatgcaggtcgtggttcagcacagtggaagagtactctggagcgttgcagatgacagtatggaaatagtccttccggtgtagagaggaaattggtgtaatacattagaagagtccgtggaagattgtcccatcccaaatgcaatattctacgaacgaccgagataaga

SEQ ID NO: 8815 - DNA, 349 bp, Arabidopsis thaliana
tacacatatccggcacgagattataaggagtaagaattatgggccaaagagaatagttaccaccagacgatccaaatggattaaaaccatcagtacataacccgagataaatatttttgcttttggatgcaaactaaggattaagatgttggaaatgcttccatgccttgccatcagaaggatgttgcataactccatcaggacatgtatgttctgcgtgccaactcatatgtggtgctgtcttttcggatagatacaatcttttgagcctgtataaaattggcaaatagaatattctcttgtatggaatatgctttctagtagcgcaaaccgatgcttttcgaggttt

SEQ ID NO: 8816 - DNA, 589 bp, Arabidopsis thaliana columbia
  unsure (1)..(589): unsure at all n locations
nnnnnnnnnnnnnnnnnnnnnctaaagttggctttcaggcgcggacaattgcgacatttcaggcttatctcgggcatccggtacgctggttacccgggctggagatacaaaactacgccgacgcgtcactgtttgctgatgaatcattacgctggcgaacgagctatgaggtggaaaaactacctgaagagcacacaaaaagttcaactgcagaactttgccaactggccgaaatactctctctccaccctatttcactttcccttctcgaaaagttgttaaacagcacacggggcaatacacagccggataatcagcttgcggcgttgttatgcgcgcgtataaatggcagtcctgcttgttttgccacctgtatggattcatcaaatgaatataaaaaaatcagcacccttatgcgcaagggcgaaaatgaaattaaccaatgggctgaccgtcattctgttgagcgcgctaccgttcaggcgatacaatggctgacccgagcacccgatcgctttacgccgcccagttcagccctttactcgaacacgaaaaatcatcaacgcagattattaatctgctggtatgg

SEQ ID NO: 8817 - DNA, 409 bp, Arabidopsis thaliana columbia
gctctaaagtacaccgcgccgtggcaatcaggtattactggagaaacaacgtctgtatttgacgcatggtcatctttttggcccggaaaatctgcctgctttaaaccagaacgatgtgctggtgtacggtcatacccatctgccagtggcgaacagcggtcggagattttccactggaaccccggctcggtgagtattccgggatgcggtaatccggcgagttatggcatgctggatagtgacgtacgtagtgtaatcgcgctcaatgatcatcgtatcattgcgcatgtcgcgattgatccgtgatttacccacgactcagaatgcgccgtaagagcccacgacaaagaacgtttcctgataatggaacagcgtcgtttggcaagtactgagtgggtggatacttgtc

SEQ ID NO: 8818 - DNA, 870 bp, Arabidopsis thaliana
ctagaggatccccgataaggattaagatgtttgcaaattttgtgagcatccaaggtacaaacctcggaaagcatcggtacgggctactagaaagcatattccatacaagagaatgttctatttgccaatatcataccggctcaagagattgtatctatccgaaaagacagcgccccatatgagttggcacacagaacatacatgtcttgatggagttatgcaacatccttctgatggcaaggcatggaagaatttccaacatcattaatcctgagtttgcatccaaaagcaggaatgtttatctcgaattatgtactgatggttttaatccattcgaatcttctggtggtactactctctttggcccataattcttactccttataatctcgtgccagatatgtgtatgaaaagagaatatctatttctttccatactagtgctagtgcgaaaccatccaaaacgaagtttggatatttttttacgaccactaatagaagaattacaggaactttggatcaatggcgttaacgcgtttgatatttcagtgaagcaaaatttcaatttacaagcagttttaatgtggactataagcgactttccagcatatgggatgttgtctggatggacaactcatggaagattgtcgtgtccatattgtagagatcaaacggatgctttccaattgaagaatggtcataaatctagttggtttgattgtcatcgaagatttttacctacggatcatgtttttcaccaaaacgaaaggttttttcgaaagggtcatattgtcgacgatgacccaccatattttatgtcaggagaagaaattctggaaggtcccttggcttattattatggggtgaagaa

SEQ ID NO: 8819 - DNA, 574 bp, Arabidopsis thaliana
gtcacttatagtccacattaaaactgcttgtaaattgaaattttgcttcactgaaatatcaaacgcgtcaacgccattgatctaaagttccagtaattcttctatcagtggtcgtaaaaaaatatccaaaatccgttttggatggtttcgccctggccctagtatgaaaagaaatagatattctcttttcatacacatatctggcaggagattataaggagtaagaattatgggccaaagggaatagttaccaccagacgatccgaatgggttaaaaccatcagtacataacctgagataaacatttctacttttggatgcaaactcaggattaagatattggaaatgcttccatgccttgccatcaaaaggatgttgcataactccatcaagacatgtatattctgcgtgccaactcatatttggtgctgtcttttcggatagatacaatcttttgagccgtataatattggcaaagagaacattctcttgtatggaatatgcattctagtagccgaaccgatgctttcagaggtttgtaccttggatgttccaaaatttgcaaactgttaga

SEQ ID NO: 8820 - DNA, 617 bp, Arabidopsis thaliana columbia
  unsure (1)..(617): unsure at all n locations
cttatttttatggtgtctaggtgagacaggagcatcatcgtcgtcatcttcgttcatggcaaactcagggacttggtcaggaaaaacagatgcaattgtggtgttggcgttttgaagctctttagagatatgatcataccgctctgctaaagcacgataagccttgaaagattcttctacaaaacttatcaattcaggccttctcttgtaatacatttctgcacgcttagcaaatgaatcaccttcatcttccaaaagcttaagtgcatattccaccttctcctcgatatctacataaacattttatcaaaaatatgtggaagaagtgaaaaatgatgataatatggaatgtaaaaatatgtaaccttgaaggttttcttcaagccatttggattgtttggttcgaacgtggcttgccaccaccaggagtacgcattgctcgcagctcttcgtagcatctttattctctaatctttttcttgaaaaaaatttcaatcaattgaacaaaatctcatctttttctggaggtttcgttcatgacaaccanaggagatgtngtttttttctctcgttaatantgttgttaatcttgttgatagagaatgccgtagagaaag

SEQ ID NO: 8821 - DNA, 519 bp, Arabidopsis thaliana columbia
tatccagccagtgtgctctaaagaaattttcgtagtaaagaatggctaacgtataggcaaatgcatcccataacgaagatgtttggctatttttactttgcggcaaaatcacacttagctcattaaataaggtttttatgacttcttttccctgccccgcggcaattaccggacaagaatgcggttgcagtagctgattttcctcagccccctgaaactgaaagccgtacagcgcacaggtacacgtcgttgccggatcgttaacgtcagaggccaccgcatgcagcctgccgcgttctatcaccacaatgtcatccgcatgtgcgacatataacgaagaatcgatggtaaaccttgcaacccctttcttgacgtaaatcaactcggtttcattgtcatgaacgtgatgtccggactcccattttggatcatcgctaaatgcaaaacgtgaaagccgtggcgttttaccggcgacaaacagcgtttcactggcgttatcaaacagcgttgatacatgac

SEQ ID NO: 8822 - DNA, 1536 bp, Arabidopsis thaliana
acttcactcacaagttcacacctgtttaaatctcacaatctcaattttattaaattaacactgtaacatataattgtcttctaagtacaatcagaaagaaagtccttcgatgatctaaaacagaaattcaaaaaaaggagctttcacaacctctttcaaaaaccacgaggctttacattgtatttgagaaaccctaattatattatttaacaactttcgaatgattttaacaaaagatccggttttactttaaaccctaaattaacacctaaaaccctaatttttctcatcatttttgtcctaattccaaacttttttttttcttcttcttgttgcaattttgatcaaaattcacattctttgtgtagtattaattggcaagaacttcccaaatcagctctggatcgaacgatggcatcctcgctaataaaaacccatcagtgtccactcccatcattgcctcttcctccgccgtcgccggtacttcactagggaccgaaactgataccggagaactattttcactgttacacaaacccataggtgaaacccaataactatcctctgaagtaaccgcagtagtagttgtcgtcaccggagacgacgacagaatctccggcgatgacaaacacgaagaatccgccgtggccgacgagtttttgctcacttttacgctcttttttgctctctcttttctgactctctggcaaatggattggatcttcccgtcgacggcgttcttgagagctattagcttagaggaatctccgagtccgagtagctcactcgggtctttgagattaggaaaattgagacgagcgtattctccacggagcttataggcggcgcgatcgtaagcgtaagggcggcttccgcgtgctcgtaagtacctaaccaaaccctcattctgttttgcggcaatcttatctccgcaacccattttccccaatgtctctgcctcactcctctgtaaagtttcttctttttcgtcaccctcccagccgctaacgcagcggcgaaacgtggcggctggagacccggccgccgcttggagcattagctcggaagtttgatgatgatcgtacgttgaggaaaacagaggaggatgaggagtggagattgctctgttctgaaggtggaacttctcgatgatatctcgttggcggagatagacggaggacccgagctgcggcggtggcggaggattgtgagtgttgaatgatgttgtggcggattctacggaggagggagtgagaagtgagaagattgagtcgagtgtgtttggtcctcctgctaatatgatctgagacagagatgctctgatttctgagattttaggactgaaattgttctgaaaaatatcattgctttcttccattttttctcaaccagacgtttcgtggagtataagataaaaagaaacctaacaattgtgtttgatttgatagaatgatggttttcaagttcaaagagattgacaagagtaagattgagataatgagagattgtttttgaaagaaagtagaattggttttt

SEQ ID NO: 8823 - DNA, 605 bp, Arabidopsis thaliana
cactagtgcagagagatcaagaacaaaaaggtaaacttactttcttctttttgttttgaaatgtttctaaatttttctttgaatgtttcatcagattctgtagatatgtctctgcttggagggctacttgtatctggtttcaagaaagagtcttgcttgagtagataccaatcttacctctaccgtaaagcttcaccgtataaaccttcgttgcatctactttcgaagcttagagcttacgaagagcttcataaaagatgtggaccgggaacaagacagtataccaatgcagaaagattgcttaaacagaaacaaacaggtgagatggaatcacaaggatgcaagtatgttgtttggatgtcgtttagcggattaggaaacaggattatcagtattgcttctgtgtttctgtatgcaatgttgacagatagagtcttgcttgttgaaggaggggaacagttcgcggatttattctgcgaaccgttcctcgataccacttggttactaccgaaagatgttcaccttagctagtcagttcagtggctttggtcgagactcagctcactgccatggagatatgctgaggaggttacttgatgaatgaa

SEQ ID NO: 8824 - DNA, 418 bp, Arabidopsis thaliana columbia
ggaacaaagatcataatcaatgaatggagaaaaccaacgaaaccctgaggtatgggggattgatgccaatgaatatagaccggagagacatttaggtacgaatttggatttcaacgtactgattccaaatacgttccatttggagcagggagaagacattgccctggaatcggattttctttggttttgtccaaattggcgctagccaacattgtgaaacgattcaactggagacacaaggtcggaccagtaggagatgataagcctgatctagctgaagcatctggtattgatgattgtcgtaagtttcctctcattgtctttccatcgattgcgcgcacacattgatgagaaaacagagagcgtgtccagttcatctgtagaagaatgatcattgagtgtggcctttgttttagtg

SEQ ID NO: 8825 - DNA, 284 bp, Arabidopsis thaliana
actatatacacagcaaatctctcccttgcacgtatcttagcagcaatctttaacgctatttcgacaggtatcaagtctgtgcatccgctgcagattctatccatcaaaaaaagaaatactacaatagatcagaatctcccaatggatatttaatagcttcgttaagagaaatttcgtacttatcgttcttgctctcccaatgatcacagcttcccatgaaatactgattctcgatgtagataaacctctcagcctttcgaattactgcgacatagccatcgtgt

SEQ ID NO: 8826 - DNA, 538 bp, Arabidopsis thaliana
cattataagaatgttattagtaatttaacagttaaatttatctcttgtactccgtaaaagttacaaacctcagatgtcaacatttacatctatctcttgttcttaaaacaatgaagaactttcaaacttctacatttaaccaaaaaaaaaactttcaaacttcttctttgtaaaagttaaaacaccaaaggtcaccacaagccaatctataaatgtcaccaccaacatgagtctcttcactcactaaaaacttttcttctctgcatctaatcctttatttcctctctcactctcttttgtttatactcgtgcaaaaatgggaggcagtaagatgtccaatgactatgaaattgatgtcgaagctgggatgtcttctctttctatagtcaacacacccattgaagcaccaattgtatcatcttacaatgaccggatccggccattgcttgacactgtcgacagattgagaaacctgaatgtgatgagagaagggatccagcttcccaccattgtggtggttggagacagtcttcaggga

SEQ ID NO: 8827 - DNA, 819 bp, Arabidopsis thaliana
cttcttcaaaaacaaaaaaaaacaaaaaaaaaaactgagatcttcaaaatcgttcaacaaacagccttttcattgccttcgaaatcttcacccgacacataaaacataaatatagtaaccagttgcaacaatttcatctctacaaactctttgaaattcctgttcattgtcttcaaagaacgtgttcaatgtactataacaagtttcttaagagcttggttttctattacactaattgacaaattaattaatttaataactatgaaaaaacaaaattaatgtggcgttacagagacaaagagattgtgaccaaaagccaacggctcattttctcaaaaaaaaaaaaaccgtaacgtatcttcttctccgagtgttggcttaaattcaaaaatccaattataatctcttgaagaccgtgacgaatcctcgtggccacttgaatctccgactatttcgaaaaagttatggaggcgaaaaccagcggacctaagcaaattcagccatcaacaccggctcctccgccttcaacgcggcggccaagagttagagaagtaagttccagattcatgtctccggttacttcatcctcttcctccgccggagatctccactctttgacttgtaattctccaaagcagcaccaccttcaacaccaccagattcaacgctctgtttctgctcagagacttagacgtcagttaaaaatggcagacggagatgagaatcgctcatcagagacggcggcgcgtagcctagactcgccttttacactctcacaaagccgaaaatcatcgaaaccaagtcacttgaagccgctca

SEQ ID NO: 8828 - DNA, 964 bp, Arabidopsis thaliana
gaaaagtaagttccattcgcagatactcaacccacaggtcttcagagtttgaacacactctcagcccattcagcataagagcacgagctgctgtaacattcaagtttctatcaaattcccaagatgcagcatatatccacactccagccacttttggatgaaaccttattgcttgagccaatgcctacacatgtttcagataatataaacgcaattaaacatcgacatatacccaccaaagacaaatcattaacaaagcaaccagcaaatttcaaatcttttacctttttcattcttccatgcctcttctgtttacaaaactcgagatacctaaaccacaaattgatatcacctttatacctcatcgtcgccaatctataaatctcaacaatcctagccacaccggcgaaatcagatactgatttcttctttctcttcttagtcacacgcgccaccgatttcctccgtagctgacggagctcatcgagcttaacctcatagtcaatataggctatgaaatcttctttgagtgggcttggacgcttgagccggtactcaaacttacgccgctgcttcacgatctcagctatctcagcacgagtgaagatttctcttcgttctagatcatcaagctcgtcaaccatccgctcgaggcggtattgaactacgtcggccatggctgctgcttctcgattctcggcggggactgataacggtagggcaaacgcttaatgcttcttcttctttcttcagttattatataatgggccgtaagagtaagaagctattgggcctacgtctaattttatcacggcccaatgttaaaactcttgctatgagctatttgttgttgttctgggggaaaagctttagaagttgaagacgacgatgacgcttttagctctctcttcttctctgtcttctccttccttcttctgccgcaattctcgtattcgtttctctc

SEQ ID NO: 8829 - DNA, 526 bp, Arabidopsis thaliana columbia
aggtatgacgatgagttttcaattaattaacatagagaaaaaatttcaacaaatctagaaaggatttaaaaacaaatttatgtgaagatctggttatgaatgttttgtcaagaaagcaacaatatgatttgattgtgaatatatgtccaccggattttgctcctttctttttgctgtttgattttgattgtgaataaatgtccaacaaaatgattttagtcactgttctatggtaaacctgacgacacaaagggtttagtcgatttttattcaatatatgatgtaaaaaataaacaatggttaattatgtcatgtgttttaaagattttgattattggattcacgaaccaaaacgtttttgaattttatagtaattctttggttttatgaaattagggttagagactagtcacttaccaccggagataagtccccggctgttttccggtgtatgagagtcagctcaatcgacgatgaagacgaagagtatgcttatcaaacggctgttagcattggaggacacgtg

SEQ ID NO: 8830 - DNA, 1335 bp, Arabidopsis thaliana
ctgctgacccctaaccaaagttccggcttttacaataatggtggctaacggtccacggcctttgtcaagccgagcctccaccacatatgcttgagctggtccatccacacgtgctttcaggtccatatccacagcttggagaagcagagcttcttctaatttgtctagccctgtactcttcgctgcagatacctcaacagcctgaaacaacaagtcaaatcatattaacaaaccaagtccaaattgcaacaaaaaccatattaaaccgaaccaacccggattatctttcacctgaacatttcctccaatatcctcaagctctatcccctcagacgtgagctggtacttaactttttccggattagctccaggtttatcgcatttattgatcgcaaccacaaccggaacattcgctgatctagcgtgcgcaatagcctcgagtgtctgcggcattaccccatcatcagcagcaaccaccaagacgactatatcagtcacagcagctccccgagctcgcatctcgctgaaaggcgcatggccaggtgtgtcgaggaatgtgattgaagtgccagaatccggcatgcctaccacgaaagcacccacgtgctgagtgattccaccagcttctcttgctgcaacagaggtgtttcttaaagcatccagcaacgaggtttttccatgatcgacatggcccattacggttacaactggaggccgtggaagaatctcagatccttctgtagaatgttgcctccttacgttgatcccgatttcctgcaaaggatgagttaattgacctgtgaaatctattatcttggactagaggtagaatcaccttaccatagcaagaagctcggcgacatcaacactgattgtgtcgaattctgaactaaaagtttccccaacattaatgagaatgctctgcaaaaccgccacagactcaccagtacgcttggagagctcaagtagtgtcatcccttcaaatatgtcgacagtcttcccaggcaatccctttgccaatcttttcagcctaggaggcacataaggagcttcaacaggtggcttatctgtttttttctcccgttttgagaactttcctttcgttttcacagtctgtttcttgcgttcacgatgactcagcagtcgatcagcatcctcttttcttttcgccaatgtttctcgactcgcatgaaaatacctgttcaagaagaaacacaacccaagccagcaaacattcacatagtgagtgctctgaggatgaaatttaagagagaaatgacagaaaagtctaggcgaatggtttaccttatggatgtttcagtagggaaagattca

SEQ ID NO: 8831 - DNA, 439 bp, Arabidopsis thaliana columbia
actactgtctaagaagaagagcatcgagaatttacaatgggctcaagcccaggcccgttttaaatagactcctattgattggttagcaagtaagaccggttccaatttccggttgggtattgagttggtttaagttattagccgttcgtcgtcttcctctggagaaagatcctagagaggaaacaatggaaaatcgccatctcccttccaaattcttctcctctgcttcatccatggctcagaatcaacttatcgattcgctaacatctcacatatctctgtaccactcccactcgtctacctcttcaatggctaatactatccccaatcctaggtcggcgatcctccgatggttctcttctctcagcgtccaccagcgcctctctcacctcaccgtcgttgatcccaagttcgtccaaatcctccttcagatgcttgg

SEQ ID NO: 8832 - DNA, 1439 bp, Arabidopsis thaliana
tccccctatttgtcctattttcagtaccttcctgaggacttccacttggaatatctcattaaaggtggcatcaacagcgcctttcttaatctctggatgctcagaatccacaaatggtccaagctgagtttggaaataaaacgtaagtgatcccgagacacaatcacacaagagacaaatatctacagaatgtgtgaatgcattctagttactcaccagcacgagtaactgtggtggctttctttttgcataggctagtagctcattcagtggctcaaacagcaagttgtctgatgtggtgaatggtccggatgcaattatctgtcaacagaaagacctttaaacatcattttgaatcccaaactagaaaattatgatgctaactgattctaaacacaccatccttgtgcttggtaatgacaacttaatagctatgcataaaaacagaacatatccatacattcatctcaaatatcatcataaaagaaaaggggaacacagcatacaaattttgtttggcattatcgaagtcagtaactaaagtagctccactccaagttaccaatctagctaagtaaaacagctttgtaatctctaaattctcaacattctgcagttatctcatctcaacattatgattatgtgtgtataaatgtacgagaaagaagtgtgccagaatcatataaaataatcaatgggttccttgacgatataggtaaaaaaatactagtacagctcccttgacatgaaggagtgcatacttacaaatgaaacctctgatttttgacaggattcttctgcaggaactaagacttcctgatccaagatttgcctcttagcaggaggtagatccacgtcaacagtaagtgttaaaggaactgaatctagcagcttagatgcagtgagataatgtccactaggattttgcccctcaatgccaactacctgcatcaaattcagacaacttccacatgaatattatgagtgttctgtggaaaaaacacaatatctaatgttgttagctttaagctatcacctggccaggaaaaatggagaactgatctagtctctttaagtccactggaacacgctgtcctgaagtacgctcggcactgcaatcatcgaatttgttggcattaggataaggaaactctggatatttggaactgaggcttcatgtttaaaagaaagttatgccaataactaactataaatggctataccctataggaccacaatgtaagtcattctagtatccaaattgttgaatatgcaactttttataacacaggattcataatccttcacgatgatatacaaagaaaagtgaagtcatgatggactaacctgctctgcaatagaatggacttatcactcaaatgaccctctccatcacagcaaatcattcccacagcaactatacttctctgcagcaatca

SEQ ID NO: 8833 - DNA, 802 bp, Arabidopsis thaliana columbia
aaatcatgttagactacggcgccacaaaacagagaactctttctataaaagtcagagcccatcagaaagagaagtcagaggatacaaaacttggaggtgattggtgattgatcttcttcagccattatctaacatatacacctatttacaccacaaccaaaagatcctaaactttctcatgaatcagaaggtcttaagattcataggctctcttgtttttagcatcaatgactgtttaaaagtatcgaaattttaattgaatagaaccggagataaaagagccgcggtttcgtctgaagtgtcttaccattcttcaagccagttttgagcatcttgatcttctgttgtgtcaagcgatttagaagtttctagagggagaacgttatcattctccaaatggtgatgaattcgcgagattatctcttgaggaacttgaaattcgcggttactaatagcttcccatttaagaccattgaaccagggatgtttcttgattgattctggacctccttggctaccaaaccgcaggttttcatcaacttcaagcaactacacaagagttttgaagatgcgggtaagacaatgagaaacaggagatttctacttttaatagatgtgaaattggaacttaaagatgagacctttgtgatgagatcttcagcttctgagcttagaactcgagggaaagttagttggccttttgcaatcttctgaaacgtgtcgagctcgctctctctccatgacccgaatggcatttcccttctagcatatagtagataaaactccaagagcccactttttg

SEQ ID NO: 8834 - DNA, 353 bp, Arabidopsis thaliana
tagatacataatcccctcagttaccgagaacttgcaatgaaaccaaatgtttttcacagattcatagaccctggatatatcggttcttgttactttaatttgcatgttaaacctataaaggagacttaatatgaaaactctttatgggatttttaaaagctatttggtcacaaatatccgtctttttcgattctgaaatatgcaggtaacagtcgagagccagacatatcacaagtcctgcttcaagttctcacatggaggttgcccaatttcacctgtcaactacgcagctcttgaaggaatcctgtactgcaagcaccatttcgctcagctcttcaaggagaagggaagtt

SEQ ID NO: 8835 - DNA, 1302 bp, Arabidopsis thaliana
tcaatatttaccaagagctcctgttgtttgtcctatgcggttcaagttctcttccaagatcttggtgttaaccctaagatccacgagattgataaggaccctgaatgccgagagatagagaaggctcttatgaggctagggtgttcaaagccggtcccagccgtcttcattggtggcaagctcgttggttcgaccaacgaagtaatgtccatgcacctaagcagctcgctcgttcccctagtgaagccatatttatgttaaacaacaacgaaggagtatttatgatattaattagctatgtatatgttattcaataaggaacaaaattgagccaaatctttgtaatgtgttttttggtattattattggttgtataacattgggaaagtgtacgtataattataagactgttatattgattcgaaggtaaaaaaatccagtatgatccaagtcaaaacacataagaagcggaacagataactcacaaaggcagacatattaaaatgtctgcaacatataccgttacatcgcttacaatcatttttcctgtacaaagaaagaacaacaacaaaatcacactgaataatcaaagaaacagtgtatggtgtatgagtcgaagaaagtttctatctaggtgcaactgagggagcaactccactgacgaggtcagagccggagacatccatcgatgtataatgatgcttcatgattgaagaattcgatgacgatgatggatgagtcattgtctcagagagatccgctgtcttggctacatgagattccggcatcagttcccatatgatttctagttctcttacaacttctgccattgaaggcctcgcatctgtctcctctctgcagcatcgcagcgctaaagttgcaaacttttcgaggcattcgtctggaactgagctcattctcttatccacggttgataatatcgaaccagactcgtaggcaatgttgatctgacagaaacaaacattccacacaatttatataacgcctaaaaggaaaacacacgctcttattatctactcagaattacctctcgcacaatgttcttgccatgtgtgattggctgcattccagtaaagagctctaacaacactacgcctagactatatacatcacttttgtccgtcaattgatgagtcaagaaatattccgggtcaaggtaacctgcaagtcgacaaataactctcagtcatgagtttgagaaaaaaactttagagaagcaatgcaggaatgagatcttacaggagtcccttttacaacagtagacacgtgctgaggtgagat

SEQ ID NO: 8836 - DNA, 439 bp, Arabidopsis thaliana
gccagtgtgctctaaagaacacctataccattaccggtctgccgccaggtgcgatacgacgccgggggcggattcgctgaaggctgctgcgcatccggcaaaaacgccgtatctctattttgtggccgatggtaaaggtggtcacacgtttaataccaatcttgccagtcataacaagtctgtgcaggattatctgaaagtgcttaaggaaaaaaatgcgcagtaagtatatcgtcattgaggggctggaaggcgcaggcaaaactaccgcgcgtaatgtggtggttgagacgctcgagcaactgggtatccgcgacatggttttcactcgggaacctggcggtacgaacttgccgaaaagttaagaagcctggtgctggatatcaaatcggtaggcgatgaagtcattaccgataaagccgaagttctgatgttttat

SEQ ID NO: 8837 - DNA, 569 bp, Arabidopsis thaliana
catgccattcttaatttgctaaggccctatctaaccgacaccgtattggtttcttgtctcgccaacccctgcacgataaccaatctccaaggtatggaaattccagaagaccacaatcttgaatcattgaattaaaaggaataaacgttgaagcaagtcttaacttaccacctctttttttattattatttcttaactcattaaaatcacctattaaaaaccaaggattatcccgagtcacaccaattcttgttaaccgttcccatacgtaatctctcttttttggaaccggatccccataaacaaaggtaaggtgaatagtttttcctttataactggccgcaacatcaatgaggcgattactttcgaaaagaattgaaacattaaaatcattattataaaaaagtgctaaaccgccactacaaccaataggatcaaccgtttttaaatttttataaccaaaatgactgacaaatatttccatatataaataagattgctttgttccattaaaacaaaaaatccggccgatgttgttccataaaccctaagataccgattgttgctta

SEQ ID NO: 8838 - DNA, 588 bp, Arabidopsis thaliana
ccctaaattttaactaaacgaagaaaatgttggtttgagtttagaaagaacggttagagtttagatttacgattaaaggaagttaaatattggtttgggttcacgaaggagaattaatgtttagattttattattaaacgaagttaaatatcggtttaaatttataaacatggtttaaattttacaattaaacaaagttgtatatcagtttgagtttacaaaaacatttaagatttagattttacaattaaattatgttatcaagattgcggccttttagaatttccattttttggagattggttatcttggagaggttggcgagataagaaaccaatacgatgtcggttagatagggccttagcaaatgaagaatggcatgatttattcagtaattctttcattgaatatctaactatgttagcttcagatcattctccggtgattgcaacgattgcggataagatccacgtgggaacaaaattttcggtttgataaagatggattgcaaagatgggttatagaggcgatttccaaggttggaactagatctgggttagagagggcaatttgtgagaattacaaatt

SEQ ID NO: 8839 - DNA, 479 bp, Arabidopsis thaliana
caaacattacacataggagggccttgcggcagatgtgtcaactgagtagaacctttcttacggggtttcttgactacctctccttcagtagtggtcaccccaataggggtacaaccagatgcttcggccagcgcttccaataatacacggggtttcccaacttttatgatttctggagttccactaacgtcaccggtaccactagcactttgttctgtattccctgtggcttccttggcggctgcacgatcaacttcgccgcggaaacggcttcgttacggatgctttcatccacattgagactctcactaagtcttagtgcaggaaggccaagaacaatttcacgtatgtctccttcttcatcgctccaaagataatcactctcgtcaaaattctcattctcttcctcagcaattttagacttctcgggattactcataatttcttctttgcagagatttagaataccacgtcttcaa

SEQ ID NO: 8840 - DNA, 825 bp, Arabidopsis thaliana
tgtgcttataaacataaaactctttctaacctttcttggtaagaacgttgagtgtttatccttttataatcgtatgtttcccacatttacggaaaaagtgagtaatttgccaattggatcagcaagagaggttactactttatgtaatcaattacttgtaacccacacaatatacacaagaactcttgatttgccgcaatcaaatatcaactgctgcacaaaacataagttctacataactgctgcataaaaatctcatatacacaaaagtcaataacccaataacattctacataaacaaattcatagcttctatcacagtatcatcaaataggatcgagaaaaataaacgcataaccgagagggatagcgaagatttataagcaggacagtgaggtgatgaaattgcagagaagctgctatgtaaggattctaaacgagtttgaggagattctgcttcagaaataccagcagcggaacatagagcgagaggaagccatcctctggagggggaaagcggacgtctttaaggctaccttctccacgaaagacacatggaatcatatccgaacatcatcaaatcagagggcgtggcatacaggagtttggttcgctcacgcaacgccaaaattctctttttgtgcttggctcgcaattaggaatcgtctttccacgggtgatcgtatgatgacatggaacaatgggactcccacgacctgtgttttttgctctagccctatggaaacacgagaccatctgtttttccaatgctgctattcttctgaaatctggacatcaatcgcaaagaatgtgtacaaagatggt

SEQ ID NO: 8841 - DNA, 900 bp, Arabidopsis thaliana
caggagggacacaagtcaagtctacggaggtctcacaaccaaaacaggttagaaaagcgctatttacaacggcggatcagtcaatggtggcacaaatgggtgttgatgcggatgggccgtcaattgaggtagaaactgcaaaggaagttctccatgaagagggggaaattacagaagctacaatggtagtaaacaacatggagagttctattccattgagtaatgtgtcgggtgaggaaaatttggacaaggtgctttctaatgagcttgaacggggagaacaagtgttcatgtcaactaaagaggtggacgaagatgactcaatggtctcttctcctctgcagcctgaggatccggttgatgaggtggaaaagtttgcaaaaaaattaatggatgcgacaaggcttcaagaaggtgttggtgcagacaaatggcgatgcaggaaactgatacgggtaagattggagatacagaggcggctcgcaaagggaaaggaactgcgctacttctggggattagctcaaaaaagcgttatgctcttcttttttcatcacctcggaaaacgtttggtatcacgagtggagagcaagtaaatgaaggaaatgtcccaacacaccatggcacggtcaagggaggtatgggtgggaacaaaccaccaaaaccaaacggtggtaaatgaaagttttaacctggaactgtcaagggctcggaaataaggcaacaatcggttatcttcgggatttgtggaaacaacatcggcccaattttttatttcttatggaaactaaacaatcttctttatatatggaaaaatttgttggtcattttggttataaaaatttgaaaacggttgatcctatcggttgtaatggtggtttactctttattataataatgatt

SEQ ID NO: 8842 - DNA, 1667 bp, Arabidopsis thaliana
gtatgaatcctcaaaggcaagacatgaagacactgttgttcatgcttcctcgtatctagcagttggaggggaaggttgtgggtgcagatttggggctaggccggtttcaattcgactttgaaacagaggaggatattgttgatgttttaaaaatggaacctctccattttgaccatttgatggtttctctggtgcgttggagaccttctatagatccagcttatccatcctctttaactttctggatccgtgttcttggtgttccgattcaatattgggcggaaacaacttttaatgacattggtgcagcgttgggtgaggtcaaagcagtggatgttgatggtggccgcgttcaggtggagctaaatgggttcatgccgttgtgttttgatacggaggtggagtttagcagtggagagaaaaccactatgttcttgtgttacgaaagattgtttgggtttgtaagagtttgtttcatgatgagtcaaagtgtgccttcaacatggttccaaatccagcagtgatgtctcaagctccaagacaaaaggcagagctacataaagagagtcaaaatttgagctttaggggagcggtaacaaatgagttaggggctgaaacacgtcaagtttagagggttcaaggcagttctttaaggaagcctgccgcaggtcatcacaaggaggttcgaaatcggtatcaaaatggttcacataatggggcaggctcctctcgtcaaccaaggtttctcaattatctgaagtatgctgaatttagggacgctcgagctggagctcaggaaaggaaggggaagcatacagaggtgttatctgagcaggtgctttctgagcttccagtggctgtggagagaggatattctaagcaggtccagaaagctctttttacgtccgaggtgtcggagatttctggttgcttggagtcagaaccggcgattcaagagtggcaggatccatcaaaggcttcagaggaggtggcagttttggcttctgcagggctggagcagatttcttctgggggtgttgtttcagtttcagaacctcttgaggtctccaatttgcagggggttttgaagagcaaatggcagaagatgaggtcgatgaagatgatctgttattggaggatggattagtgaatccggctgatcatgtggatgctatggaggagtatgaaagtgaagagtttagagggtccgaggtgaaagatgacggccagctagatcaagaagttgaggattgtgttgatcatgttggggaagtgtattaggaggatgctgtggatatggagtatgaggaaaaagaaggagatgttgggaaagggcgcaacctgaaaggtgttgcagctatgaaaggaataagttccaaaaagaggaatgttcaattgttctcatcgtcacggaagcggtttgcaccgaaagggagtgatcaattaattgagggagctgagccgaagaaccgggtcacggggaaggctgtgcgtggtggtgctaaacaccaaaaccaacggttgataaatgaagattttaagctggaattgtcaagggctcgagaataaagcaacaatcggttatcttagggatttatggaaacagcatcggccggattttttgtttttaatggaacaaagcaatcttctttatatatggaaaaatt

SEQ ID NO: 8843 - DNA, 574 bp, Arabidopsis thaliana columbia
gagatcccgaactgtcagacctttatgatttgaacagaaaccatcaggtttccatgcgtgtttcatccccacaatcacaacaaccaccacctgtgtagatgattgaataatcgtgggagttgtgatccccattctggaaacaaggcacgcagattgcacaagttgggtcattctcgggatgtcctacacctatatgctatatcattctgtccccagacagagccacaaacacctcgctgatcaagattcagttttgctagattcctcaaagaaacatcaggctcatcctggaacatcaaccactgcagcatattcatgctctccctgaacctctttttcatggtaggactcacagcagactttcgaggccgttccctagcttctttcaatcctagtttaacatcgtcatctgtaggtaagagagcagagactaactctgaaatcttggccgggttagctctaacgaattccactaggccacgtttagagcggtatttcttaggacccccacagaagcaagcctctacaaaccaagacgcaaaaaatctgaactttcactccaaacagtcacaaa

SEQ ID NO: 8844 - DNA, 556 bp, Arabidopsis thaliana columbia
atttaaagagaaaggggatgaagatattggtcttcgggctcgtgtaagagtgcagaagagcaaggttagtatcaaggcaaaacatgttcttataccatgtcacattattttagatataaaagtgattttgtctatcccttttctatttgcaggtttcaagaccgtataagcaagcagagtttgagattatgtttggggaaggagtcagtaaactggtacgcatccgtggctgaacaatctctaacaatgcataaacgtttttccttacattttaactaaaaacctaaatttgtagggatgcgttcttgattgtgctgaaattatggaagttgtggtcaagaaaggttcctggtacagctacgaagaccaaaggtttggattctacattgaaaactcataattcctgaagacttttgattatgttatagaagtgggtacagagtatgagatatggttgtgttttgggtctctgttttcaggctcgggcaaggaagagagaaagcactgcagcacttaagggaaaccctgctctgcaagacgaaattgagaaggtttg

SEQ ID NO: 8845 - DNA, 618 bp, Arabidopsis thaliana columbia
  unsure (1)..(618): unsure at all n locations
gctgtttaccggctcattgtcaatggtgatgcggatgtgaattatgtgtatgaccaaacttccagttcttcgttaacactttccagagtaatattagtaccagaaaggccaaagcgtgaggatgttctactcagattaagaaatgagttacttgatagaacaggtagttcttcaaatatatctcctgagggaagcggaggttcctctctgcttcactgtgcttgtgagaaggcagaccttgggatggtagagcttttgctgcagtatggtgcaaatgtaaacgcctcagattcaagtggtcaaacgccgctgcactgttgtcttctcagaggaaaagtgacaatagcaagattgcttctcactaggtgagttggtcttcttagatccgcttatccaaaatgtccctaacattttctctggctaaatcctttggaaatgttaaaagttttcacacaagttgtgtgtatgttgcaggggagcagacccggaagctatgaacagagaaggcaaaaccgctcttgatattgctgcagagtcaaattttactgatccagaagntcttgctctcctttcagacacaaatggatacaatcacagacagtgctgataaagatgcat

SEQ ID NO: 8846 - DNA, 524 bp, Arabidopsis thaliana columbia
agtaacggccggatccccgggtaccgcgacacagcttggaaaactcaatgacttgcatttggaggtaataaagaaagaagacaagattacgaagacatctgcgaattttcaagacgatgtggcggatttgccaatcgcggatgtggtgcatgctgatgtagcggtggaggatgctttggataagcatgaagagggaatggcggttttactggcggaggctgataaactgaggtttgagacgcttaggaagattgtggacgttgtcacaccgcttcaagcgtgggagtttttgcttgccggaaaaagattacagctgtcgttgcacgaccggggaagagttagagcagatgtttgtggaggagtggggggcgccgctgtctgaagaggtgaggtggagcggggatgtcagacagagccacttgttaaagtgcgtgtcagtcagtagcgtataatatatgtgtaatatttgtctaattagagatgggtcatgtttagtgtgtgcttcatgtgtatgagatgttgca

SEQ ID NO: 8847 - DNA, 418 bp, Arabidopsis thaliana columbia
gcagtatttgcctacgtgcaacaaatgcataacaagttaacaactatgtactatcgtagcctaggaattacctctgaaacacgcaaattgtagtggatttcaggggcatagaggcagcacagtaaaggatccttgtcatctgaatcgatgtctacaaattttgggatatccggtacagttgaactaccaataacagcacttttctcagctgtaaccatttgcaaaaaagatttataagtcattaaagaccactcctttatacaataggaactaatcatatgaaaacttgtgttaaatggatcacatgtagaagctgatctcccaagaggtcttggaggcaatctagaattccatatctcaatacagttatcagctgtgttatctgtgcctttagaaacagaaaggtttcctgctgtat

SEQ ID NO: 8848 - DNA, 499 bp, Arabidopsis thaliana columbia
  unsure (1)..(499): unsure at all n locations
nnnnnnnnnnnnnnnnnnnnctaaagggataccgtgctggcgtctaacacttcaaccattcctatcagcgaactggccaacgcgctggaacgcccggaaaacttctgcgggatgcacttctttaacccggtccaccgaatgccgttggtagaaattattcgcggcgagaaaagctccgacgaaaccatcgcgaaagttgtcgcctgggcgagcaagatgggcaagacgccgattgtggttaacgactgccccggcttctttgttaaccgcgtgctgttcccgtatttcgccggtttcagccagctgctgcgcgacggccgggatttccgcaagatcgacaaagtgatggaaaaacagtttggctggccgatgggcccggcatatctgctggacgttgtgggcattgataccgcgcatcacgctcaggctgtcatggcagcaggcttcccgcagcggatgcagaaagattaccgcgatgccatcgacgcgctgtttgatg

SEQ ID NO: 8849 - DNA, 559 bp, Arabidopsis thaliana
gccattctaagtttgcacctgtatttcaacacgtcgcatatcagatgtctcacgttctgccctgtatcaccgctccagtaccaatcaagaagccagttgggttcatgcgtgataatgatcacagcatcactctcaccaacctgaatgagaaaatattaactttattaaagaaaaaatgaaaattgagtaatatgaaaaagacaagccactaaaatatagactaatccacttgttaatggcacttcagaaacaaaagaaatcacaaatctatacccgagtaatacagtatatagtaagtacacagtagttagccaaataatggtaaaactctaactaggtgacagaaactatttaaattgcatctataaatctatataaagcatgggaaagcaaaatgttacacaaactaccttctccttcactaatttagaaaagaaattgaactggtacacatcaatatcaccatgaagcgctagatccaaaccaaacacccaccatcctttaggtagctgcagggcaaaatagcttttcttttggggcataaaccagccacccaacc

SEQ ID NO: 8850 - DNA, 527 bp, Arabidopsis thaliana columbia
ccctactattaattcataattgtgactataatgcaagtagatggatatgttgtgtagcgaatgtgcattcacagaggattgtgcaccggagactaaaaggatgccattacaaagagaggttaaagaaccggttgcaaatgaagaaatctgttttttttttattgacatagattggttcatctcagcttgaggacaagctgaatctcactacggcagtattgttgaccatttgttagttttcgaagtctttggcttatggagagactctatagcaaattagcaataaatggttcttgttttcgtgattgttgagtaataaaaagagatatgatcaattttaaaccagtaacataccttttggtgtcttctctggacgctacaatcacggctatgcaaagctgctacgtttccatattggtcacaaagcaactgggcctctaaatgtcgactctacacaatatataaagaacatcccacgtattactaagttaatcagttatattgagatcaaaagatatagttaagta

SEQ ID NO: 8851 - DNA, 346 bp, Arabidopsis thaliana columbia
gtgctctcaaggttttcggttcagcgtccgcagcaggttttaccaccggctctggcgtggtttctggcttctgttccggcgaactggcctgcgtttgtgttgcggcaggcgttacgcctcatgcgcacttcattatctttcaccaccgggttatggatggtgtgcgcttcatcgctcgccttttcaggatcgtttgcaacgtaggaacgcctcatcgactccgcggcctggcgtagttcatccatcgacgctttcagttcgggcgtcaggttagtgaggctcgccttttcaaccttgttcagactgtcctgaaactcgtggagttttaactcctgggtcagttcgt

SEQ ID NO: 8852 - DNA, 532 bp, Arabidopsis thaliana columbia
  unsure (1)..(532): unsure at all n locations
tnnnnnnnnnnnnnnnnnnnnnnactatagtggcgctacactgatgtaggattgattatggttagtttgaaacagacctactatgttgctaatccaatttcacgacaatgtgacctcctcttcctcgtctgactcgaagagctgatatatacaaaccttctggacttgcaacacgaatagaaaacggcgtcgttttaggttacaaagttgttctgatgaaagataccaccgataccgacgacattagcttactcatatattcatctgagacaggcctatggagtttcaacactgtccaatctccttatcttttgaagcgtgttgcttggttcaatcctgttagcttgaatggaaacctttactggctttgctacaacaactatcgtgatcaccttgttgtatcccacaatttatatgctactggtacggaatctgatcaatgcagagttatagagtccctcatctagaaaacgatgtgtattttagaagagctttcacaacatcccaaggatctcttatgtatatgaaaatt

SEQ ID NO: 8853 - DNA, 863 bp, Arabidopsis thaliana columbia
gcttccgttcagatttatgcctctgttaagctctcctcgaacaatactaagatccaccatgtttggaacagaggtctttatgtccaaggttactctcccaccattcatcctactacttccaccgatctctcctccttctccacctttgatgtcacttcaggtatccaaattctttctcaacctttgatctctcatactaccaccaaattctttctcacttcagcaaggtttgatcttacactgtttctttctataggatttgcaactgttaatcaaaacagcggttcccgagctttaaaagtgactcacggagtagtcaacgcgatatcgtggggttttctctcccggcgggagcagtaacagctagatacctccgccaaatgcaatcaataggacccacttggttctacatccacgcagcaatacagctaaccggtttcctcctaggaaccattggcttctccattggaatcgtgctcggccataattcccctggagtgacctatgggttacatcggagcctcgggatagctactttcacagcagcggcgctgaaacactggctttgctgttcagaccaaagacgaccaataagttccggagtactggaagtcttaccatcattttgtcgggtacgcgtgtgtggtgatgggcgtggtgaatgtgttccaagggtttgaggttttaagggaaggaaggtcgtacgcaaagctcggttactgtctatgtctgtcgacgctggttggtgtctgcgtggccatggaagttaactcgtgggttgtgttttgtcgaaaggctaaagaggagaagatgaagagagatggtttgaccggtgtcgatagatgcagtgggagtcatagtta

SEQ ID NO: 8854 - DNA, 656 bp, Arabidopsis thaliana
gttatgtatacgggtagtacactcattgatgtctggtccaaggaaatatatgtatgaggaaaacattcaacactcaatagaagaaaggaagaaaacaaatgatatgaagtaccttggcaaccgtccgaaaggtatggattcccatcaaaaccttgtaaacacttgcagttataaccctttccacgagtagaatcaaaacatgtgctgttcccaccacatatgtttctacctacaacttgctcacatgtctggtttccaatagaccaatctagtaacacagggaacctcgtgacatttcgcagatccttaagatcttctaaagaactgaagttaaacataccatcttcaacgaaaaaagcgtactgcaaggattaaagtgctccacggaagtcatgttttcgaagcgagatggttgagtttcaattctatggctatccaaggggatagatacctctgttctgcagcaaccaacaccattacatttactatttggcggcgggggagtatcgcataatgacatacatccagttgagtagttttgtattccaaaagtgcttagaagtgcccaagcgttacagcctactaaagtaaacttgttattgggggagaaagataattaccaaccgaaaccagagggactccgaatcattatttgt

SEQ ID NO: 8855 - DNA, 1672 bp, Arabidopsis thaliana
gttgttcgattaaaaccttctcaagatatagcctcctcaaagaccagtatcgatttgcagccaaggttgaaaaaagaaaaaaagaccacaattttgttgttttactgacaagttttcatggtcgaacatccatgactcaagagcagccggaaatgttttagatgaaagatataaaccaagttgaaacaagaattgtcttactggaacgaaacatctttgaaaataacaattggtccctcaaagtttcaaccttgaaagtcagtttaatttatctccaaaccatagccaccggatgcttcaatctgcaatatataacaaacaccattgaaacataacgtcttagtggttctactgcgacatttcgatataatgagggacatttactagaatgaagggaaactattgtggatacagccttagcatttgataattctctaacttactttattgatgggtgtgacaatatggaagctaggtttattatgggttgtcttctagaccatagttgtacacaatctcaatctgcatcagtcacacacacaataaaagatcagcagttgcgaagaagaaaggtagatcatgaagaaaaaagtgataagtgttgagaacaaaaaattaccccagcaggcggagtcgggtttctacagaactttgagccaccaggagcccatggaactacaacagaaaatgtgtgtcatttagtgtccaattcgggaagtggactactcatgttatctaatctacgaggaattccataagcctgacaaagagttcttgctatcaaatctaccacgattcatatatgggtcgagacgcttaccgatataaggatcagggtgccgccatttgttgtattctgcttcaccatgagcaatcagtttgtcgattctgtcgacatcctcctacaaataccccaatcaaaggtattagagcattgataaagcccaagaatgaccaaatacaagttcataagcccatgtaatcaggtttcttagcaagatgaggattgcatctctccttctttcccttatgaaatatcaaatctaaaatgaatttgttcctgttaacaatctaaagactaataattttatttcctttgcactataaaaagctttcattagctatttcatttcactcttattttctatgttttggatctagcttaacaatgctctaaaagcttaaatcctactaactttgaattctcctacaaaaggaccatatcaagagacaaccaaagatgagagactcaatgtacattgtggcagtagttgaaaaaagaatttcataatatgattttcaactccagtttaaaaaggtacatcctttacttgaattcaatattggaatgataatgagtggaatatgcaaactcaacacacaaatcattgaacagcaattctatttcccatatctcctacctattcactttttttttataatagcgaagaacctaaacaacttagcaagagaaaatccagtagaggtgtttcacaacaaaagtcccaattttctcatcacacacacttagatgattatgctcatcatatctctaaagtctctctaccaaattaaatgaaacaagacaatatcaatttccatttctacggattacaaacattttaacaatcgacaatgaaccaaggcaaagagagaggtatgacaatgaaag

SEQ ID NO: 8856 - DNA, 467 bp, Arabidopsis thaliana
aataatttttaaaaaaatatgtacaaaaataaataaataaaaagacaaaagtgaaaaagagatgtatgtgaagaatatggataaatagtgaagacaagacagttattgtcttgcccttgagacgtatctaatggctaattctagtatcttttacaaagataatgagtccgattatgagagctccaccgtcggaccagactcgagccgccgtacgagttggctgagcagctctttcacggctagccctagttgtagctccatatctcatctaagtaaccatggtctcaacagctataaccaatcaaagcctcacaaagccaaccaagtcgcatgggaagctatggccaggctccgtcggtgctgcggccgctgcggtagggttagaacattttcggcttttaaagaggttgggaagtggtgacatcggaagtgtgtacctctgccaaatacgtggaagtcccgagacg

SEQ ID NO: 8857 - DNA, 561 bp, Arabidopsis thaliana
cccctgtcaattccaagaaatacaatattgtttaattgatgaatttcgtaatgtttgatggcttaagccttaatccagcctcgaatctgagcatccacaaagttgccaatgtaattgtaggcagcttccgagggatgaattgagtcccaaaacaagtgatcggagtgattcggacaagtctttgtaaggggattgcacatgaatgttgtttccaagtatcctgttccgcaacatcctttcttagtctccttgaatcctgttttcatgtgtacaacaatgagtatctattgcataaattattaagattgagatttagataacttgcgttacaaggaagaaatggtatataccgtatttactagggttttggatcatgtccatcaatgggtcgtagacgttggcgtaaaggaaattgcttcccggtagagacgcttggatctcaggcagtttctttactagtttctgattgtacaaaccggagtctttgttttcttgtccacacaaaatctcaaaatgtttctcattttcgcggtcatttggattggtaacacccattggtgg

SEQ ID NO: 8858 - DNA, 612 bp, Arabidopsis thaliana
attctaaaaatatttataaatggtcattacaaatccaatgtcatatgataaactcccatggttccaaaagttaataacataaacaagatagcaaactgatacctaaatgagaataagataccatcaaagaagcttaaagttctcacccgacttacattagaagcaatccaaaataaactttcaagaacaattacccaaaaacaacattcaagaacaattccccaacattctaatttcatcctcaaacccttactcggtacaagtgctcaacttgtgcccaaccttcttacatctacagcaccttggcctacccacctctgtccagctgataaggtggctgcaccacgcacactttcatttcattcaagtcgagcaaaccaccattgcgtttaccattgcacaccttccaacggcatctcatttgaaagtaccctatggtcgattcataagtcagccctttactctacaaactttgcataaggattattcgcttcaagacacttcttgaagaaagtgtagtattttgaatgagacatggaccaccacatgaaatgatggtttttgtccattcgaacggaagataatgttttcttaaaagaactgcatatctcc

SEQ ID NO: 8859 - DNA, 445 bp, Arabidopsis thaliana
acaaggtggacttgaatgtggaagcagaagaagcagaacaagacgaaaacgatgtcgattggcaagaatgctgaaagcatatggatcaaccattgattcgtttgcaaaacacgctgtcacgatttctgagcgcataacacaaatcacaaaacagacaatcctttcatgagctataatgcatgctgattactttaatttaattttattggttaaatgctcatatgacttattaaacattcaaaaaacccttcagaagagttacattgcactagcaggaggaatactttgttcgaatctaaagaaattctcaggatcatactttgctttaacttccatcaatctcttaaaattcccaagaaatacttcgatccatagatcttagcttcttcaagattggtctcaccactcggattgcttccgacatcgatatctctgtaattcaaga

SEQ ID NO: 8860 - DNA, 667 bp, Arabidopsis thaliana
gatcccctatacataattctcaataatctaaggtattttagactgtaacaagaaaaggtcaaacacacatacatacgtacgccctgataacatcgtaatcttctcttcgtcggaagcttctttcagcaaatctcttcgaggactcttacactcatgacatcccctccttctcccttcgctatttcccctgcagccgccgtagcagcagatttgcctaatgaccctgacctgaccatcgttggtttcttgaagtcaccagattcattaccactctatctcttaatcggaatgatcgtttacaccgtctctattccactactgcaactgcaggtttaggcagaaaacaaaacccttgaagaaggagattttgaagtctctcccgaaattaacattctcgcaggaatgtggtgtgaggttatgtaatagtagatgtgtgatatgtcttgaggattacatggttagtgacattgtgagagtgttgccacattgtggacatcagttccacgctttttgcattgacaagtggtttcagttatgctccacttgcccgtcatgtcgcggcatcccagttatttatcaccctcttttaaatgtattgatccagaaatagttgattatttaactctgtacatacatctatggaaacaccataaacttttaacctatt

SEQ ID NO: 8861 - DNA, 954 bp, Arabidopsis thaliana
ttttatttatcgttattccaaagtttcaattttttattgccacaccaaatttatctaaaacccaccaaaaatctgagaaatcaaaataaataaatttcaatgatttttttaaaaaaataaaaaataatttgtctcggacactaataatgggcttcaaacactaaggcccaaaagataaatatgagccgtccaaatagaaaagcccaagaatccgcgtgttactactcatggcgagagagagagattcatcagaacaatacttcgtttgtgggcaatcttcggaagaagttgctgactccacagggcatatcgttgcgtaagggcgtgaaattaagccaatatgcgatagggtagagagaccaaagccacatcggtatattgtaccagcagagcgcgaccaaaacacatatgagccagcagtaaaacgaagccaattgatcatcgccattaaacgttaagagagcgtaaagcctttcaccttgtgacgcagcatcgcccagtaatatcatcggtctctgacaaaccatccttattctatcgtacctcatccgcagaatgttcacatcgctcaccgacgacgggaacgagtcaaactcttcctctaactcatctaggtttggcgattcgagtttccagagcttcaagtcgttgacaatcaatggagaacgaggattttctctcttgttccaaaactttcgtgtcaggaacttgtgtaatcccgaaagacctacaagtactatgcaaggcacaacaactaagtaaatcgccaaccaaactatcaaagagggccaataaagaaatagatcaaagaaagcaagcgcacgaactttccgcatatcacatgttgagtatctggtattcgctaagaaccaaccacaccaaccgtatagtgccctaaagattctatgacctctcgcaattaactttggttctctcagactgaaactcttactc

SEQ ID NO: 8862 - DNA, 514 bp, Arabidopsis thaliana
cttggaacaacatcaaccacgaacagataaaagcaataaaatgctaagaaagaagaaccaaacccaaaatatcaattcagaaacatcaaacccaagacatgcacgtataacgtattagtaactctaatggtaacattcgtagagcttaatatcaagcttgacgcggaaatacttactgccgtcaatgtgatcggtcgttaacgtagcgatccctcgagtcatgatgaagtcaccagtcccaccaacgatcggtaggtctctagtcggctccataaacggattttcacccattatggtgaatgcccctttgtgttgtgttgagttgaataccactgtccaagcgatccaagcgtcgtatgttgccttaccgtggtagcagaagaagccttgaacacgagccacgggtttcgagagatagttctggtccattgtcacagggtcgtccataatcacaaacttcccaaaactgaagtctcctagtcctaaaggattcacaattgctgctgacgttgca

SEQ ID NO: 8863 - DNA, 637 bp, Arabidopsis thaliana
gaagatttcaagcttttgctgtggagaggaaggcaaaacccttcttggacatgtaagacatttgctctatcctcctagtgtttcaaatcgcaaattcttaaactggtgtcaatttttaaactgtatatcaggcatgggaatgttggctcgagaccggtggagtggatctattggatgaagatattagcagctcgtgttctccagttgaagttgaagtcgctcgatgtgttcagattggtctactctgcatccaacagcaagctgttgacagaccaaacatagcacaagtagtgaccatgatgacaagtgcaacagatcttccgagaccaaaacaaccactctttgcattgcagattcaagatcaagagagtgttgtgtcagtctcaaagtctgtgaatcatgttacacaaactgagatatatgggcgataaagtttgctttattatgtattaactgcagactgaaatgtaataccagcaatagagtgtaatcacttaatttaaattgtacattacgatagtttggttgttaataaatatgatgttaagaaagcttacgtaattatactgttcgataaaaacaaaaggctatcaatagaagaagatgataacacaccacatcaagtaaaaaaaaaaag

SEQ ID NO: 8864 - DNA, 550 bp, Arabidopsis thaliana
acacatttgaaacatggcatacgccacatttgccgactcatgagtaggcacaagtcggtttaataaagcaagagaaccggagatatccctctctcgggttattaaacgtagagattcataataaatagccttagagtggctgcttactaggaccaacaatatgtttttgatggtgttgttatgcatgtgctgcttcttaggttgcagagtaagaagaactagctgttcaaattcaaaaccagctcaaaggactataaactgcaaattgaaattaagaggcgggaagttaaaaaccgagtttgggatcccggaggttcaggtttcagaaatttgaacgtcaatcagaagctacaatgacattgtggttatgtttaaatagtcaaatgttgatgagactgagttttttcttttgggagttaagaatggttcatggcaacttcttcttcttgcgggcaattttcacatatcaacaaacttcttcggttcaaatggttaggcagataatgcgactccacaacggtcttaatccgtgggagaatcatatgtggat

SEQ ID NO: 8865 - DNA, 565 bp, Arabidopsis thaliana
atgttaagtgtagagacagaccaaaactacttttcgacacggtgtgtgctttgaaagagttacaattcgttgtgtttcacgccgtcgccggagctaaaggctccactgcagagcaagaatatttcataagaaagaagaacgggggcacgttagaaacggaagggcaaagagagagactaaggcattgtttggttgctgcgatttcgagacgtgcttcacaaggattgaaactcgagattcggacagagaacaagatgggtttgttgtcggatgtgactagagttgtgagagaaaacggtttatcgataacgagagctgagatgtgcacgcaaggtgagattgcggttggctcgttttatgttacggatgtgaatggtggtgagacgggtcctagtgaggttgaagcggttgtacgagaattgggaggagcggttgtgtcagcggttaaaggggttggaatgatgccgaggaggattggttcgacgagtgatagtgtggagcaggacaaagctaagtcgtctattgggagaatgttttggtctaaattagagaggttgtcaacgtc

SEQ ID NO: 8866 - DNA, 891 bp, Arabidopsis thaliana
  unsure (1)..(891): unsure at all n locations
tttcgcgagcacatgttgctgcttgtgtgtaaccataaagctaacccttttggtttattgttattgcataactttttttttttttttgtaagccacaagaaatgggaagagagagccctacttcgccagtgccaaccgccacgcaagacaagcctatggacaccaagccaataaagactatggaagaaccattggatttgggaaatcgagctgggtcgccaaggcaaacaccttgttcaccagtaacacctattgctcaggtctagattgcgagtaataaattacatacacaatctgagatacaaatattttacctagcttgtatgttttgatcccaggttatacccgactcttctattgttgctgtttcacctgcttattttgagaaggagagaaccaatatacgccagccagtgccgggtaagcgtgttccaatacgttcttgcttcctcgacacaactaagtatagcgtagatcctaggatcagtgctctgtttaagagcagaaccaaggaacctgcatacacacctctcccaaagttggatgatggagagttccagacatttaaaaggctgcttgaagatgatccacagaggtttgatccttgttaatctcagttttattagaacaagacacaatgttttttaaatctaacatccaagctaaacagcgagtacactatctgcactgggcacacagtgactaacaaccacttcttggacattgcaacgaaggagacatgggtacacactgaggtattatgagcaagaactaataatatttcatgcgttcgtagctanaatgggtttggtgacatgacttactctattatgagttgcagcatatgcagctaattacaggaatgctgatgaaacgccggggtaaagcata

SEQ ID NO: 8867 - DNA, 1222 bp, Arabidopsis thaliana
attaatatgcgaaacctacaatggcatgtattttttataaactgaaccatttcattttcttgattacaaaaatctgcataaactaggaaacgtttgctaatcatctataaagctatcatgtgaatgtctctgtctttgaactactaatacagaagcatttacatctaaagacgaagccaagaaatcaccgacagttccaagctccggacactcttcccaatctttcattctcaccgtcatagggcaatctcctgtgctctttccgaccacaaacagtgaatacatctctccaatctctcttagaatagtcagcgtatgcggtccattgctcactagcttctctatgaaccccacttgtcccgttgttacaaatctgttgcacagtggaaaataatgtcaaaagtagtttctttgatggaaactgaactttccctagcttagataagaaacaaagaaacagagtagcggcgggaaacagagctcttctcagaaacagagtatacacaaaacagagcagtgataaaaacagggtataagtaaggtacctgttatagaattcttctaagaagctccgatctgtttcttgttcagtttgattccttcccagaacttccatgaaaacctcattattatctcgtgtcatagcatttccaacaggagtctctgcctttgattcctcggagacaaactgtataactgtgagatgaatcagagtattattcgcgagccatctgcacagagcaagagcctcacgatcatccggaccaccaaagaacaatgtcgcgacgtgttgtacagaatcaaacccgtgcggctgctgaaatccggttatgttacggtccacaaaaatgccaatggaacacggaccgtgccttagaacattacggttcatctgtctgaacagttccccatcgtttgtagtcttcccatcgattctctggtgtttatgaaacggaagaaatacaatggaaactcgaagatcctctgttgcgttacagatctcttcgtgcatattaagcatctgagtcacgagcttcacttgttggatcaagattttgctgtctttagcaaacgaatcaatcgaatcgttgatctctaaaccttcgttggtcccgaattcgtcatctccattcgcattgcctccatcttcgtcgtgctcatgatacacagttccgattttcgtttcttggggaggggtacaaggtgcataagcagaggtgta

SEQ ID NO: 8868 - DNA, 594 bp, Arabidopsis thaliana
taacgttttcttttgaatatttgatacattaggctagaactcaggataggagaggaagtgaatccagaatgatgtttgatgggagaactcagtggagtcacgcaccggtgctatcgagtgcgtatccagttcgccccggtgaagatgattgtctgttttatatgaaaaaccatctgtgtgaatggggaagcgagtgttgttacaatcatcctcctctacaagtgagaaagaaaacattatctcaattaatttggctaagtataatttgcagttttcctcatttcttatacctttgttactacaaacaggagattccgtgcaggattggtaagaagctggattgcaaggtacatttcttggatgtcttgttattatctcaaaacctgattaattcgattggttgttgtggtatgagcggattataaagagtaaaaaaaacgtagattttcttctgctttaatgcgttcgacttgagcgtcaagtaacaagaattccaaacttctatatgcattttgttgcagttttttaaggcaggagcttgtaagagaggctcaaattgtccatttaatcaccaaaggaaagggatggtgatag

SEQ ID NO: 8869 - DNA, 901 bp, Arabidopsis thaliana
ttcgttgtatccagttctttgatgtcctaatcaatcatacatttctgaagctcttacactggttttaaaaacacaaataatccatacaaaggagactacctctcgtattccaaacattcccaaccccactgttatagagactcaagaaaaattgtttgaggaagaaataaattgctgggttcgcctacgctgactccttgttcactagtaacaccaatagctcaggtttagaattatgaagaccggaatgttcctcatccaattcctatattcttatatattcattgagtaacctgttttcggtttggaatactattattatgacatgttattcccgacacgcacaaggattttgcctttgatgaggttaaataccgcaatttatcctcgattgttgcatcatcacctgcttattttgttcaagagaggaccaatatccgtcagccgcttccggataagcgtgttcctaggtgctctcgcttcctcgacacagcggagtatagcgtagatcccatgattagtgctctgtttaagagcagaaccaagtaacctgcttacacacctctcccccagttggatgaagaagagttcaaggcatttaaagagttgcttgaagatgatcgagccaggtttgttccttgtataaacaataaacttgtttgtcaataagatttttggtttgaaaacctatctttctttaatacagagaattcacaatttgcactggtcacaaagtgggtaataaccacttcttggacattgcaagaaaggagacgtgggtctcacaaaggtaaatttagtaaaatagagatatatttattgtctacacaacttgagaggaatcatgatgaggtaatattctatatgatcagcatatgcagctactacagaatgtgatgag

SEQ ID NO: 8870 - DNA, 748 bp, Arabidopsis thaliana
tcacaaaatgttaatacataaataactcaaaaggaaagtttgattagtcaagagaaatatagctcacatctcctctgagagtgacagcaatcccaagaggttgatcttccctgatcttgaaagtagcaatggaagctctagctcgtgtcttaataggtttctgccctgtgataagcgcgatatccttcatcgcagcctccaaacccttgtcgttctgcgccgcatctccaataccacaattcactacaatcttctgtacctttggaacctggtagagaagatgtccaagcagatatacaacaatgatgagattgacaaattcacattcacatttgtaaatggcacatcccaacagcacgattttatcaacacaacaatcttaaatctaggcttcttcactacattttctagaagaaatcaattcaaacttatcattaaaagcaaattaggtttaacattcgctcaaaaaattcgaattcactgagaattagacttcaatcaatcgcaacagaacaaaaactaggtttgagctcagaggggaaggatttggggttacatggtgaatattaacgtacttgaactcttctttgagcgcagggataatcctctcgaggtaagcggttttgaggcgttgagttttctcggcttcagatttctcgaccagtacagttccagacgccgagacttcaccacgtttctgagcggcggagagagcattcgtgcggaggatggaccgctaatggtgaga

SEQ ID NO: 8871 - DNA, 878 bp, Arabidopsis thaliana
gagcaataacggaacaaaagcgtggatagcagctgatgtacattccacgtaactacagaaccattcttgcacatcaagagaaatttgcaaaacataaaataagattaaccagatgattcaatcaatggaatatgctagtgccttacggataatcaataacaatatcgccaaaggtttctactgggttaaatagctgccaacaggaataagtaaacttttcacttaaaacctcaagcaaaggggactaaggcaaatatgtgttggacacagagatacagaaagtatatattatctaggcacacagacaatacctctaaccaagggtatgacctggtgagctcatatgttgcgaggcctccatctgcattctgacatcagaaattttcagctgattagacaaggaaactgttttggttttcaaaatatgcatttaaaaaacaaaaggtcaacagagcagaaagacgacatatgactgatcgaagcaccaatctgtattagaaaccaaatctaacctgtaaagaaatgataacattaacagcttcatataaccgttttgcatctattggttcaccaacaatcgccttgggaactttggatagcaaaagagcagcctgaagaggaattacaaaactaattaccaccagaaaagaaatcctgaaaggtaactctgtcgcattattattactttcagtccttctgcggtgcagtcagagatgggccaaccgtgatctgcagttgagaaaggccaagcccctttagaaatgtggcgataccagtaattcagatctccagggcagtcttctaacacctataccatgaaaagaaacaatcatgagagggaaaagaacatccaaagcaatcagataaagcattaacga

SEQ ID NO: 8872 - DNA, 598 bp, Arabidopsis thaliana
ctgtttctaataaaactgagaataacaaggatcaaacctttgtggatcatctgcaagcagccttttaaatgtctggaactctgcatcatccaactttgggagaggtgtgtatgcaggttccttggttctgcttttaaacagagcactgatcatgggatccacgctatacttagttgtgtcgaggaagcgagaccgtattggaacacgtttacccggcactggctggcgtatattgtttctctccttcacaaaataagcaggtgaaacagcaacaatagaagtgtcgggtataacctgggatcaaaacatacaacctaggtaaaatatttgtatctcagatttgtgtatgtaatctactactcgcaatatagacctaagcaatcggtgttacttgtgaacaaggtgtttgccttggcgacccagatcgatcccccaaatccaatgcttcttccatagtttctattggattggtgccataggcttgtcttgcgtggcggttggcattggcgaagtagggctccctctacccctgttcctgtggcttacaaaaagaaaagaaaagtacgcaataacaataaccaaaaggggtagcttatgg

SEQ ID NO: 8873 - DNA, 1002 bp, Arabidopsis thaliana
tttggtgtccgatgtcactgcgtttgctttgacctgaatcttgatctataatctcgctcttgtttgaatctcgtgtttacttgtagaaaattgtagaactccataggctttttactctcatttgctgcgatccaaacgataaaagaaggacgaaattataagctatgtggattgcaactatgttaaatatatagagatgacttcatgtaatgacggaaacaatatatgatgatgagtacaagaaaaaacatgcaactaattttgtcacataattttgaagttcattagaaaaatgattatgcaaatgaaaaagtcggctaaactctttgaaaagtaaaaaaattcggctaaacttcatttcaaaattttggaacatatatacctttttcatcaataatccgtgcaagactcatatacatgcaaacacatctatagaaaatggatccttctccatcattttgagtttacctttgtgatttaaagcgatctttccggtgaaaaactcctttaggaagtgaagatgattgatatgagagaatttgtaagggaaatttataaagtctgctggaaatattttcttccgatcatcggaactataattatgattataaccaccagaactcatcatgatttgttcactcgccattaaagaagaagacgaagtcgtcgagggaagaagacgaggcttagaggtttggcgtgtgcgacgagccatgatgacgtgccaatggttcttgacggcgttatcagttcttccagggaaaagccttgcgatgatggaccatctgttcccatggatccgatgagccgctaaaagtctttcttcttcttcttccgtgaaagggtttcggttgatccttggatccaattgattaaaccatctcaatctacaactcttacctgcatatatacccaatacaattaattcatatgtatatatatcacacagtatcaaaattaaccctagcgtagttttgtatatatggacaaaccctagaagat

SEQ ID NO: 8874 - DNA, 902 bp, Arabidopsis thaliana
acaagcttctcaccgaagctgccaagaggataaacgcgagtgcgatttccgttctgtacagacggtttcttttggttttgccagctttctttgctgctcctagtttgctaagctcggtcagacctgaatcagaggatgatcgttggatggttgtgactcaaccaaagagccggactctgcgtatgcaaccagatccgcctcagaggatctccctagctttttggtgactacccactcgtaagaactatcaaacttgaacaaaccagagatcatggctccaaatttggtaactgacatggtgttttcgaaaaggagatacggaactatgaaagggaaggatcttggggctgggatgatgtttaagatggacatgatcccagggatatagcaaacaacccaagatggtaagttagcctctgggaagaacatcgttaatggaagaatgacgcagaagagcgtgaatgagtagaatggcaagataagcttccgtagcaagaagaagagaaatatcatatttgctttcttggcagcactcacctgtagtagagaaaaaaaaatgccagattaagatcagaccgagctatcaatatgaaaacttcataaacataaaatattctcaaggaagagcaagaggaaaacagtctcaatataattctcaatttcacctttgaccgaagaatgtcaaagaagcacaaacggaacagttgcattggacccgaatgccagcggtattgctgttttttatatgcctcataggactccggaagttcacagagacactgaggaaggaaaatacagctggatgatatcaaaaagttctgttttctaacatctggtaaataacaggaaacttctgagcaatttagttacataagtaccttacatcattcagataaatgaac

SEQ ID NO: 8875 - DNA, 778 bp, Arabidopsis thaliana
caaatcgaaaactaaaaaaaaaaaaaaatcatttacagaaatcaaagtgatcaaagctaatagagtaatagtctaatacagtgtgaatcggaaattagttgggtctcgttttccattttcttggtagtcagataaataaatattatgatgggacgtaaaaagaagtgagaaactgaagtaaaaaaaaaaaagaagtgagaaactacaatatgaataatcaaatccaacttgttgcttctgacttgtgagttgtgactgaacataaactcttcttctctttctctgcctctctctttcttctctctctctcaggcacacgatccacacacacacacaaagactcaaaacaaagtcaagaaccctaatatcttaagaacgtcctgacataaccataggatcaaagatggagggagaaaccgcagccaaagcagcggcaagttcctcctcatccccgagccggtacgagtctcaaaagaggcgagactggaacactttccttcagtatctaaggaaccacaagccacctctgaatctgtctcgttgtagtggcgcacacgtccttgagttccttaagtacctcgaccagtttggtaagaccaaagtccatgccacggcttgtcccttcttcggacaacctaacccaccgtctcagtgcacttgccctctcaagcaagcttggggaagtctcgatgctctcatcggccgtctaagggctgctttcgaggaaatcggcggtggtcttcctgagtcaaaccctttcgctgccaaggctgttagg

SEQ ID NO: 8876 - DNA, 566 bp, Arabidopsis thaliana
tagctacataaacacagaaattcaagccatattatctaattaccttcttgtattggagtagtactatttctgaacccgatctttccggtcaagaactctttgaggacttgaaaatgattaatatgagagaattgataaggaaaattgatagcggttgtggttgccaatcttctctccttatcgcagtctttataattaccaatcatcccagtcgcagccaccgtgccatcatggccaaggcctcgtggacggagcttggaccgttctcggccacgacgagccatgatgacgtgccaatggtttttaacagcgttatcagttcgaccgggaaaaaatctagcgatcacagaccatctgttcccatggatccgatgagacgctaaaagcctttcttcttcttcctccgtgaaagggtttcggttaatcctaggatccaattgattaaaccatctcaatctacaactcttacctgaaaccaaaagatccaatcaaaccaacatatatatttgtatataaatatattaacacgtagtttatatatgctttgtaagaaattaaagaaatga

SEQ ID NO: 8877 - DNA, 610 bp, Arabidopsis thaliana
cacattcaagtttatttttgttaaaaagttttctactttcgttaactctcaatctggtgttagataaagtttgaatcttttgtaactatatattttgtgtttctcatttttgttggttcgttcttgagcagagaacttgggagaggtcgaagttagctactacgcttgatcatattggtaatgttgtctcataatctttatatatgaaaaatctctactttatgcatctaagatctcttctatgaactttgcctttggttttgattctttctttcaacttgtgattattcagattacaagatgtctgatttctgtgtgttattaatttatcagttgtagccactgatgatgaaagaatcgcggagtgttgtcgtggatttggtgccgatgttatcatgacttcagagtcttgcagaaatggtttctttactgttttcttcataattttggttttttatttggtgggatatagagcctctggcttaagctctgtatcatttgggtgatgtttaggcactgagaggtgcaacgaagcgctagaaaagctggagaagaagtatgatgtcgttgttaacattcaaggagatgaaccacttattgagcctgagat

SEQ ID NO: 8878 - DNA, 1281 bp, Arabidopsis thaliana
atcatcatctacgtcacacctactgatctaagccgctacctcaactgtagatctgctggtcagtactagtctacccctagaccaccacaaaatctgcaggtccttcaaggccaccacacctctgtcaagatctactgccagatcttcaacaccaacttcaagacccacacttcctccatctgaaaccatatcaaggtcatctacttccaactcgccgtccaattgctttgcaagtgctgcaactactacagcagatcccacaatatcccaaatcaagccttcttctccagcgccagcaaagcctatgccaacaccatctaagaaccctgctttatctcgtgcagcatctcctacagtgaggtcatgaccatggatgccgtcagacatgcctggtttctcattagcaactcctccaaatctaaggacaacattacccgaaaggccactttcagcgacaagaggcagacctggagctccaagctctcgttctggttcagttgagccagggggccctccaggaggaagaccaagaaggcaatcatgttcaccatcaagaggaagagcaccaatgtactctagtggtagctctgttcctgcggttaatcgtggatattccaaagccagtgacaatgttagtccggtgatgatgggaacaaaaatggtggagagagtaataaacatgcggaaacttgctccacccagatcagatgacaagggttctcctcatggtaacttgtctgcaaagtcttcatcacccgacagtgcaggatttggaagaacgctctccaagaagtcccttgatatggcaataaggcatatggtatgtatctctctcttctctcttcctcaagtggtggcaattgcgtttaactgatgatcaaacgttttgatgaaaacaggatatacgtagaactattccagggaacctgagaccactaatgacgaatattccagcatcatcaatgtacagtgtgaggtctggacatacacgtggtagaccgatgaatgtttcagactcttctccactagcaacaagcagcaacgcaagctcagagatcagtgtctgcaacaacaatggcatttgcttagaggcaagtgaaaaggaagacgacgcaggcagcgagagaggttgcaggtccctgcaagcttacaagggagatgaaggaagacagaagaaaagcgttttgtagaacgttcacatttgagattctctattattgtttgtgagttttaattacacacgagcttgataatgatgatatgtgaagtagcgtcttgatg

SEQ ID NO: 8879 - DNA, 1189 bp, Arabidopsis thaliana
  unsure (1)..(1189): unsure at all n locations
gtgattcacataaacattttttttatctcgaacacaccatgccacttgacagctaaccttcacccatcttgctaagtattttatctgtcaaaagtcaaaacagaacacacaatagcgtaagttaagcaattaaaaatgttcaggaaggattctcatcccaatgaaaccgaagcganaaaagattatccctaaggcaatggtgccaaacaaaacaaagagttactagcaacaatacacatatagaagcaacataggtaaatatcttagctcacatagaatagaaagttagcaactttatccatcaaaaactcacatctaggagtgagattgtccctcaaactgaaaacataatgaccatcacgatcatcgtcccttaatggtggtgacaaaatcctcccatcgcttccatgtcctttaatcacagcccttttagcctatcacaaaaaagtcaaaattcattcattgtcagcatatcaaaatctcaccaaagaaacataaatgctcggtctttcctccacattctaaaccctaattcgaagttctaaatgtcaaagattaattaaaaaaagaagaagaagaaagaggagcaacctctggttcagctggggcctcgtcccaggtcatacgaggacgtttcctgactcgttctttatccatactctcgaatccgttagctatcatcaccgacgcggaaaatcgatcacctgcacatccagaacggaatctgatgccgatctgcagctaaaagagggaaaatttctaccagaaactctttacgtagatgtaatcacaaggcggcgaatcggggagaaggtgataatctccgaaaatggtgaaaacagaggaattgctagggtttggaactagagagagtgcacgagaatgacaactcccaataattttaccggccaaatcccttggggtcgaaccgcgacgacatccaccaattgcatttcttttgcactttccaccgaaaaaattgggtctacacgatcacccggaatgtttcgcccacccggcccaaatgaaatgtggtgagatcttcttataatcttggcccaaatttccatcatggatcttaaacgttcgtttcattgtttcttggattttttttcattaactggtccatctcaaaatgggcttccataaaaatgggcttttttacaaaagggttttgtttcattaattg

SEQ ID NO: 8880 - DNA, 771 bp, Arabidopsis thaliana
gggattgatgttaaacacattgatgatagaagattatgctgcggaactcctcctggtaagtcttaagctcttttcatctcctgcttgctgtgataccttttaagatgcttcaaaaatcaatgtacatattttgattacttagacagaaaaaacgtcaacatctttggtgttggggacctaactacaataatatctgctttaaagcaaaaggcttaaaaatgaagagaccttaacctatctaaagagatgactcgtccctatcaaaatctctactgatacaaagtcttaccaagaacctaaatgatttaagtttgacaataacatcaaatctttcaacctgaaacatactgaaaatatgttaaaagattcagttttggtatttgcagattgcgaatggaaagcacaagctggaaacatctgtgtagcatcattcgactggagctgcagcggaatctgcagatccgcagatcgcatcaaagaggttcatagacgttgcggtgaaggtgaaaaggctctttggagtgccacgttttgacatataaacagaggaatggtaaaaacataacggttttgctcagcccccaaaaacagctcaaagatcagaggaaggtcgtccagatatacaattccaagagatatccacttttgtattcataggtacatagaatagaagaggcaggaaggattagagataagtgtgaaaacctctggcaagaatcgcaattgcgtattgaaatctcggatgcggaaaagttgtcgacggtgactcga

SEQ ID NO: 8881 - DNA, 787 bp, Arabidopsis thaliana
tcaacttgtcgcttcgataggcttatcaaggcgttgggacgataacggacgttccgcaattgaatgtgtgttttgtggctttcatgtatttggcgtaagttgtgagcaagaatgttatggaggttacgtactgaagattgctttgaggtagcttgtacattaatcctcctgtaattggtaaacatatgattagaagaggttgttgtttagcaatttgtgttctatatcgtgaagtaggttaccttgagtgtattgggtagaggaagaaggagaatctggaaggattttgcagatgaaattctcagctgcttgcttatattgttcaaagttgctgtctttgttaagtaatgctctctgccaaaatgtaaaagttagatagtgtgatgctaaaagctatgttctcaatgagtttttattagcagagagacaaacccgtgagagaagaacataggcaccagcatatttattgtcccagctgaagatgtcaggctgatctccacctcctaaagattttatgaagtttgcgtaatacgggttattcgttgctcttagcagccatgacgcaccccacattagctcgtcctgtgttcataaattcacatttttaaaaatgaggatctgatgtagtggtaagagtggtttagtttcatgtgaaagcagaccttgtaaccagagtaggagcagtagaaaggacagacagatgaggaaagggaatcactgtaagctccctggtactgaatggcaaactgcatcacatccttagctgttgcgagcagcaaacgtgaat

SEQ ID NO: 8882 - DNA, 629 bp, Arabidopsis thaliana
cataagcgttagaaaagatgctgaattataaaatcaaagaatggagatggctttgcaatttgcattggccaattcatgagattcaaacaaaaagaacaattcaatgtgatggcgtccctgcagctgaagtttttcttagttgacgttggcttctgtttttggatccacgtccttttgcaatgtggcctcggtggtgaacgctaggggaggctgatccaacaacactcttggtggatgttcttttgcgcctgtggtgcaaagaatctccaccaccaaacgcagctctcgctacactatctttgagaacttccctggctcgttgtggcttaatgagctgcttgttatggtaaactagcttagggagaaggctggaaacggtcttgcgtagctggtcctcgcctacattgttctggatcgggtttccgaggatgttcaaagcaacgagagagttgtagttggctacaagctggcctattgctttggtggtggcgatcttgttgaaactaagatcaagaacaataagtttcagcaatctgtgtaagccttctacattgctgatcttgttcccagctaggtatagttctctgatcagtgtacagtttgataaacctgatacatagcttttgatt

SEQ ID NO: 8883 - DNA, 1047 bp, Arabidopsis thaliana
tgcaacgttacattgcagataagcttccttggcttcactatcatgaggttgccggagtggccacttcttccccctcgctaaaggtgtcgttgatgagattgttaagacagctcttaaccactgatgcgtagcattaagtaagataagatcccaaaggtatgaaaaaaccccaaaagattatgggacgtacaatggatttcttatgtaaaatgatttacatatacgaaaacataataaagtagacttttttacagttccacaccattatagtctaccaaaagagtcaaaaccaaaacagagcatgaaagctcaagtcatacaatcacaacacctcaaaagaactcaaacgttggaggtcaagactttaatcctcgatcatttcctcattatcgtcatcttctatttcctcgatcctcatcttcttcaccgcctgagctgcatcacttctctttggcccgttagcaatatgaatcagcacatctgacttcttgcctgttgaagcgtccactagacctccactttctacccggtacacaagatcaccagcgcctgcatctatgtaaacagtggagttttcatcgatttcctcacgcacaaccatctttgacagttctgtcaccaccttcttctccatccatctccttataggcctagcaccatacacctaaccaacaaaacaagaaagcaaccacaagagtcagtcaacagaacaaaccagcctgagagatcaacaatgatatgcattctgcatcatgtgaagagacttaccgggtcataactctctgccaagatatagtccaaagcagcatcagtgactgccaaagcaactcctctttcagcaagccggacagcaacgtctttcatttgaagccgagctactttcctcaactggtcatgtgaaagggggtcgaacaccacaatctcgtcaagcctgttcaagagctctgggctgaagtgtttcctcacctcgcgcagcacacagtcccggggccacttccattgttactttcgcagttagccctgcaaggaggtgttcagcaccaaggt

SEQ ID NO: 8884 - DNA, 1190 bp, Arabidopsis thaliana
gggcatttcgaaacccgacccgcttttttgtggatccagttacttcaatccggttgctgaattatataaccggaacaaaccaatttaaatcaaccggttctggtatttttgtaggtggaatgtaccataccgaaagacgatggtacactagcatcattcgttgggttcagagttcaacacgacaatgcaagaggtcccatgaaaggtggaatcagatatcatcctgaggtttttgaccttttgactttgaccttttgaaccaaaactcaaatgtaacaaaccagtatacaatttcggttttggtatatgatgcaaaccggttatcgttttcttgcaggttgaaccggatgaagtaaacgctttggctcaacttatgacatggaaaacagcagtggctaagataccttatggaggagccaaaggaggaatcggttgtgacccgagcgagctaagtctctcagagctcgaacgtttgactcgagttttcactcagaagattcacgatcttattgggattcatactgatgttccagctcctgatatgggaaccggtcctcaggtttcgaaaacatgatcttgaagtcttcatcttgtattttacgtgttgttcttgtctgaaatatagtgatgaaaattttcagacaatggcttggattcttgatgaatactcaaaattccatggacattctcctgctgttgtcactggaaaacccattgtaagtgaccgttctaatcgcggttttaggttggttaggtttatgtgttcaactaatctaaaactgaatgagatttgatttttgaggatgatgttttgagcaggatcttggtggatctcttgggagagatgctgctacaggaagaggagtgttgtttgcaacagaagctttactcaacgaacatggaaagaccatatctggacagcgattcgccatccaggtaaaagaagttacaatgtttagtcagagagattacttcggtgtcagggtactcatactgtctctgcgttttagggctttggaaatgtgggttcttgggcagcgaagttgataagtgacaaaggtggtaagattgtggcggtgagtgatgtcacaggagcaatcaagaacaataatggaattgacatcttgagtttgctcgagcatgctgaagaaaacagaggaatcaaagggtttgatggtgctgattcaatc

SEQ ID NO: 8885 - DNA, 1487 bp, Arabidopsis thaliana
cagctatattttatatatatatctctatgtttccttctacagacaagttctcctgcatcttgtagctataaagcttctatatcaaataaatgcagttagaaagtaccttagacatgtacagtttgtctagggcttccaacatagaaggtgcagtcttctctttcttactcttccgcaaaacttgatctgagacacttaaaacaatggtgcttctcgctttctgtctcttctcttccatgagtgcttccttatctcctttttcagattcttttccttcttcctcagattctagaggatctgagaccgactgtgtttccctgagagccaccgttaaacccaacagatccatgtgagccatcagcttctccttccacaatgtgtagtctccatgcccatcaaacttctccatctctacccttgctgacgacatggcttctttgtttgtaagaaccttactgaaccgccaatacaaagaaccttcgttctgataccactttgtagtgtttagaccaaatacagactaagggtttcaagacttgatgtctaagaaacttgaaatcgaacaagaacagaactttgagataagaagacttgtgactgaaagtgaaacataacaacacagagcacacaaacagattgttaacccagttcacaccaacggtgctacgtctgggccgggaaatctttcccggaatccactataacctttgagttttacaaagagatctctcaccctctcagccccttacagaaccaatatgattcactctctctcactcattgtttccctaagaacactcactacaagtttactctctaatgaatgtctctacgtttctaactctgtctctaagcaccaccttcagcttaaatggacttagaggttttaacctaggttcccttctggatccttcttggtttgcctctacaagctcctctacagctgtctccaagctgcctccaaatttgtcaccttccaccaatttggattgggcttaacccgcgtgcaactttaccaaaccaagacaagaatgctttagtcgtgcgactcataaccctggttggcgctaacggctccttctttgtcttgtggtcctgctgttgacgtgtcccctttgctgagttggcatttcttcttcctcaagcttcttcatgttgtgttctttgttgctaaatcttaacaaatagccacatatatttttatcttgttgagtatattaattatgaagattgttggcaaagaaaacttaatatactttctatgagagtaaaacaaaacacaaatttttgaagctcaaagagactatttgtttagactataagtcatgaaatatggagttttgtttatggtttcttgtggtgtcatgtttctaattctaagccatgttgaaggtaacttgtttccttattttgtgttacaactgttttgtatatatattttcatagtctaacattttatttttgtggttgatacgacacagaggttg

SEQ ID NO: 8886 - DNA, 612 bp, Arabidopsis thaliana
tccccatgttaacaagagtgtttttttactttagggtttcatagttaagaataacgaaaacactaacaaatatgttattgctgaaaactccagcaagtgaaaatggcgttcgtggtaagattggtccctagggaaggaaaaaaaatgaaaacggttttttcaaacacgtctcgcagatggataggtttgcactaggagtatgactgcgagacaagatggctttgcaaagtggttatggcagtaaaagaaaagttagccctgcgtcctaaagacgatattgagttaacgtactagtggctacagtggatgatgggccctgactagaaacgagcaaacccgatcgatatatgaaacaatgaagacatgactctttcatggcgataagggtcgatctagatgaagtgcatctgccagtaaagattatacgaggtgggaatgagcaaaacgttaatagttattggaataacatggatctaagcggcctgagttcaaaagaaatatcggataaatactagaatagcgcagaaacaagggctgtgtggggaacacactaacaagaatgttcgcagtacatttcaagtagaaactgatactacttcctgagtatatgta

SEQ ID NO: 8887 - DNA, 1102 bp, Arabidopsis thaliana
gatctgggtagacgaatgtatcaagcacttgcaatagctgcaatgtgtgttcaagaacagcctagtatgagaccggtgatagctgatgtagtaatggctttggatcacttagcttcttctaaatatgatcgtagtcaccgtcaaaagcaggataatgtgaccgagactaaagtcgatgaagagaaaacacttaccacagaatctaatgtttgtgtggaggagaaacaagagatcaagatatgctcagatcaagcaacttaatcatcaatgaggattcttaaaattttgatattttcttgatttgtagaatgcttcgtttacgtaagcaacagttttgttcgaatttcgactcatacttatatagtaaactgtagcaaaagttcggtttatcagaatcttaaaccattacgtatgggaaagtccggtttatcaccaaaccagtttatggaaacgaatttgtatgatgttctaaataacgattttaacctcaaagcttctgttaaattacgattgtgccataactatataaaggagagacccgaacaaacaatccggaagcggaacgtaaagttaagcaacggccgccgcgaagtaacctccaaagaaggggaaaaatggcgaaaggagacgataatgtgcagaggaagaagaataaagtgacgaggaagaagatgagtaggaagaacgataccgccaccgtatctgctcgtatcgccgccattatcgccgccaagaaacgtcgcaagtctggcaaacgcagcatgtgtcaggtatctcactcttttctattcgattttagggttctaggaaatcagaaatgttcaatttcagagaagagtatctgttaattgaagtgtttggtgaatctattgaatttgatgcatttgtttctctattgaatcatagggaatgtgttttactcttcctacacttgaagatccattcaatgaaaggcaaggtaaagctgatattactaaaaagaagaagaaaaagaaaaaggtgaagagtagagaagacaagaaaccatctcctatgtctattgaaggtgttgagaagatggatggtcaccatagtttctgatgttaacttgaatgagattgag

SEQ ID NO: 8888 - DNA, 531 bp, Arabidopsis thaliana
taacggccgccagtgtatttgagactctctttatttttttgagctacaatgcatgcctgtttctgtctatattgccgtagtttagtcattttatctgatttttcattgttgtaatccaggttctggtaacggcagcagtaattggtttgatcactcactatgttgctggtcaggctggtccagcagcaatagtaattggcaatggcctggcattgtcttccactgctgttgtcctgcaggtaaaattcagtctccttcttccaaatttgcaccaatttacactaggtgaatctgttaccgtgttttgggaagatatccaaaaattgtcagtgctactatgtttttatgaaattaattttgtgatagctcgtttagctttttatgcgatttagctaccaattggttgaactaagacaatgtactcggtttgcaggttttacaagaacggggtgagagcactcgagacatggacgagctacattttcggtcttgctttttcaggtttgttcagaacacaaagttgttactgcg

SEQ ID NO: 8889 - DNA, 1203 bp, Arabidopsis thaliana
tatcgttatcgatcttatttggatatgttagcatgtgcagcctaagaataggtatttaaaatatttgatggcaaggcattgtaatgaataaacaatcctggctgcttaacctcagcctgttgaaaacgcacccggcgtttcgcgcagtattcctcgctcgtttcatctcaattgtgtctctgggtttgctcggcgtcgccgttccggttcagattcaggtgagtgccacattccacttggcagttggggctttcggtgacgctgaccggcggcgcgatgtttgttggccctaatgctcgccggtgtgctggcggatcgctatgagcgcaaaaaagtgattttgctggcgcgcggcacctgtggcattggcttcattggactgtgccttaatgcactgctgccggagccgtcattgctggcaatctatttacttggtttatgggatggttttttcgcatcgcttggcgttacggcgctattggcggcgacaccagcactggtagggcgtgaaaacttaatgcaggccggggcgatcaccatgttgaccgtgcgtctggggtcggtgatttcgcccatgattggcggtttattgctggcgaccggtggcgtacgtggaactacgggctggcggcggcgggcacgtttattaccttgctaccgttgttaagccttccggcgttgccaccgccaccgcagccgcgtgacagtccgttgaaatcattactggcaggatttcgttttctgcttgccagcccgctggtgggcgggattgcgctgctgggtggtttattgacgatggcgagcgcggtgcgggtactgtatccggcgctggctgacaactggcagatgtcagcggcacagattggttttctctacgcggcgatcccgctcggcgcggctattggtgcgttaaccagcgggaagctggcacatagtgcgcgaccagggttattgatgctgctctccacgctgggatcgttcctcgccattggtctgtttggcctgatgccgatgtggattttaggcgtggtttgtctggcgctgttcggctggttgagtgcggtcactcgttgctgcaatacacaatgctgcaaacgcaaaccccggaagcgatgttagggcggattaacggtttgtggacggcgcagaacgtgacgggcgatcccatagcgcggcgctgctgggtggtttgggcgcgatgat

SEQ ID NO: 8890 - DNA, 908 bp, Arabidopsis thaliana
aaaccaaaaccaatcccccaacaacgtttactataatgatctcggcacgctctctcaagatcctgcataaagctctttgcccaataaccaacatcatgagtgctaatataatgataatgtttctcatgccgtagttgcttctcagtctcactcattttaagagccgagtttaccgcttcagcaacagcatccacatcccatggattcaccctaatggcaccactcaaagaaggtgagcatccaataaactcagacacgacaagagtgcttgtgcgaggcgatgaatccacaacggccttattacttcgagtcccctgcctgcagacgatatacttataaggaactaagttcataccatctctcactgcattcactaagcaacaatctgctgcagcataatacgcggttttctcagaacgtggaacaagacgatcgatcaaaactatcggcttatagtcagaagtaccgtaacgctcattgatcctcctcgcagtctcatacgtctccctcttcgcttcttcaacatctttaccagaagatcttgcagggttcactatctgaacaagaacaactttccctttcaaatgccaataagtctcaaagagatgttccattgctataagctttaagcttatccctttaaatatatccatatcatcgataccaagaacaagcttcttccctttaaactgttcttgaatctcttttgtcttcgccgcagtagaatcaagactcaaaacagactccaatctacccatatgaacaccaacaggaagtattttgatatacacagtcctaccaaagtaatcaagacctatgtgaccgcgcttagactcgtaatcaagaccaagcattctactacaacaagacaagaaatgctcgcgtaataaacgtatggaaacaatgag

SEQ ID NO: 8891 - DNA, 1363 bp, Arabidopsis thaliana
tgatttacattttttgtatcctctcagtttgtcaattgtttctaatatctccttcatatttgtcaaagaacactgtatgagaaataataacatattgtttcagctaataagattcattcatttcctattgctttctctgctttcctgttttttccactaaactttaaccagcgattcatagactaatagacattaatctctcaactaacacgtttatggaagtcgagtaactatcaagtaaagtggtggtctcactttgaaacagtaaagttagaaatcaaacaaaattgacgcaagttaagattgcttacacttcaaaatgtgtgtgagtgagaataaaaattgcagaaaaactctgctcaatccttataaccctgatttcaatccttctcaaatctgaatctcaaagccgttctaagagattatatatataagtaaggaaaagaatgggaagattggtgtatggtggtcctcaccacaagccaatgaacttccaccaggcaccacctacaccaagccagatgagaatgttgactattgaaatcaggaatccatagccccagcatttagccagcggacgtagttagctccgtagaagataggcgcagagccgataccataatgggtcaatcctcccatcaggttggaaaggaacgcaagaaccaaggctgcagagtcaggtggagtgcctagagcggttgaaaccgctaaaaagggagtgaacatagcaccaatgtgggcagctccactagcaaagaagtagtgagtgtagaaatacaagaggacgaggattccaaaagatagctgccatgacaaacccaatcctcccacaaactgcaatcaaaacccaaacaatgtcaaaacatttcattagcatgctaagtcattaggcttattaagcattcatcaaatcatttaacaaaccttgactacggtctggctgaaccactcaatgagaccatatttgttaagataaccagccatcgcaatgagagcagcgaaccaggtgagtgtgtcccatgcgaccgactcagctaagcactctttccatgtcacaacacctgtcacaagaaggactgataatccaagaatggctgcagtcacagcatctacacccaacttagctccaaagatccagagaccaacctgtgtcaaggagaacacttttttagaaaaggaaaaccttctctgtaataaaacaccaaaaccacaaacattttcactcaaagcaaatgcattaaacagaagcaaagccctagcttaatctaaggagctacaatagctaaaatctctcaatgttcaatactgaagcacctttcaaatcaagctctcaccataagtaagaacagatccgatgaagcag

SEQ ID NO: 8892 - DNA, 1012 bp, Arabidopsis thaliana
ctctagacctaaaaggtcgacgcgggctctcttgtacacttaagcaatcaaatgctataagaataataaacacaagttccttctgttcaatctctgaatttcaatcggactcatgaaaaccattactgctgctagtctgctactacaataactcgagaatattttaaagttaacagaattgctccaagtcaagaaagtctacggaatgtacaaagaaacaaagctgttttcctctcttttttataagtgaaccgacacagaagagaaaaaaagaaaaagacaaaaagagtttagagatcagaaaggagccgagcttgtccgtcggagctgccgcttgggatcaggcggtggtacacttgggaggattttttccacctcctgcaaagtaatgtaaggattagctttggccacacataaacgcagacaaaattgaagaacagaaagtccatgaagactagaaaccagcaagaccaacttgttccgggtaaaggaaaactatgtctcctaagacgtttggtctaaacctattcctcctgtctcttgttcgtggttatattttctatcatatattgtctactatgcgtgtgccctattctatacttcactacatcttctatcatctatcattccctttaatatgaatccagaactaatcaacgatcagctcttacaagtttctagtaatcacaaatttaatcaatgcatgtgttgtaaaaagggagaaaaacctacaatgcattaccttttgcttcctgagtctttcgttttcttcttctaaccgtgaaactttgatctctagctcatgagtgtaagcctgctcatcaatatccaatgttaaaacaaaaacgagcatgacttgacaagaagaataacaacaacaaattagttgtttctcacctgtttcctagctcgggaacgactagcagactctctgttctttatcaatctcttctgcctcctctctacagtcttctctacaagttctcctgaagctaccctcttccttccagga

SEQ ID NO: 8893 - DNA, 1448 bp, Arabidopsis thaliana
ggttaaaaatagattttactggtgttggattggatgaaagaaaaagtcaacggtcaaccaccaaaaaaacaaggctcccctacttcttcgattcagccattgcgaccatctctctcaatcgcctctctaaccacaaaatcttaaaagctttaacggaaacagaacacatgaatctctccttcctctgcatctcaattccacttcgccatttttaaagctttttacgtaaataataagaaaccatggagaagaacgacaaggaccctgatcatgatgacaaatccaagggagatgagaaaggcgacgtcgtttcggatgctcatccctcagatgatgcgcatcatcaggatggtatcagtaacgaaaatgtagatgttgttggtaatgcggagacagatcatcaagatccaggagataacaatgtcgacaaggtttcacaaggagaagaagcaccagagattcgtcaaaccttggagtctttgtctgaagaactcgatcagtttctcccgactctttcccttcacatggaggagcacaaagatagcaccgaggagaaaggagaggatggttactttcagatcccacagtttgttgggaaattcttggatctttttgaggaaaaactctccaaatatgactctggtgagcctaagactgtgtggtaccaagatcctgaagaggtgtcttcgcttttggaggcagtggatcgtgtctcaaagcttatggggctattgctcaacaccaagtcctgtttggaccatcatgagtccttgatcaaccatgcgggatctattcagcagcgtgcaatggctttcttggaagacgaattccgcatcattttagaagaatctgtgaccaaagagtctgtggttgtcaccgatgacagcaacagccagaggaggagcactgccgatcagcaagaccaccagaacgatgtggtggtctcacaagaccacgaccagatgctcgttccggaatgcggtgatcaggagattgaataccctggttaccctgaggatgtggttgtggtgctgaggaaaatagcggaaaagatgaaagcaggaaggtatggatgggaatgtagagaggtttatttggttgggaggaggaacatcttgatgcgcactttgaaacaagattgtgagtttgagaaagttagcatcgacgaggtgcagaaaatgagctgggacacgctcgagagagagatccctatttggaacaagactttcaaggactgctcttctctcttcttccctggtgagctaaaacttgcagagaggatattccaggggacgaggggaacttattgtgtattgtcacacacggtctggccatccagttcttaggtttcgcagaggccgtagccatgacaaggcgctccactgaaaagcgtcttcaagatcctcgacatctatgagactctgcgggatagttttcgggccatggag

SEQ ID NO: 8894 - DNA, 1201 bp, Arabidopsis thaliana
tcggattatatatgaaactaatggtaaacagagaatcaaaagaggagagaaaccaaagaacggagtatagatatcttaaggtgaattctattagcatgccaaactctctcatgcgtaaaccaatcccttaatcacttgatatcctctcctacttattgtaaaaacaaaagtccataatatattctcctaattatttgctcccaatcattatacacatgctgatgtgtggccagtgtactccatgaaatcttgtcaactacatgttcaagtggataccacttttgagtatgaatgggggacaacaagtggctgcaatataatagtggcgttttgggggacagcacgagggactctcaagaaccaaatccctcccaactagtttttctttatgagtgttttcttcttaatgtttgagtttccacttctgttcttatcacattaataccgtcgccttgggctaattgtctcgtttgctcctttctagtccgtcattgtatgaggatcacgtggctgaccaataagccagtctacccccaaactttccaaaactagcttaagattagctaaggccaaagctaatcaatgacgtggactccaaaataatatttgacttttcgggttgagataacacactgagaagagaagggtgacaatgacatctttaaaaagaaacaaattaaatatggtttcttttctaaattaaaaacaaattggttcttgcttctattatattcatatcatattattccttgttgctttggcaagaaataagcgaacaacgtttgttttcgcatagttttacaagaacaaaacttcttcactggccgtggtctggaggatgacgtctgtaggattaccatcgttgctacctcttagcatcccatgcctgtgacgctgtaaaaatccaaaaaataccaaaataaatcattaaaacattaccttttcgtttctgataagaaaactaacgaatattttattttatttagaattggaataaaaccgaacctgcacgagatagacgagaattatcgtcagctccaatgtgccacgagaaataaccaagtagacctctttgcttagcgtatttcactttcataacaatactttgattatcatcgtaaccaatccaagtcttcttggcataacagtaattctgaaccaaattcgaattataaccatcgttgcttgtgatcactatgaa

SEQ ID NO: 8895 - DNA, 622 bp, Arabidopsis thaliana
tctgccagtaccatttccaccacgtcatagccgagatcgtcgaacgctccgacaagtcctggcagcgtcaggaaatcgcttgtcgacgtgacgccgcaggcctgggctatttcttctgttgctggtagctgacgccagtagggttcgccgataagcatgatcccgcccggtttcaggctttgcgctagcagctcctccgccccggcaaacccaccggcaatccatgtcgcgccgacgcaggccgccacgtcacatttttcatttgcgacgtaaccggccgcatcgttatgaataaaatgtacgcgttcgctgacgccgagttcttccgcgcgacgctttgcctgcgcggtgaagagcgaactcatgtcgatgccagtccccgtaatgccatgatccctggcccaggtgcagagcatctcgcccgagccgctgccgaggtcaagaatgcgggtgcccggcttcatgcgcagcacgcgacccagcgtggcgtacttctcttcggtgaacgggttatggatgcggtgttcactttcgctgatggtaaaaatacgtgggatatccattatttaattcctgttattgggttaagccttaaaaaggacacaacaagattgttattcac

SEQ ID NO: 8896 - DNA, 850 bp, Arabidopsis thaliana
agttctattaaacgctcagcacaagcaataaaatcagtgaatgtgtttttcttcttcaacagcttcccattctcataccactgtctccccatctcaccgcccccacgaacatgagcaattacaaaggtaaacccacgatctaacagggacaaccttgatgccttgaaataaggatccacagaaatctgtaataaagataaagagtattttatagttccgttggaaagaagtagcaggaccgagaatctgggaaccataaaagcttcaactagaaatacctcatatgaaccatatccataaaggagtaatggatcagatccatcaagctttgcaagttttttgttatacacaatagacattggaatttgagttccgtctgatgcagcgacccactttctttctgtaacataatttgatgcatcaaaacctcccaatacctgaatgaaatacagcaggctatcataaagatcaagcgatgaccatttcaaaagagaaggcatgttagggaaaaatgcgtaaaaacacagtaccagtaaaaaaaaactaaaatttttcataattttcatgtgttgtatttcaaaattgtcaatacgacttattaccattcaatgaaatacgcttatgcattgcaaataaaatcggcaactaaatatgcagaggacataggaaattgatccaaagtgagggagaacgaatgaataagtagttttacttactgtgtcaatcttcttgacaacggaagtgccactgtccatgtcatagtcatacacagaaggaggtgttttcattgagcagtatttaaaccttaaaaccctggacgaaaattcggactcggttgagcaactgaata

SEQ ID NO: 8897 - DNA, 355 bp, Arabidopsis thaliana columbia
acttgaccagaattcttagtaaacgggaaacggatggcagggtgtataatgtaccaacggcatcagaggtagccatgttgattcctggagacttcactatagatatgccatgtagagatatagtagtggaagagaaatcagggaaactacaaataattagtgaacttctcccctgtgatcttcctctacaatatcgaattttgttcccttatggtgaaaatggattctgaacaggcatggagaaacatcaaacaggggctggtaaaactaagaagaacaagtgcatatctataaggcaatcgtttgccttaagaattcacgaaaggcaacatgagtagcatattgtacttaggtc

SEQ ID NO: 8898 - DNA, 1331 bp, Arabidopsis thaliana
tcatcgtgttccatgtaacttcattcttctttgtcatcaagtcaaacaatcaggcgtgcttctgcaatgcttccacactttgcatacataccaatcaaagcagtagacacatatatgctagactcaaaatctgtgctccttactaaatcatgaacccatttccccaaacttaaagctcctaactgcgcacaagctgatagaatacaagttattgtgacagggtttggactgaattcagacttctgcatttctctgaagagagatatcgcgtcctctgtcaacccgttttgggtgtaacctgagatcattgcattccaagatggcaagcttttttccggagactcatcaaaaagcttccgggctgattctatctcattcaatttactataaaccgtagttaacgcggttgagacagaagcatgagacaggaaattcgatttcaagcagtaaccatgaatggcatatataagcataagatgaccagagacagggaccagactcaccaacgtgcttgacctcaaccttgctcctgataacatcagctctttaaacaggcttaaagagagctcagtctctccattggatgtgtacccatgaatcattgcattgtaagctactatatctggtttacgaaactcacgaaacagagcacttcccatcttaatctttccacactttgagtatagtgagatgaaaccagtaagaacataatcgtgggagtagcacccagtttttgtagcaagactatggatttgcatgccgagtctcagctcctgcaactctgcaacagcgggaagaatatcaagcagagttgtagtgtccaaacgggtacagctctcattgatcaaatccctgaaaacctgaatagattccacatacatttcattctttcggtagccagatatcatcgtgttccacaaaatggtgtctttctcaggcattctgtcgaacaccttcctagcatcttcgactcgccaaaacttgaagtacatcttaacaatgttagacccaagcagcaattctgagtcacacccatcaacgaccgcttgaccatgaataacacggccagctctgtcgtcacgaaacccagaagcagccgagatagcgaaggcgtaggtggagctgttgggcttgagatcagtggatttccttagatgagcgaacacagagagcgaagagtgaggtgattcgttgacggagaagccacgcatgaggacgttgaaaaggaaaacgtcaggtctttggacggagaggaaaatgtcgcgtgcgtagtaaatggcgccgaggtcggagagtcgttgagtaagcttggtgagcaatgagatgtcgtt

SEQ ID NO: 8899 - DNA, 538 bp, Arabidopsis thaliana columbia
attgatcatggtgatcctatttactcatgtgaatattgtggagctataatgtggcatggtgagcgtattgaaaagtcagtcaagaataagaagcccaagtttacattgtgttgtttgtaaggtcaagtgaagttaccttttcttgaaaattcactagaattactttatgcattgctaaccaatgacgatgaaatcagtagatatttcaaagaaaatatcagggcttacaatatgatattttcttttacatcacttggtggtgatacagaaaatagtgttatagccagtggtggtcctcaaatgttccagattcatagagataattaccgtaggatagggagtttgagaccagacaatgatatacctccaaagttcatgtagttatatattgtagacacagagaatgaagttgataacagatcggaagcactaaggatagacctgagattatatgcaagatcttcaaaatgaaacttgattctctcttgatttaactagaagagacatattagggaagacaagtatatgtaagaagttt

SEQ ID NO: 8900 - DNA, 971 bp, Arabidopsis thaliana
ggtcataaactcgccgtgctttgtcttgtcgcggcgggaatttgatgtttagtggttctgctgatttagggatacgtgtgtggaggagaccagaaggtggaggtgagcatgtttgtctttcggttttgaccggacatgctggtccggtgaagtgtttggcggtggagagagatcaagaatcggtttccggtgagagacggtggattgtgtatagtgggagtttagatagatcggtgaagatgtggcgtgtgtcggagagttcaccgccgatggtgaatcaagagtttaagttgccggatcagtttggtggtggtggtggtggtggtccggcggagttaacggtggctcctagcttctcggctcaagggaggattagtccacaaaaatagttgtttgttttttgtatgtaaccaacatcgaactattcaaacgtgtatgtaattgtaatttcttctgttaaaagagattttgatccaacaagattcaagcatttttcatttcgtggagttccggttcaccttaaccgggaatctgacaaaacattacttacttccatcaaaactgtaaaatttcagtcagtgaaatgattattcaaatattcatgttcagaaactctaatgatcataagacaagaatgatctcataatctgaatttttcaattgcatgtattagctagagaacaaaaaatcggtactgatttgaaggcctaaaaagtctatgttgtttagaacgttcaaatatcttaccatgggaatgaaagtggacacgagtcatgtgatcatccttttggcaccattgttttgtcttctaatcgaacacgtagtgtcattttcatatcttcaatcgtatattttgttactactagtcaagtttcttcttatataagaacatgggacatgatggattatgatttaagtgttctacggtaggtaatgaagtaattcgactttttttaatcatttaatatgag

SEQ ID NO: 8901 - DNA, 601 bp, Arabidopsis thaliana
ggcttattggttggaactcacaaccaattagcaatgagtagatttggtgctaaccttgttatgtatatcacttggtaatttctccaacttccaatgtgagactacttcacttaaacaatatgatttgcattatcattatatactgactactgaatatttaaccagatcgctctatttttggagcgatcagtaacatattttttacttaagaattgtgtgtacactagacaacatttcttatataaaaaaagttgtattgacatgttttcagcaccagttgttagaagatcgggagaatacggattgttgtacgctgcagagcctcttgatgcgtgctcgtacttaacaaacatggcggaaaaaggttcgaaatttaggccctcgtatgtattgatcgtccgtggtggctgtagttttgaggaaaaaataagaaatgcgcaggaagctggatacaaagctgcgatcgtctataacgatagatatgaggagctcttagtacgtagtaagttcataagttctcaatgtttatgtgagtgttataacatctttaatcgatggttgttataatcttgaaaaaaaacaaaatcatagtggcaggaaa

SEQ ID NO: 8902 - DNA, 540 bp, Arabidopsis thaliana
cgtaccgctagatagtaaagcattagaaagttcagatacagcttcacgaatgtataactcttccaatgcagggaagccatcgaggaggttacaatatttgtcaaaaccaatctcgaaagaagatgagagggaaagtgatttaagggcagggagaaacacagtctcaacttgaaaatcatatctaccggatagtgtgagcttaaccagtgtgttgctcgtgaacagctctctctctataccaacaggataataatatcgatccgcgtacaagtgtagttccagtaaaccacgttcttgttccattgcagtgaaaatccaacgtaagtatgcatctacacagtaaagtctaggctcatgacgcagagagaactttttgatgggagaattgcctaacagagcaaatgtcttgtttacgaaatctacgaagcgaagtgaaccattttcagcttcttcgttgggataaacaaccatcgactcatcaaagcaaggttatctacaagacccagcagattcctccactcttggacagaatcgatgtgg

SEQ ID NO: 8903 - DNA, 559 bp, Arabidopsis thaliana columbia
caaaagtgattgcttccaactcacaaacaaaaaaatatatccgtttttctttgccagactgcttggtgactttccctgtgagacaccaacaatataaatatatgatgtcaagactaaatcgatgtgggtaattcattaagaaggaatgaagatatatccttttttatatgaaagccatgacttctacaaactctgcatcaatctgaagcaaaggaccaaaaaaacactgaatttattttacaatgtcaatattttacaatgctgactataacgaaccccaaattctcatctctctgcctattacttctcaatttcacaacctcaacagctggcttaggagtgatcacagattcaatcttagcctttccgatttcgattgaacaaacatgaattcactacaaaaaaatcattgtttatttcagtaaatcaaggaacctccaaagaattgaagcaacacaaaaaaaaattacttatgattcattacaaatttatttcagtaaatcaaagattcaaaaagaactgaagcaggactgaacgaagatttttttttttttttttt

SEQ ID NO: 8904 - DNA, 840 bp, Arabidopsis thaliana
ggtggtcttataagctttagacgcgaagatcgcaggtcgccatgcgatgacacgtggcgtaaagagctaaccagcagacacttagggtgtctccgagtgtagcatccgtgatgatgaggataaccgtgacgtaagagaaggccgggaatgccacgtggcggttgatccattctggaccgtatagtgtagctgaaccaacgattgtgcaggctagagctgttcggaacgctgaggctaggcacgtgcgccacatggctcggcctctctccgtcattagcattatatatagagagagacagccaaagacaactttgaagtgaaataaaagcttagacttgggagctagtttgttgttgtgttgtgtaagaatctaatgatttgaggtgaaataatggaaataagaagaaatagggaataatttgaaagaagtgtgtgacgatgaaggggcttataaagatgcgttgatttgatgagtgggtcagtgatataaggacgacgtggaagtacaccaagtgggttccacgtgaggaaattaatggattattatgtaatgaaaatcaaattttatcttttaatcaatggattgtttagttgatacggcatagtggctatatagtaatgatcatatttggtgcctatttatgtatatatgtgttcctggcctctactgatctatacggctggaacatattaaaaaggaccaagagttttatagtatttgacacaaagcggtctttaatcacgttttcaacaaataaaatgaaaaagattgtatccgtatctaatgaggaattcaagtatcattattggagttcaataagagcttgatctacgtgtgtg

SEQ ID NO: 8905 - DNA, 508 bp, Arabidopsis thaliana
cagttcttgcggagttttctctcttagagagttaaggtacattctttgcccggttatgtaatctttcggttgaccaatgtccatccaaaaaccaggtagtaccatcgcgtaaagcttcttctctgaagctatcttagggaatatctctttctctatcgaagtccttctcagctcaatcctgtcaagaacagatgggctcaagaggtatatcccagcgttgatcttgttccccacaaaatgtttcggtttctcgacaaaactttcaactctcgctgtaccttcctctgtaaccaccacaccatacttagaaggatcatcaacctgttaatatcagaaaatgctattaacagatgaaagataaacttcacaaaatgcagaaaatgctcctgtttgactacctcggtcaccatgattgatgcttcagcacggttagtcttgtgaactcgatcatctcaagcaatgggtattccagataacatcgctgtttagtcaaaaaagggttggctga

SEQ ID NO: 8906 - DNA, 894 bp, Arabidopsis thaliana
ttttttttttttatctaactcacgctttatacacacacataaagggtttttactgccacatggaatgtcgccggcaaatctccgccgagttatttaaatctcgacgattggcttcacacttctcctccttccgacatttacgttcttgggtactttgcacctcacctaactctttctttcttttgattcccaatctcggaaagcctctcatgattttggatttttcacagcttccaagagatcgttcctttgaacgccggcaacgttttaggcaccgaggacaacggacccgccaggaaatgggtctctctcatccgaagaaccctaaacagccttcccggcggaacgtgccagactccttctcctgttcccacccggtcgccgagctcgactctgactttgaaggcgactcagccgctggtgctaactcgttattctaccatcggagcaggagcatgaggatggacgcgtctgcatcatccctgccacagcagtttgaccgcagattcagcgtctgtgaccgtttcatgctgagcgacacacctgacgacttctacgaccagagctttaggtattgctcctctgaagacgagccagcagattctccttgtcatgatcactattcccctgtctcgaggactggttcctttgtggcagacgacagagacaaaggaagcgacaagtctaagtactgtttagtggccagtaagcagatggttgggatattcttaaccgtttgggtcaagagtgatctaagggacagtgtcaacaacctcaaagtgtcttgcgttgggagaggcttgatgggttatcttggaaacaaggtcaaaattccacattcccaaatcttctgttttgatatacgtccaataatatatctttcggcttgtcaaa

SEQ ID NO: 8907 - DNA, 1027 bp, Arabidopsis thaliana
caaactccaaaacaagcaaagaatcatctcaaagccatagttctgtacaacaatagaaagacaaaacatcaaattcaaagttcacaccaaaagcgtaattaataccttaattgggtaagccattgattcagtaccgttcaaaataccatgaacaccatcaaacacaacactaggagagctagtgtaaataagcctctttactccaacatcaacacaagcatcaatcacattttgtgtccctgtacattaaaaatcccataaacacaagaactaactgaattcatcagtttgacagaaacgaaatgtgcaaaaattgaagtttctattaaccttgaacattcaccgaatactgaagctgatgattgttaatagaagaatctggagctgccatatgaaacaccacctccgctccctgaaaagctaatgggaacaagtaattacaaagatgcatagatctcaaagtccactaagaatcaatgactttgtgattaagaacctttaacgacttgagatttatctcgaagatcagcggagatatattgacacgaccagatcttaatccttcgtcgagaactccgttcccttcctgagagtcaagcattatcgccggagctaaatcggcgagacggacgcaaaacatttcgtagcgtacgagcatttcaacaagatgcctcgccgcgaatcctctaccgccggtaacaacgcaccatcgctccgtctccgtagctgccggcgacatgtcttttgaatcgagtaagcaaaaatggcgaaatcagagaagcatttacctttgagagaaagagagagcttgaaaaatcttttcaggagaaggaaaacactgctttggtgtgtaatgtgtgcctcccacaacctttctgttccaatctatttttattgttgggaaggcaaaacatattgggctttcggggggggataagattctggttaaggggaaacccatatgatttgggatttttaatgtgatttaatctcaaggtttatgtaaatgaaaactgttttaagattg

SEQ ID NO: 8908 - DNA, 1011 bp, Arabidopsis thaliana
tcagtccacctgaaagttatagcttttagtatttgagtaattgaaatgcttttggagagaactctgtgttgagtttacctttagtgtactttgttgacgaggatggagaatttggaaggatcttacacatgaaattctcagctgcttgcttgtagagttcaaagttgttgtctttgtttagtactgctcgctgcgaaagaaatgtgtttgtaaatcattgaaggaaatggttaagttatgtctaggaattttaaggattgagacatactcgtgagagaagaacataggcaccggcgtatttattgtcccaactgaagatgtcaggctgatctcctcctcctaaggattttatgaagtttgtgtaatacgggtcgttggttgctctatgtagccatgctgctccccatagtagctcgtcctgatatcataagagtagttaagttttcaacgattcattgatatgtctttctcagttttggaacaatgtaaacatatgaatctctaccttgtagccagagtaggagcagtagaacggacagacggaagaggaaagggaattactgtaagcgcctcggtattgaatggcaaactgcatgaccttctttgctgtcgccaagagcaagcgagagtacttgggatctactttcctgaaaaccatggagcttgcagctagagcagcagcggtttcagcggctacatcagagccagggtttgagggagatacagagtagactgtgcgaggagtgtccatatcttctggtcgttcccagcacttgtggtcaccattaggatctcctactccaacgtaaagcttccctggtgtagccctggcacatttcagtagataatccgtggcccaacggatggccacacgggagttctggagctcgggtcccatcttcttaccgtactccaaagagctccaggaaagcatggttgtggtgaacgccatcgggaaattgaacttcacattgtccccagcatcatagtagctccggtcaagtccacctg

SEQ ID NO: 8909 - DNA, 895 bp, Arabidopsis thaliana
aatgtctgtccatgtgggaagctcgatctgaaacaaacaattatggtctcgtgaaaaccaaaacaattgtaaaaagtggagcttgacattcaagctattgtaattgctagtgtaaattaattcaacagacgtaacaaagcaaatcacaatattaatcccaagcatttgaatcttaagctgtctattaacaaatactaagagtaacacttgtgattcaataaatattagcaacatatacaaaatttcaatacattcaacagacattacacaattcaaagtattatagagaaatgccaacaatcaacagaaatatctatgaactaatggaaatcattgcaatttgagcttaatccatctttattcgagtacatacaaataaagcttggaacatttctactcaaacaaaaaagaagagactttatccactaaccttgccagatcgcttgagatgagaagcataagccttgacgaagtcatgaggcgagacgtctttcacagttttaccagttgccatggctcaagttatcaaaagactaatcactgatcttcgtctgggattttgcccaacgcagctgaatctctctccgcaaagactagggtttttattctccaataacaaaacttatatatacggccacgatatttcgattagggttttctccccatatccgggtcaaaaaatccaacccgttctcagcccacactaatgggcctaattcttcatacggccttactatctaaccagtatgaataatgttctttgatacgataatgcgcctactacggccttattatatcagttgactagtattatgtcctaaacgacaccgttcttaattagtaacattaaatgacgtcgttttataatcgcttaaccactggctattagttcgca

SEQ ID NO: 8910 - DNA, 547 bp, Arabidopsis thaliana
taacaatagctccatatgtaattaattatcgctttattgaaaaaaaaaaacaaatcttttcattaatcactacaaaacctttgaacgcttcaacaaccatcccaatctcaccatctctctcacagcgtccattcatttcctaaatctaccagagatccatccattttcccctaaatccatccttcagatccagaaatcaacacaatctttaacgatttcttgcatcacaagcaacaaatcgggtattggtaggtaagatttggttaattaatgcatgagaaaaccacataggagaggaggaacaatggcaatggagaagtctagctcaaagtacagaacccagttctggtacgtggcaatggcctcattcctcctttggcttgtcttgctttacctttttagttcttccgctaaaaccgttcataaccacgagagattgttccggcaagaaaatatcatcgatctccctgtcgaaaacgtccacaaaaccacgaacctgatgaagctcctgtcgttaacgttgtctctgaggacatttccgttgata

SEQ ID NO: 8911 - DNA, 705 bp, Arabidopsis thaliana
gatgctactattaaaatgatagacaaaattggattgttttggccttgatgctacagaggtgtacatggcttataggaatgtgaaaactcttggctgttgtctgttttatctgctgaaataggttcttggagaaaagagacgacgtggagagaacattccagaatacctaggcgaacgaagactgtcgatggagcggtactcaggcatgatgaacccttctctctcctctctattccagcttcttgatccgccattgaacgtcccatacttcaccaatttaccgaatccccatgacttctttttgctgggactccttggtgagccaccattcatcttctgtgtcagatactctctcaccacctgcaaattctgctccatcacctctatgggtggcgacacaagcgggtttccttcaacactcagcttccttaaccgtctcatgcagccaatggactctggcaagacagtgatcttgttgtagctaacatcgagctcaatgaggttcattaaaaggccaatggaagatggaagagcggaaagatactggaaattctggctgacattgaggatctcgaggttgatgagattctcgagatcatccggtagaatcatgaggcagttgagacgggcgtcaaggacacggagagatgtgaggtgagtaatggagattggaagactaattagcttgttggacttgatagagag

SEQ ID NO: 8912 - DNA, 420 bp, Arabidopsis thaliana
gctttggtcctcgaaattactcatataagaggctgtcgagtgaccagtggtcttggagcggagtagagtggctccagaggcgtgaaaggatgaggtagaggtgctgacagtgtcagaaacaccaagggtctctgttggtggctttctcgctttgcctttcttcttcttcacagtcatgtgccatttcttcaacgcttttgccatttgctcatcaaacacagctttcttcatgtttgaacccatctgcccacaacaacaacataagtttgttgcttagttactactatatagcttcgtagacacaaatatctggagagtaaaggctgaaattaggataaatgtacctgagtaactagtgcatacaaaggaagtgtgatgtagctgcacaaaatcaaagctccaacgctgcaaatttatcaa

SEQ ID NO: 8913 - DNA, 470 bp, Arabidopsis thaliana
cttcacttcgccttatttcaggtacttgcattgttttcagttccaaacaaaactaccattgcatgttacatatacttgtcttcaacttttgtgccatgctgtctaaatgctccttctttttgtatagaatgctttccagctaacatacttcttctgggtctggggtaacaacatctctctatattctatgcgcaatacactagttgtttgccttttggaccatgtacatattctcttctattgatacaaatgacttgatacatttcgttaatttggcatgcagtattcctttgggctaaaatcttgctttcacacggatttcaaactagtcatcgtaaaactctctctagggtaaaatttacactcactcttctctagtgaataaactaatagatatatctctcttggaacgattagctcaacaagtttgataaatttgcagcgttggagctttgattttgtgcagctac

SEQ ID NO: 8914 - DNA, 688 bp, Arabidopsis thaliana
tagtaacagccgccagtgtgctttaaaggtattgcgcgttaaccgctcaacgggggaggcgatcaccgcgccaacttccgcaccgttgaccagaatgggtcgccgtgtaccgtcagtggaatcggcgctcgcggaccaaccagcactttgttgttttgatcaaccacccagaactgggtacgccagccgtgcggtggcatacccgggccgggtttatcttccgaattatcgtgttcaaatgaacgcaggatctgaaagacaaagcgatcattgttgcgcaggaagccgcagttgccatgctgcgcatactgctcgccaagcgcatcacttaacagttgtaatcgctgttcattaccatgcttgatgtaatcaataaagccacgctcaaaactgatacgcaccgcccagtgcatactgatcagcaagacaatgcaggtggcgaaaatcgccagaaacagtttgccggtaataccgggtcgccagaacttcattgcgcgctcctttttcgccgcgaaatagctacattttgatgcgtatcgttcggcactctgtgcagagatgaacgccggaacggcgatgctcaacgccatgctaagccaggtgtacatacagacggtttgtgtggtgccgctgtcgacgctgacatgctgtgaaccgacaagtcccagcaacagccctggcgatagtg

SEQ ID NO: 8915 - DNA, 578 bp, Arabidopsis thaliana
tgagaatccaaagttcgatttgcacgctgttggcaatcacaacaacgacaacaattactatgccttcacccaagacttttatcaaaagctcggggaagaaggtacaaacatgtctgttgacagtatgcagacaagtaatgctggagggtctgtgtcaatgtctgtcgataacagtagcgttggttcgagtgatgctcttattggccatcctggtttgaagcctatgcgccatccctactctctctcggatggccaaagcgtatttcggccaggaaaagttactcatgcacttaacgatgatgccttagcacaagcgttgatggatagtaagtatccaaccgagggactggtgaactatgaagagtggacaatagatctgaggaaactacatatgggtcctgcttttgctcaaggggcttttggaaagttatacagagggacttacaacggagaagatgtagccattaagctactcgagaggtcagatagcaacctgaaaaggcacaagccctcgaacagcagtttcagcaggaagtttctatgcttgcatttttgaagcacctaacatcgttaggttt

SEQ ID NO: 8916 - DNA, 741 bp, Arabidopsis thaliana
tccatgataattacacatcctcatcaggtgaattgcgagtttgtcaacatctcaagatggaaagttgccatatgtggggagtacatgaagtccaggcttaaagtatgactcttcatcatttgagattccaacttcttgcttatctctagttcatgattttcatctacttttcagacttgttctcgtggatctgcctgcaattttatccattgtttccgaaatcctggtggagactatgaatgggctgaccatgacagaccacctccaagattctggattcacaaaatgacctctttatttggttattcagatgaaaagcacatggaacatgaatcttcagggtcgttaaatgattcaatatcagatctatcaacagattcacacaggtaggttgctttatatttggaattctaacttttgaggatcctcatctttaactaacttatcagcgtatttcctacttaatttggttatggagcgtcatgctcatgtgttttgtttccatgtcaggcaaccttcaagaagatctagatcgagggaccatgatcatgctaatgttggatctacgccttcttataggagccgtaaatatcatggtgatactcaggacagcactcgtgaagaccaagttcgcaggcatgccgagaactgtcatgatggtgatgacagtccgagcagagatggtagtttagagagggagatgtataaagagcgacggtatgctgctcttgcagtccgcca

SEQ ID NO: 8917 - DNA, 968 bp, Arabidopsis thaliana columbia
ggtatctcttcgatcgtttactcatcgggtgagaaggaagcgtctttcatgtgttcttccgtgtaatcgactgttttattgggcttagtagctctaggtaaaccttaatttcttcttcttcagtacttgattcatcggatctgcgtttttcttatgttttttcttctgggttttggctcagagtcatgatctgtagctttatctctgttaggaccttaaagttataaactttgatttttctgtaatgggtattgattctactaatgaaagttttcgaatcttatggtaaatagttaacctagttggtttcttcgttttgactagctcgtttgtcttaatttgggtatgtgcatggtctttgagagcgaaacgtgttttttttgtttcaaggttcttgttttcatttttgaagcaagtctttcatatttgatatgttaattttgatgatagtaagatcattttactgatggctagtgctgttaatgagactttgtttccagtttttgagctaatgcttcttgtttgtgtttatctttgagtctaaagattttatttgtgtgtacttgcagtttggtcaaagaattcgtaacaagtgaatcttagattgggaagatgctagaaggagcaaagttcaacgtgcttgctgttgggaatcatcacaacaacgacaacaattactatgcttttacgcaagagttttatcaaaaacttaatgaaggttcaaacatgtccatggagagtatgcagacgagtaacgctggaggatctgtctcaatgtctgtggataacagtagcgttggttccagcgatgctcttattggccacccgggtttgaagcctgtacgccattactcactctcggttggtcaaagcgtgtttccccgggaagagtacccatgcgttgaatgatgatgctttggctcaacactgatggaaccaggtatcaactgaagggctgacgactatga

SEQ ID NO: 8918 - DNA, 420 bp, Arabidopsis thaliana
gtcattgggtccaagagttgcagagttgaagctcttgacatgacccaaatggaacttactgtttcagtttggatctgatttttctttggatcaggagaacggtgttatccccggaatcaaagtggacaagggtttggttgatctagcagggaccaacggcgagaccactactcaaggtctagactcgcttggtgcacggtgtcagcagtattacgaggcaggagcccggtttgctaaatggcgtgcattcttcaagattggggccaccgagccaagcgttctctccatccaagaggacgccagggtgctagcccgctatgccatcatctgccaggagaatggacttgtcccgatcgtcgagccagaggtgctgacaggtgggagcacgacatcaagaaatgtgcggcggtgactgagacg

SEQ ID NO: 8919 - DNA, 1713 bp, Arabidopsis thaliana
ggcccaagccttgatagcactttgctggagggctccgcaaaagagaaagtgagcgtccatggcttcaacacatcaagcttgttcattgcgtttagatttagtgtcgcttgctcttcgcgctgtatgcctgagaggaacacgattcccggaatagctggtgggactgtgcggcgcagagcagtcaccgtgtattccgcaattagttccggtgcaacctgtaagaagaactattttagcgttttgtagcaaattaacgttgcatttcgaggtattgatgtctctgtgattcatttgattgtggttacgtaaggaccgggcatgtaaatttaaataaaatagcatcacaccgatacagtttggttgtggtttcagtttcaaaatataagaccaataaaacaacgactccaaaacaaaaccggattgcaacatctagtttggatacctttgggctgtcagagccgggagtgaccatgttcggtttaagcagagtgccttcgaggaggacatggtggtcgttcaaggccttgtacacggcagcaagaacggtctcggtcaccgctgcacatttcttgatgtcatggctcccgtcggtcagtacctctggctcgacgattgggacgagtccattctcctggcagatgatggcatagcgggctagccccttggcgttctcttggatagagagctcgcttggctcggtggccccaatcttgaggactgcacgccattttgcaaaccgagctcctgccttgtaatactcctggcaacgtgcaccaagtgaatctagaccctgagtagtggtctcgccattggttcctgctagatcaaccacacccttgtccactttgattccagggataactccgttttcctgatacaaaaaggaatcagaatccaaattgaaatagtaagttccattttgcaactcttgaacccaatgattaatgattaagactagtgctggagtttggtttttcagggacggaccatgaggagctcaacgaagggtttgccatccgtggttttctggtagagggtttcctcgaagagtataacaccggagaggcaagggaaagtgccaggggacgtgaagaggagctcacggagagcttggcggttggactcagtgttctcaacattgatgctggcgaatcgtttcccaatagttcccgtgctctcgtctgctgccaaaatgccctttcccggtgtggcaatgtacttagccgtctttatcagctcatctgaacacagaaagcgcattaaagagagagaacctaagttattcaacaagaagagtgcatgttaagtgtatgaatttacctgcgtatttgccgacaaaagcagacatggttgctttttggagtgcaagagagacgagttttgctgaagaggacgaggatgccaagacaaagccttaagtacctgcaactattgagaatatataggtaatatctacgaggaatatactattagaatttgtcatacgtgtcagaaggagaacccgaggaaatttatcaacctcggataaagcaaatgggtgattgcttctacacaaccaaatggcaaccaatgatctcagctttatccccaaagtcttggatatgtggagaagagaaagagataggtacaaaacaaaagcagagtgtattgtatagtacctctcacacacacttcaaccacacgagtgtgcaaccggaatcctcgatactctag

SEQ ID NO: 8920 - DNA, 530 bp, Arabidopsis thaliana
tatgacaaaaggaaagaaaattatatttggcttcaatgtccaatatatctaagtttggtggtgacttatgttggttgaagtgtgagagaggtattatagaaaatactctgctcgttctcctccacatatccaagactttggagataatgctggtatccttggctagcatttggtagtgtcgaagcaatcattcctcgggctctcctttctaactgcattcctagaaaatattaccctaaaggcctttgtcttggcatcctcgtcctcttcagcaggaactcatctgtcttggaagaattattaccatgtctgcttttgtcagcaaatacgaaggtaagtacacttaatatgcactcttctcttcgtgttccagtaatcttcagttctccattttatgtgctttctgagttcagatgagctgatcaagacggccaagtacattgcaacgccgggaaggggcattttggcggcagatgagagcacagaaaccattgggaaacgattcgccggaatcaatgttgagacactga

SEQ ID NO: 8921 - DNA, 553 bp, Arabidopsis thaliana
gggattctttttacaatatacaaatttgtagatattttagtacacaatatacaagtgggtcattaaaaaataatcatgcatcataattgataagactcaattatttgtttctggtactactgttaaggtggaattgtcgtcagtcaaagcatcaatatacgatcgagacagaaactgagaaagtgtagacattacaataccattatctcttctaagtcttaatcactttcacttaaaaatcacttttgtaaaatttgagttattcttcttcttctgtaatctagtaaaaaaaaaaattctaaaaaataaaatcaatttgagttgaactgagatgactcctccatcaagtaataccgaggcggtttctgaaatttggacatttggatatttttacaggaaaatgggagaggagcaagtacgtcggtgtatctctcgtcggaaaaaccttggccgtgatgggtttcgggaaagttgggacggaggtggcgagaagagcaaaggtctaggcatgaccgttatctccacgtaccttacgcgcacgtgacagagcaga

SEQ ID NO: 8922 - DNA, 572 bp, Arabidopsis thaliana
agagttatttcctctattacagttccctgctaaacccgatgatttgcctcttgagcaaacatcactctctgatgcacatccacatcaagatgtgtcatcctccaaggctttggttcctttcgatccacagtctaaaagacaaaagaaacccccaaaacactttcaggattttcattgttataataatactagtactatcttatatcccataaaagactatatctcttattcatatatagttgagccttttcatgcctttattaacaatatcacaaatgcggtagtcccacaaagatattcagaagctaaagattttaaggcatggtgtgatgcgatgaaagaggagattggtgctatgattcagacgtaatactggagtgtggtaagtcttcctcctaataagaaagctattggttgtaaatgggtcttcactatcaaacacaatgcagatggaagtatagagagatacaaggcacgtttggttgcaaaagggtatactcaagaggagagtttggattatgaagaaccgttctcaccgtgttgctaagttgacttctgttagaatgatgttg

SEQ ID NO: 8923 - DNA, 661 bp, Arabidopsis thaliana
  unsure (1)..(661): unsure at all n locations
ctcatgacagggaaaagccgattgaagatgattatcttgatgagaaagatactaacttggtgagttgggttagaagtttagttaggaagaatcaagcatcaaaagctattgatccaaaaatccaagagacaggctcagaagaacagatggaagaagctctcaagattggttacctctgcacagctgatcttccttcaaagcggccaagtatgcagcaagtagttggtcttcttaaagatattgaaccaaaatctaaccagtgaaacatcactttctgaatctctacaacaatgttctttttcccttgaaagttttatctctttacctttttccaatgttttgctgtttcccattgttgtatatataagcttgtttgcgttaacctctatatcaaaccttcttgcttcacataaaacttgttgcacaaagagataataagaccttgcaactacaacttgacccggaacataatcttatcttacacgaatggtatttgatcacactcaaggaataatttacttcaaggaatggagacagtggaaaagctcgcatattaggatgaagaagaggaagcttgagtacttgagttcgagctcgagctcccgtagatataagagctgaaccccagaacgtcaaaaccanagacaggattttgaagcac

SEQ ID NO: 8924 - DNA, 485 bp, Arabidopsis thaliana
tagaggaacaggatccccgctcaagttccctgctagaaccgatgatttgcctctagagcaaacatcaatcattgatacacatccacatcaagatgtgtcatcctccaaggctttggttcctttcgatccattgtctaaacgccaaaagaaacccccaaaacacttgcaggattttcattgctataataatactagtactatcttaaatcccatcacagattatatctcttattcatatatagctgagcctttccatgcctttattaataataacacaaatgcggttatcccacaaagatattcagaagctaaagattttaaggcatggtgtgatgcgatgaaagaggagattggtgctatggtaaggactaatacctggagtgtggtaagtcttcctcctaataagaaagctattggttgtaaatgggtcttcactatcaaacataatgcagatggtagtattgagagattccaggcacgtttgg

SEQ ID NO: 8925 - DNA, 532 bp, Arabidopsis thaliana
acagacgctaaaccaaatcgataaaaatttaaacagttaaacgcctacgaaacatttgacatatattcaaatcgtataaaaggcgacacccgtatttaaacgctcctaatacttgtatccttcctcatacaagctctcagaggcggccgagtcaccagaagccccgcggtgtattcccgagggtagcgtccgagttacccttgcacctggtcaggaaagtggcctgagctttggctacattctctgtcttacctgcccaagccttgagagtgctttgttggagggctcggcaaatgagaaagtgagagtccatggcttcaacacatcgagcttgttcattgcgttcagatttagtgttgcttcctcttcactctgtccgcctgagaggaacacgattcctggaactgcaggtgggactgtgcggcgcagagcagtcactgtgtattccgctatcacttccggtgcaacctgttagaaatatagttttagagttatgtctctgtgattcatttgattgtggtccataaggagt

SEQ ID NO: 8926 - DNA, 565 bp, Arabidopsis thaliana
tagtaacggcggccagtgtgctctaaaggcgcatgatttcaggcctgtagaagaggggtgcgactgcatgacatgtaagccaagggaagaaggaggttccggcattacgagagcctatctccaccacctggctgctaaagagacagccggggcgcatctgtaagtagcctctgatcgtttcgaggcatcaactaacttggcaagccttacaattcacaacgtacactatctcctaaaattgatgggaagagcgcgacaggcaattttggatgatcagtttccagctttcgttcgaagtttctttatgaagctatatggagacaagttcaaggttcctctatgggtggtgaacgccttgcgaggggtaggagtcgacttgctagaagattaaaaacaaccacgtgaacatagcaagggtccatacccatcgcagtaacaataataagtagggcgtagtcaaggctgtactcgagattgcgacctatatgtctcgatcgagtgataatcacgtgataacgtgacgctgcttgggacgcgttagatttcaatttccagagtttctgga

SEQ ID NO: 8927 - DNA, 1010 bp, Arabidopsis thaliana columbia
cctatgacgattagatgagaatccgatgagatctcctttcggagaccagcaaggcatagtgtcaatccatggcccatccgttaaccgtcgtattccaccgccgttagattctccgttaacggcgtctacaatgtagagatttttatgacctgatctaccagatcggaacacgattgatttaccgtccggagagcaagacggaaaagcgttattcccagtgttctctagagtgagaatcttcacatcacatggaagatcttctttatcagcggtgagatctgatggatcgaacttgattcgagctatctgaaccgcgattctcgccggagagaagattggacctagagatgtgtagattacatgacgctctgttggactccatgaattgtagaaagctgtacggtctttgatcaacgtccatcgttttgaaccgtcggatttagatactttgattccaccgttgatgtcgaaatcggagttcaatgcgattagatcaccgttgggagatgatgatggaaacgatccgttgattcttagtaatcggagggttttgattggtgaaacgatggattcgatgttaggtacgattgactcgccttgagttgactcgcctctgaatcggtggtagccgaggaactcggagtctggagacacgaaagggttgtaatggtggaaactcggattgagtgactcagtcaccggctgaaacgttgtgttttcaaggtcgtaaatctcgatgtgacggtggttgacgccgcgacggcgagttgctaaggcgattcgtttcccgtcgcggaaagctgcaggagtgaagcaatggagtccagatggagtgactcggattggtgtgattgggaaatcggtatattccgtgaaattctccggtatatctacccggaagatgctccaccaaccgtcgtctgcttggtggtggaagaaaacagttgaatcgccggaccaagtcggccatccaccacgctcgcagataaccactcttgtctctggttttg

SEQ ID NO: 8928 - DNA, 496 bp, Arabidopsis thaliana
attctcgtcgttgtgttgctgcttattgcatgttcattggagactctttggtttcatgaaaatcaaagaagcaagatacagtttctatgagtacagcagaagcaaagtttcgagctatgtcacaaggcactaaggagatgatttggctttctaggcttcttaatgacttcaaggtgccattcgttcctccagcttatctctattgtgataatacagctgctttgcacatcgtcaacaattcattgttataagacacgggaggcagttgaatcaggttttattaaaaccatgcttgtggagactggcgaacatgtggctgatccattgactaaggccatttatccggctcagtttcacaagcttattggcaagatgggagtgtgcagccccactaccatcttgggtgtgtgtgtgtggtgggggggggggggggggattagtttgtatatacttaggctatacttgtgaataatagaagtggttaaaggatcggtat

SEQ ID NO: 8929 - DNA, 1284 bp, Arabidopsis thaliana
tgttgacattcaagtaaatgtcttcctctaatcagtttgaaagattttaagggcattttgagcaaaaaatacacttttcgacataaacttcaacgtcggacaaagtctttgagaatcacatggagtccattggccccaaaattaaggtgggtgtcctcaacacgttacacgcacatgctcatttttgacttgcttcaacttgcaaattatatgtactactccttacttttaagtttctttaatttgtaggtctaaataaaaattaaagcgttaaacaatttttggaatcgacattagttggcattttgttgttgttattgtttagataactttgattatctaacgaaaaaacaaagaaagatcaaaatggatacaaaaaaaaagaagtgatgatgtatacaaataaaatacatgaatttaataaattaaaatcgcgtcgacgagaaaaaaaaaacacttgaagccaaaataaaggggtaaaaaggtaaaagaaaagctaattaacaactgacaaactaactgccgccgttaagttccggtcaacgtcgtccgtggtgcggctgcggttaaaagttcggcgagagctccatggctcgaacctgcatctctaacgctgcgatgtaatcggtcgcttcatctaaaagattcggtacagagactttccggcaaccaggaaccaaacggccaagaatcttcagttttctctcaaccgccggtaacttaatccgattcgtctccgtgagaccttttctcgatttacaatttcccgttgactttttcgcctttctatgtttcttcagcttcgctcggacgcgactcgctaaaatcgctctgctccaccgagtcgtaccacgagcggacgcagctagaactcgatccgccgtatcacgtatctccctcgccgcgccggagacgagtttatcggtctcgttgttgctggtggtggaagatctctgacgaactcggcgtaaagcttcgacgagcttacaagcgtagatctgttgcacacgattcgttttccatctcttcaagctttcttcgttgacacgtcgtgcctctatctccgcctccgccgtctctgatatcctcggcttctttcttcgagacgattcacctgtgttttcgatgctcgggaacagagactccaccattaaatccgatttaaaaccagagattcaaagaaaccgatgataaaaggcaaaaacaacaatctcttcttcttcttcagattctgagagtctctctttctctctctctctctctcaatgtgactagttagaaaca

SEQ ID NO: 8930 - DNA, 974 bp, Arabidopsis thaliana
attcataccatttgatgcgtaaaatcatgtttataatcaagaatcaaacatggtaactatactatatgaaacgtcaaattcaaattacatatcattcgtgttattgctaggcctctttcttattcattatgtcgatgtcaatgagtatgatctttgaagtgtttaaacattcgcattataacatgtactagcgaatgtataatattcgactataatggggaagttaggtccaaacatataaagttccccaatgatgacattaacctacagccaatttctgtagagaataattaactacgcatcaaatatgattatgtaaatgtgataattattagtcctactataaaagcaaaccatatatatacgcctcaaatgattacaacattagaaaatacgatttgtattattaaagtttttatacgtggatcttaatttactttatacgtaattacgtatattgaatgagactacatgtgttcaaaaaaattcataatcgaagtgtagacaagacctaaaggctaaagtattatgcacaaggacctataatgtcaattagttataaacatccatgattttcttttttttctaccaagtagtgcttgatctttttaaaagagtgattagacgtcatttcttagcttcaaattacattgtttaaagggggttaataggaaccatgctcgagagagaaaattggtaaaagctcaatttctcattaataatcttgaaagtttgttacaatgttgtatagacaacaaaccaactaaaccaataataaaccagagattcaccttaattagatgaataaaccgggattataccgagcccttaatcactgctattatatacaagtatagactaagtatatacaagctaataccccccctcaagatggcagtggggcaaagatgttgccactcccatcttgccaatgagcttatgaaactgagctggatggatagctttggttagag

SEQ ID NO: 8931 - DNA, 529 bp, Arabidopsis thaliana
ttcactccagaatcaaccattcgccggaaaatttccaaacagagatcaattctccgtcgcttcttcgccgcaaccaaaaacacaatgcaggatctttcatcaatactcaatccctttttaaccatgtaatcaaaaacccttaaaccctcttcaaacattccgttatcaacatacaccctaaataccaaatcgaaaaacttttcgaaaaattcaaacttttcttcagaaatgtcacaatccaccatcgctgatcctaactcctcaaccggacgcttgtaaaacccgtcgttaacaactgaattcagaagcgatctcatctcattgaacctccggttagaatataaccggtgagataaagtcactaccgccgtgagatcaggtttgagattagattcgaattcgcgaagaagcttgaagaaatcgatgcaggattgagtgggaagagttggctcagatagaacgagacgggtaacatttgaattcaaattgaagaggagtgatggattcgattgaagtttccgatggtgga

SEQ ID NO: 8932 - DNA, 852 bp, Arabidopsis thaliana
  unsure (1)..(852): unsure at all n locations
gtaacagcatgttctctgacttcacgtccctatgtacaatcgccttggagtggaggtaactaagcctgagacaaagaaaaaaggtaggaagagttttgttgataaaggaagcatctttgtctgaatagtttcagaaatgaatggcaaatcaggaaacataaagtaaaggagagattaccctctagcgagatccaaagcgagctgaatgacatccttgatgggtagtttggccctatatttcttgatgaggaacttcttaagcgtgcctccggcaacatattcaaccacaacacaacaggccctcgcaggatgtgcaccgttaccacgtccgccagtatcaccagcaggagggatccgcagatcagaggttcccatggatgctcctataaactgccacagagagagagaggtcaaatgaataagtcctttgatcaaaaggttcttcttctaccttaatcggtgaatgtaaaaagaataccttggtaacgttgggatgatcgagcttctgccagacggcgacctcttgctcgaaggaagcacggagagctgtagtttcagctggtgtggcgtaaccatcttctccccaatctaacactttcactgcagcaaaccataacatccatcagacgggagatcccaaaaaagaccaccagtgtctatcctaatgaatcatatatatcttagtctaggagaaaagacggacctgcgacttcttggccggcgtagacaccgcggtagacagtgccgtaagtaccgtgagcgaggacgtgcttcatatcgagtttggagaggtcaatctcccattcctgcatcgctggtgcgggacgcntcgtggaagcggaattggtgagg

SEQ ID NO: 8933 - DNA, 336 bp, Arabidopsis thaliana
ctaaagagtttgttataatcatctatagtatatagactctactaaaccagaaataaccaaaagattcaccttaattagatgaataaaccggactataccgatcctttaaccacttctattattcacaagtatagcctaagtatatacaagctaatcccccacccccccccccaccacacacacacacccaagatggtagtggggctgcacactcccatcttgccaataaccttgtgaaactgagccggataaatggccttagtcaatggatcagccacatgttcgccagtctccacaagcatggttttaataaaacctgattcaactgcctcccgt

SEQ ID NO: 8934 - DNA, 658 bp, Arabidopsis thaliana
ctaaatcagagggagaaacaatttggaaataagaaagcttttcctgcctaaacccatttgagaataatgctcagggttttgagtctttaagtcttgttcaaatctacacctgcagatacctgtgttgatgataagtttttatgatatcatttcttcttgttacctgcatcggttccagctagtttttttctctgttgatgctctgcgactttgtaatcaatgacctctctgaaaaggtttgcgtccaataagcagtttgcgcttccatacacagcagcttgaacgcttgccatcaatttcgcgatttctctacccgaaaacccttttgttttggcggcagttctttcaggagatcctcagtaacgccttttatctcaattgtctgctgctcttttttgaaaaggctttggagcaaacccggcttttttagattcgtcttagatatgtacttctctaggtagaggtttagaagcttgaagcgctcttcttctccaggcaaggggaattcaagagtctcatcgatacggtcagccactgctgagtctagatcaccaggtctgtttgtggcaagcgctaggactatgtctttggactggtcaccgtacggaagaggagggcatttagtgcactcctttgggcttcgctcatgtatgttttg

SEQ ID NO: 8935 - DNA, 1221 bp, Arabidopsis thaliana
agaggatttggggcaaatatatttttaatttctgaacataaacgaactcaacattaattttctaatttcgattagcgaaaatgtttctggtgatgatgtgagtgggacaccataaacaagctcgtttatatcaaaattgaaaacattctgttcacatattaaaagatacttcaaaagtggatattttttttatcagataccttgtccaacaagaaaataagaagtactaaatgattcatttgttaaggcttgtctatttgctgaaaagttcaacgtcgaagatgagagttctaataggaaccatgctcgagagagaaaacatggtgaaagctcaatttctcattaatgatccaaagagtttgttacaattatgtatagtgtacagactctattaaaccagaaataaccaagagatccaccttaattagatgaataaaccggacattacagagcccttaaccaactctattatccacaaatatagcctaagtatatacaagctaataccccccctcaagatggcagtggggcaaaaatgttgcacactcccatcttgccaataagcttgtgaaactgagccggataaatggccttagccaatggatcaaccacctgttcgccagtctccacaaacatggttctaagaaaacctgattcaactgcctctcgtgtcttataacaatcaagttccacaaatttggttcgctcatggaacactgaattgttgacaatgtgtaaagcagctgtgttgtcagaatagagataagctggaggaatgaatggtaccttgaaatcatcaagaagtctagaaagccaaatcatctccttagtgccttgtgacatagctcggaattctgcttctgctgtactcatagagactgtatcttgcttctttgatttccatgaaacaagagaatctccaatgaacatacaataagcagccacacaacgccgagaatcagtacaggaaccaaagtctgaatccgtgtaacctcttaagtcaaacttgtcatctgcaggatagaaaagaccctgtccaactgtgcctttgagataacgaagaaccttatgaacagcactcaaatgaacacttgttggagcatgagaaaactgacacaaagtgttgacagcatatgcaatgtcaggtcttgtaatctgcaaatacatcaactttccaaccaactttcgataagaggtagaatcagtcaaaggaacaccatc

SEQ ID NO: 8936 - DNA, 927 bp, Arabidopsis thaliana
accgacccttgatggtcgcgtcaaactgaaagtgcctggcgaacccagaccggtaagctattccgtatgcgcggtaaaggcgtcaagtctgtccgcggtggcgcacagggtgatttgctgtgccgcgttgtcgtcgaaacaccggtaggcctgaacgaaaggcagaaacagctgctgcaagagctgcaagaaagcttcggtggcccaaccggcgagcacaacagcccgcgctcaaagagcttctttgatggtgtgaagaagttttttgacgacctgacccgctaacctccccaaaagcctgcccgtgggcaggcctgggtaaaaatagggtgcgttgaagatatgcgagcacctgtaaagtggcggggatcactcccataagcgctaacttaagggttgtggtattacgcctgatatgatttaacgtgccgatgaattactctcacgataactggtcagcaattctggcccatattggtaagcccgaagaactggatacttcggcacgtaatgccggggctctaacccgccgccgcgaaattcgtgatgctgcaactctgctacgtctggggctggcttacggccccggggggatgtcattacgtgaagtcactgcatgggctcagctccatgacgttgcaacattatctgacgtggctctcctgaagcggctgcggaatgccgccgactggtttggcatacttgccgcacaaacacttgctgtacgcgccgcagttacgggttgtacaagcggaaagagattgcgtcttgtcgatggaacagcaatcagtgcgcccggggcggcacggctgaatggcgactacatatgggatatgatctcatacctgtcagtcactgattttgagctaccgacagcagagacgctgaacggctggaccgatttgcgcaacggcagacgagatacgc

SEQ ID NO: 8937 - DNA, 1207 bp, Arabidopsis thaliana
gataaataagtaatcgaatatcataatataagtttttttttggtttgcgacgtaaacatgttatatataacagacgaagaacctgccactctactgcgctgtaaaaggaaagcaacattatcttcaattttatattttgttggatggaataattgaatattttattgcaggttgatatggataaaagtttccagaacttttttattttgttataaataaaggtttccagaacttgcgaagaaacttcttctctttcactactagctagcttgtttcaccagccattattattattgagcataattacttagtactaaactatccagtgaacaagtaattcacaaatagacacattgtttaaccttttgcagtaattaaaggccgaaggcattgttgagttcctccaagacataagattaagggaacactatagtgaaaaaaaaaacaaaaaatacagtaaggtcgtttagtggagaaacagagatactcacataagtgttaagttgtctgacaaagctggagaagttgttgtgcttgaagtatagaggcagaatagtggccgagaaggaatgtggatcccacacgacaaaactgatgcctcccctgttccaagacacaatgtggtttgtgtttggatcaccaaccatctcgaacgtctttgttagaaaaggagaaggccctgcttcctgcaatccctccataggcaccggcggtggcattgaccgtgctctggagcttgacgacgggtccatcttgttagcaatgctaatgctagaagtctaatgatctatgattggatttttcgtaaattataatccaaggaaggaaacgatgcatttggggttcctgtattggagaagaccaaaacagcacagaaccaaaagaagaaagagcgggaagtgtattttttctttaaaacagagtactctgcttttgctggtggttagttacttagtttatggcagttggggcaggaaatgtggcgaagacaatggccacgtaggtgacttaaatccatatatatatatagcggggagctggtgatccttaaaattcttttagtcaccaagtggagttcgaactttctagagctatttaccagagggaggaagggtgcatatcttcttagaaagttccggaacttatacttttgaggagattaaggtaaaatcgtatgtggtggatctccatgatttacatatcgaag

SEQ ID NO: 8938 - DNA, 551 bp, Arabidopsis thaliana columbia
tccttactctcgacatttaccaaacgatatcgcagcttatgcctcaaatcgaagagatttttagttatgattcgactactgcggttcgactacaagctgctgattctctcaacaatctcggtgaagagattaattcaatggtggctgaattcgaagcttcgattacgaaagaatcttcgaaaaccccaatccgtggaggcagtgttcatcagctcacaaggtacttgaaaataatctaaaagggtgaaatcctctaatttgtgtaacgtttaagtttattgtattaaactgtggacttccaactcaaaactaattggcaatgaatagagagtcttatatcttatatataccacttaagaccctactcaactttcgatttgtaacaatatccctaatatatataatttaccataatcataacaggtacgtaatgaatttcatcgtttttctcgcggattaccacgaatgtctcgctggagtcgcaccgaatcgacgttgccattaccggaagattactttgggaacaatgacgaagacaacaccgaaggaga

SEQ ID NO: 8939 - DNA, 513 bp, Arabidopsis thaliana
tgtaacccgaaaaccaactaaattcctaattaatttcactctgacgaaaagtagttgactacaacacaaattaaaaacttcgatcactgaaactaaaaaaacagagtatacaattaggtggcttcctacgcaagtaaccactacatactttagcttcttctactttggttggttaataacaatatgaaagaaagtttattctccaatttttctaagccgttggtttttggtttctttttgtgatggatccagtggtgacacagacggaagagttccagtacttgcgactcgttatagcttaaacgcactcgaattacccatcaagacagcttggaggccatggtaccatgaaaaacaggtacccgtggacctaattcaccagttatatgaaattcttgatttgagtattgttagaccggttaaattcttgatgatgctataacaggtaagtgggtggcttcaagaatacgaaggtttaacgtttgctacgttcagaggagctggacatgcggt

SEQ ID NO: 8940 - DNA, 594 bp, Arabidopsis thaliana
taatatgtttgataattacttataaaagtttcaaatggcaaagcgggatcctgaaaccggtgccggtcccgatatggtgacattcatggaggagactcataaacggaaatcggatggtgtctttgttgattaaaaagctgaggaaatagctcgtcgctgccgactgatggagggagagaaaatcacacaattgagtcaacaaccggatacgtccaatgttgatcaactcacacaagtggaacaaaatgaaattttccgatcggtaagtaatagttattataagattatatttagctactatgtttttttcctaacaacaattttttattataagagaaaaatgaagtaaaaaaaaaggacgtaggtttggtgttggttccacccgtttgatgaagaaattggtggaagttagtcatattcaagagaatgttgccctaataaaagatttgaagactcaattaaaagatgctatattttggatgaatattatttctcaactgcatcccgaactcatatcgccttctcgacaaaatcaaacgggatgggaaaataagaaacaacaacgttgacaatctatttgataatgtataatat

SEQ ID NO: 8941 - DNA, 628 bp, Arabidopsis thaliana
gagattcaacgatcttgatatcttctaccaataaatttaaaagtgtgaggtcatgatatttgaagtacaatctaaagcaagatcataggcaaaactactgaaaacataaattcatcagaatggtaagattgcttaccccacaaagaaacaagatccttttatttgctccagttattttaccgccaagagccttgacaaaaagctggataaattcaggatgaccctcatatgtagctgcagtaatcaaactaccatcaacaacacagacatccggagttatcggttcgacccacttggcacctgcagcaacaagggaaggtccaacagttgcataagctgtacattttcgaccattgactgtgtctgcagctgccaatatcaactgcccatggcaaatagaggcaatgggcttgccagatcttgagaactctttaaccagctcaacaacagatgcagtcaaggccaggtattctggagcacgtcctcctggtataacaatccatcatacttgctaaggtcaacttcatcaaacgttgcattgagcgtgaaattgtgacctcgtgactcaaaatatgtctgcaaattctctcagaaatacatcagaaaagtgtgcacagcttaaagaaac

SEQ ID NO: 8942 - DNA, 523 bp, Arabidopsis thaliana columbia
tagtaacggccgaacatgagaccataaaaccgcatacgacatcgctgaaggactcactcattcagaggaaacggcagagatcaaagagatattatcgcgttgcggtgcacttaaagccaacgaactaaaccagccaagagacgagcttagaaaaaccgtgaccgagatcaagaaagacgttcacactcagctggaacaaacccgaaaaaccaacaaaaacgtcgatgggatcgccaaggagctaaggaaactccacagagctggaatcaacaatgcgaccaactctgtaaccgtcgtggctgttctctttgccacggttgcatttgctgccattttcacggttccaggaggtgacgacgaccacggtgtggccgttatggtccatgcaacatctttcaagatattctttatattcaacgcgatcgcgctcttcacttcgttagcagtagttgtcgtgcaaatcacgcttgtaagaggagagactaaaacggagagacgtgtggtggaagtaataaataagctc

SEQ ID NO: 8943 - DNA, 1144 bp, Arabidopsis thaliana
gagagacacttggctcaccagacaaactacctaatcacccaaacgaagaaccaaacattttgaaattttttgggaaaattacaaagcacacgaatttagcaaaaaggtaatagatttttcttctctttgtgtgtatagaagaaactgtggtttttgttcatcttcttttaattctttcgatttatgtccacacttaatttttggataaaattactaattgtgcctaatacttgtcataaacgcattcatattctcctgttggtttaatctgtttttatccatttgactattaaagttttgaaatctgttagtgtttttgaattgggttttgcagatttcttgatttttatttatagattagggttctgatactaaagtttggatttttaaactaaagtttggatttttttttgtattcatggttcagatccagttattaggtggaagcagattttgtagaaaaatggatggtagtatgaatttggggaatgagccaccaggagatggtggtggaggtggagggttgactagacaaggttcgatatactcgttgacgtttgatgagtttcagagcagtgtagggaaagattttgggtcaatgaacatggatgagttgttaaagaatatatggagtgctgaagaaacacaagccatggctagtggtgtggtccagttcttggtggaggtcaagagggtttgcagctgcagaggcaaggctcgttgactctgcctcgaacgcttagtcagaagacggttgatcaagtttggaaagatctatccaaagttggaagtagtggagtagggggaagtaacttgtctcaggtggctcaggctcagagtcagagtcagagtcagaggcagcaaacattaggtgaagtaactttggaggagtttttggttcgtgctggtgttgtgagagaggaagctcaggttgctgcaagagctcagattgctgagaacaataaaggcggttactttggtaatgatgccaacacaggtttctctgtcgagtttcagcagccttctccacgagttgttgccgctggtgtaatgggaaatcttggtgcagagactgcaaattctttgcaggttcaaggttctagtttgcctctgaatgtgaatggagctagaacaacataccagc

SEQ ID NO: 8944 - DNA, 970 bp, Arabidopsis thaliana
tgatttacggtgacggcaaagggaagaccattatttccggcagcaagaacttcgtcgacgggactcctacttacgaaacggcgacgtttggtgagtcctcttcttcccttgttccttattattatctttgattaagttgttaagattagtgaagaggtcaaatttgatttggtttaggtaagaacaaaaaagacttgacattgttacatagtttaccaatttagctatggttgttaagtttctcttttgatgcagctatacaaggcaaaggatttataatgaaggatattggaatcataaacaccgcgggagcagcaaaacaccaagctgtggcattccgatcaggctctgatttctcagtctattaccaatgctcattcgatggttttcaagacactctttaccctcactccaaccgccaattctaccgtgactgcgacgttactgggacaatcgacttcattttcggaagtgctgcggtcgttttccaaggctgcaaaatcatgcctcgccagcctctttctaaccaattcaacaccataaccgctcagggcaaaaaagatccgaaccaaagctcggggatgtcgattcaacgatgcactatctccgcaaacggcaatgtgattgctcccacgtatcttggccggccgtggaaggagttttccacgacggttattatggagacggtgattggagcagtggttcgaccgtccgggtggatgtcatgggtttctggagttgatccaccagcaagtattgtctacggagagtataagaatacgggcccgggttcagatgtaacgcagagagttaaatgggctggatataaaccggttatgtcggacgccgaggctgcgaagtttacagtggctaccgttttacacggagctgattggatacggcaacaggagtgatcaatcgagctacttaatatagtgacaatacaattggattcgtagcttgtttttga

SEQ ID NO: 8945 - DNA, 846 bp, Arabidopsis thaliana
tcgtagtacactgtatatctacactagtcttcactacgatctcaacaccacccgaagatcctgtcaaatgtgtgtcgggaacacgaactgtacagttacaaactcatatgggccttcccagaccgttccacgtgtcgagccgccaatgtggcttatccaacaaccgaagccgagcttatctctgtcgtggtgcagccactaaagccgggcggaaaatgcgtgtaaccacccgatattcccatagcatcactaagcttgcgtgtaccgacgggaccgacggtttgcttataagtacaaagtttctaaaccacacggtgcgaaccgatgcaacggccatgaccttgacggttgagagcggtgtgacacttaggcagctaatcgctgaagcggctaaagttggattggcgttgccttatgcaccatattggtggggtctaaccgtgggtggtatgatggggaccggtgctcacgggagctcattatggggtaaaggaagtgcggtccatgattacgtgaccgagatcaggattgttagtcctggttcggtcaatgacggctttgccaaggttagagttttaagagagactacaacgcctaaagaatttaacgccgctaaggtttctcttggcgttcttggggttatctctcaggttagatcaattaaaaattcatattttgttcttattacgtaacaatatcagtcatagctctaacactttttttttactcaaaaaaggtaacccttaaattgcaaccgatgtttaagagatcgttaaggtatgtcatgagaaatgattcggattttggggatcaagcagtaacatttgggatgaaacatgagtttgc

SEQ ID NO: 8946 - DNA, 354 bp, Arabidopsis thaliana
ccaaggtaaatctacaatgtaacattgtgtttaaccagaccgatatgacttgtaatacaaggttgaagaaatacattttcgagtagcttacatgcaggtgcaggcatgggtacttccatgtgggtaacaacgattacacacacttggaaaatgtatgctatcggaggaagtgctaacccatcgataaacagtcaaggctatagatttgctgctcccaaaaaccactccgccaaggatgttcgagtcttccgagttgttgcgtgcttataaacagagaaaatggagccctatttccaaaatatgtaaccgtacaggtgacaagaagattagacactaatggtaatgagtggatgg

SEQ ID NO: 8947 - DNA, 563 bp, Arabidopsis thaliana
tgacatgttgatggaagaagatcttgaaggtcagtcttgtatgttggaagacagtttggctttacaagccgcagagagatctttcttcgaagtgcttcaagatcaaactccaatctcgggtgatctagaggatggttctcttggaaacttcagttctataacgagtttgcatcaacctgaagtttcagaggagtcaaccagaaggtatcgacatagggatgatgatgaagatgatgatcttgagagtggaaggaaatcgaagctcactgcgatttctacggtggatgagttagcagagaagtttgaggaagtgttgttggtatgtcaaaagaatgatcagggagaagcaacagagaagaaaacaagacacgtaaaaggctcatcgaatcgatacaagcagcaaaagtcagatcagccagtagatatgaggaatcttttgatgcaatgcgcgcaacgtgtggcgagttttgaacagagaagagcttttgagaaactgaaggagataagagaacactcttctcgccacggtgatgcgactcaaagacttggttacactttgctga

SEQ ID NO: 8948 - DNA, 685 bp, Arabidopsis thaliana columbia
tgctcacttaacaacaacaagctaattacacgtctacgttcactatttatagacaaatgcatctagattagtcttcacgtgctcttcctcatttagcacgtgtttcttcctactcacatatacttgagtcagcttttcatatcagtgaattcatatgtttttatgagcaaatccgtctgggtcaaagaatggatcagctatatctgtagcagccagtcttctggccgtgtcactagggattgaaactgatggttcttcagcaagtcagaactctgtggtcgagaataaaccgagtatcgggttcaggagccgagctgggggtagcttcctgtacctgaaggcggtttttgaacactagtggcctaacaggtaagagattagggattctaatgaagcattcttccacagtcttgatcatcgcatcaaaacattaatgtgaaactcgttactcagttgagaaagcagcgttgcaaaaaatgaaagaactttagaggggaatggaatcaaaaggctaacgaaataaaagttagatgcaatagtggcacgtggttcaactttgagctctgtcctcgccattggagaatatcctctgtttcaaaagttttgtatgatacataaaatggtttagtcactcaagtaaattactttttaccttgataaattattacgcagtaggagaaatatg

SEQ ID NO: 8949 - DNA, 504 bp, Arabidopsis thaliana
ctgtattgcaagtaatataagtctagttaaacacaatgttacattgtagatttaccttggcattctctgtatgagcccttctccaaaatggttatacgcaactgtcacttgcatcatcttgtctcgtgtgtacgaatcattgtgccctagcaacatcacctgctccacaatatcattatgatcaagaaaaaacagagttttacaaaaaaaaataaaggagaaagttttaggtgtttgattgacctcatcgtggtgagtgaaatggttattggaaatggtaatggcagtggaaccgtttacaacatcaacaagaccatcagtacagttagagagcgagttgtggtcgatccaaatatgacttgacccaaatatattaatagcatcacatcagccgttcccataaaccggcctgacttggcgagcttctgacagttagattcccggttctcttgcaactgtgaatgtgcaagctatgaacgataacattggtaatattttggattg

SEQ ID NO: 8950 - DNA, 725 bp, Arabidopsis thaliana
ttgactgaaagaaactagctgagaaaccgttggagccttggctttgtcagggtcaatgtcgacgaagcctccttgatttccagggaggaaggatcccttatcagaactgaattaatctcctcagagacttgaggacaaattgcatcttccacaaatttccttatcttagcaggacaagtcagatgtgatgaaaagagttcctggtaacaacttgagatcactgaggcaaactggctatccttataaaaggtggtcccatttgcatcctccaaaactgtgagattattgatacaagttctcccctttgtcaccgcatgaaagaatccagaatttgatctcctaaagtgagcaagttctgcctacttctttgtgtttaaaactcttattctctttgataagcagcatttagatctgaattaatcaaaagaaggagggactcatcatgaacatggcttaccattgcatgttctaaccgctctctaaagtgctctatctccacctgactattcctctacttctctcttgtccatcgtactatagcccctctacaggctccttatctctcttcaattgaggatagagggtcatcattccacacctccttgaggatggtttttagttcatcgatattcttcagcctcctaacatatcggaataaccatttcttctttttcttttcctatcctagaaaggaaagtgataagtgtgcattttatacgttttga

SEQ ID NO: 8951 - DNA, 942 bp, Arabidopsis thaliana
tgaatctcctctgcttcttctctttctctccgtcggatctgagatttttcttccgattttgaatttgtttgattttttttgttcttagatcgcttcaattgaaagttaagaaattagaggaggagagagaagtcggagaagagaaaccagatctggaaaacgagaggaaagaagagagatcggagaacgatggttctgaatctgagcaccgtgaaaaggcggtttcagcggcggaggaatctgatcgggaaaataggtcgatgaacgagtccaactcgacagcaaccgccggagaagaagagagagtttgcggagacgaaccgagtcaaactcgagaagatgattccggtaatgataagaatccggatcctgatccggttaacaaggatgcgacggctgcggaggaggaggaaggatcggttagtagaggatcggaagcgagtcactcagacgagttaggcgagtcagggacatcggaaagtaaatggaaacggaaacgaaggaaacagggtggtgccggcgagatcagatcggctgagagtaaatcacagccgttgattagtcttcttgatctgattcggtcccatccgcgtggatctttgttcgaacgccggcttcggagccaggtatgctaatatcttttttcccttaacttcttatatttttatatttaattataatcttaaatcttaatcaatttattattacgcgtgtcttttctcttttacgtttctttgttcattcctaaatcccaaaattataatttaacaaaattcctgctaactaaaaattcataaaataagatagtcattgtaatttgtactctagaaatcttacaagtatattctgaagatatatgctgtagtatttatggaagcttcatgttggaaatgttattcgagaatttatgggaatgttgaaatatggagagagaaggtgaag

SEQ ID NO: 8952 - DNA, 766 bp, Arabidopsis thaliana
tattatggcatgggttcttctttccacaacgtaggagcaaagcagagtggtgttggtaccgtcagagttggccggaagagtgagctcgtcgtcgttgctcagcgcaagaagtcgttgatatacgccgttaaaagtgacggcaacatcctcgatgacctcaacgaagccacgtgagtctatattcctttccttttaacaaattttctcgtgactaaggctatcttcatgtgtactcgcaaaaactctcatatacattacgtactcgccatgatagttattttattttggttaatcccatcataacagttttatacatactataatcaactataatggccttgttgaggattgagtttccatggtgtagatatatgtttttaaaatcgtttgtcaataatgaatcttaacatatatatatatatatatagaaagaaagcttctgatttcgtgacggataagacgaaggaggccttggcggatggcgagaaaacaaaagactacattgttgagaaaaccattgaagccaatgaaactgcgactgaggaagctaagaaagctttggattatgtgactgagaaaggaaaagaagccggaaacaaggcggctgagttcgtagagggtaaagcagaagaggctaagaatgccacaaagtcctgattcaaccactcatgtagtcatgttcaatagtttacaataagatcagtttgttgtaatttctttttcaccatttgaaatgaagagctgtttaattctcactagcacattt

SEQ ID NO: 8953 - DNA, 545 bp, Arabidopsis thaliana
tgggatgtttcctatctagaattctccacttagtcttccacaaaccaaaagttctctcgattactgatctcaaactagcatgtttatggttaaacattttttagtgattgtaggtggttctcctctattgaactaatctaaatggtatctaatcctatgctgaggacctaaatatccacttctagttggataaccaggatccactaaattatacttttcaaccggaggatgaggaaaaacagtgatgtgggtagcacattatgatagcaccttcgtgtcatgtgcttttctaggaactccaacataggcttatgggaactttagactaaaattatacatagcgagaatattcatagttggttcggattttctacatataaatcgctctaaaaaccttgatggaggatgcacgggtacatgagtaccatcaagggcaccaatgcaatccctaaaataaggcatatagcgcttaacctcaagtataaaaagactaatatatgtgacatcacccttgtaggttcactatgtttgctcaagttcaaaag

SEQ ID NO: 8954 - DNA, 1019 bp, Arabidopsis thaliana
cgttttatatcttttcttaaggtcctcataaaagtctttttctcatatcatcatatgtattggctaacggtttacccaataagacaaatacgctgttaaatatctggttttgtttaacaaaaaaaaaattgctaataaataaaccatatgattgagaaagattgtcagactgactatcaaaaacgcctaattgattcgatcccattatcttaagttccaacttgtcctcaaactcttttttttttctttgacgtctcaatatttaaaatgatctctcaaagttcaatacaagccaagaaacatatttgccaatattcaaaacgactttaattactctttcttggtacgtatgtatagataaactcgttcacattgcttaaagaaaaactaatccaacaaaattgtgaaaaattcatccttaacctcctttctcttacaaatcttcggcttcgaagagtgtatatacagtgatcagttagtgaccaaaaataacaaatttacaaggaattaaaagaagaattaataacgagtttaagccggagattagtcaagatttcgatttcttcggttataaaataaacaaatcactaggacattcttgtggcggccacggaggaggctaaagggacaacctcggcgaggggagtagacagaggagttggaagcggcgaagtccgacacacaggacacgtaggattgagtctaagccacgtgtcgatacatttaaggtggaagagatggttgcaatctggtagctgccgcagcagatgttttcccttgtagtctcctaaacaaatggcacaacacgacgccgttgttggtccctttgcttccgagtagagaatctttggatagctttgaatggtgtcctcgtcaagaccggggacaacgtcgatgatgacatggtggtgatggtgatggatacgtgttgaatcttggttggtttgtgaaggtgaagaagagagctggttacgtgtgcaatagtatgaggtgagggtgatggtggtgatgaggaggag

SEQ ID NO: 8955 - DNA, 512 bp, Arabidopsis thaliana
cctcggtgattacaatctctacaagagaaaatctcctctgtaacaagcaccaactcctccttccttcatcaagctcttcactgactgcatcactgtcattgctcgtctcctcccgttctctatctgcgtctaagacttgcaaccgcgtcttgattgtgtctactggcatagttactaaagccgagcaaccgcttgctgtagctgcactcaacgcttgaaccaccactgagccaccagcatcttccttgtggttgtaggagtgcttgtatcgagaccaaattgatttttgagccaaagaataagacgcccaccaaaccgcgttggaaggtgcgtaagtcaagatcgagatcccaaatcctctgtagaaccctcttggtccatctgtgtaaagaatctttctaaaagcatcaaacccatttctgtatctgcaagagttcatcactccaggaagatgcttactcaaggagacatcgccttgaaccataagcccttgactcacaatatcaatcgga

SEQ ID NO: 8956 - DNA, 943 bp, Arabidopsis thaliana columbia
cataaaccaggatgtgcaggaacggactgcgacgataatggtagatccaagagctatagcttctccacacccattcatagtgccagacgtgggtcgtctatgttacatgccaacttgactcaaagggatagaggttgctacttcgatttcttggtgcatgtttgtgccacatgataagatctcgtgtctcttatccggatacttctgtagaatctcttactggtattttggaagtagtgatccataaacattcttctgatttctgttgtttataggaaaatgtaatgggagatcttcttcatcattcagtagagataggtacacagttccaagtggtgacaatctgagatctgaaagtggaggtagatgttggatattctacttcttacatatcaaagaagcaaaagatactagttaacaattaagagatatgattttgtagtttgaattatcaggaatcagtgaagagaaaggagatatattctctgtgaagagaaagaaactgcatcagtgggtcaaagatacatggcttactgaaatccctgagcttacctcaaacgggtacacaatagttgttaatttatcctaatcttaatacttgtttctataatgcactcagaaaataatcatttttcaggcatgatttagtttctgttctcctaactcggctgtcccctggtacggaggagacacaggtaagcttgatagaatccctgagtatttgtcaattgcttatcttgatcaatcctcagcacttttttttccttctcagccttctaggttttccaaggagacgacggccagagtcaaaagaagaacgtttgttgaatctcctggctcaaagtttcttaagaggtcccatgaaagctatgcagaagttgccacagtctgcatatggaaagggagagattgatatcttggcagggatggctggaaaataaca

SEQ ID NO: 8957 - DNA, 758 bp, Arabidopsis thaliana
cttcgcaaccaaacgtgccttatacctctcaagattaccatctgccaaaaacttcaaagtaaacacccatttacaaccaactgctttcttccctttaggtaacgtagtaatctcccatgtatttgtcttctccattgcaccaatctctgcatcaactgcctcacaccattccttggtgtcctgtgcctcagcataattagtgggaataggaatttttgtgatattattgatataacacatatgagatggagaaattttagagtaagagatagtagaagaaataggatatttgtgatcagattgcatggtgttgcaatgataatcattcagatgagcaggaggtttcctaactctctgagaagaaatttgtggtggtagatcagaaatttgtgatggaagagaagagggagaatgagtagtatcagatatgatacctgaggacacaggaaccattggtgtaaacaacttcaacgaactctctgaacccggattctttgccagaggaaacacttcttcgtgaaactgaacattccttgagatgaacactgtgttactctccaagtccatcagcttgtaacctttgtaaccagaaggataacccaagaacaaacaagctcgtgaccttggctgaaacttatgtctttgttttggagatgtagaactataacacaagcaaccaaaagtacgaagctgctcataaacaggtgctgtaccagtgagaatctcatatggagtcttgttcatcaatagctgtgatg

SEQ ID NO: 8958 - DNA, 584 bp, Arabidopsis thaliana
gcactcttttggtaattaaccaaccttcttcttttaatcctttttacattcatcatcacatctgtttatcggttccgttttctagttttgtttttatacagccaaacgttgttactctttaagtctagaaattacactagtagtgtccattgttgtccgatcctgttcttggattcacgaaaatgtgcaaaagctctgttgtgtgtgtcaaattgtttttcataatcttaattagattctgccaaattcaaattctgttccggcaaatctaccacctctgtaacttgtagtcaaagacctgaaacctttgtaatcactcttattttagggttttatgtgggtttagactttatcacttttgagatgtcttcaagataattggaatgttttatctttctcttctttttattgctgtgatcatatagtctgactgaattgtataaacagagcttttcgctggagagaaagagtggcaacaagtgctacatgatggcagcgagggccttgaatattgtttggggacatgagcaaagatactggcactggatctctctccctaacactaggtctcctttttttctgtg

SEQ ID NO: 8959 - DNA, 847 bp, Arabidopsis thaliana
catccgagattgtcgataataccatataataaaccgtgcataatagtagaaggagagggacaaagagtcaccaccatcacgtataatggtcatgcagccactgacgtcagctcaactttcacttcatatccatcccatattgtcgtccgaaacttatcaatcatggtacgtaacggaacggaccaacatatcttttgacttatatactatattttgttacgtaacaatataattttgataatgataacattttatatgtttttgtggcagaacacttataatcgtttgactagtctaactaaagcaaacggtatgagttgggatataaagccagcggttgcgatttcggtttatggcgataaatcagcgttttacaactgtgatttcttggggttgcaagatacagtgtgggataatcttggcagacatcacttcaaaaattgttacatcgaaggtgctatcgatttcatttttggaagtggccaatctgtttacgaggtatgtatacttaatatctctctctattacgtacacttcgattttcaatggcaaaacacgaaaactgtacttgatcactatttacacaaagactgttacattcacagtacaaacacacttttataaaatctttgtttcaaaacgccctagaaaggagctaggcacagccacaccactgtactaaaatcagctttttgttctagaaaaagtaacatttcagtcagtcaaataatagaaacaaacttggttaaaaccctgtttgtagcatgtttttccgtaggcaaaactatacatgtgacttgactagcgaggaggactgattttttgtaagtcacaagttgattttgag

SEQ ID NO: 8960 - DNA, 754 bp, Arabidopsis thaliana
tttggatagagtaacttcagattcagagatctgtggctaaggacttgtttttctaacttagtgattttcatttacggttttgcttctgtttttcatccttcttaatcctttttcttttggctcctccaattggttttccatagagacaaggtgcaaaatcgtttgaaggattctttgttcaacaaagatatggaatgcaacaaggaggaagctataagagcaatggatattgctaagaggaaagttgcagagaatgattacaacggggctaagctttttgctaacaaggctcaggatttgtatccgaaacttgatggtttaagacaagtgatgatgttgatcgatgtgtatatctcagcaggaaatacaattagtggaggagaatctgattggtatggaattcttggtgttgatcctttggctgatgaggaagtagtgaagaaacagtataagaggctagctcttttgcttcatcctgacaagaacaattgtgaaggcgcagagggtgcgtttaagcttgtgttagctgcttggtgtttgttatctgataaggttaagagaattgcttatgatcagaagaggaagttgaacgaagttaaaccgaaaaggagtcgaaagcagaaacaacctccaaagaaaccaccaaatcagccgaaacaacaaccaaatcagcagaaacaaccaccagatcagcagaagcagccaccaaatcagcctagacagccccaaaccagcagaagcaccacaaaacgag

SEQ ID NO: 8961 - DNA, 892 bp, Arabidopsis thaliana columbia
tgagctagaggatcctgggtaccgagctatattttggcgttggtgttcgaattcgtgactttgaaaatattttaatatccatttaaggatgatcaacttagaataccaatttgagaaccatccatgccggatcaaaaatgttaattgcatgcccctagactaagtctatacatatattaaaatatataattaggaaattttcgctttatattcttgttgaaatgaatcaatcaatcctcgtattgacctttacaatacatgtactaattaagatagaaactaagatatactaaagctttcaagtttcagtttccatataaatttcggccatatataacaatttaaactagttttattacagtcggtattcaaatccatcataccgctaactttaaatgttcttagatataaacggttgagctactgactcttgaaacttccatatgatctttactacaacgtttgttcaatatatttacccgatcgtctaaaaaatattgaatttattcaacagttataaatggaagacaaaacattggtcttttcaaaggaaaaacaacatcaaaagcaaaaagccaaagcgaaaatgcacatagatatttaagtacacacataattccatttcttataatgacaacgtctcgaaagggaaagcttttaaaccgtgtggatacacttattaaatacactcttactttgagtctcgcttcatcatgtatgtaaatggttagtatagtggtggagagggagagctatagtaaggcggttgtgaagacgagctttcgctctaatgcatcctgcagatcaatggtcacttcgagtagctcattatgctccttggcttacatattggtggaacactcagaaatggttccaatctccaatgtgattg

SEQ ID NO: 8962 - DNA, 983 bp, Arabidopsis thaliana columbia
agcatgcccatgaatttcaccacccatggagtaaccaaagagatagaactgaggtcctagtcctaacccatcagcaagctcttctatatccaatgctatgcttcttggtgacccattcaggttaggatcactctctccataaccaggacgatcaaaagacacaatgtatatcctcaattcctccacaagagcctaagcacaaagacaccatttttccccattagcttcactaaaagacacaaattttgacattttttctacatgctatcgatgattcaacaaatgggtgatgttagatttggccggaaaacttaccggcgataagaaattggcgaaatgcgagtctcgcatacaagaatcgaagccgtggatgtttatgatcttgaacttggcttcgtctctagggattccgaattctgtgtaagccagatgtcttccgtctctcagtttgatcctcggtgatgtcacggtgggtccaccgggagagccgacgattttggcgggtggtggttggattgtttgataaacccatgctaaaactccgacgaacgttaccaggagaagcgttttcagataaccttcataattgaagaaacaagtcttctaagaccatttagtaaaccgttttcggcccattagaccagcccattaagcggttttattaatatatatatttgttacgagaattttgactctttaattaattcattggtttatgaaattatgattagagaattaatttcataacatgagattattcaaagacaaaaggggataactctgtgaaaactatacagaaattttttattaaaaaggtaaaaaaaaacacacacattattctagttttaaccaaaaagtattacttcttttcttctgacatcccaaatatatttatttacttaaaaagatgcatagagcactacccatgctttaaagtctaagttggtgttacaagaaccgtatcactttaatgaattgactga

SEQ ID NO: 8963 - DNA, 1062 bp, Arabidopsis thaliana columbia
tgccgccagccctttcatttgagacattagtacacttgtattaacgactaaagttgctttgatttgattgttgatcataactagtttagcattgcaagcaattaattattcttaaaaaccacattgacttatacataggcttctctactctcacttacatcttcttccccaaccaaaagtgacttgatgatcttatcagtcataccttccacaaatggtacaaaatgtcctgatccagatatttcatggtaacgaatccatggcagctttgacgcgacataccgttgaagctttactggcacaaacttatcctcatcgccattccatacgtgaactgagccattgttgttcgggaacggatcttgaaggtctaacggatcaaactcccagcttgaaaatgcgacattcaaatctcggtgtaagcttacatattcaccttgttgtcttatgtatgcctggaacaaaaaaaaaggaatatacacatcatatgattccaaatcatcttctcattgtagaggtatgaaacttatgatatggaaactgaacgtctatagatgtgcttgtacccgatttggattgacgaatccgagcttcgacaagatctccatgtcctgacgtgagaaaataatgggattaccggcaatcacattggagattgggaaccatttctgagtgtccaccaatatgtaagccaaggagcataatgagctactcgaagtgaccattgatctgcaggatgcataagagagaaagcttctcttgttaaatctcccggtaagtttctccaccaatagttaatcgctggagctacaagggcagctcctgctaacctgtaaacaaagtccataaccaaaaaaacacatttcacaacacatcttagctattgtttcaagatcaaagttaatagctttctcgatacatcgaaaacatttccaaaaccaataagacagattcaaatgcagtacctgtgaggaatgtagttaaggcatgcccatgtaatttcaccacccatggagtaaccaaagagatagaactgtttagagcacactggcgactagagga

SEQ ID NO: 8964 - DNA, 569 bp, Arabidopsis thaliana
ccttggaaaagtaagaagccggtgctgattcgactgaaatgggattgttcacatcaatcccaatgtgattattgtttgtctcacgaaaatctggattcctaacagtgtcgagctcaacagcaaacaggtgagaagagggagatccatttgttgatgcgttgaatatccccatgtaccgagttggttgcgcccgtgtgaaatccacagtaggagatatcacaaaggtaatgccgtgaccgccttcaaatcccggcttaggcaccagagcacagacgaaatgtgttgaaaatgagagtggtttagaggagctgaagtcaattggcttcttgatgaaagcatgacccatttgatgctgggagtcttttgcaagctgtagtaatccattgggaagcaatgtagcagacccatcaagagcaagatttgattgaccaaagccgttgaagacaaaactggtatcttttgatgaagttgagaaagagataagatgaaaagaggagatcaaccagattagaaacaatcctttagacattgctgctgatgaaacagagagctctgtctagctgcagaga

SEQ ID NO: 8965 - DNA, 1030 bp, Arabidopsis thaliana
actgtctcctcactcttattttcgccggcccaccaaccgccgtccttctgaaattcctccaagctccttacggtaaacacaaccgtaccggatggggtcccaccgtatctccaccgattgcttggttcgtcatggagagcccaaccttgtggctcactctcctcctcttcccctttggtcgtcacgctctcaaccctaaatctctacttctattctctccttatctcattcattacttccaccgcaccatcatttaccctcttcgcctcttccgcagctccttccccgccggtaaaaacggatttccgatcaccatcgccgccttggctttcacctttaatctcctcaatggttatatccaggtacggttttagctaatttcggtttggttcgtttcgattttccggttttcatctattttgctaatttcggtttgtctgagaacaggcgaggtgggtttcgcattacaaggatgactacgaagacggaaactggttctggtggcggtttgttatcggtatggtggttttcataaccggcatgtatataaatatcacgtcggaccggactttggtacgattgaagaaagagaaccggggaggttatgtgataccgagaggaggctggttcgagttggtaagctgtccgaattattttggagaggcgattgagtggttgggctgggctgttatgacttggtcttgggccggtattggattttttctgtacacgtgttccaatttgtttccgcgtgcacgtgcgagtcacaagtggtacattgccaagttcaaggaagagtatccaagactcgtaaagctgttattccttttgtgtactgagaattgagaaagttgaaaactagtttatcatatgttatgtgtcaatttgttccaaactacctttgtcaaaatttccagtaaccggtttaattccacacggtttagatcttatgttggtacctcaacgatgcacacaaactgtgtatctttagacaaatttataatccaaaggttttgaccagagaggagtg

SEQ ID NO: 8966 - DNA, 1242 bp, Arabidopsis thaliana
atatatcaattcactgtaatgtcatgggcgatgaatgataccaaagcggcgatgtgggttcctgcaacatattgccgtctatttctagcctagcgaccgggaactctggcaagtgcccagactgtttcttcccaagcaaatcaccaggtccacgtagaagaaggtctatgtttgccaagtaaaacccatctgatgatttccccaacatgttcaaccgttttaggctattggtacttgacccaactaataagcacttggattttctggttcctcgcccaacacgtcctcggagttggtgtaactgagcgattccaaatctttcagcattcattacaaccatcattgatgcgtctggaacatcaacacctatctctatcacctgggtggacagaagtatctgtgtttctccacttctgaatttgtttagagcctcttctttgtcgtcactcttcatcctcccgtgtaacagtccgcaattgtactttggaaattttttggttactatttcgagctcagcagaggcagcacggagctgtggcagttgctctgattggtcaataacaggatacacaacgtatactctgcctccagacttcaggtcttccagcatcatctgtcaatggaaagaagatatgttcagatatcatttaatgttgaaagtttaaaaatcaatgatgcctttttctatgatgagagtcaagaaaagaaatgtagttattgtcattggccttactgagtagacttctttgatgccagtctcatttccttcaaaaatgtgcgtctcaactggtattcttccaagtggcataccagtaatctgaagaaacaaagagttgcagtcacaaaaactgcttatagacgtgtaacacatggaacaagtgagtttcaaccagatggataaaagtggagacgtttgacatacttgggtcaaagatatatctccgtataacgctaaggcaagtgatctcgggataggggtggctgacatggcaagaacatgaggagccatactgagatcagctttagaagtatcatcagagtcagatgagccactttttgatatcatagatgttccatataactgcagaagtcaggccacaataaacttcagtttactaattatatgcttacgtcgataaacaagaaagaaaactaaagagataagttcatttaaggtcaccaatcaaatgatcaccatggatcattactgtttattttttcgaaatagttcaactagagtga

SEQ ID NO: 8967 - DNA, 616 bp, Arabidopsis thaliana
tccaagcttattgttatcgatctaaactcgatggaaccgaaaatatcgccctcgttaaggtacaaaatcacgacttacttctaaatcttgatcaatgtgcattggtgtcatctcagaacaaccaactggatattcgaatttaagaccagtcttgtgtttgtttctgtctgaatcgtgaccagggaaacgttggaaatggtgaggacattctggtgcgagtgcattcagagtgcttgacaggagacatttttggctcagcacggtgtgactgtggaaaccaattggacttagccatggagttaatcgagaaagagggaagaggagttgttgtgtatctccgtggccacgaaggaagaggcattggccttggtcacaagcttagagcttataacttgcaggacgaaggacacgacactgttcaggccaatgttgaacttggcctatccattgattctcgtgaatacggtatcggtgctcaggttagccatattatatcggtttgatttggctacattaaggactaactcatagccattgatatgattgctttctctcaattttattggttttggaatggccaatgtagatgctacgagacataggagtgagacaatga

SEQ ID NO: 8968 - DNA, 835 bp, Arabidopsis thaliana
agattaactaagaaacaaaggcaaaactccataccttgacataaccactacggcgatcgagattgagatttagattcttaatctccccaaaatcaccaaaagcattggttatatcctcctcctgtgtctcctcatgaactccagagaccaagataatccatccttcaacggctacacataaacacacacaacaaacaaattcatccaaaacagtcccaattcttcattaccctcaaagaaactatgttctatcttcacagactctagaaccattacattttttataatggttacaaactaaatctaaaccaatctaatttttttcaaaaaacttctaggtcaaattgaatcccaaacacaaggggttatgagaaaccctagaacaaattactaccacaaataaatcaacaacgcgaagaatcagtatgccaacactaaaacctaactaaaaacagcgaaagaggaagagatttagtgaaattacatctctgcggaccaggacggccatctgaaccaagtgattcgaaatcgcgtgaggaaagacgacgctgacgatcggaatctttctcctcgcgaaacccacggcctttggtcttctttgctgattcgccattagctccgcaatagccgacttaagcctcggatgtcccgcgcgtggagaaacatcagctccgtcaatagctgtaccttcttcgtccataaggtcatcctcctctggctcgaaatcgactgcttctgattctatgttcgccatgacttccgccgccgtaagatttccgatagatctcttcccgtttcgccgactgattttttgtttcctttgtttttggggacg

SEQ ID NO: 8969 - DNA, 725 bp, Arabidopsis thaliana
ggacattccaatgctccacgtgcctgcaagccaacattcatcaaaatatgtttaaccagcttcttcttcttcacaaaagatttcaaagttgaaaagagattagtggggtttatattaatgagctcataagtaatctttttacctgcaaattttcccggattctgtgtcgaaataatactccgtgtaaccagttgctgtaaaaacagatttccataaaaagacatagtaaaagttttgttctttttgtcttcattactaatcattgaagctattaaagttgcaaactttatcctaaaaaggctacaaaaatctgaaaacttttaaggtttccttgataaaataaatacctgaaagaatgggtttccatggaaacgacatgacacagctaaatttccaatgtccaattcctttatcctgcaaaactcatgatggagctctggtgagaaacaaaaaacgaaacttttactccgacatcttttagtagttgaccgtacctcaaaattctcccatttcatgagcttcatattggatttctcgataaggcttccgaaattagtgcaattccttttgaaacgagcaagacccttgaaggatccagccggatcagcgaattcacacttctcctcataaacctccggcgtcaaattacctgaaaactcagagatttcgatttagacaaaagaaacagaattcagattggatgattttacactgacctgtgacga

SEQ ID NO: 8970 - DNA, 554 bp, Arabidopsis thaliana
tataaataggattattatcttttaaacaccgaattattattcaaaatacattcaatataaagctttcataaagactcacttttcaagaacagtttttgcaaaaccattgcatatgccacaccaaaatcatggcttttgaggtgtcttgacatgttcaagtttgataacttcctctttgacaaccttcttgttgtgagcacgataacaaaaatagtaccacaaatccgtatcaatgtccgaaacagtacaaactattttgcacttatccaccttcaaatgaatataatgaggatttcacaaactaagtttaaaataaaataaataaaaaataatagaaaggttagtagataaaataaattcataaatagtacatcagtaactgtaaggacttctttgattgtttgccttggataatctccatcgtcatccccagttcttggagcatagagtctcttgtgggatgatccgaacttccaaatttacccatcggttggtaatttctgcgcttaatattataaagaagcaaatatatttagtgaaatagaaatacagtt

SEQ ID NO: 8971 - DNA, 827 bp, Arabidopsis thaliana
caaaccaatctcttatctttgtaatgactttttcaaccctagtaattactatatcttaattgtccctttatacagcctgacgaatcattgatatatatgcatcattttacgacttttagtgacccggctcagtactctgtggctgagtttgaacagcctgaccagcataagcacaacacctgaagcagccaccgtagtagcctctgtagcagcaaccatagcgacaatatcctcctcctcggtttccatatcctccaccgcggtttccatatcctccatcacggtttctatatccaccaccacggtttccatatcctccaccagggtttcctccataccctcctcccgggaaccctccataccctcctcctggaaacccgccaaactgctccgtttgctttacttcgtctctttctgttactcaaaatgaatatatattagtaattgtgcttaatgatatattcagatattgtcactactttataaagtatttgtaataaacatgagcgattcgtgattagtatgagtttttttgtaattaaagcaggccaaattattaagggttgtgaataaggaggattaggtctttgtacaataaaccatactttgaaagtgatctatagaataacatggtcgttatgttacaaatatacaacgatctcgagtaatttataactttatgggaacacaaataaaactagtctgaattttattatgtaccattgtttttctgctctgccgatttctcagcgaggtctctggctaccacctcagaagctataagaagaacaacaatgagacttagaacaagcaatgcttttgaagcc

SEQ ID NO: 8972 - DNA, 1514 bp, Arabidopsis thaliana
cttctctgcgtagaagacgaagagtatgcttccgaagtggaaaatgctgcggttgcggttgcagttgctgcgtcctgattggaactgaagaccaatcccatattccgcagatcccaatcgtttagtttattgctgatgttcttgttgtgctgttggtgctgcggaaaatcgttaaatatgtcgtagcttgggttaccaaatccagcagtagcagctgatgaacctccttttgcatccgagctgttgacctcttcttggtaagaaactgatactggaactgaaatccctggggcacttgccaacgggaagctgctgcgaggtagatccgcggggaagttattgaagaccgagtgagtagttggtaacactctgctgttggtctcggggatactgtttctaaccgccagcgcaccagtgagatcgcttcttcttgaaacgctgcttgacaatatcggctgttgcccgagggatggtagcatcgatggtcctcctcgaggtagctggtctgctactggcaacatcattccgctgctctgaacattctgtccaggacgcagacgcatgtgactacccgttgggacaccatgaagcaaatttccattgttcatcgtctgaccatgtccgtctccaaatcttatttttgggtttcaaagttgaagatgcttctctgatctacaagggagaaaccgacatccctggtttagcgagtgtaggccggccaagaccagctgcttgaagctgtgcaaggctctgaggagggagctgaccagtaacagctaaagattgaagatcaaatccattcaacgaagaaagaggtccaaaactctgatcttgaccagtcataaacgaatggttcatatttccttggtgttgcgatactcctccaagccgtctcagatatatccgatacttctggaattccacaatgttaccactgttagaacacatcaacaatgaaaaaatgtaatactattcgatcacatatatacctggaggtgactggctacgttttctcgcgttagcccgggtacattcatcatctctaagatcttcttaggaacagcttctgcattgaatgccccaatacggtaaagattagacaagaaaacaaacatcgacacacacaaatgcataagcaagcaagtttttaactcactgtcaacgcctagctgattcacagcagcaacaaactgctgatgcaattcaacagaccaaaccacgcgtggtttctttaaactcgatgagtcttccttatcatccccttgatcatctacttcctcttccttccgcttcctcgagctcctcccgttcccttcattaactgaagacgagttgttatcagcatcctccctatgctgctgctgcctgtccctgtcaccgccagtatcttcaatacttcctccagaatgttcagaaacattccactcgttacgcttcttccgcaccacatgttgccatatattcttcaaagcctcaatacgtaccggtttgatgaggtaataactgcaccgtga

SEQ ID NO: 8973 - DNA, 961 bp, Arabidopsis thaliana
gtcagctgcgtataagtttcatagcccttcccgtgtatccgactatttcgctcctgccacaccagaaaaatgtcccttagatgatcgcctgagccgttgatcaacgaagtgagagtaatatgccagtcagggtcttgccgatgctggagcagacgccctgcaacttccgaccaattcatgaacgtgtatgggcacgcaaagaaaagatgatcacacaattcgtccggctctccacagaagacacacggttggttatgtccccagctatcatacgcatccctgtagctagccgatcacgaacagctaaccaagtgatgaaactgcatctaggtataccttggttaaaccaaataactttactccaatcgacttggggataatgacatcttatttggttccacgtacggttggttgagaaggtctgctcgaagacgtcatggtcatgcctccatagattggtgttcggagcgttggaagtggtaagcagtggcagtgtttgcagtagctctatgatcggagccatgtgcactaaccctcgacctccgcattctccagccttgcaaatctatagcttctttaactatggctgaaattggtataccgagaattatttgccatgtctctcccgtgagatctattagccgactcatagggagccaataaccctgccaaaaagaaacagtgaaaccatctgtcacatcagcccgaataaaaggacggatgtcatctcttagtttaagtaattttctccaaatccaagaacccgtcgtagtattaggtgttgacaaaaagagttgtgacgcattaagttttgttttgccaagcaacccaaaaagacccgaagaactgaataacgccatattaaccgaaagcataacccttgaacctctttaagtcccgcaacctaaacaccactgatttgggcctcaaatccccccaagagacttggaccagtggtata

SEQ ID NO: 8974 - DNA, 553 bp, Arabidopsis thaliana
cgaggaattatgaaactttggaaaagagtggtttttaccctaatttggggacacgaatatcggttttgaaatcgtatttgacagtctttggcttcacaatccattggtaagtgccattgacggtcttctcatgaacaacctccgtcgtctcgtaatcgtacacagagtgaatctcattctctgtgtacttcacgttcgggctctcaactttgaagctctcaataaacatttttgcagaggaaaaggaaaatttggttgtctttctcggaatttggatcggttttggggtgtgagttttgtgcttctaatcagcggagacgtgcaagtttatatagacgagacagcaagggagatagagacaccgtggcgtcacttcactggttgatggtccctatttgtccaatgcatgtgagctagtgatgcttctggttcatagtgagccacacgtgtggggtctcacacgtgagggaggagcggaaaattaaaaatagtaattgacacgtcagatatcatggccatacacgtggcgtcgctttgttatgatgatacaaag

SEQ ID NO: 8975 - DNA, 552 bp, Arabidopsis thaliana
cttgcattgtttctctgaacaaaaaaagaggagaggtaaaaggttcaagccaataaaaagatgtgaaacacacaatatgtaaaaagaaacactgatttgtgttgtaatgacaaccttaactctggtttatgatgatcttggaacaaaacatctgctgaagctttggcagaatcagagaaatcaggtccagagacaacaaggctttcgaaataaggagaggcgatgtaccgaggagtatatgaaatgggaccaagcttgagctttgattcaagaggagctttgaaaacatctctggacaaggaacaaattttgctgaacatctctttagagattccatgattggtgacatagaagaatccccactctttacaagcctcagagagagaagacagtatagaggactcaattggttgtgttaagtctaacacaggaagctgcagagaagaatgaagttcagacattatattatatatttagttgtctaaagagtttagaggttatgagtaggggcaagctatgctatggataggggtatatatatttaagacatga

SEQ ID NO: 8976 - DNA, 893 bp, Arabidopsis thaliana
agagaagggaagagatgatttcgcgttataaccaaaaaaaggccaagactgtcgcacaagtaaaagaagggaaaggtaagagaagagaagagatgatttcgcgtgataaccgaacaaaacccaagactgtcgcacaagtaagagatgcgaaaaggaagagaaccttcgatcacgtcccgtgaggaacaagggaacctcacgcataccttcgcaatgatccagcgcctcaagttgcttctgtccccaagagtgtcccagaagagaaagatgtgatattggatagaatcttgagtaacgtccccagaagaaaaaagactacttcttacgaattcgtcccaccaaaacacccacaagaaccgcaatggcttctccaggttatgagtcgcatgaacggcgctggtgatccgaagctaatcatagagaagaatctggactcgaacgatgttgatccacgtcaaaaccgactctcaatccctatcaataccgtaatccaaaacgatttcttgacgcttgacgagtcaaggttgattgatgaagacgaaatcactaacgaagggaatatgggtgttgcagcgtttcttgttgatcagcgaactaagaagtggaacatgggttttaaacaatggtttatgacgactgattcagggagcagttactggagttttgtgttgcgaggtgaatggagcaacgtcgttgagactaatggactgaaagaaggcgacaaaatcagcctttggtctttcaggtccaacgatatcctctgttttgcccttgttcctccaacgagctctgttgttgagtctttagataagtgaaaagaagggttttttgggagtattagggttttattgtgataaagatgttgctagggttttggtacagaaattggatct

SEQ ID NO: 8977 - DNA, 980 bp, Arabidopsis thaliana
tattgacatcgttttagattttgtgttctacctgacgttgataacatcatcaaccctccctgtaagccagtagtaaccatccttgtctctggaatacaaaatagaacttattaaaaacttagtcaaattcacccgactttggatattatcaatatattaaaacgcctctatctaagcgatagttgaaagatggcacactaactagaaattggtttttgtgaaaagtaagatagattatccacctgctgcaaccatcaccactgaaataatatccggcaaaaggtttaaagtatgtggtttcgtatctttcatgatccccaaacagagttcgaaacgccccgggccatgaacctttgacacaaagataaccactacactcgccttcgatttcattgcccttttcatcaactatgacaggctgcagcatacacagagagatagagatgagagtgaagccctctccaaagaagaatatctctagaaagaagcaatatgctaattattaatttgcactacaaatcacatacctgaacaccaaagaaagggaaagtggctgaaccaggtttctggggccaagcacctggcaatggggttatctgcgatgcaatttgatgcacatgagagaaagagagcatgcaagaggttttaagagagataaagagggagtagagggttaccatgaagccaccagtttcagtttgccaccacgtatctgaaatgggacaccttgaatcaccgactacattgaagaaccatctacatcaaagattcggttaaccattaaatatagttcccattcaactgaccgcaggaataaatctagagatattagagttcaaacctccaggcactaggattgatgggctcaccaacacttccaaggacccgcagcgatttgcgcgagtgacgtgttacaaactataacaattaaaatgagttgaaacggaaataattagtaaatgatgtagagacctaaaagt

SEQ ID NO: 8978 - DNA, 1198 bp, Arabidopsis thaliana
gtatattctcttttgtataatatctctgtttctccggagaaacaggggaaaactagaggaagagaaaccgttatgctctgcctctctaattcgcttaagttttattaccatctctcttttctctgttttctctttcttgcgttcctaagaaacttgggaaacacgatagagatgaagaagctccgttacgtccatttaaacctccttctccttctattacctctaatcaatcttcagtttccgacattatcattggctcaagactacgatgaaccaaagaaggatgatactccaccgccaggtctggcccgttgcaacggagtttacatgtcttacagttccggtggccgagaaaagttgtatcctcgcaccacaaacgcgactgctcaagcttggtcttttaaatcaacggccatgatcgtgaacactggtatcgaagaggtcaaaggttggcaaatgttcgtagggtttcatcacagagagatcatcgtttccgcgactggagctgtctcatctgacggtgacttcccggtcgatgcaaccaacggtactacgtttatcgggtctcagaatacggacctaaagacctcgatcctgacagctggcgattacactcagatctcgaccaatatcgagataaccggaacggtttttggcgggaaaggtacagtacgccgatgccgaaatcgatcaagctcacaaacgatggatggcaatgccctgctgctacttctaaaggtaacgaaacctatttcatgaaaaaaaccttagtttcttgttcgagaagaaacaatctgtagtgaccagttttcgattggttcggtatattttcatcggtaggcggtacaatgcaagtttgctgcaagaggaacccaaagtttaaagctaaagaaaaggtgaaaaccaagttcatgcctagacaacacggtgacctgaacataatctacgacgttcttcaagcctatgcaagcagctacatggcgcaggttagtcgccggatccatcaattgtatcaatataacctcgagagagtcatatatacataacgtaatccaaaattgatttgttttggacaggtgactatagataacactagcccgctgggacggttagaccattggaacttgacatgcgagtggatgcgaggagagttcatccactcgatgcgtggagcctcgcggccgagaagacacgttgg

SEQ ID NO: 8979 - DNA, 945 bp, Arabidopsis thaliana
tacttgtatttgcaagtttatcgtagtgtttgttgctttatgatatactaggtaggacaagtacatgacccttgatttctaatagctatgcaaggggctctgagagtctgagcttactgtttttctagttgttttggttattaaagagaacggtctcaaacagcagtttcgtcatcattatggaacactgtctggttcagtcttgttcttgaagttactggttcacactttctatgactgtttcaccaattattggatacttttatgtgcttatcgtatatttttcttcttaagtgacagaatgttacttcacatctcattttatgacctattccaagtcatatacctgctagatgtatctcaagattatttttcttgatagattcacgaatccctttcttctgtcattttactccattacctcagtgctccttctcatattttatctggggttgatcaagtttacattcttattgtaacaggggccaggacctgatgcacgcattatctacatagatggtgcttttgatcttttccatgctggccatgttgaggtatattaattggtgcatacaacatacagttcactttatatgtgaggagtggtgttttaataccgttacatgaacaatgggtgtaaggttaaccatattaatgatacattttatgcttatataaagtaaagaagtagaagtgagtgggattgagcgaccatttagtttattctgccaatttatttgttattaaattacttaattcgtacagattcttagacgtgctcgagagcttggagactttcttcttgttggtatacataatgaccagactgtcaggttaaaaaagctcaattttggcaatttgctttattgatttctttccagtttatttgcgtatattccctctcatgcctggcaagtattatgggggttgacaatatgattggtg

SEQ ID NO: 8980 - DNA, 1464 bp, Arabidopsis thaliana
  unsure (1)..(1464): unsure at all n locations
ttcttcatagtaacaatattagaagaaccgtacctattgaaatcattagattatatgtttacttgttctaatacactaatcacatatcccatgtagatgtaacatcagtgtatttatgctttggattttttaatcatgaatataggagtcactcattttcttacatatagtgaatatcctttggtacaaattattaatagattaatttctanacatatcagttcagaatttgaacatatttggataatgtttccagtttaaaaatctgtgattcttagttcccagtatttaaaatgtgttggcaacaaaatcaaacaacagagtacacaacttttgtctgtctcggatcggtcgttttccaaagctttcaatgggtatctcgagtgccccatataagggtccataattataaaagtttttactattagctcctcataatttgtttttgttttgttaagcagctcatacattaatatgttagattttgagtctttttattttctgaatataatattaaattaaattcaagaaaaaataaagggtaggtcatcaaaatgcaaaagttgcttctttttttcctgaatttgaagatgcatgaatttgttaagggcgtaaaccatgtttaagagtaatagtaataccgtatggccgctttcctttcgaatgaccgagagtttattttaaatttgcttttccatccaattgacgagtttagttgcaggaatcagctgctcatcatgcttccttccattacgctcccgccatatcgaatgtatattgttatttgaaaactgtagggagctaagaacgtttgaatcctgcctaattgagattcttttttcttcttcttcggactgttgtaagttgttacaaacacatcagtgataaggtatatattgtgcaaaatccgtaattaaagaaaacattaagaagaaataaactggatgagttggttattagagagaatgcatcttgtgttgagacaacagctcggattggtgaagagaagaaccagatcagtgctgtgatcggacacgaagcagaggaagctgtaaaggtaaactcttcacatgacattatcaagaaggttctgagattgggccaaattgagaatgcagcaaacctcaagcccaataaacaacaggctccaagcgcagaccctaaacaactctcagctccaacggtcatctactgcaaaagaagacaaaaccaaaagcacatcaagattggatcaaaggacaaaaacaaggagctgtgctggaaaagaaggagtggttttacaaaaccgttttgactgtctaggatcaatagagacctgacatgtgtcagtgaaaaccctagtgtcactaagattgtaatgcctataaaaggaaacatgatgtaaccttaaaccctaaggagaataatcaagagaaatgaaacttatcttcttcatatttagcctttgagcatctttactttcat

SEQ ID NO: 8981 - DNA, 919 bp, Arabidopsis thaliana
ttgacgttcagtcactgccattgtctctctattctgtccaccctacgactagacacatcatcacctcattatatgaaatttattattttaatattctgctcattcaatcttcaaattcttctttctttagatttttttaaaagtattttgttatttatgtagcagaaaaagtctttcttttgtcaacgtagatataagaaagttacatctatagaacgaggagctacaaaacccaaaattaaaaattcctgaaacctaatatctacgttaatctgttttgctttaccttgcaaattaataagtgggaacaaaactttagcagaaatataataaaattttcttttttattagattatgaacttacatacataatttacaacaaaatcttcccacgataagggtttatcataaatgctttacaatttagatattcgagggctgatatcatatgcccaagtatagtactaaaaacatctaatcccacaaaaagaacaccaaaacaaattattatataatctgtacaataaaaccaaaactccaaaaaataatgaaattccgaaaataaccttttaatatttgtagtctttgacgtgaaggctctcggacgcaccttcacctaactgagcatcacccttgtagccaccaagggttgcttcagagttagccttggctctagccaagaacgccttttgagccttgtccacattctcctctttacctccccaagccttgagtgtactctgttgaagcgcacgtccatacgaaaacgtcaagctccatggtttcttccctttgagctgattaatggcgtttaaattcacagttgcttcttcctcactctgtcctccagacaagaacacaacggctggaactgctgcaggaacagtcctttgtaaagcacggaccgtgtgcttggcga

SEQ ID NO: 8982 - DNA, 565 bp, Arabidopsis thaliana
gggagagagatacgttggtcaaggtgattgaagttgttaaggacagagtgaatctacagacaaaagatgaggtggaagtatcttatcaatggccgcaatggatgatgggtccagattggtagcgtgcaaacccgatccatattatcgatgacgaagacatgacgttgtttatggcaattcggtcggatctagaggaggttcacttgaaggtcaaaaccataagcaggaatatggggaccccgacagttaattcatactgaatcgtcttagatataggaggtatgacttcggaagcgatatccgataagtattggaatagcagtgaaacaagggcagcctgggattcgacagtaacaagaatgttattcggtaacgtctcaagttatggtccggctagagttacgggcaaaacaagaacggtgtcggtgctccttcggcaggcgtgggggaataaatattcgataaaatacaagggagacgggtgtaggaagcgtcgacccgttaaactaatccaagcccaccaagtgcaacagctagagggaaggaacgtgtcttggacgatgag

SEQ ID NO: 8983 - DNA, 694 bp, Arabidopsis thaliana
attatagactcttaaagttgagtgcgtttcttacacagtagtaaacagagtttctaccaccacattgcatgttatatagtattgaaaaagggctgtctactttattatttcggcttgggaaaatctgcaatccaagtgcattttctatgtctgtaatcagagctaggtttgaagtgcttttaacactgttacaggatctgttgccgggagcaggcgaggctgttgatactaaatgtactgcaggatcagctaataacgacttgaaggatggaatggttactacaccacacgaaaaggctacagattccaagaaaagtggtaccgagtcaaactctcagccaattgtaggagactcaagctatgaaagaagtaaagtaggagatagagaaagagagagtgatagagagaaggaacgaggtagagagagggacaggggtaggtctcacagaggcagagattctgacagagacagtgatagggagagagacaaactcaaagatcgaagtcatcatcggtcaagagacagattgaaggattcaggtggacattcagataaatcaaggcatcattcttctcgggaccgtgactaccgcgactcatcgaaagaccgtcgtaggcccattaagccaatcttcttgtcatctacatccccttgagcctacttgatgttaagacagtatagtgttgtattgtg

SEQ ID NO: 8984 - DNA, 541 bp, Arabidopsis thaliana
tagaggacccacctatgttgtttggttgcacctgctcatcaacaactgcagccattgtctctgtttctgtctgtgttctgagttggcgtgcaatacggtcgatgttatcgttgaacaggagattctgatttcctcgtgaccgtatttgcatacaacgagtaccaacttgtaaagctggtatcgtagtacctaaatcaaaacagacaaacagaaaaaacacaaagttagtaactttcagaaaaaatgaaaaagataacagcgccaaattgataataggtttttatggtcaattatcctaaaacacctatcatgtcattgtagtattttaggtgtcaatccaaatgggtgtgatgcagacaaatgagatgtgatcagaagtcactaagtcaagccaagcaataacagttttggggtttctaacagtcctaagtgaacatgcagaaaacagaaagaataacagaattactaaaatcacgtcgccacaacaggctaatgccaggagtaggatgtggtcgagtaacaggcaggatatgaaacagat

SEQ ID NO: 8985 - DNA, 614 bp, Arabidopsis thaliana
gttctttttcattttttctgaaagttactaactttgtgttatttctgtttgtctgttttgattcaggtactacgaatcactagcttcaccagttggtactcgttgtatgcaaacacggtcacgaggaaatcagaatctcctgttcaacgataacatcgaccgtattgcacgccaactcagaacacagacagaaacagacacaatggctgcagttgttgatgagcaggtgcaaccaaacaacataggtgcaggcgatgcaccacgcaaccacaatcagcgtaatggcatcgtgcctccacctgtgcagaacaacaactttgagatcaagagcggtctcattgccatggttcagagcaacaagttccacggcctccctatggaggatccactcgatcacctggacgagtttgataggctctgcagcctaacaaagatcaatggagtcagtgaggatggcttcaagctcagattgtttcctttctctcttggagacaaagcccatcagtgggaaaagtcgcttcttcaaggctctatcacctcctggaatgactgcaagaaagccttcttggctaagtttttctcaaactccaggactgcgagactaaggaatgata

SEQ ID NO: 8986 - DNA, 425 bp, Arabidopsis thaliana columbia
tacccaaaaacaaagggagcagaggaatttatagccaaggtactggtaataacagtatcaaaggacatgaaatctgagatgtagtaaccagaagtgccacttccatcaccgtacttaaacgaataggaacagagattgttgggagaacagcctgattctgtctggaaaatttgagtaacatctcctgtctgaacatgaaactaatgaagctgaggatgacactccaggatcaaagaaacttagttgaatctgaaaatccaaaaaataaaaacactaaatacagggaaaacaagtgatcatttagacaaatcataaagctagaaccaagaccatgaggaaaatgttttaaaagctaatatgctatagaggatagttagctggacacatacttggagttcgctagtcttggggcagccattgcagga

SEQ ID NO: 8987 - DNA, 417 bp, Arabidopsis thaliana columbia
gactccctgattcgcacattcctgaacaggaatacttagagaccttggaaccttttggtgattccgagccttcagctttctccatccacaatcttataatagctggagcgtcctatggtctcgctgctgggtcatgggtaggaccgtatgccatttgtcgagcgtgggagtcattagcgtgcaagaagagaaaacaaactgattctaaaaaccagacgcttcctatggctgttcatatcgtttctggcagcgaagatggagagagaggtggggctccaattctctgtatagaagatgctaccaaatcttgtctagaattctcaaaaggacagtctgagtggacaccgattatccttttggttccactggttcttgggcttgacagtgtgaaatccaggtttgcaactgtgaaattga

SEQ ID NO: 8988 - DNA, 671 bp, Arabidopsis thaliana
atctgcaatccaagcgaaaggcaaggagatgagcaaagcagagagtgagaccggtgaggaaggccctatggtcacggagtcagacatccaacacattgtgtcttcatggactggtattcctgttgagaaagtatcaaccgatgagtctgaccgtctcctcaagatggaagaaaccctccacaaacgtatcataggccaagacgaagctgtgaaagccataagccgagccattcgccgtgcacgtgttggactcaagaatcctaaccgtccaatcgctagtttcatattctcgggtccaaccggtgttgggaaatctgagcttgccaaagctttagcagcttactacttcggttccgaagaagccatgattcgtctagatatgagtgagttcatggagaggcacactgtctccaaactcatcggttcacctcctggatatgtcggatacaccgaagacggtcagttaacagaagcggttagacgtcgcccttacaccgtcgttctattcgatgagattgaaaaagcccatccagatgttttcaacatgatgcttcaaatccttgaagatggtagattacagacagcaaaggaagaacagttgacttcaaaaacacacttctcatcatgacatcaaacgtcggaagcagcgtgattgagaaaggaggaagacg

SEQ ID NO: 8989 - DNA, 692 bp, Arabidopsis thaliana columbia
ccggtttcgcctagccttgcttctaatagttgatggaattctttgcctgacatgtgcgggaacaatcttaatcctgaacatgtagagatggttaaagatgttgttgcatttcttaaatatccatgggcagaacctcgtttctttctacaattagaagcgcaaaacaaagaacaaccaaggaacttccccaagatacaagagccatacaagggttcccgcatgcgttagttcttgtgactgttaccgcatgtccagctatcatatacacgttggactcggttattaacatactagacccaacaatttcagttgagaagctggttcagtctgttctgggaaggagcttgaatatcaatgtgcatgacgtttgcactatagaccaaaaatggcatggtaagttcttaattatgtagactgctacttgattttggtattaaaattgtatgttcatgccttaactatccaatttcaactttatattgtatgtcagctacttgattttggtattaaaattgtatgtgcatgccttaactatccaattcaactttatattgtaggactgggtcacatcactgctgaatgacaaactacttgcaaaagatatcgacttatctttatctgatgaggaggaggatgatgaagtatccgcctgctatctgtaataatagaggagccctatacgagcataacag

SEQ ID NO: 8990 - DNA, 471 bp, Arabidopsis thaliana
agctttatcttcaaacacttgctataattgttacaaattaaagcgctttcaggatgagtcagatgtggttttcaaggcagtcaatggcaaatggcgggcagtagtagtggagatctctagaatgcacaagacaggtagggctgtgctagttggcacaaccagtgtcgagcagagtgatgaactatcgcaactgttgagggaagctggaataactcatgaggtaaggctttcatgtcattttgattaataaatcttggacgcgtaatctatgcaaaaatgaatccaagatacatatgctccattagtattagttcaaactttttttttttgacatctaaacaaatggtgtatgtaaagacaaaccaataaaaaaatcaaatcaattatattccttgtacaagaatactgacagatgatgttatatatatgttgtcaaaaaggtctcaatgccaagcagaaaatgtggagagg

SEQ ID NO: 8991 - DNA, 557 bp, Arabidopsis thaliana columbia
ccataggtattgggcataatcaatatcataatctccattactcgtctctctctctgcgtctaatcaaacaatcaccttaattacaggagactgctcctcgatgactccaggggtgtagcagaaaatctaaatgagacagtgtgcgttcaagacaagtgtactgggctaactgtaagtacagacagataagataaacttggttccagtgaaaattatacccttcaagaacattctgtctcctactctaaggtactgattctaacaattattacagatccaaggaaaatattactatagaattgatccatatggagaaggtgcaaaatggagacgtacattcggacaagaaatctactcgccactcctcttggcttttgctcaacaggtgaaaacaagtgtaaaatggaacaccaggatgctattctctaacagtcccagaccatttatgcagcggatgttaaaatatttcaggatgatggaaagccgatgagttttggtgcagcatcattctccgggattgatccatcgtacagtctgcctgacaatgtggcacttct

SEQ ID NO: 8992 - DNA, 649 bp, Arabidopsis thaliana
taccttgcatttcacatcgatcccgtcgtaaaaattatcatttacaaagcagaatctattagaattttctaaacacgaaatggggttgaatcacttagcacttgtatgctttgtggttgcattattaagcatttttgtcgttagccaagctggagtcacagtgcctatgtccgagtatcggaaccatctgaagaaatgccactcaaaacattttcccctcctaccactataacgctccagagcaagtgattccagtttttctttataaaatcacgtttacatattatttgtttctttcatcacttggagctttcattcttggttctttctcatgttcacataatgtaaggagatcatgatggtcaaggtgtgatcatctcgtgggtaacgccattaaataaatattgttctaatgtcattacatattgaattgccagtagtgattgtagtgataataagaatgttatagcgacaactttgtcctatagatactttgattacacatatggttatcttcatcatgccacaataaaagggcttgagttattataaatatatatgactatatcccaagtaatatatatatacacacctctgtatatataggtttgtaagtaaagtaacctctctttttccttctaagtaaaaa

SEQ ID NO: 8993 - DNA, 575 bp, Arabidopsis thaliana columbia
gggcttacttctcatgaacgaatcaagaactaccatagctactaggaatcctgaatatggaagaaaccttaccggtgcaactgtttcatgctgttgtagattcaaaagtaaacttgcaattaattcatcagttttcacaagagcggggttttgtttaacaaaccattgaagagctttacaaaatctattataacctctttcttctctactctctactttgtccttcaacaaaacaatgactctctctctctcttttcgtgtgtcatcaaatgatcgtgttccttgcgtcttcgagcttcttcagaatctccgcaggtgttctatccagctcgtctgctattttcctctgcaagtccattgggagtgtcgggaactgctcacacagatctccatctatcacgtcctgttacaagatgcaaaaagtgtcaaattcaaaatcaagggacttcttttgatttggaggaaaagcaaatgggttttggtttattacttgaccggaaaatatgcagatctgtaagccatgtggtctctccgcagagaggaggaactcctgcctcatgtgcactccagatgag

SEQ ID NO: 8994 - DNA, 513 bp, Arabidopsis thaliana columbia
ggatttgaattttgatctgttctgtgtgtgtttggatttgggaaaaattcaggattgtggaacaaagggaagaatggatacgaatgatagcttgagagtagctagtttatggcattcaatgcacgccatttctcagcagctttcacctgtcaatggctgttctggcatcgagcttctcgaagccgacactttcgatctccattgtctccagtctctcccaggtaatcatacatcgccatttgcaagaagataccgtcacattctcttgattactgacttggctcaataactgatcatatctcaggtacaaagttctttgtggtttgtgaacctgggactcctcacatggagagcctccttagatacatttatgaactctacactgattacgtcttgaagaatcctttctatgagattgaaatgcctatccgttgcgagcttttcgacatcaaccttactcaagctgtacagtcagatcgtgttgctttgttaggacgatgaactagagattga

SEQ ID NO: 8995 - DNA, 613 bp, Arabidopsis thaliana columbia
tagctgtgagattcacttgtctatccttggctcacatgatctatctttatggccatcctctgcttccaaagatgcattatctccatccattcactgtgaaccaattagacagtctaagataccaagcaatgagcattgtcgcagcacggttatctcgagcagagcctcctttaaggaaagagaacgtagagtacatgcttgatgttgattcacacatgtggagcatgagaaggagcaaagctaacttcttcaggatagtgtctgtgtttgcaggcttgattgctatgagtaaatggctcggagacgtctgctactggaagaatccgttgacgacgatattattccacgttctcttctttatattgatttgttatccggagctgatactcccaaccacattcctctacatgttcttgatagggctttggaatttccggttcaggccgcgtcatcctgctcatatggacacaaaggtatcttgggctgaagcggctagcactgatgagctagatgaggaatttgatacttcccaacttcaaagggacaagatgttgtgaagatgaggtatgataggttaagaagcgttgcgggtcggatccagatggttgttgga

SEQ ID NO: 8996 - DNA, 559 bp, Arabidopsis thaliana columbia
caacttggttttgccttgaaaatggattccgaatcccttcttgtccccatccactctgtaaaattggaacaatacacttaactcagtaagagaataagaaacagacattaacatcttctaatgggggcattgtactcatcaggttagatctaacagctggaattcataatccagtttggtgttagctagagcctgttgtagttctttccttttttctatatgtcgtgagattcaatttggcaacatgatctattaatagggttttggatatgtccgaggaatttggggtgaataggtttcaagtaacgcaccattccaggattagttgatggagtgggagatggaagggaaacttcgaccctttcttcaacctgtttatttgagctactgcttgagtttggtgcaccagtcttaatcacatcaagcagttttaccatatcttggccggctaaattactgggtttcccgaagttagtgcataaacaagatctgggttcttaagtaacgcagctaataactcgagatcaggttcaggactgcttagagatgaagaggttgt

SEQ ID NO: 8997 - DNA, 846 bp, Arabidopsis thaliana
tgaagtgcaccgccttgctgtgagttcttctatcgggaagttgcaccagaccctgtggtaactccataactgtccgttcctcggttcatgctctccatcacccattcgctactcgccttgactccggcacgagcctcctccgctagctccaccgtagatcctcctcctcctctagccacggcggctacttgaccaatcgtcaaagtctcacctcctaacttcaccgcctctttcctatactctttcaccattcgtttcacctcatccaggtggctccctttcaaagcttcggccgtcgcgttccagttcaacggatcgcccgagacggcggtgatgtgattgttttgattgcatagctccatgcgcgccgactcggttaaagaaaccggtttttttttatccgacccggttttcaaaaccgatatatacggtcgtcttaacttcttttctctatatgcgatgatgttattatacaaaacaaaacactacaaatgtgtgtatgtctctacttacacgttgcgcttacaagaactattgaaatttgtttttgcgattataaaaaaagtaaagggagaaataaaaaggaaatttaatagcaaataaatttcctgagagaaaggtgagcgacatcggaggttttaaatagacagacgcaaagagttggtgagaacgaacgagtcgggttagttgaaatgtgtccacaacgtcagatgttaattgcaatatggacggacaatatagtcaccacgtgtctccatgtatatgagtcttcttttacttgtcgagctcgagcgtcaggtattttgccagagatagggacatgatgtttggtctggtgtgaggaag

SEQ ID NO: 8998 - DNA, 606 bp, Arabidopsis thaliana columbia
  unsure (1)..(606): unsure at all n locations
nnnnnnnnnnnnnnnnnnnnnnctaaagacttttcttccttcagttacagcattcataacagttcctccaccggtttaaagcaagcacgcagacggccaggcgtaaactcttccagcggcggtgcgctactacaaatttccatcgcatgcggacaacgtggctggaacgggcaacctttcggtaatcgcagcaggtttggcggattacccgggatggtcaacattgtttcaccttccgcatcgagacgcggcaccggtgtgagcaaaccgatagaataaggatgaacgggttgataaaagacatcgcgcgcgttgccatattccatcgtgcgcccggcgtacattaccagcactttgtcgcagatccccgccaccacgacaagatcgtgggtgatcataatgatggcggtattaaattcccgcttcagttcatttaatagcgtcatgatctgcgcctgtacggtgacgtccagcgcagttgttggttcatcgcaatcagcagcttaggtcgacataacaaggccatcgcaatcatgactcgctgacgcatgccgccagaaaattcgtgcgggtacattttcatgcgtttaccgcttccggcatttt

SEQ ID NO: 8999 - DNA, 420 bp, Arabidopsis thaliana columbia
caggtaatctcctcgaatcgacttcactagtcaccaattgttccggtaccggtgcagtaaccaccggttcaggattcaccacaacctgctgcaattcaagatccggttcagttcctcccggttcaactgactcaccttcagctacctgttcagcaagattcgctctgcaaacgggacaagtcacgtgagcctcgagccaagcatcgatgcagtgcggatgaaacacgtgatcacacttgggaagcaaacgcagcgtttcgtcgtcttcgaactcgttcaaacatatcgcacactctaactctcctttaccaagcttctgcgttttcacatctgagtacaagaacgtaggaaaagtctcgacaactgaaacgtcgagaccacgcgccgccgcgttgacggttgccctggatctagctccac

SEQ ID NO: 9000 - DNA, 594 bp, Arabidopsis thaliana columbia
tcatagaaggaccagacacacactgcataatccaattcacccaatctccggataaaccagccgccaataacgtatcctctaagaaatcccaacgaattctgtcataggctttctctaggtcaagtttaagaagcatccatcccttcctgcccttctttcgttgcattgaatggactgcctcttgaacaaccacaatgttatctgtgctcaaccttccgggaataaagcttgattgagctggccctactagttttgaaataactcctttcaacctccccaccattgtcttagtaatgattttgaaaagcacattacacaaacttataggccgaaactgagtgattttttctggtttcaagacctttgctatgagcaccacaatcacatcattagccttagcaggtagctgtcctgtttcaaaaaaatccagagcaaacttactcaccaactctcctacgacatcccagcaagtttgatagaaaattggctgataacatcaggacctggggccttgaatttcccatactacgcagcacctgttctacatctccacagagaactgcttgttcagattaacatgatcagtagtagata

SEQ ID NO: 9001 - DNA, 710 bp, Arabidopsis thaliana
atctccattaattaacactgtccccttcaaaggtttggctaaattaacttcaatacatactcttgcaaaccgtcccctaccaaaagtaatcgtattcagatcaaccttaagaagcttccccagcccacgagcaatctcctccaataaacatctatggtaatagttaactgggatatttgttaacctcactcacaccggcgttgtaacgatatcatccctcaatggatcaaaatttggtgaccaatcttgtaccatcagataattaccaaaaaccctccatggtcctccggttagagccgccaaatattcttcttccaactcaaatctaatcataaaaaactgacggggcaaatccatcaccgtcatagcccccgacggttttcataactcctgtaacttacgactcagcaccaaaataggaatttgattccctagcaccttaactatcatacatctcttccaaagcccattcatggcttccaacacctcttcccctatggtgataactggctctccatcctccccattcggaaactccaacctcaccctctcacgtacaaacgcatcgtcaatcacattctccggtttcagaatacctccaccaacactccctttattactaacactcatataacgaaggaaaagtcttacaggtcattttatttcagtgcataatcgtacgagcatttgccttttttggttacaatatt

SEQ ID NO: 9002 - DNA, 504 bp, Arabidopsis thaliana
atgaccgcggaacaacatttggtctgaagactggaggacgaatagagagtatccttgtctctcttccgctatctgcgagatgagaatatgaccatgtaaagtttcttgattcaagaaactaaatcttgtttcatcttagctaatgaaacttaactactgatggtgtttgtctcttgttgcggatgagaaacctgaagaaggaactgaggaatggaaactattagatgcttgtatcaatccaaaagagtggctttagttaattaattgtggttatttccccaattagctcttttattagttttgtctttaaaagccttaaaagagtaaagagtctaatgaaaagtgagtgagataaagaaattgtaatttggcgtcatctcatcatgagtcactgacaaacaaagatcatgatggttgatgatggagtatatagtaccaatcgtgatgatgatgataaaagtaattaacttttaattttttttactgacacagtaaaaataagag

SEQ ID NO: 9003 - DNA, 472 bp, Arabidopsis thaliana columbia
gatccccagatggcatttcagtaacaagtctagtgatggcaaactttgccaacctgtagattctgattacatgcagacaagatgcatgacaagtaccctttatttgcatccaaagaaaggcacatgcgattataatctcatctaaatagtccattacactgtgaacatataatctacaagagctgatgccttcaaatacgattgaagcactctcactagtctgagatgtgacaaggtcctgaaagtattcaaagatcacttcacgaataatcccttcatcaaactgtgagtcgccattcttaactgctataacttcaaattagttaacagttttcctgcctctggtgatagcatgcaagtagccagtatgtaaaacatcctaaggctaacccaagtagactgcttagatgtcactagaaaacctctacatcttggtaagctaagagtaacttggtattgagtgtcaagatga

SEQ ID NO: 9004 - DNA, 699 bp, Arabidopsis thaliana
gggctacgaaagtgaagggtagtgctgggggaggtatcttgaaaccagaagacgtgattgatgatgagtttgtgagggagcgggtggggctggagtttccagatggtgaggacgaggagccagttattaccattggtgaggaggtgttggaagccatgaatgggctttggaagaagtgtatgatagtgaaggtgcttgggagccagattccgatctcggtgttgaatcgcaagctaagggagctttggaaaccgtcgggagtgatgacagtgatggatttgccccgccagtttttcatgattaggtttgaactggaagaggagtatatggctgctttaaccggagtccatggagagttcttgggaactatctgttggtccaagactggtcgtcaaggtttgatccgttgagggatgatattgtgactaccccggtgtgggttagattatcgaatatcccgtataactactatcatcggtgtttactcatggagattgctcgtgggttgggtagaccactcaaggttgatatgaatacgattaactttgacaagggtcgttttgctcgagtgtgtattgaggttaacttagcaaaacctttaaaagggactgtgctaatcaatggggatagatacttcgtagcatatgaaggactgtctaaaatgtgggcttagggtggtatttacggtcatttggtgca

SEQ ID NO: 9005 - DNA, 539 bp, Arabidopsis thaliana columbia
attgtctacttttgaagcagtacgcccctggcattcagttatgaaacataaaccagaagaaaggattgtgtaatggaactagactaatgattacgcgtttgggagaaaaggtacttgaagcaaagatactaacaggtactaatgttggtataaaaatcaccattccaaggatatcattacaattgtagatacagatattccatacaagatgacgagaaggcaatttgcaatcaaagtttgttctgctatgacaataaacaagagtcaagggcaaagtttggagaatgtaggttttatctaccaaaacaggtttttagtcacgtccaattatatgttgctttatcaagagtcatctcaaaaaaggactacacatatggagtgaagaggcagacaaagaaagaaacccatcaatcaaaaatgttgtctatagagagatcttcaacaatctccactataaacactcgggtgatacaaataacaaaacaaaaaccagataaataactctaatattaattaaaaaaacagttgcacgtgaagat

SEQ ID NO: 9006 - DNA, 461 bp, Arabidopsis thaliana columbia
tgtcctgatatccacaaaattgtgcgtgaagcagttacaaccaaacaagtccaacaaccaacaactgcggccgagaccctccgtctctttatccatgattgtttccttgaaggttgtgatgcatctgtcttgatcgcgaccaactcgttcaacaaagcggaaccagctgatgatctcaatgattccctcccgggagatgcttttgacatcgtcacccgcatcaagacagctctcgagttgtcttgtcctggtgtagtatcatgcgcggatattctagcgcaggctacacgtgaccttgtcacaatggtaggaggaccttactttgacgtaaagcttggtcgtaaagacggattcgcatccaaatctcataaagtcagaagaaatgtccaatggcaaaccagactgttcctggcatccacgggagattcgagaaaaacggctttagtcttcgcgagatggta

SEQ ID NO: 9007 - DNA, 576 bp, Arabidopsis thaliana columbia
tatatgactttttatttgtcaaaacatgaagatagtaaggataacacataatattttatcaaaactttactttgaaaatataaaatgacatgtattatgcaataagattcaagttgtaaaaacgacacgtaatacgaaacagaaaagtaacattttagggtgatcattcagtaggaaaaaaagtttcaccttaagtgatttcattattttaatatttagctatttgcatcatttcaatattgaactgacaaatcaatttgttttgttctttgatgatgagatagattattcagactgatttccgcacatgtagatatgatatgaaataaaatctagtacattaaatattgcgaaactgacatcctggttgtgcagaatacgaatacaaggatgacaccagttataccgtataaagcaataaaggtagctccatcagttatactagctgcggacaaggcgtggttctatggctgcagcttcatcagtgtccaagacacagtcgctgatttactcggccgccactacttccaaaattgtaacattgtaggagctatcgatttcatatggggaggaggc

SEQ ID NO: 9008 - DNA, 322 bp, Arabidopsis thaliana columbia
ttagagtctttttaattgctaatgctttcaaggtcgaggaaagccgatccaactctttttactaagacttgcgatggtgatctttttgtatgccaaatttatgtcgatgacataatatttggttctactaatcaaaagtcttgtgaagagtttagcagggtgatgacgcagaaattcgagatgtcgatgatgggcgagttgaactacttccttgggttccaagtgaagcaactcaaggacggcactttcatctcccaaacgaagtgcacacaagacttgctaaagcggtttgggatgaaggacgccaagcccgcaaagactc

SEQ ID NO: 9009 - DNA, 640 bp, Arabidopsis thaliana columbia
  unsure (1)..(640): unsure at all n locations
cctatctccaatcgtgcttaaacccttaaacgctgaaaattcaaaacaaagaattttaattaagatcagacactcatcatgactagggtttacgtgaggtagaagtataagtatttacgtagagtgacggttccagaatcagaaacggcgtcgtgtagaagagtgccaatgagattggtggcattgttccttgcgtagtacgttgtgtagtgattaatccctacaaaatctaaagaacccttcaccagagaagattgagatcctgtaaacaccggtaatctgcttccgactctgcttctcatcgagcttgggtaatccccaaacatcaacggatccaaaaacctaattaagattgtttaaagatatatgatcacttgttataagttatggaacagagctaagttgtgtaagaacatatacgtaccagccaagttgaaagtcttgagctctttgtgcagcttcaatgtcctctgtcttgttcgactctggttcaaaccacattacatcaaacgcaatccctaacgaacctccttgctttgcctatcataattatacatcaaaactgtatatatccttttttttcatgtaacatcatgtnttcactttagtattgactaaccttatactttttcgtatagat

SEQ ID NO: 9010 - DNA, 392 bp, Arabidopsis thaliana columbia
gatagagttttcaattatgtgtatttcaatgtgtccagtcaggagttgcttgaggctgtggaacaggagaggaatttccgcttcaatccaactagaaatgccaccatatttcgtcatccaactcttggtgattttgaattacaacatgtatgtggcccttttactatcgttttgagttgataacatctcttttcttgtgaattatctaattagagctctatctttttactttaatgcagcttccagtgggggtggataatgctgagattgaagaacgaatcattcagcacttggctgctgctgctgctatgggacgagcaagacatggggtaagaagggaaggccacagaagcaggtcgtcaggtcaaggccatcaacatttcatgggggtt

SEQ ID NO: 9011 - DNA, 496 bp, Arabidopsis thaliana columbia
tagtaacgcccgccagtgtgctctaaagtctgattatctttggtttgctgctgaataaaaccacctttggtcgtaacaccctggcgattggcgggaacgaagaggccgcgcgtctggcgggtgtaccggttgttcgcaccaaaattattatcagtgttctcacaggcctggtatcagcgatacgcggaattataccggctacacgtatgaccagtgggcagccaatgacgtcgattggttatgagctgattgttagctccgcctgcgttttaggtgacgattcgctgaaaggtggcatcggaaaaatcgcatatgtggtggcgggtatcttaattttagacaccgtggagaacgccatgaagctacttaatagtactcctgtcgcgcagtacgtggatcgcggcttaatcctgctggcagcagtgatcttcgaccgttacaagcaaaaagcgaaacgcactgtctgatgcttatttctgcaacaatttagcgtttt

SEQ ID NO: 9012 - DNA, 999 bp, Arabidopsis thaliana
gttcatgccgcagaggaaggcaaagtaatctgttttggttatctcatagacgagtccaggattagtagcagctattgggtctacatgacctgctccataagcaaactcggttgatgcatagccagattgagaagcattcatcgaccaagctgtgagatcgacaaagaacagagcatgaacaaaagttgatggttttcttgcgagacaagaaagtatgttttattacttatggtaatttttctttacctgttgtcataatagcagatttgatcatggaaggggaccattgaggatgaaacgtcttgacgtaggcggctacgctagcagcatgtggacaagacattgaagttccggattcaacagagtatttcacataagcggtgtcataaaacggtgatgccctaagtgaatttgcagccaaaatttccaatcctggtgctgttatatccggctgcattttcattcaccactttctcagatagaaaaaaaagagagattaatctaagcaataagcataaccagtatatatcatatataccttgagaatatcagcaacaatgatgtttggaccgcgagaagagaaggatagaattttaggagctgtctgataaaagattgactcactttttaaaacagccgcttctggggacctaaaggttcaagctcaagaaaaatgaggataaagagaaacatatacacaacaaagcgtataattcaacagagagaagatgactgtttacttttcggacttaaagtaagagaggacagactcaaagtcatctttttgtaagccagatacaggtaaaccgttgatttgggcccagtctgaaccatcttcaaaaatggctgcaacggctctctttgtataggctacgtagggaagaaatctattgcacaccaaaatctttcccttcaccagggatgcgtcaagacactctggcgtgcaatccctgaaagaatatagaaaacctcatcatcacaatcagaaactaaaagtat

SEQ ID NO: 9013 - DNA, 931 bp, Arabidopsis thaliana
gatagccggcgagtggttttccggaagatacagctcctacgtgtgttgcaccatcctccaccctgcatcacaagtaaaccaattgtaaacaagaacctatatgaatcttacttatatgaaaatatgccaaaagactaaagcttttggataaggtatatacctcgagttggatgagccaccggttagctcctgatccagaaccagggtgtagatgataaccaggtagtgttccatccaggcacactgcattaatgaagtgataatattcaagtaatttcagataaaggactgacctttaaaactcgacaatatcaaatttgagggaaacatattcaaagaaggacatgacaaattcaaattacaacatctccctaatcttttgtgttaatgaatccgacaaaaaacatgaccaggatattcaaattcaagtatcaccaacaacacatctgtggaagcaagcaagcaagcaactagagagagaaagagagtaccaaccagctcctttggaggcagcagcctgaatcaaagtgagaggcaccataagaagctgcgacggagatgtcaccaccaattgactttcgagtaacgagatctcatcgtctgtatctctcacattcccactcccaatcacacctaacacgataaacagccaaagccagaatatcgccgccgcaatacgcaacacactcttcatctccgccggagtcctgaacagagctgaaaatcttgactcgaaaagatcgatttctgtggactctgacaaatcttgtactgttgcatgtgtgtgattgatagcgagagaagtctttatggctttttctggttaaattctttcacgctttcatcattatggtaataaattgatttacgtcacgaaccaaatctttgaataattaattgattttcttgaaattaatatggttctaaaaat

SEQ ID NO: 9014 - DNA, 611 bp, Arabidopsis thaliana
  unsure (1)..(611): unsure at all n locations
tcctctgctattgctgctgatgtgagctcaagagatggtcgaaaaggtcacaactttacagtttcttacctcgttgattcattaggtttagctacaaaagtcgctgaatcgatctccatgaaagtcagtttcgataacaagggcaaccctgattctgttctgagtcttttgagaagtcatgggttcactgattctcagatctccaacatcattaggactttcccaagattgcttatcctagatgctgagaaatcccttgctcccaagcttcagtttctgcagtccataggtgcttcaagctctgagctcaccgagactgtttctgcagttccgaaaatattggggaagagaaagggcaaatctctcagcagatactatgatttcgtcaaagtcattatagaagcggataagagttccaagttagaaaagttatgtcattctttgccagagggtagtaagcaggagaacaaaatcagaaatttattggtgttgagagaaatgggtgtgcctcagaggttgttattctcattgcttatatccgatgccggagatgtttgtggtaagaaaaatttaaagaatcctcaagaaggctgttgagattggtnttgatc

SEQ ID NO: 9015 - DNA, 523 bp, Arabidopsis thaliana
  unsure (1)..(523): unsure at all n locations
cgcttctataatctctttaacaaaatcatagtatatgctgatagttttgtcccctctcttccccaagatttcaggaactgtagatacaatatgagtgagctcagaccttgaagctcctctggactgcagaaactgaagcttgggaccaattgatttctcagcatcagctactagcaattgtggataatccgtaatgatgcttgagatctgagaatcagtgaacccatgacttctcaatagactcagaacagaatcaggattgcctttgtcctcgaagctgactttctttgagatcgattctgcgacctttttaggtaaacccaatgaatcaacgaggtaagagacagaaaaactcaacccttttcgaccagctctaaggctcgcatctgtagcattagcataggagaaggaattggaaaaaggagatgccttttcgaggaggttcacctggacgcttagatgacgacatttcttcaactggaccaaccttcttccatggagtatcagangatacatgacggga

SEQ ID NO: 9016 - DNA, 274 bp, Arabidopsis thaliana columbia
atgaataatgacgaacctgtggagagaaaatggtcggggagttgtagcaatttagcaagccaatcaagaacgatgatttcgagctcagtagcggcaggagaagtgagccaggtaataccgacgacgctcagtccggcgttaagcatctctcctaagaatccagccacactcgtgcttcatgcatagtatgcatagtaactcgagctttgcatatgagttatccccggcattatcttcttcgaaacatctagaacagaaagtttatgcaacataa

SEQ ID NO: 9017 - DNA, 459 bp, Arabidopsis thaliana columbia
cccagattgttttaataaagatcatttcagcgatttttagtcaatatagacggttttgccaaactcaaaagtcaaaagtcaaaggtcaaaggagtccattatataaaccatagcttaatcatttgattactaaacactagtataaaaaattgaacccgttaaccggcgacccgaaacaatgacccggtccgtcagtttccctctcttcctcttcgccgttgtactctccctctcttctcctctcctcagccgacgatcccagaccaatccgccgtgaggtctacgaaggaggtaagatatacgacatcagccatcgttacacgccggagattccagcttgggaatcttcggaaggattgggaaagacgttcctgcgattagccgcgagtatgaagaatggatcattcgctaacgtatcggagatgaaactatctgttcactctggaactcacgtggatg

SEQ ID NO: 9018 - DNA, 505 bp, Arabidopsis thaliana columbia
tcgggccagagaacatgcttatcttcccgacctacactcatggagagctttgtgaactcaaactcgctgatttcggcttagcaaaagagcctaatggacctaatccattggatggatctctcttcgagggatgtcctgcatatttggctccagaggcggtcgggccatgtcgaattatttcgtctgcggttgatatttggtctttaggtgttatggtaatcgagatgttgggggttaatggaggaggaagaaatgattacttgtcacagacgctatcatcgatggcttgggactttgtgaggaaatgcaaagtgcatgactgggagagtagagccaccgcagaggagctgctgagccatcctttcgttaaccaaagtattggggttccacgtttgagatgcttcctgttccttattgcttaactgatggagtggttcaaggaaggtttttctgagtagaaatacatggtagattgacggtggagatgagcccgatatgaatgatt

SEQ ID NO: 9019 - DNA, 611 bp, Arabidopsis thaliana
cagccccaacatgaagaaagaataggccaaggaggaggatagaacccaccttagaggagcactatcagtacttgatggaacttaagtttgaaggcaccagatacctccacaggccaacaatgcaagcacttggaatctgcagagatgtggagtatctgatggagaaggccaacctcgaaaccttctagacttacaagtttgaagggtacaagaaggagagttccaactccttacaaccatcaaggtccatttctcttctggtgaaagtgaaagagaaaaaggaaggttatgatgcataacctttatcgtggagaggaaccacttttccttaaccatcagaaaacttgaggttgtgtttggatttcctacgaaactcggaatcctccaaaactttgacaaggacgatgtagtgaccctcgttaaggggtaagcggtttagcggaaaacatcgaggaacgtgtgaggaagaactagaagagaaaggaactagttaaagggaagaaagccaaagagatgggcaaggcaaaaatgagtgtggtcaaatctagtttgaaatggggtcatccggggcaaacccaaaacgagagaaagttgtcccaaatacatggccg

SEQ ID NO: 9020 - DNA, 568 bp, Arabidopsis thaliana columbia
cctaattatttcaatacatagcgacagttgatttcactacttgtgaatccatcagaatgtctaaacaggtggacaaaaccggtgagcggactctggctgtagtcacaaaggctgacatggctcctgaagggcttctccagaaagtaactgcagatgatgtgagtatcggacttggttatgtctgtgttagaaaccggataggggaggaaacctatgaagaagctcgaatgcaagaagagttacttttcaggacccacccgatgctttcaatgatcaatgatgagattgtgggtatcccgtcttagctcagaagctgacgcagatccagggaatgatgatatctaggtgtttgccggaaatcgaaaggaagataaatgtgaagatggaaatcagtgtcctggagtttaacaagctcccaatagtcatggcttctactggggaagcattaatgtctctaatggatatcattggttctgccaaggagtctctactaagaatccttgtccatggagatttcctgaatccctaacgatcaaaagatgcattgacagctcgcttggctgaaatg

SEQ ID NO: 9021 - DNA, 471 bp, Arabidopsis thaliana columbia
gtttttggtgttgttactagcttgctaagaaaggagaaaactttattgatcttccgtatgctgttaaaggtatggatgtatcgttcagcggaatcttgagttatatcgaaactactgcagaggagaagctcaagaataacgagtgtacaccagcagacttgtgttattcccttcaagtaaggctatcacttggttcttaactgatgaattttgtcacatgaatgcaaattttggactgtttaagagtaatatcatgaattcatgtttgttgatcttgcaggagacggtgtttgcgatgttggttgagatcacagaaagagcgatggcgcattgtgacaagaaagacgttttgatagttggcggtgttgggtgtaacgagcgtttgcaggaaatgatgaggactatgtgctcagaacgtgatggtaagctgtttgcaacagatgacagttctgcatcgataatggagctatg

SEQ ID NO: 9022 - DNA, 612 bp, Arabidopsis thaliana
gtgctttaaagtcttttttagcgaatgcttcgtactcaaggtaggtatcgttgcggatctgcggtccgaaacgggtgtgatagcttccgacaacgttaacgctctggtgccaccagtcggaaagatactgcggtttgtcgttttcagctgcgttgacagtaaaagacgaagagagcgccagtaccgcaccggctgccagtaatgtttttttcatatgtatgccactgtttgaaaatcccttgcgggagtgaaaaaggcgcaaattgcgtttctaaatatttcgtatacagaggagcctattataaaaatcattgctcacaaaaatatgtttcgtttcacagttctatcatttacgtaatcgattgcgttcacgtttacacacattcgggcggggattgtactgactttcgcccttgttgcaaacttttactatcaatccaggtgatgtaagcagagtaacaaaatgacggggaaagatgttgcgggaccgacaaaatcgtcccgaaatacgtttactgcataacaggttgaatgtcgtggatacgtacaaagcctaactgatccacagaaatcccctttaactgtaacggaatacaacatcgctgggggcga

SEQ ID NO: 9023 - DNA, 921 bp, Arabidopsis thaliana
ctaatcatatatataagtttcaagatatgttttctagtaaattaatgattagatagtgctctttgctatcatgcagaatgtaaatttggtgaatagtcatcattagatgaatattacaatttatctgatagaatccttatgatcaaaattaatattgaaatattcgattaattctgaaaacggatacagattgtatatgtgccagacaaaaaaaaagagaagagaattgggaacgttgcagtttcgtagatgtgataagataataagtctacagttgtaatgtccatctcttgcagatctcaaattgcatttaccatattctgtttggtcccaatgacctaacctcacttatattcttgtacaaaagaatgtttactttatacaaatatttctaaaactttttcttctgaccaacattcttccactacagaattgagactgatcataagttcatcacacctatgctttattcctctccattgcttacttcttcaagctacaaaatcatgtaccaattgtgaagaatttatccggttctggcgacttccggggtttacatactccatttcatctcccgggatggcattctcgtaaatatccaccccggaaaagttgttgtatgcctcactagacatagccacaacattgtcctgtccttgagagttttgaagccctagagtcaaggacacatcaccacgacccaatcttgacgtatcagccacatgatatgtaggctcaactgccatgaaccggcgaccatccatatgactgccttggaccatgccacgagtttcctcgccatatccatgtccatggtccggtttggtctggtcttgtgaaaactctcgagctcgatcttcatcatcagcagcaacaggtcctatctcagacattttcggtgtatttcggaagacgagttgg

SEQ ID NO: 9024 - DNA, 335 bp, Arabidopsis thaliana columbia
cagtccataaaccacacgaaatcggtgaaaaccccaaattttgattagaggcatgattgtgggcgaattccgcttgacaaagcttcacatcccaactcttgatattgtcacccaccaagcaccttaacaaaccaccaagggtgcgattagtaacttcggtttgtctatcactcttccggtgatacgcagagctcatgtcaagattcgttcgcagcaacttccaaagtgatcgccaaaagtgactcagaaaacgtgtgtcacggtccgacacaattgaaagcggtaatacatgtagacgatagatttcatgaaagagaagagtagccacactactt

SEQ ID NO: 9025 - DNA, 542 bp, Arabidopsis thaliana columbia
aacaacaacactttccactctttacagagcaatttaagcagcggcggtccagaaacatcaggcaatgtgaaaataaccccacttagaccagtgacacacgagatcaaactataacctttaacagttcccgcaataacataatcatcaagccaaaccaaagttttgatcccaccaattcccagaatctctttcaaaacaacaaaggaaccacttaatccttctttttcagcacattgaagttcaatcagcaacattctctcaccaatagcaacagcgaaaacatagtgaccttgttggactctctcatgtctagaatcattacctctaacatcactcacaagattcccagcaccaagcaactgaagaaacttcttactcgagctagaatccgttgaaatctcagaaggcaacaagtcagtactcgacgaatcacgtcctcttactctcttagcaatcacattgatccctttcaataaaccacccaatctcttagctggttgagaaagaagcgaatccaataagaacaagtaaccattgcagag

SEQ ID NO: 9026 - DNA, 506 bp, Arabidopsis thaliana columbia
ccatagtgtttcgcttctgataaataaccacacctgcaatacaagtccaatatagagttcatcaccgggaggttagactgaaacccacgtttaatcacagacgcatgaatttgcttgccggttgtaactgaatcaatcgaagcggaactctaaccgctattgttatacagtaaggcgtcacttcagcattctcctgaacacataaaacagatccaaaatgtaagaacttcaatacaaaaacgtcaccaaaaacacgaggaatatagctaaattaccagcaacatttgcttgtacatctttaaaccgccaatgccatcacccaaatgcgtaaacccggtgattagagtagtccaagtaacatcatttttcaccttaatatcccgaaaaatcaaacaagcagcctccattgttacagaacaagtggcgtacatattcatcatcgcattgtcaacataaagagaaccttccatgccaagtttaccacaactccatgaaccaaagcacca

SEQ ID NO: 9027 - DNA, 1534 bp, Arabidopsis thaliana
gagaaggtttcagggtcctttaatggcggtaaatctataagattgttccagtggagacatttgtaacccaacattcttatctgatcgcgcgaaaccctaattaatcaggaaggtggaaatatgtcagctttgtagcatctcatcacttgtttaccatttccttcgggcaataaattaaagattttcctcttattgagaaaaccaaaaagtcatgaaactgttttatccaattccacacatcagcgaataccttggggaaaaagtaactttggtttttgaagaaacgccacaagaaaatgatgatgaacacgaaaaacttggacagtcgcacaaaatatgttttgtttcaaaatatatctaaaaatcctcgcatatttaccccataagttttaaaattgtatatttttcccattaagtaagaattcgaggtctattcttttctttttggaaaattaagttctctaagcgtcgttacttttcctttttttcttctgaggagtttaactgagttagatcattgaaacagtactacccgggctccatcaattcaacttctctggttacaatctgtatcataaccggcgtaaatccaagaacttttacgaatcaaacaaactgaagaaaagtaaatatctattgtcactgatcgagaaaagagagacatgtaaacatccagacactaaatttgagtagatagaagcaaatggttatcaattacactacaaaaacgaccagcagcagtaataggctcagtagtacgtgttgtagtacgcttgaggagcaacagcagcagccggttgctgcaccggtgcagccgctggtgctgctgctgcaactggaggtgcataactctgcgttgggtatgtctgcaaaaaatttcacaaagataagatccaagttagatgatcaaagacttatctccaagagtgattcccaattcaaactggtggctaatccctgtaatcctcctaaatactcctgagtttaacactaattaagaattttggttacctgagcaggatacgctccataagctgcggcctgtggacaggtgttggtgcttgtggagcggtatagccagcaggatatcccccatatgcaccataagcagcctacaaaggtatattcgatactattataagagtaaaagtatagaaggaaggaaatggatatggttctatctttggtatcttacctgttgaccgtaggcagggttccattgctgtggttgagcaggagcagcttgtgctggtggccaagtctgaggctgcgcagatataccaccagaccattgagcctgagcatttggatatgcattggatactggctgagcaggtggagtgccgttgtaagtttttgccattttcgtcctatctgatgcgagaaaatcatctgcgctacgctttttcagctccgacgtgctccgatgaggataaaacagtttaacatgttgatcttccgcttttttaatggacttcacatctccaaaaatacccaggaactgcaaaggccatgcacatttggggtgttaaac

SEQ ID NO: 9028 - DNA, 555 bp, Arabidopsis thaliana
cgccagtgtgctctaaagggttccgaggaaattgacttcgccgtgaagctcgcgacaatcaattttaatttcaattaaatccccggtgcgtaatttaccgatggggcctccggccagcgcttctggccccacatggccgatgcacgcgccagtagaaacgcccgagaaacgtgcatcggtgattaacgaaacatgcttaccgtatgacagatgcttcagggcactggtaacctggtaggtttcttccatccctgtacctgaaggtccaacgccaataatgaccagaatatcgcccgccttgatcttgtcatgtttgatatcgtaaatcgcacttttctcggacagataaaccttcgccacacctttatggtaatagataccttgctcatcaatcatcgaggggtcaatggcggtggatttgatcaccgaaccttctggcgcaatattgccaccgggaaggtgatagttgaggttaatcgcgcgcttttgcttgctgcggagacatgatcacttcgtcagcgttgatttgttcatgatcgagcaggagttgcttga

SEQ ID NO: 9029 - DNA, 370 bp, Arabidopsis thaliana columbia
tttagtgtggatttacctgacccagttgttatacaggatttaaccgacgagaagcaatggttgaagtaactttaatgctgaaggtgatgttgaattcaaggctgtgttgtatgtacctccgaaagctccccatgatctatacgagaactattacaacagcaacaaggcgaacttgaagctatacgtaaggagggtattcatctcagatgaatttcatgagcttctgcctaagtatttcactctcttgcaggtaaactacttgccacacaaactaaggggttctctccatacacatcccatgggctcatccctaacgtgaatcgcttctgcagggtcttgttgactctgacacattgcctctaaatgtatc

SEQ ID NO: 9030 - DNA, 364 bp, Arabidopsis thaliana columbia
  unsure (1)..(364): unsure at all n locations
nnnnnnnnnnnnnnnnnnnnnnctaaagcttgcctgatgcacaatggattcatcggcagtcagtggtcgccgtgtcgttgaacatcatccatgccctaccgtaattgctggagcaaaataatgaaaaaattgatcaatgatgtgcaagacgtactggacgaacaactggcaggactggcgaaacgcatccatcgctgacactgcatcaggatccggtgtatgtcacccgagctgatgcccctgttgcaggaaaagtcgccctgctgtcgggtggcggcacggacacgagccgatgcactgtggttatatcggtcaggggatgctttcgggggcctgtccgggcgaaattttcacctcaccgacg

SEQ ID NO: 9031 - DNA, 357 bp, Arabidopsis thaliana columbia
tgctgaatcaaaatggttccatacaattaaaaactcaccattgtttgattagtctgaagatgaggaagaggaagaaggaggagtgtagttgtcctcgagaagatcatcataaggatcccttcgaccagcaacctgactgatctgaggatcccaacgaagctgagcattgtgacgctcaaatgtccagaatccataaggacgaataggcaatgcccacatctccttaatcttcttgcacctctcatgcatctcatatatgtgttccctcgctttcctgtctcgttcctctggattctacattaacgttaagaccaaattctccgcgaatttcaatatgaagaccatatttcactggaa

SEQ ID NO: 9032 - DNA, 240 bp, Arabidopsis thaliana columbia
gactctctatagaaaggattcctacagaattcacacataggatgtcctgcgacgcacccctttcactctcacttccatcaacttcagagtcaccagtctgtatgtgttggttcagttgtgccctagtatacaacttttgttcacatatgaatatctgtccacagagagagagagacacacacacacacagatgtaaacaaatgtgcaaaatttccgagaagatgataacaaataggctgc

SEQ ID NO: 9033 - DNA, 731 bp, Arabidopsis thaliana columbia
cgaagagacgtcggaagtagtccgattctattactgatttccatcttttgcatactgatttgaacctcgcaatgcttctcaacggtaatcttgcaagtatctccacctctgggattgttcttcttcttccagtctccattagagtcttttttggtctctctgttttcttcttaaatagttctttttcttttggagatggttggacgtgaatcgctcttttattatcatcaactttatggactcatgaatcaatcaatatttatagagtgattaaaatgtgacaatatgataatgtttttcaccagaagtacaaacgaagcaaaacaacatattctaaccatattaaagatttgataaagaaaaagcttttgcaataagcaattgaaaagtgaatttaaccaagatgatatgatactgatagggagctctagtgaatagtgtcctcattagtcattacactaaagaaaaagattttgctaagcaattgaagttaccaattctttaagaaggacaatcaatttggtggagaagtacagagtccatccactgtggaagcacaaattgggataatatgaggatagatttattgtgattagcatcttccatataccccttagaattgctaatcaaattaaataaaagttcaagcttcaagatggaaattaagacagaaagatatgtctatataaatataattatagtcagaaatcatatggtgtagatcacataat

SEQ ID NO: 9034 - DNA, 492 bp, Arabidopsis thaliana columbia
cacatagaggttggggcagcaaaggagaggccgggctgctgggggtgggaagggcaagggattctgagacctcactctttacaggatgaaaagctcgtccgctacttcttggacaagacgctgacttcgaggcttggaatccgcatgttggccacacatcacctggcgctgcatgaggacaaggtggggctctgggacctgagacccacctgggaacattaagtgagacagaggagactgggctggggatccgggtcaagggcctgggggctgaggctgtggggctggtgctttggggcagttccgaagttgccagcatcttggggtggggctaggggcgtgggtagtcctgacctcctttctccggccagcctgactttgtcggcatcatctgtactcgtctctcaccaaagaagattattgagaagtgggtggactttgccaggtgaggcaagaatggctcagggggtgggcagacatctggggcaggga

SEQ ID NO: 9035 - DNA, 356 bp, Arabidopsis thaliana columbia
tcattgaattaacttttctaaaactttccacacaagaaatgaagcattaaaagcatctaactagagtttttttacagtagctattgacatagctattgaaattttgtatttaccaatatgttaagcaatacaaaacagtttatcaaataacttacatgagccgcgacgaaataagcgatcatgttggtcctatcagtttcttctattctgagtgagatcaaagccaggccattaacggtacaacgttgattacctactatgctgatgagtaatcgggagatattggaagaagaatggtaccagcaaaactgacaccagtaaagtcacagagcctctctttacaagagatggtatca

SEQ ID NO: 9036 - DNA, 453 bp, Arabidopsis thaliana
gtagacgtcgtggtcgccgcttctaaatccgtggccgagcagttcttgaaaatacacgacgccaatttcgctagccgaccaccaaactcaggagctaaacacatggcatataactatcaagatcttgtctttgcaccttacggacaccgatggagactgttgagaaagattagttctgttcatctattttcagctaaagctctcgaagatttcaaacatgttcgacaggtaaaacaattataaacggtattctcattttctaacgctatagctcactggcctgtaatcatgtcatttcaatgttttgactttttctttatatatacataattataatttataattgggatttcaaaccctatctctcactatttcaagactagaccggattggaatttgaacttttgtaatgaatattagtatctgcacataaattttatgttaaagttgggt

SEQ ID NO: 9037 - DNA, 568 bp, Arabidopsis thaliana columbia
tccatgaccatgaccttagacgatgcactattatttaagtttcgtccaccaatagcatagatatcagaaccaaccgctacaacacctgatctgtagtcaaaaggagaatcaagagatgatattgggaccaaaattttggcgctgctacttattttttggcggagggtgaaacaaatttgtctgtaatcagtattcgtacggaaccgtaaacacacgtaaagaccactgctagtacaacctaagaatgatctaagctcttgaagctccgttgaggcaatgagagaccggaatttcttggaaacgaaggaaaggctagggtaatacactttggaaacacgggctaaacagtttaataccaaatcatcaggaagcatcgaaaacgtcatctgtgactcatcttccttcgacattaacataattgtgggatacgtgaacgaaagcttcgtacgtacgttttcgcttcctctcgatctctaataataatcctaaatccactgccacaaatacagtatatatgcacaaaaattaaaactcgtatcccttggaaagtggaaaaaactaatttgta

SEQ ID NO: 9038 - DNA, 531 bp, Arabidopsis thaliana columbia
atgagagcagccttaagaatcaaagcgtagaaactaatcactcatcacaaaactaaaatcctagatcgaatattattcgagaattaatcacttgactaaaaagaatacaagacaaatcataaattccgctacgttgccattgcaaatcatctataaatctgcaaacaaatgatttgaaatgctctcacaactacgttataggatgattcaagaagtagcaaccaatgaatatcaaagtatagaacgaacaacataatgaatatccataaaatcctaaaaccttccataatttataatccagaacgaaagatgttcaacatagaatccatgataactcaaattaaagagcttacaaaattcccaaatagaaatgcagtttttaaaagataagagagaaagagaaggatcgatctaccgctacaacagatcaagcttcaactccttctttctggtaaacgtaggtgagtcccacttaccacagtaatggcgatctaaatgactcgcctatgaaagtccagctccacaggttgc

SEQ ID NO: 9039 - DNA, 457 bp, Arabidopsis thaliana columbia
tcaacaaacaataattatggtttgtttaaggtttaaattaaaattgatgtatgcatttgtctactctaatccttatcattgattcattatatgcttctttttttgttggtaaaaccattatatgcattttgtcaaacctatccttatcttaataacaaacaaaatacattgtatgataagaacttggacaacgtgaaatatgactcattctaaatatattagcagtagatatcaaataagtataaaacccggctcatctattttacgtctaaaccgttacacactctatatataaacgaaggaagatcacacgtgaaaatagtcatcaaccaaagtaagaagcgcacacacacaacatatttctttcactacccaaagagatggcgacatcgggaacatatgtgacggaggttcgattgaaaggatcggcggaataacactacaagcggtggagaga

SEQ ID NO: 9040 - DNA, 463 bp, Arabidopsis thaliana columbia
ccttggtaaatacaaccccaatgaagaatccatgcgcgagtgcagttcttcaggtgaaactcagctcttacactgctcccattcggcaatccagtgacggtgatctattatcgatacgtaagattaagtccagaatctgatattttaaattccaggaggacagaagaaagaacagacctgaagctccatcccttcaattagctggaattgttgggatttagaggttgccatggcagctattcataaaaaagaggtaacaggtgagcctcaactaaacttatgaaggatctcagatagttccaaaaaataaaatttaagttctagttgatggaccactgatcattactgtcatcttggaacagaatcggagtaacaacaacatcatttactgtatagtccagccaacttatttccatatgtttaccttgttccacttcacaaacttgagctgtttttatgcgtt

SEQ ID NO: 9041 - DNA, 552 bp, Arabidopsis thaliana columbia
aaataaagtataggtacttaatcttaatggttgttgatatatgcgatatatctcctttcaaatcaacatagtcttccactttgttttgaactttttgaccaaaaacacactcgtgagcttataaaaaaaaatcaacaatgaagattcctctcttggggttacttttactaataagtcttgtcggctctccgacaagggctgaagaaggacctgtttgcccgaagaccgaaactcttagccgtgcaagttttccggagggctttatgtttggtaccgcaaccgcagcctttcaggtacatgtatatgtatacaaaatagataaaatatccatagaaatggtgatattaaaacacttacaaaacattgggtgaagctaagaatatgttgggaaatggaacaatgaaaatgatttatgtatttatatggttaaaataggtggaaggtgcagtaaatgaaggttgcagaggtccaagcctgtgggacatctacaccaagaaatttccacgtctgtctcttttcttttctatttatttcgccacgaagcatatatat

SEQ ID NO: 9042 - DNA, 473 bp, Arabidopsis thaliana columbia
atcccccgtctcctcccatgtggcagaacctcaagctctttctcgtaacaatctagaacagctttggcattgaacttaagtcccaatgctaagttctgctgtcccatctattcaaacaaccacaaaaccatcacaacaaagaaaccactctaagttttgaaccactcttaagttttcactagaaaagattcacaattagtatcaaagtttcgaaatttgaatctaaccaaagcttttcaacagcaatgaagtaatgaacttaagtcccaatgctaagttctgctgtcccatcaattcaaacaacacaacaaagataccactctaagttttcagttttcactagaaaagattcacaattagtatcaaagtttccaaatttgaatcaaaccaaagcttttcaacagtaatgaagtaagagccatgcactaaagttggagatgatcacaatttttacctggaaaagacgaacacga

SEQ ID NO: 9043 - DNA, 534 bp, Arabidopsis thaliana
ttcgattaggttaatcgtatctgggttccaccggactcaacccctaaaatcgccggtaaattctccgagcgtcttcatctccgtacctaaattcttcaactctgagtcaaaatcgacgggaactggttcaagatccgtagcaatgagcagcgttgagaaaaccgggtcggattctggagcaatagagaatcgagcgagcaggatgagagagaagcttcaaaaagagctcgaaccagtggagttagtgatcgaagatgtttcgtatcagcacgctggtcacgccggaatgaaaggtagaaccgacgatgagacgcatttcaatgtgaagatcgtttctaaaggattcgagggaatgaatttggtgaagagacacaggttggtctatcatttgctccgggaagagttggatactggattgcacgctctttctatcgtctccaagacgccgtctgagtctccttctaaagactagtgtactggtactgtttaatgtatcttctgtttctgttatcagagtttctcatcaaactctgt

SEQ ID NO: 9044 - DNA, 590 bp, Arabidopsis thaliana
ttcgtatagcggtgttgtcacagaagaggtaaagatcattgtctcactaggaacactcaaaatttggttatggttttaaattagagcattttggtgatgtttttattggtctattagtgtgatccatactttgataataccggatgctctcacccgggttgcgaaccggcatatcctacaccgaaatgttcgaggaaatgcgttagcgacaacaaactatggagcgagtcgaagcattacagtgttagtacatacactgtgaaatctaatccacaagatatcatggcagaggtttataagaatggacctgttgaagtctcttttaccgtttatgaggtaataaaacttaaatcctaagattgtttttgaatagaagttaaagaaagatgtatcattaatggtttgctttggttaggattttgctcattacaaatctggagtctataagcacataacaggttctaacattggaggtcatgctgttaaacttattggttggggaactagcagtgaaggagaagattattgggtaatgttatacattttcgtgagatttttttatcgagaattcgaaattaaccgaaatttat

SEQ ID NO: 9045 - DNA, 1712 bp, Arabidopsis thaliana
ctctcaagctgtctccacaattctacggtcagatgactccaccaactacactcatcatgtgtccttcgtgcgagcgtgtgggtggcccatcatcatcgaaccatcaccacaatcacaggcccgtttctatcaatccgtgggttgcttgtgctggtcaggtggctcatgggctgaattttgaagccttgcgtccacgatcgtgattttttattttagtggtgggaaaagggtgttttggtatttttcgttatcgttatatagtctatctgtgtggggtcattgtaattttggatgattggccttctcatgaactagtcctatgtatgatgcaaccttaaaaagatttaaattagcaaaaattagttacaaacttgctatattaaccaaaaattatgaaactatctttttttgatatcttacaagagttctaaattaaaccaaaaattcacaaacgtcttctagataaatacacagtttctgagcatggtataagtgtagcttatatgcagttgctcaaaaaagaaaagaaaaagaagtgtagcttatttgaagttcttaacgaaatcatgaaatcttgtgacctaatctgacttcaattgcttttccgattcagatctgacaaagatgtatgagcaattcttattgggtcttaattggctacattattatgtcggcccatacgtttagtctttcgtcgtcgtttccatctgcgaaacgaagactctcctgatttctctcactcaagtctcattcttacgattttcttaacgaaatctttcatcaatcgctacacttatagcgacccagatgccaaattcattgatttctcgtctggtatctccttcattacgatctcagccctcaaaaatctcagctttacgttttttaacaactgtctcagccgccgagagattatacgtgcagcttcaaggatgcacaagtaatctcgagaaagaattagcttcggctaatgtacaattagactcctcttgtatcaacgaggtactaagaagatgcgatccaaatcaatttcaatcgggtcttaggtttttcatatgggcaggaactctatccagccatagacacagtgcttacatgtataccaaagcttgcgacattcttaagattagagcaaagccagatttgatcaaatacgttattgaatcttatcggaaagaagaatgctttgttaatgttaagacgatgaggattgttctgactctgtgtaatcaagcgaatctcgctgatgaggcattgtgggtattaaggaagtttcctgaatttaatgtatgtgcagacactgttgcgtataatttggtgattaggttgtttgctgataagggagatttgaatatagctgatatgttgataaaagagatggattgtgttggtctttatccagatgtgattacttatacgtcgatgatcaatgggtattgcaatgcgggtaagattgatgacgcttggaggttagctaaggagatgagtaagcatgattgcgtgcttaacagtgtgacgtattctaggattcttgaaggagtttgcaagtctggtgatatggagagagcgttagagttgttggcggagatggagaaagaagacggtggtggattgattagtccgaatgcggttacttatacatttggtgattccaagcgttttgtgagaagaggagggttgaagaggcggtgttggtattggatagaatggga

SEQ ID NO: 9046 - DNA, 525 bp, Arabidopsis thaliana columbia
cgatatggtgatgatgtcatgatgatgatcgatgatgatttatatatacaggttctggtttcatatcatcgaatatgtatcaacatggattttacagctccatgattaagcttcccgctgattatactgccggcgtcgtcgttgccttttatgtaagtctccggccatttggtttttatggtatttttttctgtttcattaccactaaaatgttttttttttcgtttctttcatccatctgcatgaatgttttttgttttcttttagttatttaattatttgcagatagttttcattatttgttttcaaaagatcatgaactaactaatttgatctaatttaaaatctcttttttttttgtggccgagaaaatcgtcaataccacattttttgtcgaagaacccatgtcacattttttcctgtttggctcctagaaaatagtcattaattttcccaagaaaatagttctatgttcccaagaaaaagagcccaatctttaaatcgtaattttatgttaaatggtta

SEQ ID NO: 9047 - DNA, 747 bp, Arabidopsis thaliana
tgacttcatttgtcaaaacaagaaaaccatatgtctttttgagttttattggtgtgatcaatcaaatgtgtctttggtttttcaggtggctagcttcggtgcatatcttttatcaagaaacattacaacgatgtcatttgcaccaagagacacacacgaagctcaagtccagttcgcactcgagcgtggtgtgccggcgatgatcggaatcatggctacaatccgcctaccgtacccttctagagcctttgatttagcacattgctctcgttgccttattccgtggggccaaaacggttcgactctaaaccctaaataagtaggagattactcccttttgagttttgagttctaacactttgtgttgtgttgcagatggggcttacttgatggaggtggatagggttttaagaccaggagggtactggatactttctggaccgccgattaattggcagaaacggtggaaagggtgggaacggaccatggatgatttgaatgcagagcagactcagatcgagcaggtcgcgagaagcttgtgttggaagaaagttgttcaaagagatgatcttgctatttggcaaaaaccctttaaccacattgactgtaagaaaaccagagaggttttgaaaaatccggagttttgtcgtcatgatcaagatcccgacatggcctggtaatcaatcagtttctatatctaagatttagaaatgttagaatttggctataaattttggattgatttaa

SEQ ID NO: 9048 - DNA, 596 bp, Arabidopsis thaliana
  unsure (1)..(596): unsure at all n locations
agctcggtaccggggatctnnnnnnnnnnnnnnnnnnnnnnnttaaagataggctaagaggggcattggagttttctaacgtacatctacataatgagataattgaagcagggtcactgaaaggtctgatgggaattttttccacacttttcctctatttttcactattttatatagcatataaaaaacgagctttgggtttgttgatattaacgcttggcattgtggggattggactcagtgatgtgatcatatgggcacgcagcattccaattatcattatatccgctatagtcctcttactcgtcattaataatcgtaacaatacaattaattaagaataaacaagtttaagaagtgagttaaaactcacttcttatctatacaacttaatctctttactgaattagttaaagtttcagtatcgatatcttttaccgtatatgttggggatactatttgtatagatttatgatgattcggggaccaaattaaatgcgagggatattccggagtacgtgaattagggtaaaatgcaaccgttggtttatgataagccgcagcgatatgaacaagagctgtatcacagaaatgac

SEQ ID NO: 9049 - DNA, 313 bp, Arabidopsis thaliana columbia
  unsure (1)..(313): unsure at all n locations
nnnnnnnnnnnnnnnnnnnnnnctaaagcgcttatcaggcctacaggatgcatcacaatttgttgaatttgcacgttcttgtaggccggataaggcgcttacgccgcatccggcgctgcccctctcctcacggagagggtttgggtgagggaaaagcctcaccccagccctctcgggtaaagacattgatgaaggttaatacgatgaaaacagtacattttggcgcaggtaatatcgttcgtggctttatcggtaaactgctggcagacgcgggtatccaactgacgtttgccgatgtcaatcaggtggtact

SEQ ID NO: 9050 - DNA, 542 bp, Arabidopsis thaliana columbia
ttatcctacgcaagttccacctgctcctggacatggggctggtcctaggggtaatcacgctaataatgaaagaatgttcagacctccaatgcttgactcttatgtccacccaaggatgcagactaggcctgggtttaatgttggtccagcgccacacgaaggctactatggtcctcccatggggtatggcagtcccagcaacaaagacctaccttttgcaggtaggcctactggtccgcatgcttataacaatcattctggtcaaggtggatatgatacgcctggaagttcagtgtctttggaacggaacgagtcatcacattctcaagaaacacaaaggccatacaaggttctcctaaagcaccaagatgggaggtttggggaagataatgcaaagcgggaagaatttcttggaaataggctcctgaatgcagagaagatagctcaacagatgcaaacttcaagacacgagaggagagaaatctgaaatgacgcaagtggtgaagtcgaccagtctaagcagaacttgctgcccctggaga

SEQ ID NO: 9051 - DNA, 371 bp, Arabidopsis thaliana columbia
tagtaacgaccgccagtgtgctctaaagggagcccgccagttcttgcgcgtcctcaaggctaaacgacactttttcaaccgcacgcaagctacgcgcagcttctgactgagtgttgaaggtggcaattgtcgtgttacccgccacgcaagtaacgtcctcgccaggtttaaatgtaaagccatcgctggattcaccattacaggtagcaccagttacccgctggcttccgcccagggtcagataacccgttttcgtaggaacaggttctggctccggttctggtgttggttcaggatcaggtatcggttctggcgtaggctgtgggtccggcgttggctcaggcgtcggctccgggtttggtgttggatca

SEQ ID NO: 9052 - DNA, 505 bp, Arabidopsis thaliana columbia
tgctgggcattctccctgtgcagacccaaacgtgttataacaaagctttgaaacacattttgtttcataaaccaaattgaagaatgcagagaaagaacagagttttattagctataccttgatgacaaagttgttggcgactgcaccaatgagaagagggccagcaattggaagaacccaagtggcgattattataactcggaacagccatccagagagagcaaaccaaaggaagaaaatagtctggaaacgaaaatcaaagcatatccaacattagaattctaaactcagccagtaagattcactcaaaaccatcaaaggtactcaatgaaccccatgggatgatattacatagatacaggatcacattcacaagaagactcacagcaagacttccaccaagcggtgtattcaagaatgcactgaattgcttcctgtactgtaatgtacaacaacaaggcaaaatagaattcatcaatggccctaatcacagaacatataactc

SEQ ID NO: 9053 - DNA, 1007 bp, Arabidopsis thaliana
ctgttgtagtttgtgtgcaaatatttgttgaggtcagtctattgtctctgagtgcaggtaagtgtccattatactggaaagcttcagggacatgggaagattttcgattccaccgttggaaaatcacgttataagtttcgtctaggttggtattataacttgatgcgaaagtaagagctttattaatgtgtgagtggtacttggatacttatgtgcttgctgttacacatacagatgctggaaaagtcattaagggattggatgttggccttaatggtaacctagctagtttcttactggtttttcttcactaaatatggtcaaatggtgtgttgttttgatctctttttgtaaatttctaaaggaatgcttgttggtggcaaaagaaagcttacaattcctccagaaatggggtaaagcctttgcaaatctttttttatttttccataatgtgatgttttaatttaagcattttttaatgagagatgataaaattgtctggctcacaggtatggtgcggaaggtgctggtagcattccccctgactcttggctggtctttgatgtcgagctgcttaatgttaaataaagctgccctctaatccctagagaacttcctaagactcaatccaatgatgagtttttttgtggagatcgtatagtttttcctcttacgatttcaaatattgtgagacacactaaggcccataaagcttcacaagtgtgtattattcattcctgttgttacaaaacataaaacatatctaaagaacaacttaagagaagcagactaacaaactatagttgtcttctctattgtcatatcactgtttcgatatatacagttcacctttataacaagaaaaaacgtgttctgtagttctctatatcactaaaactcggatagagaatcaacagtcgttgtgggattaaggcaaatatcaaatccaaaaagcttcatattgttttgtttagttcccagatccaagtaactcaagtcgtcgaaga

SEQ ID NO: 9054 - DNA, 418 bp, Arabidopsis thaliana columbia
ctccatttagtctcttctcataatgtcacaatctagaaattcacaaacaaaaaaagagccttccttacttagctgggttgttaacatcacgctgaggatgctgatgtgttgggttttgctgctgacgttgctgaccactcacgaccacagactcacagctgttgtctgtggtcgtcccagaagcctaagacacaacacagagatttcaccagtcactctctaacaacagagaactcttaaagaacaaatacatatacaagcatcaaagataacaactcaacaatgcatttagcaaaagggattcaaggacttacagtgtggattcgatgtttcatgaatccattctcataaaccaagttggagacttgcttctgcaaacgatcattctcttccatcaaaagcttgttcatagcactca

SEQ ID NO: 9055 - DNA, 560 bp, Arabidopsis thaliana columbia
  unsure (1)..(560): unsure at all n locations
ctnnnnnnnnnnnnnnnnnnnnnnnctaaagttcctcggtcacggtgcagaagtttacgaaggtcagattatcggtattcatagccgctctaacgacctgactgtaaactgcctgaccggtaagaaactgaccaacatgcgtgcttccggtactgacgaagccgttgttctggttccgcctatccgcatgactctggaacaagctctggagttcatcgatgatgacgaactggtagaagtgactccgacctctatccgtattcgtaaacgtcacctgacggaaaacgatcgtcgccgcgccaaccgcgcaccgaaagacgattaatttcgttttttagtcataaaaaacctgccagcgatggcaggtttttttttgcctgtcgtgagcgcacaccaatgcgagtatctcccttataagtctgtggttacgtcaatagagagctttgtcacaattatctgcaaagtcatacgccgttaattgctttcttttttggcgtaacgtaagatgcttcatctggtttaaacaaaaggattaacaatggcggagaacaatcaccgta

SEQ ID NO: 9056 - DNA, 434 bp, Arabidopsis thaliana columbia
atcgcaccatctgtgcaagaaagaagctaaaacgttcaagggtttttacctggtctggagaaaggtcacgttcaccatgaaagacaacaactttagagcattcagagaaacccaaatcataaaccctaaccatagaatcaaaagtaatcaaagccaccaagcaattctcaggcaactgttcaataacaaacaaaacatcactccgcacagctcttaactcatcctcaaccatagaagcatcaacaacaaacacaaacgcaggtccaagctcactaatcacaccaccaccacctccaacagtagaagaagcgagagaagaaaaagacgaattcgaaggcattgatctaaccccttgattaaacccattactccaactcgcagcagccgtcggagtcgtcgtatttgaacccgattgacgcgacggtagcggagag

SEQ ID NO: 9057 - DNA, 501 bp, Arabidopsis thaliana columbia
tagtttgcataacatcgtgctgtttttgacttttgaaaaccacagatccaaaaactgtttactttcctctaagagaaagcaaagccgagtgagtccaagcgagttttgagagattcgttgactcactaccggagaacgacgctatgtcagagaccgccgtgtcaatcgattcggaccgatctaagtcggaggaagaagacgaagaagagtattctccaccggtgcaatcatctccgtcagcgaatttcgagaaagatcgacacttgatgtatttggagatgatgtacgagttgcttccgtaccattaccaatctcaggagatcaatcgtcttacactcgctcatttcataatctcgggtcttcattttctcggcgcaagagaccgtgttagtctccttctcctctctctcaaagaatcgatctttgtttatccctgaatctgatttagtgaatttcatctataatttctgaaggttgataaagatgttgttgcacagtggg

SEQ ID NO: 9058 - DNA, 802 bp, Arabidopsis thaliana
caacctgatcattcatcttcaaaacattataattcacagaatattctatagaatatgaaagttttgatcttgatctagttgcagtcagtgttggggttttcgaagcttggatctaataagaaaagaaaatttggtatattttttccaataagtaattacaccacgcaaagttatatgagagtccagagtcatgagaaggaattttgatgtaagaagaaatctttatcgaattctcacatacctgcccgatgcatcagtacgactcttgacgtctacatcaccattatcatcatccttttagcaaaaacaaaacagaagagaagtaagataaacaattgaacattccattgtaataagatctgcaaatgacaagagttattctcagtggtgtaaaattgaaccaaatattcccacccaaccaaaaaagtagttttaaaaaataaagaaaaaagagagtcaagtacggtcttctgtcttcatacacgacacaacaaaaacttgcacccaaaaatccaatttgttataatccatcgataaaaacgaattggatgttttaaattggtgtctctatacgtatactaagaagcttaccaaagccttgacctcctccttcttctttatcaaatctctttgaataagccgatcagaaatctgcgacggcggcggaacggaaacgtgaagagaaccaaaatcatcacctgcgtctttataaccaccgcgaaagtatctcgcggtggccgtcggtgagcggttaaagtagagatctgatagaggaactggtaatagagacgataaaggaaga

SEQ ID NO: 9059 - DNA, 560 bp, Arabidopsis thaliana columbia
ccggctatgagaaaaacgagtgtagtaacagatgctaacgttgtggcttgcttgatgttcataagcagagaccgaagctaagccaagaccttgagcaacaaggacagaatagagaacaaccagtagcgagaggataaacgttgttgggtcaggtttaagtccacccatccagtaaattatgaacacaaaagcagttggaagggcaagttccaagggcaggtccccaacgtttctagccatgaaataggaggaaagacggtacattccggaagaccgttccttgattagcattcttttctcttgtggaaatgtgaaaaccgcgttgtatagcgggtagaagccccaaaagaccgagaagaagaagagcaaagcagtctgcattcagaataaatgtagaatgatggttagaattagaatactgatgtctgaataaaatgtgtgttagcatctagaagaagagagccttactctatcttggatgtgagattttggagtatgccacataaaaggccccaagaaaacaacactgatgacttggaaaatctgagcttgttgaaaga

SEQ ID NO: 9060 - DNA, 690 bp, Arabidopsis thaliana
ctaaagtttagcaattagtgctattctttgttaaatatgatgatgataattttcctattgaaagaaacagttttcttattaagcaacaataactcatagttcatatttaaataaaataagaactatgcaatttttaatctatcaattcgaaagcattagcaaattagccaaattgacaccttcccacctccaactaacactcaatacagccctctgacaatttaataagtttcatttttaatgtctgacgactcatctctttcgtggctgtattgtttgtatatggagcgtttatatgaatagaatctatcgcgtgatatggaattgcactctacaggtatttcaggcctgctcggaattaactcgcagggcaggtaaaacatcgacggttaatttgcgtaaatcctctggactgacaacgaaattcagtagattgacgctgggtgttttgctggcactaagcggttcagcgtctggtgcaagtctggaagttgataatgatcagattaccaatattgatactgatgttgcttatgatgcctacctggttggctggtatggcactggagtgcttaatattttggctggcggtaatgctccttaaccactattactaccagcgtcattggcgctaatgaggactcagagggcaccgttaatgtcttgggtggcatctggcgattgtatgat

SEQ ID NO: 9061 - DNA, 369 bp, Arabidopsis thaliana columbia
ttcacacaaaagaacggaacgaaagtatagtaagcgcccataaagcaggtagagaacagcaagccgcaaataatcggcgttaaacgcgcaaagcccagtgaaaagcccttacgtaccagcagaaccgctacccagccagagagcaggacgccgacaaacgccgcgaggaatggcaccgtggtcataaagcctgctttcagcgccgtgattcctttttcctgggttaaatagttcgggaaccaggttaagaaaaaccacagtgtagaagacaccgcaaattgcccaagataaacgccgatcagtttacgatggaacaccagtcttcagtctttggctgtccacggctgacgcgcctctttcttcaccggc

SEQ ID NO: 9062 - DNA, 617 bp, Arabidopsis thaliana columbia
tattggtatgttttttcagaccgttgcacttgttggagagagcgggaggcgaaaatcaacggtgataagcatgattgagaggttttataatccagattcaggcaagattttgatcgatcaggtggagattcagacatttaaattgagttggttaaggcaacagatgggtttggttagtcaagaaccgattttgttcaacgagacgatcagatcaaacatagcttatggtaaaaccggtggagccacagaggaagagattatagcagcagcaaaagccgcaaacgcacataacttcatcagctcattgcctcagggttacgatacgtcggttggagaacgcggtgttcagctatcgggcggtcagaaacagaggattgcgattgcgcgcgcgattttgaaagatcctaagattttgttgcttgatgaagcgacgagtgcattggacgcagaatctgagcgtgttgttcaggatgcacttgatcgagttatggttaatcgaaccactgtagttgtggctcatcggcttacgacgattaagaacgcagacgtgattgcggttgtgaaaacggagttattgctgagaaaggaaggcatgagacactgatgaagattcaggt

SEQ ID NO: 9063 - DNA, 700 bp, Arabidopsis thaliana
ggttcaatctgaacacctgcctcacaggatgcttcacaactgggctctttataactctgatttacgattcatatcactggaacttctaccgatgaaacaatgtgatgatattgatgtcaacatttttgggtcaggtgtggtgactgatgataatggaagttggatttctttaaacgatcctgacagcggttctcagtcacacgatcctgatgggatgtgcatattcctcagtcaaattaaagaatggatgattgagtttgggagcgatgatattatctccatttctatacgaacagatgtggcctggtaagcttactatcctagtattttgtactcgcatgtttctacgtctgttttttcttctgttgctgatgtataaggtatatacaggtaccgtcttgggaaaccatcaaaactttatgccccttggtggaaacctgttctgaaaacagcaagggttgggataagcattcttacttttcttagggtggaaagtagggttgctaggctttcatttgcagatgtcacaaaaagactgtctgggttacaggcgaatgataaagcttacatttcttctgaccccttggctgttgagagatatttggtcgtccatgggcaaattattttacagctttttgcagtttaccggacgacaatgtcaaaaggtgtcatttgttgttggcttgcaacaaattggagg

SEQ ID NO: 9064 - DNA, 1540 bp, Arabidopsis thaliana columbia
caatctaaaagcaaatcaaattacccataattacccactaatacactatcataagtcatatataactcactctctctctttctcaccctatttagaattgatccattgaggaagatggagagacagcagcaaaattatctacttagttggagtcaccaaaaccagtgtggtataaaggtaactaaatcaccaatctactttctttttattatcgattgctcaaatcctccaaactcaaactgtttattttggttggcagacaatagaagagcttagacattctcttcttcacacaacaatggagttagagcaaacaagaatggtggccagcgaagaactcattgccaaagacgaccagataatgcagctcaaagatcttctcaacaaagctatcaaagagaaagattatgcacaagagagatacaaaaggattcttcttgaccaaaacttcctccttcaacaccaaacggacgaagagcaagatccaaacatcaatgggtttcactcatcggatggtgaagaaagcattgtctcatcttttgaaccgccggtggaaattgagttagattttccggagatgactttaccggagaaagggaagcttttaaaggcggtggtgaaggcagggcctttgcttcagactctacttctagctggacagcttccacaatggcgtcacccgccaccacaacttgagtcctttgaaattccaccggtgaattattgctgaaggatcaccattgtcacaagatagttgtgggaataatctaaacaggaagagggttcactgtgattccaaaagagagaccaagtaccaaaggctcttgccttgatcgtttatggacttacatttcacttaagcatcaagtatgtatcgcttttctttgtattctttccaagggtcattgtatgtcaagcccgtggttaacccatttcttatcttggagtctaggtccatcatgttaaacaaaaaaagatgtagtaccgagtatccggtttttgggtgagcatgactctttttgattataagcttggtaaatatgtgattgtataggttaaccgcgagttagcgtctcaccactagcaaaaatcagggctaaagcgagctagactaaagtgagctggctcggccaccgtattgactctactgccttttgtatgtgtgtataaaaaaaaaaggtggaaaagagactttaagatatgaaatggtgtgaggttgatgagcatacagtgattgggatttggttacccacagatctgaattagtctcctcgaagaagacaactttttcagcgacagtaacaatgagttcttgccaaaagtggatcctatagaaaaagtatgaggagttgaggacccttttttcttggctttacttttgtgcactatcatttgactaactcacccactaatatcttactttccaaatacaagttgattacttttgcttactcttgacattcaaggcaattacataacctatttaggagcaatgctaagttatagcgtctaggaggagaaaactttggtgctctttcaa

SEQ ID NO: 9065 - DNA, 537 bp, Arabidopsis thaliana
ctctttctctgttccaccgcctataaccgctccgataaccgcagatgcttcaagcaacgaaccggttttatgaacgtgaatatattcaagatcctctaatccgacatcgttttgttccaacccttcactgcttaaatccttcgcctgtcccgctacgagtcctttcgttccaatagacttagccaattctttaacggctcgaaccattttcttggatgacacgtcagcttccgtcaaatgctcgaaagctagagctaaaagtgcgccgccggagagtatggctacgctttctccgaagactttatgtgttgttggtttccctcgtcggagatcgtcgttgtccatacaaggaagatcgtctttgatgagtgacattgtgtgaatcatttcaactgcacaagccgcttgaatcgctaaacgctcttcaccgccgactagctcgcaagcggctaggcagagtattggcctgacacgttttccgctgcgagaatcggtaacgcattgccttgtggatgttgagtggctcaataagtggaa

SEQ ID NO: 9066 - DNA, 3170 bp, Arabidopsis thaliana
gagatggcaacatgatgtggtcgtgtcgggtctgtgaatcccggtggttggtgcatataaactgtttcgtgaagatcaccgtgtaaaaaagcattcttgacgtctaattgatggattggccaatctcgtgcaagagcgagatgaaggacggaccggactgtaactggtttgatgacagggctgaatgtttcgtcacagtcaacaccgatttgttgtgatttaccattggcgacgagacgagctttgtaacgagagagagttccatctgcattaaacttatgtctaaacaaccacattgaacgcacaacgttagtgtttggtggtcgaggaactaagtcccatgtgccacttttcatttgagattcatattcatcttgcattgctggattccaattaggatctttcaatgcttgaacatgagataatggaagaggggaaatgacatcagtatgtagagacaagatttgtttcggtttagagataccgcttttacttctagtttggatgttattaggaggagcagttgcggtggttgtggtattagaagaaagtgaagaggaaatgtttggagcaatgacggtggggagagaagaagttgttgcttcgggtggagcagcggaagaagatggtagagaggatgatgtcgttggtgaaacagaggagggaagagtagtgttaggtgttgtagtagaaatcggtgctggaagaggagattgagtgatggattggagattgttaggtagcagcgttaatggtggataagaagaagtgagaggagtatccaaactagccgagtgggaatttggtgtagagaagggaaaaattgtctcatcaaaaactacatgacgagaaatgattatgcgacgagaggagagttcaagacaacgatacccacgtagttagatggatagccgagaaagacgcatttggtagaacgtggtgagagtttgtgagcagtggttggaagaaggttggggtagcataagcaaccaaagacgcagaggtgatcgtaagaaacaggtttttgaaataagcgagtgaaaggaatttgattaccaatggcactagaaggaagaatattaaaaagatgagcagccatgtgaagagcttcaacccaatatgtggttggcatgtttgcttgaaaaagaagaacacgaacaaggttattgattgtgcgaagtgttcgttcggcacgtccattctgttgcgaggtgtaaggacaagaaaaccgagattgaataccattagaagagaaaaaatctagaatctgacgattgttaaattctccgccattatcgcactgaagtgctttgatgggggtttgaaattgagttttaacaaaattaaaaaaatgtaagaattttttgaaaacctcacttttgtaacgaagaggataaatccaaatgaaatgagagaattgatctagaaaaataacgtagtattttataccactcacgcttgtcaccggagaagtccaaatatcggagtgaattatttcaaaaggagaagaaactgtattagtagaagaataaaaaggttgacgaatatgttttccaatttggcaagcatgacataaagaagaaatatcgtttttggaacaatcaaataaaccagaagaaattaaaatgcgtaaaacagagttgttgggatggcctaagcggcgatgccaagttgaggcagatgatgaggtgagaagcgcttgatgagagggagtgttgacagagtacaaagggccttggctatcacatcagattagaggtgctcgggtacgaagatccttaacaagaaaaccaaacggatcaaattcaacagagcagagattattagtggtaaattgacgaacaaaaattagattttttagaatttgaggacaaataagaacattattgaggtgaaggggacgagaactagatggaattgttgtttgaccataagaagtgacaggaattgtggaaccgttaccgacagtgacgagaggaagagaagaattagaggatgaggtgatggaagagagtgtacctggctgagccatgaggtgagctgtagctgcggagtccatgtaccatccaacatcattaggatccgagaaagtcatcgtgttgaatgcatttgcgagcgtagtgggaattatgtctgtgtttgctggagaggtgattggttgggccgaggtgaggaaggcagacccgtttgatggaggtgcgtgaccgagaatcccttgtgcgcgttgtggcagcgttggtggttgagagccaatgtgaaatcttggttgcccatagaattgtggaggaggtggtgtagtgggccaaattggcatattgggccattgtggataacttggccattgaggttggttgggccaagttgatgtttgatttccagagctccaattaccgccgttgtagttagggttgccgccaccgccacgacctctgtttcctcgacctcctccacgattgtttcaattgtttcgtcctccgccacgaccgtactggaattgttggtttgtggggactgagcgatagtcttgttgttgagatgaggcaagaagaacatgtggtgaagaagcgttgtcatcattgttaggaagagattgcagcttggttttaagcctcgattcttcttcaatgagcatcgatctggcatcgccaaaagagcaaggtggggaacgatgtttaataacattaatgatgttatcaaatttggagctaagtccattgagaaggtgcatcactaaggcgcgatctgagacaggggaatccacattggcgagcgtatcagagagtgacttcagtttttgacaatagtcatgaacggattgatcgccaatccagagatttcggagttcatttttcagttgtattgcacgggcttctttgttgtcgaggaataaattctcgagcatgagccaaagtttgcgtgcagagcactgcgattttaagacagagttgaggagcgattctgaaatggtaccgtagatccacatcttaaccgtattgtcaagttgcttccatgttgcgtcggttggtccgatgggaagggaggtgccatcgatatgcccggtgagagagaaactaaggcaatgagtttcgaagaggatgcgccatgaatcgtagttcatcttctccatgttgagagtgatggggatgtgagcacggatctgagtgagactc

SEQ ID NO: 9067 - DNA, 585 bp, Arabidopsis thaliana
ctaaagtttacttatttttttttttttggaacgtttaacttgaccgtccaatccaccatgcctaaaacacaccaagaatcaagcagagtcgtcgcaatcatgaaaaaataccttctctcccttctcgctgcggtgacctacaccaccgcgcagtccgtttctggatctgctgagggcttcgctcaggcgtcaccggcggcggcggcgcaacccccgtttatcctgctgacacggccgagctcgagagccttctctccagcgaaggggagcaggtaatcgtgctcacaaagacctacgacttcaccggcacttctgctaccggcacagcatgctactcgtggggtaccggagaagggtgccagctaatcctgcaggacgactgcggcgacacccccagcaccacagtgacgtatgatgcggccggtaaaacccgatccccgttgcttcagacaagacgctgttgggtgtgggcagtgaaggtgtgatcaagggcaagggtctgagcttcacggacaacgtgagcaacattattgtgcagaacatcaagatcacggaactgaacccggagtatgtgtggggtggaga

SEQ ID NO: 9068 - DNA, 721 bp, Arabidopsis thaliana
caggcatcctttctggaatgacctgtggaagaaataagttatccagttagagatttctgtaagtacaattatgcagcaatgacttagtaggaaaaccttgtgagtcaatttgcaatttgcatttgcacacaatccattcaaaaatttggtgcaaacagcaattttcgagggatcatgaacatagggacattttccgtcatctttgttgcatttcccaaatcttgtgaaaaactggcagtacttcttctttttagccaaccgcaaccgggcattgtgcaggctccatctgactttctcatttgccaacacacgagttcgtttctttggatctctgacaagctggttaccattcccgaaccgaacatatctgcaaaaatagattcaaatgttcaattgaggctccagaatgtggagtatataaatagataaaatgcattgagaattacgtactcttcattgccgatcaccaatctctttgggataaacggtcttttcacaccctttccattttcagaaggtccagagcacggtgaatcaacatctaacaaaaatttatgtttaagctaatgagagatacacaagggtaagacttatacaacgagagagttctcaaatccgatcaaaacattttgttgagaatcatcaatcacctagagggtgtgaccagtatataacacgtgtgtgtgtgtgtgtctgtcagttttcgtatattcatttcaca

SEQ ID NO: 9069 - DNA, 502 bp, Arabidopsis thaliana columbia
ggcgtcgagctatttttccgcagaccgctgtgttctggcagagctacttcttgggcaggttagtgtaaatttctaacctgttgagtatcttgagaactaaagcatctctccaaaatcttctgtaaacaatgtggtattatttatcttcacagccgttattcccgggagaaaattctgtggaccagctagtggagatcataaaggtgaactcttcttttattatattttgttttggcgtcatttcctgtctgtgctcatgatgtgctgtgttggtttaggttcttggtactccaactcgcgaagaaatccggtgcatgaacccaaactacacagacttcagattcccacaaatcaaagcccacccttggcataaggtaatatatatatatgcatgtcactttcgaacttctttctaatcatacaattgcttacttctctacctaaacaacattcatggaaaagaagctaacacggtgcacaactgctctatgacctccaggtt

SEQ ID NO: 9070 - DNA, 755 bp, Arabidopsis thaliana columbia
gtgctcatgtccttggacaggaggtaaaccaaccagaagcttaaacactaatgcaaacttctgcaaaaccaatgctatcgcttgtgtgtgatgagtaatcaccgtgttattcaccaaaggagtaaccacatcatccggtgaaaaagactccacaacaggcaatggtgcttccacagctcttaacgatagaggaggagtgtgtaaaagctgatctccaaccaaatgcacagccttcccgttataagtaaaccaccactcttgtaatttctaatccacttcacacttacccaatgtgactaactattgcatacccaaaataatatccacacctcctaaatccagagcaatgaaatcactttgaaaatccacaccactcagctgaaactgtaccgctttacaaatgctagagccatgcactgaaacaccatttccaagcatgccatctaaccctctagccttgtacaattgcaacttaagtttggcagccacagtaggagtgataatattgtgagaagctcctaaatccaacaatatcactactctgctcttgccaaatacgccaacaagttttgttgtgcgtggtgagtgtacccaaaaaggagttgaaagataaggattgacaagctggtggttcttgaacttccataagttcagtgtcaacaaccagcatctcatcgtccaaaacttccaattccaaaccatccacaattgtaagaatctgcaattctttaagaggacacacatagcgtcgagag

SEQ ID NO: 9071 - DNA, 515 bp, Arabidopsis thaliana columbia
gttgagatccgtgtggtgagtcggaatttaggtcagttggctattggtgaagcttccgcggctcgtcagcgagaggaggagctcaggatcaagcagagacaagcggaggagcagagtagacttagtctacgcgattgcgtttatgcgctaaacgaagaagaggatgatgaatttggttctggccatgaaggcagcgatggtggtagttccggaggtggattgctaggttttgatttgacaccactttatagagcttatcacattcatcagacactatctcttggggatacttttaagcagtactattataacaatagggatcttcagcttacctctgacttccaggtatctactatgactccgtttctcgagtcacatcagacgtttttcgcacagattgctgggtttttcatagtagaggatagagttttaaggactggaggagggttgatttcgaagctggaagtggagactttgtgggatactgctgttactaagatgtgtgctgtgttgga

SEQ ID NO: 9072 - DNA, 496 bp, Arabidopsis thaliana
tagtaactttgggattcttgatattgaatctggcgaatggagcaaactgatgtcacctcctcatataatgcgagtgggaagtaaatcggtgtgtgtgaatggatcaatctactggttacaaattagtgtgagttacataatactggccttggatcttcaccaagaaacgttcaatggtgtctaccacctcccggctacgtgggtcacgcaagatacccaattagtgaaccttgaggaccgtctagccatggccatgacgaccaaagttgggcctgaatggatactagagatctggagcatggatatagaagaaaaaggatggagcaagcgttacacatggagcaaggcttactccataagtttagcccatagagttgttgtatcctggccatggcaaaaaaggtggttcacgccggtatcggtttctaagcaagggaatcttgtcttctatgataatcacaagaggctgttcaaatattattcaggtacagatgag

SEQ ID NO: 9073 - DNA, 721 bp, Arabidopsis thaliana
agagacaacgttacgggcaggtataaaatagtgaggatgtgttttcatgattgttatgaatttggtattcttgatattgaaactggtgtatggagcaaactgaggtcacctcctcataatatgcttccgggaagtaaatcggtgtgtgtgaatggatcaatctactggttacaaattagtgcgggttacataatattagctatggatcttcacgaagaaagctatcatggtgtccaccaccttccggctacgtgggtcacgcaggaaacccagttagtgaaccttgaggaccgtctagccatggccatgaccaccaacgttgggcctgaatggatactagagatctggagcatggatatagaaggaaaaggatggagcaagggttactcgtggagcaagagttactccataagtttagcccatggagttggtttttcctggccatggcagaaaaggtggttcactcctgtgtgggtttctaagcaagggaatcttctcttctacgataatcacaagaggctattcaaatattattcaggaacagatgagattcgttgtctctcctctaacatctgtgttatatcttcttatgttgaaaatttggcccacttccgttaaaaccaagccatacgcatcatgatcttgggaattcgaattccaagttcagcacgtccagatgccacttgtttccgacgcgaggttcttggatatcacagttttg

SEQ ID NO: 9074 - DNA, 814 bp, Arabidopsis thaliana
cccctcaaaaagacagtcaaaagaaagctgttcaataaccaaaagtgacaataacctaaagaaagtaaaaaactttcctacatcaatggaaatgttagtcatttagcctttcctaaactatcttaaagcttagatttttacgtactcctaatggaagtaaccaccaaacaaccattctcaagaaatatggagattttgaacttacttgtttcctttgatcttgaaccaagtctcagcacagtgtttatgagcagcagcgagatcagctttacaagaacagccaagctcaatgggaacaccagattcaagattcgctgcatctaagctcatgtgacaaatcctgcaatctctctcagattgcgacaaatgtacaactttctcaggcaatccaagctccagatctatttccaccgaacacaccgacgcattggatctcctctcctcatctttcactatttcttcctccttctccaccgcaccggagctccgacgaggctctccatcgccatcacagccacttgagctattgattactttaacagagacaaaggtctcgagatgtggctgtacggattccatattcgtatagacccggatgacgaatcctcatataaattatgacaacgagacttgtgaagatgatgatgatgatgatcaatgctttgcagcgcagagagagagagaaaaaaagagatttctggttgaaactttacagtaaaattacatgattgccactgggttttggagttaagtgatcgtcagattctcagacaaaactattaactctctcctctcacttgttcacctggacacc

SEQ ID NO: 9075 - DNA, 449 bp, Arabidopsis thaliana columbia
cctcgtaaaccgaatccgaatcgcctacatttgtcacagtcctaatgaaatgtgtcgacattttactctctccatactgctgaaacacgacagagaacgacgggtagtttaaattcccgacgtgtcccgctcgtcttgcaccgtcacagtccgcttggcgacgggttattgtcacaatgttggttctagtgtagttagaattacacaagaagttgatataatcataagatgttatatcatagactaatcccggatccatagctttggttgggtgaacatgacccgaaccataatccataaccgaagatgtattgccagtggactcatccatcatcggctcaccgctgttatcaaccgtgtaagccgtggttatcaatgctgatcttatcgccgccggactccaatccggatgagccgccttaagcaaagcagctagaccagacacgtgc

SEQ ID NO: 9076 - DNA, 462 bp, Arabidopsis thaliana columbia
tgtgcaggcgaactacaaagactagcaggtgccttaatttgggttcctacaattatcttggatttggttctttcgatgaatattgcacgcgtcgtgtcattgagtctctgaagaaattttcagcaattacatgtagctctcgcgttgatgcaggtacagggtcgtctttgtgtattaggtctcgaacaatctcttctctttgtggttgcctgacactagttgtttctgttatcaggaactacatctgtgcatgcagaacttgaggattgtgttgctaaatatgtcggacaacctgctgctgttatttttggcatgggttatgcaacaaactcggctatcattcccgtcttgattggaaaggtaagtatatgctgctacatcttgtgatggacacttatgttagcccaaaacctatgtttttgtagctttatgtgctgccatctgtacagggaggggtgatat

SEQ ID NO: 9077 - DNA, 456 bp, Arabidopsis thaliana columbia
taaaaaagcttcagcaatgtaccatgtatatgaacaaacaacacatcgctaattttgatccccgaaacctaaaataatcgtgaaagaaattaattaatctccaatgtagaatatttcatgtgcatatatacttaagataatttacctggcgaggacaatcgtgatcaggacagtagttttggtcaatgatgatagggttctcgacattgttcattacacaatgttggcaacggatgtttttagcgcaaccactactgggcctggcccatgcgtatcacccgagtcaggtaactcgcctggataatatgaacgttttcactgtcacgttttgtacagctgactccacgctatcctttccctaacgtgcaatgctgcaaagtgccaaagaccccatccaaaatattagataaaatttagacctgcatatgaatgcatattgtatattccgtgattatt

SEQ ID NO: 9078 - DNA, 321 bp, Arabidopsis thaliana columbia
tatctgttggttggattttgaacgtatgagactgagtacgttgtcagaatagagtttcttgagtgatgttgataaaccaattgtctcttcttgaattaaccgtttgtctttttattatcgtggatgctatattcggtagatgactactgcaattgcaattgaggatgttagaagagaagtgaagatattgcgggctttaactggtcacaagaacctagtccagttctatgacgccttcgaagatgatgaaaatgtttacattgtcatggagtaagtaaaagttgcttcatagatgtctcatttccatgctttcgcagaatc

SEQ ID NO: 9079 - DNA, 1470 bp, Arabidopsis thaliana
gagagtaaatatcatttaactgaaatttattaatgaaacagtaccaatcagtttcacacaaatttgtagaaggcaacaaacgtataaatgtcaaaacaatgcatgagtgacacacgtaactactaatgttattaactgggtccaattaaagaacaagagacactttaattagccttaacaactgtgacaggacatgttgcatttgtcaccacatgattgctcacactacccagcaagatcctacaacaacaacaaaaaaccccacagataacgtaattattaattatcactccaattctccttttgattaaccacagaataacgaaataagtgatactaaaattaatttgagaaaagccaaatcagtttcaattatttgaagctatattgcctaaatttactgaaattcgaaattttttaaccaacgaaactagactatatatagtaagtaagcataagaatttaccttttgagagaacccaaacctcgactgccaagaacaatggaatcgagttttagattttcgacagcatcacaaagtttctcccttggatctccccaatacacctttgctacaaccttcacctataattttgtttaaagtttatattacaatgaattaaacatcattatttgaaagaaaatcaaaatgatattaaagcaatagttgttaacttgtgtaagattacgaattacgaaagtgaacatttacctttttagccctagagagagtatcaagaacatcaagaacctcaggatcgtaagcaagtccatactgtttagacaaattaacctctctaaattcctccaaaggaattagcgctgcaataattagtttgtaacttttaaatgatcaaaatacaaattttgatcataatatggagttaactctactaatatatattaaagagatgtagtaagttaaatacgtgaaccggtttcctcgaagaggattttgcgggtatgatcggcgttttgtggttggacgtgaatcaagatgacggtgtcgccgtcttcaaggagattctccgccgcccaccggagagctaatttgctcgtcggagaatagtccattcccactcccaccgtacgtgcctttcccatttttctctcttgccctctcgatgatctctaagtagaaattgattacggtagtctaatttatatgtatataataaccggtttgatggtttagactttggagaatattattggcgcacacagaattcgagatatttaatgattgtctttttcttctatggggagattcttgaaactactaggtctctctctctcgcttcttttcttaaaattctttgttactgagagtattaatgactagtcatttcttttgaatagttttgtctttttatttcttttgtgtgcataacatttcagtaacctcatatagtttgaaaagaattatttaatatacttgatattgaaaacatgattttaaagtgatgtgag

SEQ ID NO: 9080 - DNA, 585 bp, Arabidopsis thaliana columbia
tcttcggtttctatttcgggaaaactccgctcatcaagttgtctccaaagaaaacatgggaaggtttcatcggagcatcagttgcaactataatctctgcatttattgtaataaccttcttctatcatttattcattcgttcgtaactctttcttttggtctcaagactgatagattattatctgcttcgtacaacagtttgctaatgtcttaggccagttccaatggcttacatgtccaaggaaggtaacaaaaagtgatatctccatcacaatattttgtctcggcctttacttcatccttgtgttgcatatcttttgcaggatttatcaactggttggcttcattgtgatccaggccctctcttcaggccagagtattacccatttccctcttggattactccatttgtaagcaattaactgtcctctcgtgaaaaccagccgatgatgttgtcttgttttgaaactgagctccgttgtgaactttgcttaacagtctccatggaaagggatctcgaccctgcctgtccaatggcatgctttttctctcggtctattcgcatccattatggcgccttttggt

SEQ ID NO: 9081 - DNA, 556 bp, Arabidopsis thaliana columbia
acaaaagtaccaaaatacttgtataagatatttatacaaaagaaagacaaactccaaattcctgatgatggtccatctaaccacaagaaggaaagaaaaacagtaactgtaacacaaaaagaaatccgaaagcattctttctaacctagtttttgtttttgtctaattccagtaggtgacaggggaagtcaaattcccgaacctcgtaaaaccatctacatattcactttcaagtaaaaagtttttcactgcttagtttcatcaaataagcagaccgaaacttaacactaacaaacactcaatggtattctcttgtgaggttcgatcttgactcctccgcttttctcaaactgaaatctctctctttttatcatcatcaccatgatgttatttcctgcagaaagaagaagaaaaatatgattgcatcatatgatggcgtaaaagcgagaagaatatatttagtgaaagtagtacctaatggatggttttcaagcagtctcacaagacattgaagctttgattctctcgacagtgcaagctattagattgttgacag

SEQ ID NO: 9082 - DNA, 485 bp, Arabidopsis thaliana columbia
agtggatcccgtatggacgccactcaaaactgtcgattttcgagttgtcgagaatctgtctcacgttgctggtttgctgtttcagcttattccaaatagccactcttggcttacctgctagcaacgaattaggttttggttgtagttccctaaatctctcccatgtccaaacttgaaccaacataaacaaggcactcaatctaatttcgaccctaggcggagatttgctgatgtgggttttcaagagacttaggtctgcatacaagtgagcaagaacagcaggagcaagagcaatcctagtaccacttgaaagattaacagcaataggaaaaatagtttcacagagatgatggaagcgtgatggcaacacgaaatagccaagccacaagacgaggaaggcaacatgctcaagctcaccaccacagttcatgaacctgtccatccatgcaacttgcgttacgagattgactttaccttctcgttta

SEQ ID NO: 9083 - DNA, 570 bp, Arabidopsis thaliana columbia
cacaataatctaccacgtacttagttgcgtctttgaagtagttgtaaaatgcaacacttactgctccccctgcaatttcccatcccaaaaaaaaaaacgaactacaagattaggaaaacatcaattttggttaaaaactaaaaaagccataactgttttgcttacaatgagtgactaagagcaagttctcagaaggatacttctccgcaagaatcttcactgtcttataatatcgatcctcaaaggcttgtgcagattctccccattctggcacctaaacagtacaaacaaggaatcgagaattatcgaaataaagtttagatatagtcacacaaaacaaaacattaagaacgaagacacgacaaaacaagtcatatagagcacctctttataaaccatatccacattagaatccactgttccttcaggaaacatagcttcaagatctgaaatcttgaaatcaaatttcccatgtttgggagcaacttcactcttaataaagattgggtgcggtatctcggacaatccaaattcaatagccacctaaagcagacgagacaagacatatat

SEQ ID NO: 9084 - DNA, 543 bp, Arabidopsis thaliana columbia
atcagaacgactctcagcttcagccattcgagtcagaagcggagagagggaggtcgaagcgcgatgcttctgatctgccgattccgaggtcagggatgatgatggctgtggtgactaggcctagtggcagctaatccaactgtaattgatacaaaccttgactctcgctatgacaaggaagctttcaatcaacagaagcaacaactatgccttaaacggagaatataactattgctcacttaagaccgatttcaagcaatcatccaagcagaaatctcttcctttcgataagccttgcctggccctgctttacctgccccctcaaaccacaaaggcagctaagccataccccaaaagcgactaaccgagatacgggtacagtcggagtgcgaccgcaacttggacgtcgagccacagcgccgcgcgtttgagggttgctctggatctagctccaccagctggagaaacaccggcgtctggtacgcatgagcagtgacggaagtagatagagaagaagcccatgaagaagagagcagcgattag

SEQ ID NO: 9085 - DNA, 616 bp, Arabidopsis thaliana columbia
ctgtgaagagttgatggtatttagatacgcatagcacctctgcacttgcatgcctctgactgaagcataaatgaacgatgaagagcatgcttttggtcatgcaggttgtgtggtgcttgtgaatcattgatattggtgaacctgagctgaggtgttccttggactgcagggaccaggaacagttcgagaaaagcaggagaaagagaggaacgaacttcgtgatcttgtaacatcgataccactacttgaattagtatcctatttttgctatgtactgcccactaagttgtatttaatgttttcctctcaggttggaaaaaatctgcatgttctaggacagatagaaggtgttgaccttgagatgtacaaagagactgttcttcctagggtcttagagcaggttcggcagctcatttttgcatctattaccatgtcctttcttatagggtttcaattcatgtataatctgctaaatctgaaaaccttgaacaggtcgtcaactgtaaagataagttggctcagtattatctgatggagtgcataattcaagtctttcctgatgagtccatttgcagactcttgagaccttattggctgcttgtaccaactgatggtg

SEQ ID NO: 9086 - DNA, 577 bp, Arabidopsis thaliana columbia
tcactagtgttgccgaaatcattgtataagttgagattctccagttgaggaagttcatcaagatttggctgtgtagttgcattggcaggtggctgagggttatatgttacgttctcattgtttaagaacgattgcatcccataggagaagtggctaggtcccgtttggctcggaatcaaacttccatatctactcgtcatgttattgttgaaattatgaccactgatagctgacggtccaagttgtccaaacccaagaacttgagatgtttgggcgattttgtttgccatcacgggtggttcgaaaaagcttcttctttcttcgttttgagatggttggtttgggaaactgaggttgctctggatgggcagcgtcaagtttgatccagatccaatacggtgcggctcataggtggatgaccggttcatgtagttgtaaggcatctggttgaagcagacgggctcacgtgttgtggacaagagtttagactgtccaaagccatgtacgggtttggaatagaatgatctattgttaagccttgtgtcataccaagaagtagatggtgtgtaatagttga

SEQ ID NO: 9087 - DNA, 824 bp, Arabidopsis thaliana
tgattactttcaccctaaacgccgcctgacaaaaccaaaccggataattttcagaaaccaagaccggttattgtaaatgattcggttaaaagaaaaaccgagatttggtaggggtgatagatgtctctcaccttcttatctgaaccaaactcgatgatgtcggacgatctaaaccgcgcgggaaaattcggtgttgctctatatcttcttccttcgttactagaaaacattcaaatatcaaatcagaaacttcaaagactcagatataataacctggtcagagtatccatatagacttactcggtcacataggttccgtgttcgcttcgaagatccatcaagaagaaagctccgtctttgtaaatcacacgagcatgcatcttcgaaacctaaaccaaaacataattaagttcgttgactagttctctttaagtatctcaggtcacactatcagatacacagtttatatacctgagacgaagggatcacaatgcgcattccaggaaaatcttgatctggttcgcttctaaaatcaacagagttttcaaaagtttaaaactgtaagatctttaatacaaagtttctaagtttccattgactataaatctgagaggaattcagaatggtgagttgtttcatacccgacgatgcaaggttgatcttcatctttggttagacataatgtttccgaaacgcaacaatcgtcgccgtgtggaattagataccatctgcaaagaaattaagactcagactcagaccaaagcagtatagagagcaaggccgtttttttgttaggtaggtgaagaaatataatggaactaaat

SEQ ID NO: 9088 - DNA, 635 bp, Arabidopsis thaliana
gccttacaggtttttaatttatcgaagacacagaacgagcttatacgaacggactaatctgtattaacacctctaaaatttgatgggaagcctactgagccaaccttcttcgtcaataaaggtaagattcgtaaactgaagaacgtctttttcacttgccttcgtgagccatggcactctctttgacgtgtctgctccaactccagtgcaaccaaactccacaaacgttatatgccccctaaaataatatcgttttcctttctttttattaagaaacagatataactttaatgaaatatttatcatatgaaaatgtaataaaaaggtaaagagattatttactcttggccttttgctttccaagcatcccaaccaattggcaaaatattgtcgctaaacatagaacggtaaaagataacacgtgaataagatttccacgctcgtcccagtaacgccttgccgcttcccataacagtgcagtccttaaacacgaaccctcccttatccgtcggcgagtcccttccttgtgccgttatcgttccatacacttcattcggtgggtagatccaacgcttagtttcaacgtacagccctttttgttacattcaccattactcagagtatcaacaaattta

SEQ ID NO: 9089 - DNA, 616 bp, Arabidopsis thaliana columbia
  unsure (1)..(616): unsure at all n locations
nnnnnnnnnnnnnnnnnnnnnctaaagtgctcttccagacggatctgcagctcatcgagatccgcttcgtagcgttcgatcttctcctgctgacgcagtgcggtttgcaccaggttcaggtgatcactggccgcctgataatcggcttccagatcgccttcggaccgttgtgctctgccagctcacgcgccatatcgacgtgtttgtactgctcagccgccagttgctgacgcgaagtatgtagctcgcgacgaaactccagggctttgtcgagatggacacggcgctcgttggcgtgacgcatgtagtccgccgccacgtagttggtggcttcgctgatcagatgcttaaacaggtcgcggtccgactgggtgacacgaatcgcttccagcgtcatacggttttcacgcagcgccgcttccatgtcctggaacgctttacgcacgccgctgttttctggcaacaggtagtcgcgcagagaacgggtaatggcactggagatccgccatacagcgaacttcgatcagacgatagaatttgctacggtcagatgcggacgcagacgacgcgcgatgatgccagatcgacatcacgagtggtaacagtaatggagttg

SEQ ID NO: 9090 - DNA, 483 bp, Arabidopsis thaliana columbia
ctgcttttgctcttagccgttcattttctatccgatgatcaaggagtcggagggatgatgacgtctttgatccatctgaacgaaagagagtctttgtatagagctggaggaacaccgtggggagtggccttcatgcttgtctttctcttcttcatggtttcttatcaatctcagtttcaagaacgttggtttcctcttagataatgagatgacgtcgtttattggttcttttactactcttgactttctctttgggtttagtataatggattcttgatgtaatttttttggtttaaatttcattcaccaattgtaccgttttatggaatcttttgtctcatggtatagaataattcttagtacatattatgacgagaataacaatagattattataccaagttttttggtatctgcaccaaatagctatggacggtgaattatattttgttcattttggccttgggggaaaattaaacttttg

SEQ ID NO: 9091 - DNA, 771 bp, Arabidopsis thaliana
ctcgtctgcgcactctcgccctgtgtttcatcctcaccaacgcttccgtctatcgcaccgttgtcgagttcgacgaagatgacgccagtaaccccataggcccaatacagaaatgtcagaaggagtttcagcaagaccagcacctaagagcttgccagagatggatgcgcaacgaaatgtggcaaggacgtggtggtggtccttccctcgacgatgagttcgatatggaagacgacatcgagaacccgcagagacgacagctactccagcagtgctgcagcgagcttcgccaggaagagccagtttgtgtttgccccaccttgagacaagctgccagggccgttagcctccagggacaacacggaccattccaatccaggaaaatttacaagacagctaagtacttgcctaacatttgcaagatccagcaagttggtgaatgccccttccagaccaccatccctttcttccctccttactaatagattccaaacaaaaaccctcgagcgtatgagagtgtggttgttgatacatgttaacaccacacctcatcgtgtcttttatgaaaatgtaagttttggatgtttgaggctaaatgtatttagcacaagtccttaataaataagagttttgtttatgtttcattttcattggcatatgctctctctaggttgtccgtaatattagtttacaagaaaatctcccaaataaatttacaggttaagcaaattagcaattaaaaactgctctatgactgtcctcctctgaaag

SEQ ID NO: 9092 - DNA, 572 bp, Arabidopsis thaliana columbia
  unsure (1)..(572): unsure at all n locations
nnnnnnnnnnnnnnnnnnnnnntaaaggtcaaacagtaactccacttcctgggtgtcgagactggcggtgggttcatcgaggatcagcactttggcagagagatcgatagcccgacaaatagcgacgatttgctgcatcgcgactgaaaagcggttgagcggttcgcgcacgtcgagggagaaaccgtaagatgccatcagttcggtggcgcgcttttccatctctttgcggcgtagaaggccgaagcgtttgggttcgcggcctataaatagattatcagcgaccgacatattgggtagcaggttgacttcctgatagacggtgccaatgccgagttgttgcgcgtgggcggtatttttcggtgagatagcctggccttccagccagatggtgccgcgatcggcgtggtatacaccagttaatgctttgattagcgttgattttcccgcccgttttcaccgagcagcgccatgatttcgccacggcgcaggctgaaatcaacgttgtctaacgctttgacgccggggaaaaatttacttaatccttcggtgcggaggatctcctggtgttg

SEQ ID NO: 9093 - DNA, 1120 bp, Arabidopsis thaliana columbia
gttgtagtatttacttaaaacaatacaactatactaggagaaaaatgaacacagaacataaagtaggaaattggatgaaagtattatctaaattgtggtccaatagtttgtggatactttaactttagatgtatgaagactatagacttttcctagagatttatatataggtggtgtatatatacactgatttacacatattaagttatgtgtatatctaaaaaagatagtgactaatttctgaagtagagatttactatgaatttcttcagaggttgaacctaagctaaatgatatagcatgaacaagaatttaaatgttaataaatagattcgtagtatcaaaggcttaaagatttaactattatttttgcttggaatctacttttcgtgaaagatctccagccaagcaaacacttggggctctgtacggacactctaaaacataataatcatttaagcaattacgatcattattctatctcttctttcttgtttgtttgttaaatgttaaaccatttatcgaataatggagatacatatataaataaaacctcttccacaccactttttttttttccatagaaacgaaaaatagttgatgatgacaaaatgaaataataacatgaaaacttatacttatagttattgtatagaaataaaatgatgagtatatataatgagtagagaaactattaaatcagtatagacccctcacctacgctttactctttcactcctctctctcctgctttgctccgccgtgagaggagaaacaaatggggaattgtcaagcggcggaggcggcaacgacggtgatacaacaaccagacggtaaatcggttagattttactgtacagtaaacgcgagcgaagtgattaagtcccatcccggtcaccacgtggctctcctcctctcttccgccgtacctcacggtggctctctccgcgtcactcgtataaagcttcttcgtccttctgataacctcttgctcggtcatgtttatagactcatctcctccgaaggtatataatatattaatcacaattcacacagaacatgtttcagttttaaattcaggaaagaacagaaccctaacttatagggttttcttcaattt

SEQ ID NO: 9094 - DNA, 534 bp, Arabidopsis thaliana
gcaagagatctttccattgcatggtcagaggactccaaccattggatctggctccctctcccaaaccaaaattcaaagtaaaacttctcttaaaagtatttcttatataaattgaaagaaatatcttaaatcacgaaaatatataccttataacgataatatttctagatttattgtctaatactaagcacaatactttccagtgaatcagtgatggaaattgcatttttgaaaagtgctagctggctagacgtagctggaaagtttgacactcgatatttgaccccgaggacaaggtacgaggtggtgttcgtagtgaagttagaatacacattcgaatgggagacactagtgaagctaaagctagacttgccgaatacttgggagaaaccgcaagaacagagtgtggacatgtttgactacataagtgaccaatggctcgatattccagttggagagttcaccacatcgaagaaaaacgtcggggaaatctcttttgcaatgtacgaacacgagtgccaactgtggaagtca

SEQ ID NO: 9095 - DNA, 555 bp, Arabidopsis thaliana columbia
cacacaatctttcatcaaatagatgagaaagagtgtcttacgccaacgacaattgaggtttctgaggataaacgacttcaacagaatcttgatgagcttttgtgggcttttgaagagaaatgtgtagctggtgggcaagattctgttgcttcttcacaacaagtctacgaggagtgagaaagactttcgaagattgcagaagagtgagattcttgctagagaatcataaggcatcattccgagaaagagatgtttcaatggattgtgagtacaaagaagagatgtggagattgcttggggagcaagttacacctcctaggctcttcataaagtgtaagtacattggtggagcagacgaggtggtgtctcttaacgaaaacgagaagctcaagaagcctctagaagtgttttcatcagctaagtcgcggcagtgtgagactgtgcgagaacgaaagatttttgatatgttcgaaatgcaatgggaggtcgagagttgttgcagacgacgaacctggaagagatcatagagtgtaatgagaatggtcttgtgaaatg

SEQ ID NO: 9096 - DNA, 543 bp, Arabidopsis thaliana columbia
caatcattgtgcatcttacaatgagttatgctacattgcctgtaagttcatttctcatgaacatctcaattatgatgttgtgttacgttagtgtcctttatatcttttggttctcctcaagatgtcttctttttttaaaactagacttggatgccttctcctaccttcccggatttacatcaagaacatccatagagccaaacatggaagcgacacttcaacttacgacacagaaggaaggtttgtctctcagttacgttaacatttctctatgatgatatttattgaatatgtggttataaatatcaaaattttcaggtacattcctgcaaatcttgagaacatgtttagtaagtatgcccgtacagtgcctgacaagctaactctgttacgagctgtggcaaatgacggaagctaaccgcaacgcattcgatttctttggctggtcaatccctctttgtctctctttcgtatggcctttttttgtctctctcttaatggtgtgaaaataaaaacagggcagcgagtaaaatggagtgggga

SEQ ID NO: 9097 - DNA, 574 bp, Arabidopsis thaliana columbia
tgtaatctcttgagtataagtgagattcaagtttttttgatacttttattggctaattaggtactacaacttcctgatgctcctaaatgttcgactgagtctattgtgaaaaatgtgaagaaaaaggtcaagagcacaccatctaagatggtaagcagtgaatacaattctgattcagatactgaggggaatgtggacaacgaggaggtagctgtaaagaagacaatggcccgaaaagttaaattatcaaaaccagagatgatgggaaaacggaaaagtgaaaatggtaaacaagtatctggaagaaagaaagcaaaacatacagaaatagattcagagaatgacagtgattcaggggatagtgaaaaatctttgaaggtataacatcttggttgtgatttttatctcaatttccattaaaactaatgtgtttctgcttttatgttatacaacagcagactaaggagactgcaactgatgtgtatggaaagcgtgttgagcatctcaaatcagtcatcaaatcttgtgggatgaggttctccaaacttggtatactttaagaagtctgtatttg

SEQ ID NO: 9098 - DNA, 563 bp, Arabidopsis thaliana columbia
  unsure (1)..(563): unsure at all n locations
nnnnnnnnnnnnnnnnnnnnnnctaaaggctggcgcaggcgggcgcggacattatcgccattgacggcaccgaccgcccgcgtccggtgcctgttgaaacgctgctggcacgtattcaccatcacggtttactggcgatgaccgactgctcaacgccggaagacggcctggcatgccaaaagctgggagccgaaattattggcactacgctttctggctataccacgcctgaaacgccagaagagccggatctggcgctggtgaaaacgttgagcgacgccggatgtcgggtgattgccgaaggcgttacaacacgcctgctcaggcggcggatgcgatgcgccacggcggatgggcggtgacggtcggttctgcaatcacgcgtcttgagcacatttgtcagtggtacaacacagcgatgaaaaaggcggtgctatgaccacactggcgattgatatcggcggtactaaacttgccgccgcgctgattggcgctgacgggcagatccgcgatcgtcgtgaacttcctacgccagccagccagacaccagaagccttgcgtga

SEQ ID NO: 9099 - DNA, 540 bp, Arabidopsis thaliana columbia
gtaatcataacattttgtctccttaggaatcattgaaagagagcaataaatcatcatctcctacgcgagaagatgtatcggtatttagaaaagctgaagatgttgtaagtggtatgatttcaaaagggtttgttttaggtaaagacgctatagctaaagcgaagagtcttgatgagaagcatcagttgacatcaacagcttcagctagagttacatctttcgacaaaagaatcggattcacggagaaaatcaacaccgggactacagttgtgagcgaaaaagttaaagaagttgatcagaagtttcaagtcacagagaaaacaaaatcagcaatagctgctgctgagcagacagtgagcaatgctggttctgctataatgaaaacctggtatgttttaacaggtgccacgtgggttacgggtgcgtttaacagagtgagtaaagctgctgaagaagttggacaaaaggcgaaagagaaagttggtttggctgaggaagaagaagaagagaagaagaaagtggttgatgaagttgctatag

SEQ ID NO: 9100 - DNA, 537 bp, Arabidopsis thaliana columbia
cagctcataactccgtcttcttctcctaattccctttttttcagggggttcctgattattattattattccgataacagataaaataaaaacatgggctcgatcaatagacacgagctttgggagggaaagtgtcgatctcatcgtcgagagtgtccatgtgaacaggcctataatccaatctcactttctcatcttcccaatatcccaatgtatgcttcatccattctccatcctctcttttctgcatacacacgcattcatttatactacgttatggtttcatcattatgggataatcaatcattgtggaaaagctgagcaaggaatcaaaccgtgaagtcttcccgagcatgtgctcctctgctttcctttcgtgcttctgctgaatgcattgttatggatgcgtttatcaaaaggttctccagttccaatgtctctatcaaatccgagttcctgcattttattcatagtttccaagattaacaagaggttaccagattttataacagtgtgataacaatcccatgtgaataga

SEQ ID NO: 9101 - DNA, 627 bp, Arabidopsis thaliana columbia
gagcacagaaaccggtacatttcggtttactaactggtgacaagctggtttattaacacagttaaaccaaataattatttcgacttatatgagttagagttatgactgactcatcactttatatctctctttctcaaaaaaagtcaatggtgaatacggccttttccacagaatttttgtgtatgtgaacttcaacttttctcgctagtcgctactctagtctctcatggcttcctcttcttcttcgcctcgaacctggagatatcgcgttttcacgagtttccatggaccagacgtccgtaaaacagttctcagtcatttacgcaaacagtttatctgcaatgggattaccatgttcgatgatcaacggatcgaaagaggtcaaaccatttcccctgaactcacacgagggattagggaatctaggatctcgattgtggtgctctcgaagaattatgcttcatcgagctggtgtttggatgagctgttggagattttgaagtgcaaggaagatattgggcagatagtgatgactgtcttttacggagttgatccatctgatgtgcgtaaacaaacgggagaattgggaccgttcagtgaacttgggctggtaaaacggagaggaga

SEQ ID NO: 9102 - DNA, 761 bp, Arabidopsis thaliana
cggtttctcaacattattaaaatttatttgatataaaactctcattgtttttttcttttgctatgatgaagttctcattgttattgttttctttgacttgataatctcatttttaatcaaacattaagcagttaacaaaaaaaaaaaaagagggaagcgtatagaatatagtacattcaaatttaggggattaatattctcaagttaacattttgttaatcatcaaagcgtttttgcacagcttgagaaagacttcgttcctctgggaaagctcagcatcattcccagcgcgtgaacccaatgcgcttccacatgactcgatggcgctgatcgccgcgctcagccagacatcgacgtcggtgtgtgcgtctgcgagcatggcggagatcgagtcatctagctgctccacggcatcttggtaatctttctgacagtcctcaagcgtgtcctcaatagccggctccaaatcttcgttgctgagcttttgtttgatgtaggaggaagtggcggaggcgttggctgatgcggcggagatagctatgatctcgatctggttgctggtgcctgcgaattcgccggactcgggacgtgaagttatgctggagagacagaggtttggatcgtcggagtgtttgcagagatcggatatcataccggaattagcatttccggtgacgaaggagatgagaccgatgcagaggaagagacatccgctgattgctcatatttgatgaaatttggatgatgattgtgtggttatg

SEQ ID NO: 9103 - DNA, 343 bp, Arabidopsis thaliana columbia
tgcactgaatgaagaaaatctaactgaagaaatggagcatactcgaacagtgtacagagaatgcctcaatcatatcccctcaatccaaataatctatagccaagaaatggttgcacgctgcacagtttgaaatcaggcaattaaatctctcgggtgctcggcggatactcggaaacgccattggctaagctccatagcatacgaatttctcgaaatgcgttgtggttgaactcctcttgggacacattgataggtgtggaaagctgtctgcgcggtctcttgactggtctcctgagggttgctgtgcttggacctcgtttgctgagtttgagaggtctcttgc

SEQ ID NO: 9104 - DNA, 474 bp, Arabidopsis thaliana columbia
atcaccaaaactctttacccgttcaacagaatctagagccttaacgccagcaatcttgaggctatcagtgatatcctcaagaggcttctgcacttccctgatggctttattgtcaataggcaatgcatatctaagtaaagcttccggatctttaatcggaggaccggagatcaacactgaaacatctggaatcactggattcgccactgcgtgacagttgggaggcaaagcaatcgaaggtactgaaaccattaaaccaaccgataaagctaatgaaatcgcacattctttcagtgatgtaaatgaccctctctgcattcaaaaaccgagaaattaatcagtttcagctgccgtgtgccataagtatctcagtgttagacatcaatctcgcattgcagtgtcaagggattgatttgatctctttacccatcaaattaacaagattaaagttggctctttggtaaaaattcaact

SEQ ID NO: 9105 - DNA, 596 bp, Arabidopsis thaliana columbia
tttccttactgtaggagatggcttgtacagtgttcctttttcttcattttgttgcagttagacactattatttggaaaaattgttaaatatttccttgtagttttatgccttttaatgttggttctatgtttttctgtttctttccctgaaaaaacagttttgcttgtccaatgttttaaagtatgtatccaaaagtcttgtattttagtgtttatctgtatctgaagttatctgtgttcctgttcgatacaggtgggactgcagctttcagtttggtagcttagtggaagaggtcgatggtcacacagcagtcctctatcacagacttctgctcgactggtttccaatgtaaggttgcacctgaaaaaatattgtctacttatagtcaagctgacaaaatgtgatgattttattccaaatgaattaaaccttactactacatcattaggaaaatagactgtgtctctcaaaggtgtctttgttttttgccataatacaatgctgtataagactggggacagaaaaacagctcagagttattattttgtttcatttgtgatatttcatgtttccagtttgaaatttagttcactgt

SEQ ID NO: 9106 - DNA, 471 bp, Arabidopsis thaliana columbia
  unsure (1)..(471): unsure at all n locations
aaaaaaaaactaaaggatagtaggtaatatatagaataaaaagtcttaaaaaaaaaaaaaaaaataaaccttaataataaaacccattaaaaacaagaaaacctccttctaggttcaatatgtcgaatgaattgtgggacgagattcagaacttggaactaggtcaagaagatccaactctctttatacctcatgaggattatgtgatggtggaggctgccaatagactgagtatgatagcttggtctctggatccgagagtcagaaacctccattatgttgttgtagccttaccgtgatcaaggggattgacgactccaattcatggcagagatcttggtgcgtcttatgttcaatttctttttcagnatgaaattgatctcatgctggtgcatagacgggcgccatggctctttaactattggtttgtgctgctgctagttgggaggtggctccggctcactactttgt

SEQ ID NO: 9107 - DNA, 611 bp, Arabidopsis thaliana columbia
tgaatatcccaggtacacagaatgtcataagtgtacggaaaaagaatatgagaaagaagagccgttcatttcctacaaagaagtagacatgaatttggtagtttacaaactaacctgaattcgattgcggtgagcaaaatcagacactgcacgatgctccaacaagccctgaagttctcgttgtctctccctttcagccctcataagcaaatcaagtaacgcctgcctacctctaactctccgcaagtctcgacgaacatgaggtggttgtccttcttcatggttaacagctaaccctacacggaccctgtcaacttgtggtgcagcgtcatgattcctatcagcttctgaagtagacctctgatcttctctcggtgttgcacgagctcctcctctctgctgacttgtcatttgcatccactctcttataatcctgactctttctcgttcagtatcacccagccactccggtctacggttatcgtctctctgccttacattagatgaatgatcattgatcctactatccatccatccacgagcaatatgcctcaccctctcctctcggcatcaccaagatcaggagattgttcctactggaagtattatta

SEQ ID NO: 9108 - DNA, 677 bp, Arabidopsis thaliana
ttttttccacctttgctctaatcttctcctcgagtatctctgcatcaagtccatacatcctgttcagagcctgcatgttatctagtgtctcactcagcgttctgctatcgttcccatcgcatctcaaatgctgcattggaccgtgcaggagcttgttcactatacctcggattagatcatctactgttttcctcatcttcttgttcatgtcaatgcccattttgggcaaggatttctcaatctctgcagctataattctctctgtatatccccttaatttcttgattgttggaaccgtctccaacgagtccctccacgcttcaaagtgttttgattcatctgtaattatagcctgagcgtccattgctttcctcaccctgtcttctttattcgcagcaacgacttccttgaggtcatccacgttgaaaacccgtgtaccgtctatttcagcgacgcaggacccgacatttctaggaacagagatatcaacaaagagcgtcgcatctctaacaggagggagagtctctacttgctccttcaagaataatggtgtctcagatgctgtgctagtaaagactacatcagcttctgcagcacaagacagcatctcatcaaggggtttataaataatctcaacgccaggcggcatctcattgcggacagctgcaactttctct

SEQ ID NO: 9109 - DNA, 2477 bp, Arabidopsis thaliana
tccccatcacattgagattctcataaatgcatattcactatgatcgtcataataaacgtcttatacaagatcgtaaaaaaattattctcgtttaccgtaaagtcttttaactaaaaaaggggaatattgaaatattcatgcatgtgggtgtgataattaagaagtacgaacgatatgaccaaaaaaagataaccaagtaaagactgaaatttagaaatctataacaatctgcagcttttacaaagaaagaataaactaaacatagataccctaaatagattattctaatacgtactaaaaaacttataaaacctgaacactctacatatattcttaattatattatatacaaaatactaatatatataggataatcattaatcccacattttatcataaactcggatcaatccaattccaacattgattcatatgtgggaatatcaatatatgcataactaattttgatggacacgtttcgtatctaattgaaggacagttttcagttgttatatattcatattttatgtaaattacagatacttcgttcgtcgatggttataacataaaagggtgcttgtgtcaaaacaaaacaaaaataggttcaaagaatctataagtgtgaggtaatttggacatgacgacacatgggatacacatgtggagcatatcactatgacatctatggtcattaaataacgcaaaaccctcttgcccgtctatttcgccctacttttcttgcttctttttatccagttaataatctgttatgtgttatctattaataatgacatattccaaccaattcaaaccttatattcaagcgcttacaaactatccttacgtatacatttctttaactttcacttaaaataaaacaattatttggttaaaagtcacttaaaatggtacggatggactaagcatttcatattcaggatttagcaaatgttaaacgaatgaaatctttatcttatagtttaaaagatataaaccacctataattaaatctttatcgccataatttcgtttcttgttagtgttgtggtgagtcttaatttgtatataaaggaagtgcgacacttgggtttttgcatcaaacaaaacacttgacacatttcaaaagaaaacaatcaatcgagaaatggcaatgtctggaacatacgtggcggaggtaccgcttaagggatcggcggagaaacactacaagaagtggaggaacgaaaaccacgtcttccaggatgccgtcggcaccacatccaaggttgcactatgcatgacggtgactgggactcccacggctccatcagatcatggaatatcacatgcggtctctactttaccttctctctttttttgtagtattttggtagttttagatttttggtccatatattttttggggccaaggaataaggtagataagtcctctcccagatgttggtagctaggcctcgaaccttctcaaactctcctccaagagtttcaaagtaggctaccgacaccgggtgtccactctctttaatcatgtttggtaatacgaggattgacgatcggctaatttggtctagcattgtgtgtgtgtgtgtttgtatgaagatggaaagccggaagtcttcaaggagaagagagagatagacgacgaaaagatggcgttgacgttgaaagggctagagggtcaagcgatggagaagtacaagaagtatgaggttatctaccagttcattcccaagtcgaaggaaggctgcgtctgcaaaatcactctcatatgggaaaagcgcaacgaaaactcccccgaacccatcaactacatgaagtttgtcaagagcttagttgctgacatggacgaccacgtcctcaatggccagaacaaagcttgaatcccctctatggtcatcgtcgaatggtcttcatctttatgtgtgtgtatcttttgtgtatctttacgtacgtacgtgacttatcatccgcctctttccccctttatacatgttatgctaataataatggcggtcttggaagcctatgtatcatctctgtttgatgattacatgttgttatgatgttttcgtggtgtaagtgtgtgttcgtaataaaatagtaattgtaagacgtaaaatagcccataatattaggatgtatatatataccctcaatcgtcattatctatcacataagtatcttcactaaaataggtaaccttttcaagaagcagatcaattgacaatttaattttgctccaaccttatcatctcttgtataatttttggatgtgcatttatgagaatctcaatgtgatttatgcgatcactccttaatttgtttgatgattggactcgcaacactatgaagttggtataattataacgtttcatctcaacgaagtgactaattcatctcaaagtagtcttcatggaaacaatatgatccctaccatgcagtgctaatgtttaatactaggtttccttttcttttca

SEQ ID NO: 9110 - DNA, 742 bp, Arabidopsis thaliana
tgtacctaccgttaacaagcttggagtctttgtctctagagcttcagctactgtgtccatgtcgcgtagagagcttgaaagagattttaaaagtagggagtcaactagagttgtcaatgagagaaaagttttgtgatcggcatatagaaactgcggtattcacatctgtttcttttgctttccttttgcagacagatagggctgctatgatcgacgagattgtcgattatgtaaagtttctcaggctccaagttaaggtaaacacccaagtcattttcagttttctattctctggtttttgaaaatgctatcattaaaagtttgtagaaagattatttaaaacagccagaaggatttagtggtgtaaatccttggtccccaccaccacctactctcttaaaccaaacttccaatcttaataaaagattataattgtttaatctggcaataaagagtaatcaaagagtacatgattgtgtgttttttggcattagtgtctttcactttttgcttgcttccctcccatggagaatcatcacaattgaggactattgtaataaagctaatgagaacattgaagaatattttatgcaatgatgggctttgataatatttttccttcataagctttatctctggtcaactatggcaggtcctgagcatgagccgtcttggtggagcggtgctgcgcacactagtcctgaaatgcattacttcacagttgaggtagctagagagagat

SEQ ID NO: 9111 - DNA, 581 bp, Arabidopsis thaliana columbia
caattaaattatcaattcatcgatcacctaatttgaacgagaaaaaacaagtaaaaaaacgaaaagtaaaatagtaaaaagtaaaaatacattctattggatttggttcggtatcaataaattatgatgttcttcacaaaatgcatttatatgacgtgtttgcttcctctccctccagtttcaagttgagcatatctgattagcaaaagcggttgaaggtcctctacttctcggcccaccgtaacaacatacactgtcaatccatatagttatcataaacccacacgtcaacgaaaccactcttttgacttcatcctctatccaatcacaccacgccacgttaacaccacgacctagtgtttctgtgatctccacacagagaaagaagcgtttcggttctgttttcgcccaacacaaagactccttttgtttcttttcctcaattggatcgaaaaaaccctaactttgacatggaaggagagattcaagactgggaaatacttcagagctcgagatctccacggaagatgacaattcgaggagcttggaggagattgatgatggcacgcaaggtatgatta

SEQ ID NO: 9112 - DNA, 1059 bp, Arabidopsis thaliana
cgtttcattaaaaattaaaaaacaagaccataatgtcaaaacagagcaaaaactcaaaagaacagagcaaaacatttctactttttgtctttcttttctctaatcttctcctcgagtaactctccgtcgagttcataaattctgttcacagcctgcatattctctagcgtctcccgcagcttgctgctaccagtcccatcgtatctcaaatgtttcattgggtaatccaggatattgttcactataattctggtttgtttctctactgcttccctcgtctttttgtccatgccattcccatgtttcgagattaatttttcaacacattcagctctgattctctctgttttgcttcttaatttcctgattgttggaaacgtctgcagcgaatccctccacccttcaaactctattgtctcctctcttattatagggagagcttccattgatttcctcggcctgtcttctttattggcagcaacaacttccttgaggtcatcaacgttgtaaacccgtgcactgtctaattcagcaacacaagacccaacatttctaggaacagagatatcaacaaagagcctcgcataatctgcaggacaaggagggaggatctctacgtgctccttcaagaacaatggtgtctcagatgatgtgctagtaaaaatcacgttggcttctgcagcacaagctagaatctcgtcaaggggtttataaataatctcaacgccagactgcatctccttgcggatagctgcaactttatcttcgctccggttcataaccaccattttagtgcaacctttagcaaccaggtgctcgattatacgcttccccatctctcctgcaccaattaccaacatcatagcagatgatacagatcctggaagcttagtgagagcaagttcgactgcagcagagctaacggaaacagccccagacgcgatattcgtctgtgctctgacacgctttccagccttgtttgccttttcaaatagagtactgataatcctcccaaacccttcttgtttaactacttgttcagcttttctaacctgtgat

SEQ ID NO: 9113 - DNA, 884 bp, Arabidopsis thaliana
acaaaagcattttggacttgtttattctttcccacattaaataactgatctaatcagattgaaattcggttgaagggtaggtaatgtgggacacagaattaacaccaaaaatccatccagagaatttgaaagacatgatctttagatctctaatcttatgaacaaacagattaaacatattgcatagggagtaataagataattcacaagaaagagagttcgagtttaaaactgcagaagagagaagaatataccttgacttggagcctgagaaactttacataatcgacaatctcatcgatcatagcagctctatcggtctgcacacgaagacgggagaaacagaaagtgtcaaactttctagagaaattatatacaggtgagggttagggtgaaaggtacagaccttgttcacagtaggtacaagttcctgcagcgccctgatccgttctgctattctttctctacgtagctgtggtaaagtaaaacaaacttttaggtaatccctccataaaatcaagagatcattacacaatgttaacatttttttatatccgaaacatattttcaactacaaccaactcgccaccaacatagtatatcacagggaaatacaaaagagaatctgaaatatacccgctcagcgatgctatgtggatcagtagcctgaccacgcctagctcgaaccctgggacggattgaagtaggctgatgtggggccgatggaggtggctgttgcataggctgcccgtggaaaaccttccagacaacacacagaagaaataagaccaaacgaaaataaaccatttgcacaaggatttgctccattagttgtaagagaataatttaagttagcccttaagattctcatttgaccacttaga

SEQ ID NO: 9114 - DNA, 574 bp, Arabidopsis thaliana columbia
catgtactttgaaggtaattttgcatacgtcaacaatttctcgagttgaagtttatgatcatgagattggtactgattcggttcttggatcgtagataatgctggagtgattgtgaaccctaagggagaaatgaaaggtattagtttgtttattccattagttctttgtcaaacatatcttggcagtacattgttttctgaaacatgttggtggtttgttttggttttcaggttctgcaattactggacctattgggaaagagtgtgcggatctctggccaaggattgctagtgctgctaacgccattgtctgaagatcatttatcacttttgctggttatgtatctgtcttcaacgaaacgcgaaatagttggtgttttgagtgttttaagtagagacgacaatcttttgtgagcttcagacatatttccagtttctaagagattttgcttagatttttccagtttctgattttgtgaaatcaattgctcagaggtgactattaataggtcataaaaatgagttataagtcgaaaattatgtcagaagaactcttacaaaccagaatacatga

SEQ ID NO: 9115 - DNA, 605 bp, Arabidopsis thaliana columbia
aagatcacaaagggaaaagcagaatctacatgtggagatagaacaatcaataacaaagctacctggatcggggagcttctcagtgctttgacttgggctgatagtacagatgtactcagcaatgtcaactctctttggcttgtcttttttaatcctcgtcagcattttggagctgatgtatcttgtcagcagattagcttccttggatctaattccattgtcaacaagacgctttacatacctggtgagttgggcataagagttctctcaaacatccttaggaaatgaagtgatgatcttttccatgattgccttgcacttggcatcatgaatctcttgcttggaacgacgcttccttggataaagaacatgaggagtgtagattgactctggctgcattgggatttgaacctcatatggcgcagtcggacccagtgtcgatcaaaaccaggtgtgtgtcgatcgtcatctttctaaggaatcatttcagagaaaagtgtaccatagggtgtcgatcgacaatggtaggtgtcgatcgcaatggtaggtgtcgatcgcaatggtaggtgcgatcgcaatggtaggtgtcgatcgcaatggtaggt

SEQ ID NO: 9116 - DNA, 504 bp, Arabidopsis thaliana columbia
  unsure (1)..(504): unsure at all n locations
tgagcactctaatttctttttacccttcaatcacttatctctatctatctacctttcatgctctttcaccactccttccataaaaatctatcaataatcacttcctctctctctctctctctcttatacaacactcaagaagcgagacacagaggagagagttagtcttcttctctgtttttgtctctttggctatatatattcaaacattgtgtgaacagaacacaaatcaacacaacacacacaactttgtgttctttaagttttgtttcagagatcaatggccgggactggattgtttgctgagattcttgatggagaagtatacaaatactacgctgatggtgagtggaaaacttcttcctcaggtaagagtgttgccatcatgaacccggccacgaggaagacacagtacaaggttcaaggtatatctcattaagtntcattctttcttgatttcagatattggcaaaatttggagatatatctagaaatatgatgaat

SEQ ID NO: 9117 - DNA, 602 bp, Arabidopsis thaliana columbia
tgtgaacctttaaatttaaccatttggttaaacaattgcaatttcaggggtttgtgaaagtggagatgaaaccattgtttatgtgtttaactatcaacaacatcattagaatggtggccggaaaaagattctacggtgatggaacagagaacgacaacgaggctaaacacgtgagacagctaattgccgaggtagttgttagcggcggcgcagggaacgcagcagactacttccctatccttcgttacgtaacgaactatgagaaacatgttaagaagttagcaggtcgtgttgatgagtttttgcaaagtctagttaacgagaaacgtgtggagaaagtaaaaggtaacacaatgatcgatcatttactttctctacaagaaactcagcctgattactacacggatgtgatcatcaaaggaatcatacttgtaagtaaaatgagagaccaaatcagtaacattacgttaatgtttttgttgttgtatatttaactgattttgcatttggataggttatgatacttgccgggactgatacatcagctggaacgttagaatgggcgatgtcgaatttgttgaacatccagaagtattcgaaag

SEQ ID NO: 9118 - DNA, 539 bp, Arabidopsis thaliana
cgccagtgtgctctaaagctacaggcgctggggccggaaggcggttgaaatcattctgcgtacccgcaccgcgtttcaactgaccttacacggcgagcgctaccggctggcggcgcggattgatgtggaagataacgggccgggcattccgcctcatttgcaggatacgctgttttacccgatggtcagcggccgcgaaggtggcaccgggcttggcttatccatcgctcgtaatttgattgatcagcattcaggcaaaattgaatttaccagttggccagggcataccgagttctcggtttacctgcctatcaggaaataaaggtgacgtttatgcaacgagggatagtctgggtagtcgatgacgatagttccatccgttgggtgcttgaacgtgcgctcgctggggcaggtttaacctgtacgacgtttgagaacggcgcagaagtgctggaggcgctggcgagcaaaacgccggatgtgctgctttcagatatccgtatgccgggaatggacgggctggcgctgctcaagcagat

SEQ ID NO: 9119 - DNA, 301 bp, Arabidopsis thaliana columbia
aatcacatatagaaaaagatgaattcacaaatgaaagtaatcacaggcgtctctcggaagtgtaccctttcgccatgcaaagtattatgttcatacgaatatcccaagtcaacggactttaaacaccaacatccccatgaatccattgctccaagttgccattatcggcggtagtcatacacgagcatcctagtggaattccagaaacgttcagacttatcacagttctacgcacgtaccgagcaaagtccgtatcccgcctgcgggtcatctttttcttacctgtctgctccttcgccgc

SEQ ID NO: 9120 - DNA, 581 bp, Arabidopsis thaliana columbia
cttctatgcaagcaacttcttttgaagatttagttggtatggaagctcacatggaaaacataagacctctcttgaagaaagactttgatgccgaggtttgtatggttggaatatggggaatggggggcatcggaaaaactaccattgctaagtatctatatgaacagcttgcaagccaatttccagctcattctttcattgaagatgtcggccaaatctgtaagaaagttgatctaaaatgtatacaacaacaacttctctgcgatattctaagtacaaaacgagtggccttgatgagcatccaaaacggtgcaaaccttattcggtcaaggcttggaaccctcaaggttctctttgtgcttgatggtgttgataaagtggagcagttacatgccttggcaaaggaggctagctggtttggtccagggagccgaatcattataaccacacgtgacagaagattgctagattcctgcagagtgaccaacaagtacgaggttaaatgcttgcaaaatgaggactcgttaaagattgttaaaaatattgcttttgcaggcggagttcctcacttgatggatatg

SEQ ID NO: 9121 - DNA, 647 bp, Arabidopsis thaliana columbia
cctcatacatatttgttaatctactaaacaaacgctatatgcttgtttcttggtctcgcatcatgtcttactgggtttcctttcatgaagttaaaacgatgtgtgatatatagtaaaatctagttgggagaatgtgtagatgttgttatagagttctagcctctgttatcttacctcatgatgtatttgtcaactaggggaatccaattcgaagttatggaatgagtaaaatagttacaagatttgccaccttgcaataactggttgaatcgaatatctcttgtttcgttgtggcatattaccattaatttgcatcaattgggctggcaactagggaagcaggttttctccattgatggctgtgtctagtggctgaatgctaaaaacagttactagttttgttatctaccaagacctcgttaagcatagttacaagttttgtactattagatccagacctgagttatgttttctctttggaaaatctctgaatcctaatattcatgtagtccagagcaaacagtcgtgtatggatcttatcagcctttgcttctttatttttataggaactgagagtgtggaaggaaaagaggtgacaagcgagcaaatgatatccgcatctgacacttcactgcctcttgtgacag

SEQ ID NO: 9122 - DNA, 537 bp, Arabidopsis thaliana columbia
caacagacctacaaataagaggtttacgatgtaactatacagaaacgacagtgtaacaatattctcaaaagccatgctctttgaagaaaaaagttcccaaaacttatagacaaacctgctctgagcagcttgttgcaaaagtgaggaaatttgtccaatgctgcatacatctactattgtcaggtcgctaacatgagtgtttccattaacatcatgtgtgattgtatattgtcttccagatgtgctactgtctgcccgcacagattctatagcaatcgttcggcttgtagacaacaagtctctgatggactcattatatatctccaacattgagacctacaattaaaattcgatcaaaacaatgctaacagtgaaagcattcaacaaaagtcagaacattcttggagaaatatttacctgcatcttgtatttccagccttgtgtactaagactttggctggttttgaatatttgttcgagtgatcgagggatcagtcctttctgttctggtgttcaggcctgccatcatggtatagg

SEQ ID NO: 9123 - DNA, 549 bp, Arabidopsis thaliana columbia
gagctttataaagagcttcagaagtgcaagtacttcagcgaacgtcgagcagcaactgtaagtcctagtgataattgaacttattctagcatgttaatgtgaatctgtgtagtcatacccttacgtttattgtggcagtatgttgcgtcattggctagagccctcatctattgccatggaaagcatgtaattcacagagatataaaacctgaaaatctgttgattggtgctcaggtaacaaattgaatctggttatctttctccatcaacgccatgtgattgcagttagcttatgtgtttatgtattcatggatatatgttttcagggtgagctcaagattgcagattttggatggtcagtacacacattcaaccgtagaaggactatgtgtggcactttggattaccttccacctgagatgggtaagagaaagctctctctctcttgtgtgattctaaattactttcttcggcaaccagctaattgacttttctgcttttggatcacagtggaaagcgttgaacatgatgcgagtgtcgatatatgga

SEQ ID NO: 9124 - DNA, 603 bp, Arabidopsis thaliana columbia
gaacaagtcatgatgctgatgccattttggttcaagagttttcgagtcgttttccagaccatgcctctatattagatattcaaggttctgctagatcagatcaggttacttgctgcttcttgaaaacgactgttactctttgttggtttcagatcgtttattgtgcttacgaattagatttttcgtctacagagagctcaaggtacgggttgtccaccatcttcgtcagttcccgtccaaaatatcacaacagcagcggacgattggacttctacatcgactcctttaggtcaggatctgcccattgatagtgatcgctatgctttaattatagttggtgtgctagaatgttaagatttttgtatgttgtgatcgttgtgtagttaaccattcagaggatgtcgttgaaggtggtgttcagcctcctaacgtcttacatagcagattaacagtcaatgcatcagcggttacgtctcttcccaacaatcatatgggacagagtcatcggttacatttatcttcgttcagtgacatatgtgccacgagctggagaagctgagcagagaacaagggaccttactgaaaagctttgaagagacggtt

SEQ ID NO: 9125 - DNA, 547 bp, Arabidopsis thaliana columbia
tatatttcatcttcacaagaaaagtattagaccttgctctataagaaaaacatttaattatgtgtaagtcatctgattatgaaaaacaaatcttgttaaagtagacttaccctatacagtttttaacgcctctgattcttgagtatcttgaaaagaagattgtctccaaccacttccctaatcttcctaactagctgctctctcctcagtttccgtttctacacaaagaaacaagaattaaaatcagagagagaccatcacatttactaatggatttgaatagaaataactccataccctaaaatcatcataactagtcaaaatcaagttcattcttgcagcgtcaagtgactttgaaagaattgacataagaacagagaagctaacacatggtgaccttgctcttccaattagacctgaaaaacaaaaacacaccaacattaatttctccctcataaccacaaaacacagaatcttgaagaagttgtatattgttgtacctctgagaagatgagatttgaaactgacgatataagttggaagaatg

SEQ ID NO: 9126 - DNA, 592 bp, Arabidopsis thaliana columbia
tggtaaagacatcctctgatgacagtgaccaaggcagttactctgaaaccaagaaggtttatggtgaacctgaaaatggtcaaaccgttccacctgtggatgcaagttgttcagggagtcagatggaccaagaagctaggaagcgtgctgaaggtactaagcaaagtacatactctgttgaaggctgtcctcgctctgaagggtcaaaggatgcagtagatgctgatggtgttggacaagttttgcagcagcagtctgaggaattaatttttgaagagaatgtagtaacagaagctgtaaaagctcctggtaacgatttttctattttgggccatagtaattgcactagcttgtttctttgtatattgccccgccatggagaccttaccagatttgtttacctttcgatgggttgattcatgttgtagcaacatttttttcttttgctgtcttactccgcagagactctgtcagttctggacaaggataacaaaaatgaaatgcctattactagctccttgcctattcttgggagtgaagctggaaaagatggccaggaagaggataatactgctgcttctggtgggattat

SEQ ID NO: 9127 - DNA, 457 bp, Arabidopsis thaliana columbia
caaatccgagagacgaaacaaagcaaaaactacctctgaatcctttgatatgttatccatcgcccgaacaacagccatctgctcctcaaacactaaaaccgcattgggagagcagctacagagcaaaagatttaggcaggaaacaaagtgattaaagaacaccacgataaagcatttacctgtgattactgatgcagaccattggaaacaatccaagcccatgaggtctcaattcgctagcacaaatgctatgagcacagcatgcgaactgtgttccgtagaaatgaaagtggcttaactaattacccctagaccacattccaataaagacgaatacaaaaaatcccgggaccacatcaccaacctttgaaaagttctcggcgatctctcttaggtcaacactaggacattgaagaagcaagttcacaagattagccatctgtgcatacaacaacat

SEQ ID NO: 9128 - DNA, 574 bp, Arabidopsis thaliana columbia
atctaccaaaaaaacacaatatgatgccaacaatgtctaggaacctaatttctttaggaaccttagaagacaaaggatgctggttcaagtctcaagatggtattctcaaggtggttaaaggatgctctactgttcttaaaggacagaaaagagaaacgttgtatatacttcttagagaagctgagatagctgaatcaaatgtctctgagaaatccaaagatgaaactgtgttatggcacaacagacttggtcatatgagtcagaagggaatggagatattagtgaagaagggttgtttaaacagggaagtgattcatgagttgaggttttgtgaagactgcatttatgggaaaaatcatagagtcagtttcccatgtgctcagcatattacaaaggagaagctagcttatatccattcagatttatggggatctcctcataatccagcatctttgggagattgtcaatacttcatctccttcattgatgactattccaggaaagtgtggatatatgttcttaagaagaaagatgaagctgttgagaaatttgttgttgggagaaaatggtggaa

SEQ ID NO: 9129 - DNA, 701 bp, Arabidopsis thaliana
tatacaagtgtatatgtgtgtagataacagtcttaacattggggtaagtccaatggtggagactgtacagactgcaaatgtccttctccgttctctactaagaagaccattgctaaaccccagaatatatgtgagtcaatgtggcagtgcatcagccacgctcctggattattggcaacgaatctgatggctacccatccacctggaggtgttccgattgtgtttcttcgtggtgggtcgatgaggttaaaggaggatgtgtctgtatttgggttgaagttaccaacacctgtcccaactacgtagaactcgtagccatggagatgcattgggtgattctcagtggtcacgatgctcgtgtcttgcaatataatctgcacttgcgaattgaactttagtttgtaggcctttgttccgcgagtaggctgccatagccctctgctcacgtttcctgtatagtcaaatgtgacaggaggcgttggagggaagtctgtggtgaaaacacctgtgggagtgccttggtaataggcttgcattatggagttttgtttggggaagacgaaagagacattgttgatgcttgcggtgaagcgtgttccgttagggccttgacacctttgtgtgttgggggttgggcagttgaatagtccaatcccactgtgaaaaacaagttctcatcaatctccaggggcacttttact

SEQ ID NO: 9130 - DNA, 565 bp, Arabidopsis thaliana
gttgctcgagcaagggcattttctgcaaggtccgcacttccacttgcttccatgtttgtcacataacgaatccagtattctgggtaatttgcacaggtaaccacacatctttcatacagcttgaccacctattggaaaagacaatcgaatgtaaaacatatatgatgatgactacggaaaaaaaccatgtaaacatagaaaacacaaaaggagaaatccacaagaaatactctacaagtccaacagaggggccctcacatacagagggaccctccttgcctgacagacagaatgttaggaagacacctgcattaataacattggaacttcaacaacaggataattcatgtgcctaaaatatccattgacaaattgagagttcgaaatacttagccttaaagttaccaaatcgaggcacatgctttggtctcagttatttcccatttaaaagttgcttgatccaatggaaacccaatcaagcatatgatgcaccagatactacttaactgtaggtcaataatatgacagaggtacaacttaatctacaaaacacttgtacgttcac

SEQ ID NO: 9131 - DNA, 242 bp, Arabidopsis thaliana columbia
atttataggaatcttgttttaatttaatcgaaataattcttcacatttttcctcctttttatacatctcttccatttttcctcaccttcacaactctctcataatctctctccctcactctaacaccaaaagaagaagaagcattttccaaagagaaagagagagaaatgggttccaagattgtccaagttttcttgatgtgggctctattcgccacttcagcactcgctcaagcccctgct

SEQ ID NO: 9132 - DNA, 476 bp, Arabidopsis thaliana columbia
actctagaggatttcgaatataatctatgagtcatgagatctatgtagatcctgcagtgttaatcgtgaatgtacatcaaaaattctttctaggtagagatatggtatcacctaccagtgatgatgtgcacacaatcgttcagtacatgcctaacgatatgtaacgtcagttgtatgttgacccttgagttttgaatattcttttatcacggtttaattttaattgagtcatttagacttgcaggtgaagaaagagtattcctcagtgctgacagtatagatccttcagattctgactcattgacgattccagttatcacgcctgatttgttgctcagtatcagactttccggtttgccacaccatgagttacgtttgaagattggtgaccggttatactacttagaaatcttggtcctaaaggcggtctgtgcaatggaacaagacttcagatgtcaccaatgactatacaagtt

SEQ ID NO: 9133 - DNA, 588 bp, Arabidopsis thaliana columbia
aaaagataaagcaaaaagccatagttattaaataacttacagacgaacatttataaaatacatcgcaacgataggacatgcatgatcatcacaatcacaaagatcagagacatcttcagatgtttcttacataagttttgtatacacacacacacatatttagcatcaagttacagtttcaactttcagccctggcggtcaatctccaccgtccatcccttggtatcctcgacccgacccgtctggatatcacttaacgtctcgtatagcttcgcagccaatgtttcttcccctgttttgaatccggtcctgtattgagtttatacattcaatcatttcagtcaccctaacttatgaaaaaatctaaaaatagacattttggattaacaaagggaagaaagtattactttttgtctttaaaggttacggatgcaatactagtcacaatggaagcagtgtcagtacagaaagcttcgtccgcatcgagaaagtccactagaggaatcgtacgttccgtcgcctttatacaacgtgaaagaccaaaaggaaattattatacatgcatgatgaatattattagtaaggaga

SEQ ID NO: 9134 - DNA, 589 bp, Arabidopsis thaliana columbia
caactaataatagagattagaatcgaatccctcactgaatttacctcgctttcattacgggaaaacatcttgaatagcctttttaacttcttccaacgaagaagcagctactcctttcggcacattaactccatatttccccatcaattcagctccctggttgtatcagaatcacaatacaaactttacattatcctaaacccagagaattctatcaaccacaaatcaatcagtggatgaacacagaaacaacagacaaagacacagatcgtactcgaattctgacttgacaaaagcgaatctaggcaactatcaaatggaaatgaagagaagaagaacctgatactcgtggatgttgagacgacgaagctgttggttctgccatttcccggagatggagagagatctggacacgagcttgttcaccaatcccctcatcgttggatttgttagtagtcgaaaagtagcccaagagaaaatgagaaaatgtagaaagagcagagaatagtcgcagctatgaatgatcgagtctaaccctaattttttcctactttatgaattttcaatttaaccctctctattcttctat

SEQ ID NO: 9135 - DNA, 501 bp, Arabidopsis thaliana
catgtcatcatccaaaacatatttgttgcagtcttgcagagggaaaaaaaacaaaagggagtcagatgttaccttttgctgttttttgtctttcacaactggtgctggtctagccttgcaatgcctgtatataattgacaatttttattattcaggagcttatatcaatgcttttagcttctgggaaaatctagcgtagacatcttttcatctcatctactcagaatgggcagtgtcttctctttctcaattacaagtcaaatatgaaaaagggtatgataattcgttgtgaagagaatgaaaacttactgaagggcgtcactggcaacatctgcaacaaacttttgtgtagccacagcaactagccttatcctgtcaaacaagtaaacaaaaaaacagaatattggcaagaatagatacaggaaaagattatgacaggagtgaaaaactcaaaaactaaaatatcccaatattcagcactcaatttgatagaaagagaag

SEQ ID NO: 9136 - DNA, 540 bp, Arabidopsis thaliana columbia
tgagtttcatcagcagcttctcctcttaataacctcttcactacgccttcccaatatctttcaggtttgttttttaacgaagcaccaagaactttcaaagataaaggtaaacctttacactcatcaacaacctaccaaacagagtaacaattttagtatttggaagcaaagtgtgtttttagttacagattcaaatatttataaaaaggcattagtacctgcttcaccaaatatttgttgaatggagaaggcggggacttttgttcgaaagcacagagacacaaaagagacattgcttcatctttctttaataattccacattgtaggtggttctaggatctgcaagcttggaccgtgacactactaaagtagtgcttccacgaattttagacatcagcctgtccaaggactcccttgtccaaacatcatcaagaatcactagcttccgttgatgaactccatcataaagaaattctcgtatacaagactccaaattctcaaaattcggagaccgtgacacagtcaaaaacaaaacctta

SEQ ID NO: 9137 - DNA, 565 bp, Arabidopsis thaliana columbia
  unsure (1)..(565): unsure at all n locations
tnnnnnnnnnnnnnnnnnnnnnnnctaaaggctaatttcatccagccgccataaggcataaagcacttccagcgcctggcccatttcggcaaattgattttcctgggcgattaatagtgtgagttgctccagtaattgttgactgaaggacgccagacccgctaacgccgcctggctaagacatgtggtgatactgccgattccgcccgcgtccagcatatcggcttctaatttattgcgtgcggcttcctggagtgtggcaccaaaacaggcggcctcaatcaatgccgcatgctggctaagcgggcgggttaatttccagcgttcttcaccgttgcctgcaagtgtcagtgtacttccctgctggcgtacaatcccagggatctccagtattgccagccgatgtaacacctgactttgcgccacgccatcgggggtaaagcgatttaaggtaagctccgccggaagggagattgcggtacgttccagttcgcaggtgacatcttttggcagaggtggttgtggcgtagaaggggcaagtttacgaatccgtcaccgctaatgt

SEQ ID NO: 9138 - DNA, 469 bp, Arabidopsis thaliana columbia
ttttgtaaatggggaatgattgataaaggttatagtgttttagatgatatgagaaagaaaggagtcatgccgtcgcaagtaacatatatgcagataatggtggctcatgagaagaaagaacaatttgaagagtgtttggagttgattgagaagatgaagcgaagaggttgtcatcctgatcttctcatttacaatgtagtgataagattggcttgtaagttaggggaagtgaaagaagctgttcggttatggaacgaaatggaagctaatgggctaagccaggagttgatacgtttgtcattatgatccacggatttacaagccaaggtttcctaatcgaagcctgtaatcacgtcacagaaatggtaagccgaggcatattctctgcgcctcaatatggaacgctgaagtcattgcttaataacgttgttagagatgataagctcgaaatggcgaaacatgtatggag

SEQ ID NO: 9139 - DNA, 582 bp, Arabidopsis thaliana
  unsure (1)..(582): unsure at all n locations
ctcaatacaaaaaaactaaagatgaggactttgaaatagcaaagtcaatttacatagcaaaggcttcactttgttgctctgcaaattcccaatgaaatgccactctatatcttctggaagctgcaaatttcaatgtatcaatataaattcagaacttttctaatccaaaagattcaatttttaaaggattcgtagaaatcatagcaagcagagagaacctgaggtgccttctcaatgatctcttgcacataattctctccaaaagacctctgaccagcgtcgtatacttggcgaatcagagaaactggtttcgtcttactcaccgctacgacccgtatctgatccgacccacgacccgctttctccgccgcctggtttacccgctgaaacaccgatctcagagccgccacaccatcaatcgccgccgccgacatagtagaatccgccacgtgttctttgtctggctcctcttcgttcatcgaacaatcactgatcttctggtcacagctttgtgggagagaaagagggaggacagagagacggataatacgctgcgtttcgatgntttaatttcaatgaaaa

SEQ ID NO: 9140 - DNA, 516 bp, Arabidopsis thaliana columbia
tatgaaggttttccgtctctctggaactggctcagaaggagcaaccatccggctttacatcgaacagtacgaaaaggatgcttcaaaaaccggccgagaatcccaggaagctttgtctcctctggtcagttgcttactataaaacctcaaatccataaactgttttccgactcattaccatttagctaataccaaaggggttttctctaatcaaatacgtaattgttgatgtgtgattcacaggttgacttagctctaaagctgtcgaagatggaagagttcacaggccgatcagcccccaccgtcataacataagaagggtcaagctcaacgactcaaaccattcaccttttcgtctatatgatgttttcttcttatactatccaagttacattataagaataattagtctcagggagaatttgtatttctcatcagaattctgaacaaccaagactgatttcttgagttgttgtgaggcttatacttgtacggatttggctttctcagttttgt

SEQ ID NO: 9141 - DNA, 511 bp, Arabidopsis thaliana columbia
gtgtttcctcatttacccctgaagggtacaggggtcctgttttgtcgtcgtctccagccatgccatttcagtccacaacgttccagtatcctgtctttccttttggaaacagcttccccgttacctcagcgaatttccctggtgcttctacaggacacatggattcttcttcaagcgggagagcttgcttccccggtgtcaactctcaaatattgggtcctggagttccagttccgtctaattacccaagaccttatatagttggcctcccaaacggtggtagcaatggcggtgttttggacaatggcgcgaaatggtttaggtcaggacttgacttaaattctggtcctggaggtcatgaaacagagggaagagacgaatcaacacttgtggcaaggcaattatcctcatctgcttccttacctttgaaggaggatcaagcaagaatgtatcacatgtcaggtggtgttctgaagaggaaagaaccggaagcaggatgggatggatatag

SEQ ID NO: 9142 - DNA, 592 bp, Arabidopsis thaliana columbia
attggtgatgtaattggagcccttgcctatgctctaatgattttcaaacaaccagagagttccgagaatatatttgatccaagcgtgatagagagcattttggtaaagttactaaagcctcgtgacacaaagttaatccaagaacggatcttagaggctatggcgagcttgtacggaaacagtagtctgtcgtgttacctagatgatgcagaagctaagagagttcttatcgctctcataaccatggcttctgctgatgtacgagagcgtctgataatttgcttgtctggcttatgccatgacaaggttggaatttgggaggcgattggaaagagagaaggaatccagttatttatatcatttctaggtttgtctagtgagcaacaccaagagtatgctgttgaaatgttgaaaattttgacggctcaggtggatgatagtaaatgggctgtaacagcagccggggggatactccacttgtccagttgctcgagactggatctcagaaggccaaggaagatgctgcctgcattctctggaatttgtgttgtccagtgaggaaatcgtgattgtgttgaaagacctggtggta

SEQ ID NO: 9143 - DNA, 558 bp, Arabidopsis thaliana columbia
ctaaaagcaatggagcaaacactggccaaaggaagcagatccaagatgactgttctacagtggtcaagaagctacgtgctatgctccactccgcagatgagcagctacgggtccataagaagcaaaccatgtttttgactcaattgactgctaagaccattcctaaaggacttcactgccttcctctgcgcctcactacagactattatgctttaaattcatctgaacaacaatttccaaatcaggagaaactagaagatactcagctgtatcactatgcccttttctctgataatgttttggctacgtcagttgttgttaactctaccataaccaatgcaaaggtaagaattaactttcttcttttgtttgaacatgtaactgtgtttctttctgttaaacttacggtcttaatggtttattggcagcatcccttaaagcatgtcttccacatcgtcacagacagactcaattatgcggcaatgaggatgtggtcctggacaatccactggcaaagcaccatccaggttcagaatgttgaagaatttcatggctgaa

SEQ ID NO: 9144 - DNA, 1116 bp, Arabidopsis thaliana
tacgtctctccgaccttctctccttcgaatgatagaatcggtagagtcgctagctgggaagagacagaaagcggcttcgagactctgccggagccgagttttgaaacggaaatgtaggttttagggatttggtgagaggaggataaaaagagagaagatgagaagaaagatagcgaatttggtgctgttgcagaagaagccattgttgttccctgacctgacctatcacaacgaagaagaagaagaaagactgagaaagtgttatccactcttcaaatgcctatcttgtgcttggtgagaatttatgcatctgtttggacataaggatataactatcctgttcatgaataactccagctgtcgctagtaagaaagagtcaaactccaaaagtcaaaagcctcttatatagccagcaggttttttgagacataaaactctgtgataaaacgatgatagttgatgatagctgagactttgatacagatatttgagatacgagcgcacgttagctaagaccaccgcgtaagccaccgtctcgtcttgaaacgcaccgtattcatgacttcgtcggagccactcgacctggttgtcaccgtcgtctctgccaagcacctgaagaatgtcaactggcgtaacggtgacctgaaaccctacgttgttctgtatcttgaccaagaccaccctctctccacccgctccgatgattcctcctccatcaaaccggtgtggaacgagcggattactcttcctctcacccgatctgtccacgaatcggtcctcaacatcgaggtttttcattccaattcttcggatctggcgaaaaccctcgtcggatcggttaggtttcctctagctcgtttgattgactcggacgggtcaatgattccggaattgatcaactcgctcgagctggttcgtccatcgggtcgaccacaggggaagattcgtttgaagctcgcgatcaaagacagaccaatccctccaccgcagcatcctccgccacgtcctcaatctcaaccactagattactattctgcccctcaaggaaaccattattactcccctagccctcctcctcctcctcctcctcaagcaccgccactttaaagcacact

SEQ ID NO: 9145 - DNA, 515 bp, Arabidopsis thaliana columbia
ttttcatcaacaaaaatcacaaagggtcatacattttcagcctagaactgcagagacacagagacacaactttattttagttgtgtgcaatgaccctaactcagtgctcatagatttgattccatgtaatatgcaattcaatatcactgtatcacactatacttgttcaggctacaattcaaatgcatcattctaaaacaatgatatcaaaatcaacaaagctctggtgccaatacttgacaccccccctttaaaattcataatcactaaacaagaatcacaaagctacaagagtccaataacatgagatcttaaagaaactcgaattgagacctagaaatcaaaattactagacgtgattcttgcaaaccaaaccatcgaatcaagagtctcaattacctagaacaaggagtatcaggagttggtaagtgaagtaaatagggagataaagtgttcaagtgatcgcaagttttacgagcttcgacccaacccgacccggctccgagtatccagtc

SEQ ID NO: 9146 - DNA, 447 bp, Arabidopsis thaliana columbia
gaagttatacaagagatgatgcatgcttcaattatctgaaaattcagattttatagcagttatttaactccaccaacgagacaatagttcttcaagaagataaacataatataaatgaagaatttcttgtaatcgtccatcaaagattaccttcactcgatttcctttcttgtgcaaagagttccgacgccaagatgtcatatagagtgtaagttggttaaataatgcccctggaggaaaatgccatgagaaatgaaacagacagatgaagataaatggaaccaaaagtgtaggaaaagaaaaaatataccaagtagccctccgataactcctattacagccattggcagtagctctttgaagtagtagtcatcttgaccactaaatgagagaaagaaaagttccaggtcaattctagcactattaacgttgcatgatataagtgag

SEQ ID NO: 9147 - DNA, 463 bp, Arabidopsis thaliana columbia
tcatagccgtcagtatagtctcgaatgaaacaagacataagtagattagtgcgtgcatgcgtgctctccaaatgattacttgtcagttcacaagcatcctgtgccaaaccgctaccatgggaccgcaaatccgaagtgagtctatgcagagcagatctaaatgtattagtgtctataattgatttcttctgtgtaatactaattgatagggcctcattggtaagtgctacaagatctcgtgcactggaacccatggttatagactcgaatccattagtatggaacattttcttttccaagtgaaatcccctagtataggaaagagtgaaaaagtgctttcgttgttgtggaataagaagccttcgcattttaatgcatgtatttaatttattcggggctattagagcgggatccactttttggggaatatgagtcgaagcaataacaagaatatttctagtgg

SEQ ID NO: 9148 - DNA, 643 bp, Arabidopsis thaliana columbia
tttttttcgtctctctcatcattttgctgatttctcaatttctgtgtttacactactccatcgacttgtaatttcactttcttagggttcttcttcatcggatcatcggccgtatctgaaaccggagatggccggcgttgattctggcaagcttatcggctctgagattcatggattccatactttacaaggtttgtcgttcttctaagctgatcgttcgtcttgattcataaattcgattgtctctgggttttagttttttttttccttttctcgattgctctttgattctcgtagccgttgaactagaatttgtagatagttatggaattggagagtctttgtgattttaatgtggtgatttggaataagaatccagggacatttaggttggccaatcgaatatagaaaatactttgatgttgaatctgctaaattcgttttttttgtaaagaatcgttgaagagcatgtctcagtatactcagagttcattcttaattcatatgatattgaaaagatattagatgaatccatagatacaggaacttgtaattaaatgttcctggagtttttttgttgttgttgattagtgacattgttgattggttggtgcagatctagatatccaacaatggtagatga

SEQ ID NO: 9149 - DNA, 429 bp, Arabidopsis thaliana columbia
ttttttttggaggatttcccttgtttgggcttaggttcctcttcttcaattagaggctttcaaagctcgatgagagaggtggtggtcactggggaatttccttattccacctgatttgttttgctatgtttccttttctggatcatagtcggtcgtgagtttccaattttattggtttttaacctagatctaaaaaattccaagaaacgccgccgcacaattgctttgagatcccttgaattgttttggcaaaattgtttgctctcgcttttggctcaagagatggtgtttgctttggacaaagctttgcaagagatgtcgattaaagagaacaaacctctataactgaagaacttaccgaagtttagctcatgtgagagaaacgcttgtagcctcatgggaaggttactctgtcaggaaaaccagaag

SEQ ID NO: 9150 - DNA, 552 bp, Arabidopsis thaliana columbia
tgactctctccggcaacaacacgattactgcattaggctgtaactcgtacgcttttgtgtcctctaatggaactcgaagaaactcagttggatgcatatcagcatgtgatgctctttcccatgaagcaaatggagaatgtaatggtgaaggctgctgccagaaacccggtcactgcagggaacaattggttaatagtcagatcatatcgctttgacaacgacacgtcagtgcaacctatctctgagggtcaatgcatctacgcctttctcgttgaaaatggcaagtttaagtacaatgcttcggacaaatattcttatctgcagaataggaatgtggggtttcctgtggtcttggattggtctattaggggagagacatgtgggcaagttggagaaaagaaatgtggtgtgaatggcatatgttccaattctgctagtgggatcgggtatacatgcaaatgcaaaggaggtttccaggggaatccatatcttcaaaacggttgccaaggtacttcacaacttgttttcttctatcacttcagttaattgttt

SEQ ID NO: 9151 - DNA, 483 bp, Arabidopsis thaliana columbia
cctaaatatgcatccacactcatcacactaattcaattttatccctctttactcttcttgataatcggaggaaactaaaaaaggaaaaaaaaaaatctaaataagaataaaattcctaaaaaatagataaatcaaaaattgtgaagaaacaaatcctcgagtcatgctgtctacagaaaatctctttctcacttaaaacccttacagaaacaaatcatcgaatctttgttttattagaatcagtgatagtgtttcctttcacgagacgataataacaaatcgtcttgtaaaaagtaaactcataatcatggcggcggcggttgccacaggtgttgcaccggcgacaatggttgatcaagttcccagatccgacggcgcagacttcggttcaggttccggtttcaatacctcttccatccccgtgtcgtggtagccgatcaaacccacccgaactcgtcgctctatgccggtgatctggacccg

SEQ ID NO: 9152 - DNA, 573 bp, Arabidopsis thaliana columbia
ctaaaatttctatcgggactccccaaagaaaactatgaactttgattaccgtgaagggattggttgagcagtactgtaagaagcagtcaaggaggcaactactatgattgctaagcatatctgcaatcctacaacttgctgtatttcttgcaacttcacatcctaccacatgcatggagcacattatcataatccgaagtttagaagttatcttgagtcaacatcaggaaaaaaaaagaaatggaaataaagggatacctttacagagaggaaaaatagactaaatgataagaaagcagacaccagacaatacaggcatgatgatcctgagagttttgtgctaaggatatacaggaaatatgcactagcagatgccattgcagtcgtgatcccaaataacgcgaaacgcccattgctcttactgattccaaaaggtagattccttccccaagctctgcacttagagcggttactacgccatacataacaaatccaatcactggaagaggacacctggcaaaatgtaaaaaaggattttcattgagttcaacttacctgcaatgcaatgttggc

SEQ ID NO: 9153 - DNA, 509 bp, Arabidopsis thaliana columbia
taatccaaaagattaagttaactgtgtcttcccaaacccaaaaattagtaatttacataaagagcttaaatatttttataatttacaccaaagattttttttttttggcaaaagattcctcttttatcttttcttcctcgctttaaagttttacttttctcattcctatcatcacctaactattcaaagtctcttcctttccacttaaaaacctcaactttgatttctgtacgaacattctgattcttcgaatctcaaagaaatttcaaaactttttgattttgatgggttgttcaacctcaaagctcgacgatcttccagcggtggccatttgtcgtgacagttgtagcttcattggagcagcgattcatcaacgttacgctttatcagaagctcacgtatcctacacacaatccttaaaagcaatctctcactctcttcaccaattcatcaatcaccaccaccgttacaacgattccgattccccaaaaaagctaacccaagatgga

SEQ ID NO: 9154 - DNA, 534 bp, Arabidopsis thaliana columbia
ctctgttttcatttcctctgtttttcaaacttcctctgttctctcatggctccacttcacgaatctctgtcatcaatcaacgatgtaatcgaatccaaacctctttttgttccaataactaagccaatcttgcagccaaactcatttaacctatccgaagagtctctctgtgccaaagactctactccaatcctctttgatgttcctcaaaacgtaactttcacaccattctcatctcactccatatccactgatgctcctctcccaatcctcctccgagttcaagccaacgctcacaaaggagggtttctcggattcaccaaagaatcaccctctgatcgtctcacaaactccttgggaagattcgaagacagagagtttctcagtcttttccggttcaaaatgtggtggtcgacggcttggatcgggaaatcagggtcggatcttcaagccgagactcagtgggtgatgctaaagattcctgagatcgattcctacgtggccatcataccaaccattgaaggagcttttagg

SEQ ID NO: 9155 - DNA, 506 bp, Arabidopsis thaliana columbia
atcccgtgggacacttccctcatctggctgatttggtgaccagaatcaattacaattatcactacatgtctgacactggaagctcgatgactgcttctggatcatagaccaactcttccaggtccattgaactaaatcccaaatgaatgtgtgcaaaaaaaaaaaacataaaattattattatgacatgtttgagcaaaaataatatgtggtcgggacaggtcactaccagtagtcgcccactagtctgattgcaaaattcaaatagaaaagatatatgataatacgacaacaaactcaggctagattacagagtagttaacttatattatatacctcctcgatgcacgagcgagcaaaactactactgtactacttttccggcgataaaatctatgaaaatggagggaactatcaaatctccggccaactacgttcctctcactccgatcagcttcctcgatagatctgctgtcgtctacgctgacagagtctccatcgtttatg

SEQ ID NO: 9156 - DNA, 549 bp, Arabidopsis thaliana
atcgctacacgtggtaacatcgctaccgcccgtatcgttgccggcgattcattagtcaacaaccgtgcggtcgtcctcgtcgacgaaacggttgctcgtaaagatatttgctcatcgatgaacctcgttagtgtcatcaaactcgatgtccgcatgttcgatgtcgatgatgttacgtacgtttctgatcgatgaagtgatcatactttaccaactggttatgtttcaaatttttaattttggtaatgtaaaccaatattgacaaaattcgaagggaatatgatcttcacatacgaattcaacaatagatcctaatcatgcttctacaaaacatgattccaattgaattcattaccttctcctaaaaaaacaaaagttgacgtcaaaaccctcatgctgagtcagaagattcagaaatcataatcactagtcttcagcttcaagaggcattttgtatctacactgaggacacgtggcgtgaatcttcaaccacttcttcacacattccaagtgatacttgtgtttacatggtagctccgtctccatatc

SEQ ID NO: 9157 - DNA, 898 bp, Arabidopsis thaliana
tgctcaaatattcgatggaaatattactgtcagaatcaagtgtcattacttcatactactttagttggacaacaagctctgttgccatcttcctggcctgccttggcctcacggtgctaccaatcaacattttggtcggaagttacatcagtaatatgtttgaagacaggtaatcttttgaatccgagctcaaaccaaaccaaaaatatcattcatttttttggtgactgatttgcaatttgtgtctcttacaggcaaatccttctaacatctgagatcatcgtcttccttgggattctcttcagtttcaatttgtttgttccatacactgtacctcaatacgtaatctctggtctcataatgtttgttgctgctgaagtactcgaaggtataaactaaacaaacctctgcgttctgttttaaaagaacaactgacttataatgaccctttttggtttctttaggtgtgaatctatcgttgttatcgcgggtaatgtcatcaaggctatcgaaaggaacgtacaacggaggattgctctcaacagaagctggaacgttggctcgtgttgtggcagatgcaaccataacattgggaggatatttgggaagaggccatctcctgaatgccactcttctaccatcacttgtcatctgcattggctccatcgttgctacttgttgtacttataactcactctattgattttggagttttgctaccaaattttacaaaatagaataaaacagtgtgtatgatcgatcctctctttgatttgattatttttgttgttctaattcatatgggtgtatatgtgttttataatacatatagtatgtatattcgtatatatacggtgaatacaaatcctccatttgttggaaatccagttttgtgaga

SEQ ID NO: 9158 - DNA, 569 bp, Arabidopsis thaliana columbia
  unsure (1)..(569): unsure at all n locations
nnnnnnnnnnnnnnnnnnnnctaaaggaacaacgggtgttgaatctgttaaagcagggctaccagagccgcgtgccgctggacgactgcaccatcaaaactatctgcaaagccgcgaacaaaggcgatagtctggcgtcggaagtaattgagtatgtcggtcgtcatctgggtaaaaccatcgccattgctatcaacttatttaatccgcaaaaaattgttattgccggtgaaatcaccgaagccgataaagtgctgctccctgctattgaaagctgcattaatacccaggcgctgaaggcgtttcgcactaatctgccggtggtacgttctgagctggatcaccgctcggcaatcggcgcttttgccgtggtaaaacgcgccatgctcaacggtattttgctccagcatttgctggaaaattaatgtgcttttatagtggcgcttattgttgtcaatattctgggtagtccatgaccattaaaaatgtaatttgcgatatcgacggcgtgctgatgccgataacgtcgccgtaccgggtgcagcggaatttttgccgggattatggat

SEQ ID NO: 9159 - DNA, 591 bp, Arabidopsis thaliana columbia
gagatggagaaagaggaagaagaggagagctcttcgttacctgtacagggtcctgcttgtaactcaactgatcagttgattggttggcatattttcaatacattgccatatgcggggaagagtgcagtttatatagatgatgttgctgcggttttgcctcaaaaactagagtggtctgggtttgtgttgaactcgagattgctttgggaggaagctgagaataagccagagtgggttaaggactttgggtcgttgaatgagaatgaaggtgtggagagtcctttgtctctgttgaaggatccttcaatggtggagcctcttggaagctgtggaagacaagttctgctatggtggcttcgagtagaagcacgcgctgatagcaaattccctcccgggtaagcctttttctctatacatagtaaaattaatcatcttgcaatcttgttgaagagtggaaaggcattaaaccgaaattatgaatagcgatttaggaagcaggtctttagcacaaggaatgtactacttttgcgtaagttgaattagggattagttagtaagttttgactagtatcatattctagttgggagtgt

SEQ ID NO: 9160 - DNA, 849 bp, Arabidopsis thaliana
  unsure (1)..(849): unsure at all n locations
tctctgtggcctaagacgtatagtccgcactacgtgtctctactcatatgatgcttatgttctgaccctgttcctttccacactatcttcgtaggatctgtactggatctggttttctcttctcctctcttgcatccctcttcaagcacgttcttagctttccctgtagaagctggacctaggtgaagcttgtgcatcatgctatgttcatcagtgggtgtctctttacctcttgtgaagagttcttggctctctgatcgacttgatgctcccttggaaccgctctcttggtcgaagaagagtgcttggacgaccgttcttaatggcatcctctcatttttcacagcgtgtgcacgtacttgtgcagacaatttctggcagtcaagacttctgcatagtcgttttttctcttctttgcttatctcgggatgcacctgccatgttacaaatgttttatcagtttcaagtactgtatgcaaaatgtatgatttctgaaagtaggttggtgagactctcaaccatagctagttgcccttgagcaggccagagcatctgataccttgagaaatatgttgatcgctttgtaaagtctgtcatggctctggcgtgcaatgtcgggcacctgcctcagaaagagacacaaatttggaaactggcatatggacatcttgtgcgactgcctgaagataggagtcaataagctttgccaccttcctgattgaatgcagcaattgagtgttgttactagaaagatgcgcagaagactgtcttctccagagcattaaaaaactctcaagaactgtagccaccaagtcggtatcgtagcgatggagatgagangatgagtgt

SEQ ID NO: 9161 - DNA, 627 bp, Arabidopsis thaliana columbia
  unsure (1)..(627): unsure at all n locations
nnnnnnnnnnnnnnnnnnnnnnctaaagccgttcttaattctgatatttcatcggtgatctcccgtctgggacataccgatacgctggtggtgtgtgatgctggtttacccatccccaaaagtacaacgcgtatcgatatggcattaacccagggtgtaccttcttttatgcaggtgctgggcgtcgtcacaaatgaaatgcaggtcgaggcggccattatcgcggaagagatcaaacaccataatccgcaactccacgaaacgttgctcactcaccttgagcagctgcaaaaacaccagggaaataccattgaaattcgttacaccacgcatgaacaattcaaacaacaaaccgcagaaagtcaggcggtaattcgcagcggagaatgttctccgtatgcgaatatcattctctgtgctggcgtgacgttctgaggccgtcatggaagcattacttcagcttaaaggcatcgataaagccttcccgggcgtaaaagcctctcgggcgcacgttaaatgtctatccgggccgcgtgatggcgctggtgggcgaaaacggcgcgggtaaatcaccatgatgaaagtgcttactggcatctatactcgcgatgccggtagcttttatgg

SEQ ID NO: 9162 - DNA, 560 bp, Arabidopsis thaliana columbia
tacaacttttgtcccacaacgcagaaaagtcctctctttctctctctcgaataataatttttcatttgctgcgtccttttggtgcttgaagcgatgaccatggcagcaaatctagcgcgacggctgatcggaaaccgatcgactcagatccttggagccgtgaactctagctcaggtgcggctagttctgtcgctagggctttctgctcctccaccactccgatcaccgcaactctcttccctggcgatgggatcggtcccgagatcgccgaatctgtcaaaaaggtccctcatcctaatctcttttctgcgcagaatttcgagttctggaagtcatagttacgagataattgtttgattgaattttgtacgataatttgtgggaattcggcaattttgttgatagtttttgcgttttgtactgatccaggtgtttacaacagctggtgtaccaattgagtgggaagacactatgttgggactgagatagatccgagaacacagagtttcttgacatgggaaagtccgaatctgtgcgtagaaacaaagttggtttgaaa

SEQ ID NO: 9163 - DNA, 642 bp, Arabidopsis thaliana columbia
gtttatcttccatatccattgatagtccatcatccaccgttgactcatcgcttcccgtattcgcggtcagaagattcagaccgatctatatatatatctccacagtattaatacattaaccagattcagtttatctgtgtagtaatgtaaaaataataaaattcactgtttgcaaaataattgttgctagtgttatgagcattcacatcacatctcaccaaccaaagacatatatttcaacacatataagacatacaatacatcatttaacatcgatagcaaaaattaggagaaaatcaactatacttacattgacatctctggaacgatcgttttcttcaactcgtgaaccctccattttgatgagaaccttattgccttcgtcgtcgtcgtcgttgatgttctcacgtgaaaccctatctctcttctctgagaagaagtcaacctcatcaaccaccacacgatggtcatccaacggtgtgatctgatcgtgacggtcttcgtcacgtgaaccgcctagactcactggaaaccggaacatctaagtctgtgcgtgatactgattattgtaacgatgattattttctttgttgttgattggattctcaaaaaccgtaggaatgtaacttgcaggtaagataa

SEQ ID NO: 9164 - DNA, 445 bp, Arabidopsis thaliana columbia
caaaaagatgtgagccagaaagtacaattttacactaacattatgttcaacttcaacagcttcatcttcaaccaagttactagcgtcaaaatcgagctccatttccttcgtcacaaagatgatcagagatgaaatcgatttcctgtaacaagaacgacgcgtgagaacaaaaaatcgaggcgaaatttttgtaaacccaaagcctacctacctcggatcaaaaacctacgaagaagctgagagaaaaaaatctcagaacccttgatgaaattgaaaaaaaaggcgacgagcttccaagggcaaaattggaaaaattacgagagggtggagatgacgtcacatctttaggccaagatttttgttttagaaactttgatgacaaaagaattgaaattatgtcttcgtctccatgaagatgaaattttccatttataaccacacgtgc

SEQ ID NO: 9165 - DNA, 629 bp, Arabidopsis thaliana columbia
ccatgttgatctcttcactgctaagatcttgtcgaaactgccagtgaagtctatagctcagtgtcgttgcgtatcaaagctatggtcatcacaaattcgtcgtccatattacaacatgttgttcccgatcatgtctccagccccaccgcggatccttttcaccatcgaaaatgcagaagggttgttcttctacacttcacctcagcctcgaaaccctgatgagaacacgtctcttgtagccacccttcatcataggacaagtggaaacagtttacttataacaagtcctcctgttggcggattgttatgtcttgaacatgatcgaaagaattattcaagagtgctggtgatttctaatcccatcacaggagagtttttagcattgcccaaactgagaataaacgagattaagaaagagttgttatatctaaatgaaacatatatttttgggtatgatccaatagacaaacagtcgaaggtattgcgtatacctcgtcgtcgtgtcgcttacccaaattcggtaagtatcatgttctcacattcgagtctggaaacaaaaatctcttatggagaaagactgaatgttgccacttcatttcctatgggagatatagggcgatgtcataagt

SEQ ID NO: 9166 - DNA, 580 bp, Arabidopsis thaliana columbia
aagattctttatagattaacaatctgttacttttggaatagtgtctatacattgcttgctagtgtaacaggctgttacttttttagtgaattggtgacagtgtatgctcgtcacttagagaggaagcacgatatgattcttgggatgctctttgaggaaggatcatacaaaaagctttacagctataaacaccttataaatggatttgcagctcatgtttctcctgagcaggtgaaaaatcgatttcagatcatttctaaatagttcttaactttcatgttcccttacactatttcactatatttggtaggcagaaacacttcgtcgcgcccctggtgtgagatctgtagacaaagattggaaagtgaggagactcaccacacatacaccagagtttttgggacttccaaccgatgtttggccaacaggaggcggttttgatagagcaggagaagatattgttatcgggtttgttgactcggggatttaccgcatcacccgagtttcgcgtctcatcacagattccttatggcctctcctcattcaaagggaaatgtgagaagatctcatacaagaagag

SEQ ID NO: 9167 - DNA, 600 bp, Arabidopsis thaliana columbia
cgccagtgtgctctaaaggtcttccgagttttcacggaagataaccatatcggtcagttcagggtgtttaaccgggcttggagtgccctgatagtaacgtaccggacgcaggcagatgtagagatccagttcctggcgcagggcaacgttcagagagcgaataccgccaccaaccggagtggtcagcggacctttaatggcaacgcgatattcacgaatcagatcaagagtttcagcaggcagccagacgtcctgaccataaacctgtgtggatttttcaccggtgtaaatttccatccaggagattttacgctcgcctttataggctttctcgactgcagcgtcgaccactttcagcatggctggggttacatctacaccgattccatcaccttcaatgtaagggataatcggattttcaggaacgttgagtttgccgttttgcagggtgatcttcttgccttgtgccggaacaactactttactttccattcacctctccttcgagcgctactggtttgctcgtctgccaccacgttgcatatgcgtttgcgtcctgcgatacggatgctttagagcaattttttgttaatgatttgt

SEQ ID NO: 9168 - DNA, 583 bp, Arabidopsis thaliana
gaaaaccgaaacagaggaacaatacaataaaaaaagtttgacttgtattacctgacgttgtcgctgttccagccgcaacttttctgtgttggccatttcaaactctccgttctcgagatacctctggtccggtcgcagccttgaatccgttggtggcagcctctcctacatccatcactccttctggtcagaatgtctctccaaaacataatttaagaaatttaaacagaattctctgcggcattcaccttaagcccaggtgtaagctcattcaatgtgattgcaaaacgtgttagattatactttgttgcgtttccaggaggtttgctccgtttccagagaagttgagctcctgacatatcttcactcaatttcccttttccagaacaatcacccgtcacaaagtgtatgctctcatcccatttcccaaacatagttgccactgtcttcccactcttgttttgaactataccatgaacctgtgataaggacaagttacttggtagatctcggaccatcacaactagaggtggacataagaacctagcaaagtatctcaatcgaaagcaatctttacttttga

SEQ ID NO: 9169 - DNA, 479 bp, Arabidopsis thaliana columbia
cgagaagatagacttcactttttgtctgaacgataatcttaggctcggtcaccgtccggtgagtcgtcgacacaccgtctattcttctataatcccgatatatattaactaattaattggcaatgccatgaccattatactaatactatgtatgctaatcagatgcacttctactataccttatctttgaagccggaagatcttcatcatcttcatcatcatcatcatcatcatcatgatccttacgataaccactatcatcactagattccatcatttgccctgcaccaccaacctcagtggaatctctgcctccaccgccacggcgattctgaggcctctcgtgatcatgttgacctttgtaaatgatctgagtgatctgtccatccgatgaccgttcgactttcttcttcatcggacagttaacatgtgtacatctgtaataactccttggatattcacaccctttgataggcttt

SEQ ID NO: 9170 - DNA, 545 bp, Arabidopsis thaliana columbia
ctgaatacatagcgactgtccataaatcaagaggcacacaacttctgaattacaaaagctacaaaacaatgggaacacaaagaatgtggatggctatcgaatcttttgagtttgatccactcacatcaacactgacctgggaacaatccatcaagcctatgtacggtctaaagacggactataaggttgtgaatgaaaccgaggcgaacgtagagaaggttctagatatatacgaagaacgactcaaaaattctagcttcttggctagtaacagcttcacaatggctgatctttatcaccttcctaatatacaataccttatggacacacatacaaagagaatgtttgtaaaccggccaagcgtgcgccggtgggtggctgagatcacagctagaccggcttggaagagggcatgtgatgtgaaggcttggtaccataagaagaagaattaatcttataatcttgtgatgtactttcggtgatttctttaagtttgatgttatgaataaaaggcaaagcttttgcaaaaatcactcgtttttttt

SEQ ID NO: 9171 - DNA, 607 bp, Arabidopsis thaliana columbia
gatactgttaccggagaaatcgagataggtcatggagacgcaagaagaaagaggaatggttaaaccggagattggaccggtaatgttgttgtaagaaagatcaagggtttggagtttcttgctgcttaagaaaagatcattaggtaactttccggtgaagttattgtaagagagggtgatggaaataagatttgagtatttggagaagaaattttcagggagggttccgattaaaccggaggaagagagttcgagatgagttagggttaaaggaagaagaagaagagaggttgagtttaagacgaagaagttctctgagagtttgagaacagagagagaatcaagagaggtgaaagcattgaaggagacgattccggagaggccactaccggagagattaatctcggtgactcttcctccgagacaagtgacgccggagaattgacaaggggatttacgaggtgaccagtttgagagaatgttgtttggatcatcttggatcattgttttgaaagagaggagtgataatgagtcggttttgagtgaagattggtcggaggaggaagattgtgagagatgggtaaggaggaagatgaaggagatttgg

SEQ ID NO: 9172 - DNA, 509 bp, Arabidopsis thaliana columbia
tgttcaagataatgttggctggaccttgggttatggacttccaacattaggtttggctatttccattaccattttcttgttgggcactccgttttaccgccataaacttcccactggaagcccattcaccaagatggctcgagtcatcgtggcttcatttcgcaaagccaatgcaccaatgacgcatgacatcacgagcttccatgagctgccttctcttgaatatgagcggaaaggcgcctttccgatccaccctactccaagtttacggtaatgtgtatatttatttagtataatctcaatctaaattcatattatatcctaagtatatcagaaagtacctaacatgcaactatgatgcagattcttagacagagcttcactcaaaacaggaacaaatcataaatggaatctttgtactaccacagaagttgaagaaacaagacaaatgctgagaatgttaccagtcttgttcataactttcgtcccaagtatgatgcttgcacaaa

SEQ ID NO: 9173 - DNA, 531 bp, Arabidopsis thaliana columbia
atgaacttgctattttgaatgaaccatctttaaagagtttctcttagaatataatgacaacttattgtggattgaaataaggttaacagagttgattgaaatctaaataagctaatgcaatagattcttgactaaaaatcctaaacgaaaacaccacacattaaaaaaaaaaaaaagggtcctagaaactagcttagaaaagaaaaaaaaaacaaggttacttgtcatcaatagttttgtcatagaacactaacgtcgagcttatcattccagaatcagttggcatagagaggaacgagagcgaaatagagtgtatcatcggcgtggaaagaccataggcgaatatttgtgttttcctctagaaggcaatctgtaaccacttgattccaccctgcaaccaaattgtatagaagaatgcccctcatgtccctcaacctcaaattcaccggaaattcccttagatgagaatcccgagtatcgcgtctactccttctttgcgaccctattggcatctcttctatggcccttttt

SEQ ID NO: 9174 - DNA, 460 bp, Arabidopsis thaliana columbia
gagaaccactttcaacataatgatattacctgattgagaagagagaaagcacttcgaacagggtaatgatcgtccatgaaacccaccgcgcaaaggccatttctattgtaagcgtgaaccttgtactctaaaccaaaaacaagataaaaacacgaaccctaattatcccaaattcgaggactagaacaataagatagaatcgcaagaaattaaagccggggcatagtccaggaagatctagaatcagaaacggtgcacatcctaaatcataaaagtttcaaaatcgaaaagccgatccgaatttagaaatcgaataaaaatcaaagaggaaaggagattgcattagatccgggagaaagaagatttgaaaacaatcgatctagagaggtagaagaagaaggagaagaacttcgtgttgaacagactggcgttgggaaggaggggttggctagcgacagtg

SEQ ID NO: 9175 - DNA, 534 bp, Arabidopsis thaliana columbia
gggtgctaatgcaagtgatggtgtctctgttccgtcgtcagatatcattattctcgatgttggagtaggttcttctctctctttctatatgattttggattcactccagtagtgtaatgttactaacatggatgttctgctctattgaaggggatgacatgtggagggtgttcagcaagtgtgaagaagatactggaaagccaagtaagtgtcaaagatctttactttacttgctcttcttactctcctggtctgcttctctcagcctaagaccaaattgatgtgttctgtctcaaagaatggttgcccttgcccgattatttatattagaaatctctcttttcttgtgttacttattctttgctgtatagcctcaagttgcttcagctagtgttaatctcaccaccgagacggcaattgtgtggcctgtaccggaagctaaaagtgtacctgattggcaaaagagtttaggcgagacgcttgcaaaccatctgaccaattgcgggtttcagctactctcgaggtgagagagga

SEQ ID NO: 9176 - DNA, 594 bp, Arabidopsis thaliana columbia
tatttagctattaataccatgtctgtagtttctacccattcttactggaagtaattatttcctgcctctcatttctttactttttaattttctttaccagcaagattgacgacaatcatattttaaggaagcttaaacccaaggaaatctggcatctgactgtgcttggttcgattgcaaccacacaaagggaatatgttgctttgcatgcgttttcccagcttaacccacaggttggttttgttttctccaacaaatatttcatatatgctttcagttatgctgacgctgttgaaactcatatatccttcagatgcaaaatgcaattctcaagcctagcccagagcagtttcctaattacggggagcagactcctacagtgcccgattgtttcactccgagctttgctggccatttacacagaagctttaatgctcctcagttggcagcaattcactgggccgcaatgcatactgcagctggtacgagcagtggggtaaagaggcaagatccatggccatttactcttgttcagggccctccaggaacaggcaagacacacacagtttggggaatgttgaatgttatcatttg

SEQ ID NO: 9177 - DNA, 586 bp, Arabidopsis thaliana columbia
caaacaataataattcttgattgcatttttcttaacatgttggtatcatcataattctcagggcccaagtcagcaaaagcagctgaagtgcaggctttgtcgaaggaggtacattgacatagagaccatcgctcttagttttcacctatcctctaatgaacgaaacatccatcatatgtcatatataatcctttttcatcttctgtgatacagctcgtggatctcaagatctctactgatctcttggaaaaagaaagagacttttacttctccaagctccgggatgtagagatactctgccaaactcctgagctagatgatcttccggtaaacgtttccgtagagcctgttcttttttttttttttaatcttgtttaagtgtaccttgcatggtatagccaccaacttcactatttagctccaagacaagttttccaatagtctagaaccagaatttagtttaccggctgttataagtacacataccgttcttagaattaagaggaagataaagagctcttaccaatgaactcctcatagcccaccagatttcatcagcgaccgcattttatgtttttcacatatg

SEQ ID NO: 9178 - DNA, 560 bp, Arabidopsis thaliana columbia
gtgagccaccatgaactcggtgaagggcgacccatccgcaaaggtggactcttttaccaacatcattgactgataactcgccgcatagctctgtccgtgacacccaccggagaaccgacggaggagatggaaccggcttcactactacatcgccggacgagctgcaacaggggaactggagaaggttcttcgagttccgggaagtgggtttgtccgtttgggtacgacgaagaaattagtagcgttagagatggatatggctgtggcggagaggaaacgagtaggtcggagaggcaaagttcgtaggaggagagacattgttgggtgggacgagagttagataaagagagaaaaggtttaagggattgcgtttttagagacgacgaaatcaattcgatcgaaccggttaagattgattcggtttatataacgaaccgctatggtcaaaataagaattcagatatcgtttggtcaactttggatgaagagacgtttatttcactgaaaattcaaaatcagtaatcaaaacttgtttatctgatactgcttccaaaagggag

SEQ ID NO: 9179 - DNA, 539 bp, Arabidopsis thaliana columbia
agagctcaccctgtggacggaagtcggcgacggacggtggacatgttccgatgaaaccttcacccactcggcataaagttggaatcccaccaaagcaaaacatgttcaaggatttcatgtacacattcaaagaaactttctttcatgatgatcctcttagggattttaaggatcagcctaagtctaagcagtttatgctcggtctccaatccgtcttcccggtcttcgattggggacgtaactacactttcaagaagttccgaggtgatctcatctccggtttaaccattgcaagtctctgcattcctcaggtgaaaaacctaaactcaagtacttgtatcacaagttatctgtacttgcttgtttcttatgtatattccttgatgatttcaggatattggatacgctaagttggcgaatcttgatcccaaatacggtttatgtaagtttgattttgacatgctcacacttgattgacctcatttgataaaacattggatactcaaaatatgtttcttgatgttcagattcgagttttg

SEQ ID NO: 9180 - DNA, 486 bp, Arabidopsis thaliana columbia
tattgcagtttgtggtggactatcctaatgaatttatcacatctgtggaggggactatgcgcactgaatcctttatgcaggttgcatcattgactttcaaaacatcaaaaggtagaacttcttcgacgtttggaagtccaagtgatagtaaattcttgcttgaaagcaaaggttgtggtgttgttgggttctatggacggtgttttagtagtatttttgaccttggagcatattttcgtccgctgccgcctccttccaacacagagaaagtagaagcaaaaggtggtgatggtggagcctcttgggatgatggtggttgtgacggcattagagatatatacataggacacaacaagatgggtatcgcattcgtcaagtttctttacgataaggacagtcagatcgtggtcggagatgatcatggtagcaacacattactaagagttgacgaggtacttatttactgtatcctatgagcacataaca

SEQ ID NO: 9181 - DNA, 474 bp, Arabidopsis thaliana columbia
aatggaacaccggcggagcaagtgctggagcccaatagtccgcgccgttgtcgctgcctacttggagtgtgcatgagattgggacaagacataaacctcgacttctcagatctttcttaggctcttcacttgcattttgattgtccgtagatgacgacgaagctcctcttctcttcatgcactgatcgttcacgagctaaaaccatatcaaaaaaaaaaaaaaacaatcatgatatatagcattgattaacaaaaaaagtaaacacatgttctctaacacctatataaagaggtgataagaaaaaaaatgattgaattcccctagtgaaaagcatatataacacaccgccaaaggaatttgaatttcacttagatgaagaaaacaagtaaggagaaaaagttgatatttaaataaattcagtggctttgttggttttcaagacttttttggtttatataatgtaagggagggtg

SEQ ID NO: 9182 - DNA, 462 bp, Arabidopsis thaliana columbia
tctccctatcttgaatgcaatatttccctggttgatcttagcagtctgttgaataatgagagatataagtcagttgatatccataactacaataactttagtagaatcaaacaaattgagagaggaaacattacttgcatcttagcttcaaatccagtctgcccagcttggtctatattttcagaaccagccatgtcaacaagcatcaatcttcccccaacagttggcacatcaagtatgatctacaaaaagaaacaaccacactagtaagttaaaacagagataagctgcataaagctatgcatacacatcaatcaagaagatcgttcttacaatgcagtgactccgagaacttctttcgttacaaagtgtactcttcacaattctccgtttctccactttgacaatttgtttagaaatcttcccagcctctgtcccagaaatgaaacttgcgtttttcgc

SEQ ID NO: 9183 - DNA, 413 bp, Arabidopsis thaliana columbia
ccaatgtctaggttgatgtttctcctgtccctgtagcacttgagcttagttacgtattacgttttttgtctgaatgctttttaggctttttctaagctattgtggtttgttttggaactggttagatatataccttttgatgaacaattagataggcttatgccgtttaatttgattaacttttggggttacccaaaacatatcatagtaaagacggactaggtcccttagtttatgtgtttgtttttttactttacactcctgtgagaatgagaaatgttatcttgctctgcttgagtttggtgtgagtatagcttataatccgatatgcgtcattgcagatatgattttacatggagtccaacaaaactcatccctttctaccgtggatgctgagtaccatgactatcatc

SEQ ID NO: 9184 - DNA, 836 bp, Arabidopsis thaliana
aaatggcaaattgagcttgcaaactccaaaagaacgctcaacatatttacggcaaccttcttgatttgtagcaaataaataatctttgtcaccttgtggaagtgaactagattggataaatgtatcccatttatgatatagtaagctaaatgatagtcggtccgttgacaatatatttcacttttggagctcggccttgtattatatcatcaaaaactagtgagcgatcaagtatattgatatcatttaaggtacctacaggtccaaaaaacgcgtgccatatccaaagatcttggcaagcaaaacaacagcctctagaacaattgttggtttccagatcaacgtgtatattgttctttccaagcggtcgggcaattctttcactcccaatgcatacaatcgatgcttcctgtcatcccgagaaatccacggagctctccaatacgcagtagtcgtttaagatcttgtcgcgtaggtcttcttagatactctttcccgaacaaatatatgattgcttcaaccgaatgtatcatacaagacatcaaagtgttttcaccaatccggaggtatttgtcaaccgcatctgtcgcacaatacaaattgttgcttgtggtgtcttcttgtacaagtgatgtcggcaccactcaaatcttcaggatcctgcaactcaaaactcatttgataagaccaaccacaagttagagaacttaaagcatagaacacaactgaaacacttaaattatataacacacaaactcaaaactcatttcattcatgatcaaaactaaaacacttaaagtatataatacaacctatcataaagaccaaacttatta

SEQ ID NO: 9185 - DNA, 495 bp, Arabidopsis thaliana columbia
cgctagtgtgctctaaagattccggtttagatatgtcaatttgcttcagttctcctaatcttgtagatcttttcattaaaagtaatgaaggtgatttctatttatcttttgtctatgggaatcccaatcctaattatagaaatcacctttgggaaagattagaaagaacatatactgtgagaaaagactacccttggattataatgggagacttcaatgagattatgagtaatagtgagaagaaggggggggggggggtagagtgagaactgaagcttcctttcaggatatgagaagaatgttcgatgctgtaactttacagatttgaaatcaactggagataggttctcttgggctggacaaaggggagatcactatgtcacatgttgtcttgaccgcacaatggcgaatgctgaatggcacaaccggttccctgcctcagagacagagtttttggagttcggcgagtcagatcacggcctctagttacatata

SEQ ID NO: 9186 - DNA, 545 bp, Arabidopsis thaliana columbia
gtttcaatctgttgtattattgttgttagattttgatgaatgtgttgttggtacttttttgatgcagcaaaacaaacctctaaacactcaaaatgcagctgatgctctacaaaagtttaaccttaagaagactgcggtgcaaaaggcacttgatagtcttgctgatgctggaaaaatcacgtttaaagagtatggtaagcagaagatatacattgctagacaagaccagtttgagattccaaactctgaagaacttgctcaaatgaaagaagacaatgccaaacttcaagaacagcttcaagagaagaagaaaactatcagtgatgtggaatcaggtgtgaaaaaactactttttctcagtggttttgaggatgtgatatagctgcttggataatgttatgttctgtgatgttatttgcagaaatcaagagtttgcagtcaaacttgacactagaagagatacaagagaaagatgcaaactaaggaaagaggtatatgtttttataccttttggtttttgtctttctttgagtaaggttgttgat

SEQ ID NO: 9187 - DNA, 398 bp, Arabidopsis thaliana columbia
cgactgaaggcaactttagcctgaattgtcactccaataacatcagggatcattcttactggatcttggaccagacgcagggttgccacaaaagtgaaaacgttacttgctctcaatggaatgtctaggaaataacaagtggcaaaagttgcagcagagacaaacaccggtgatgaccagaacagaaccgcattataagcctttctcatctgaaccgccttcaaagatttcaactcaatgttcctaagcttttcaataaccttcttgaaatgtgattcccacgcatagagcttcaagaccttcatgttgacaagagactcattgcaggccttcagcctctcgtcctgagaggtcatgagttcgctctgaaacttgttctgaagctttgcgataggagc

SEQ ID NO: 9188 - DNA, 573 bp, Arabidopsis thaliana columbia
atcccctactcacatgatgttaacagggttccagtggacggtgtaggtgtggaaatccgcagtgggatcgaaccagagacggaactgcatctcacggtcgcctttacctccggtgaacacattggtgtggatagtgtaaggatgtcctgtgcgatttcccaaaaactcgaagtcaatctcatcccatgccgtgccttttgacgatagctgccacaacatgtataacattaggagttaaaaatattacatttattaccgattggttttgagatgaaaagatactctaatatataagattcgaaatcaattaatttcacaagtagattctgtacgtagtaggcggtgacggtgccagcagagtttccagcgacaagcttgagcttcatgtcgatcttaccaaacaagtactccttcttggattgaaaacctgagccggagaccttgtcaagagtacaagtgagaagctgtccattctcgaatatgttggcacgaccattaccccaagtgatatcaaagctctcatagaagttccggcagatgcagcacccacaagaagccaatggaaggaggaga

SEQ ID NO: 9189 - DNA, 546 bp, Arabidopsis thaliana columbia
cagtgtgctctaaaggcgcgcaaaatggcccgcagttgagtgcggaacaggccagcaaattccgggtaaatacgtaccgcgcgatagcgaaggaacgggttctcttcctggggaatattcagataaggaatgcttttatcgccgccgatgtccatcgtgcggaagataatcggcttgtcgcccgccgccagtagcacctgctggtaggcttcaaattgctcctgctcgtccggcgcgctgtccgatccatatagagcatttcggtacggaacagcccgacaccttccgcgccgttgcaaacgcgcctggcgttccagagcggtgccgatattcgccgcaatatcaatacgcttgttatcacgggaataggccagctgcgcgcacgctgcgccatgttgtttttggcgtttatccgccagcgtctgcgcgacctgataataaccgctcaccgcgtcattcgggttaatcgccagcacgccgcactgggcgtcaagcactgcaggtatgccggcataacgggaatcgcatccagcggcaagcactcag

SEQ ID NO: 9190 - DNA, 558 bp, Arabidopsis thaliana columbia
agaggacaagacagccaaggtggcacgagcagttgcaatgctggtgtttgaatttccgcggacgtgtgacagttgcatcggttaagaatttccagcttgtagcagcaagacagccacagcctcaagggacaggtgcagcagcagcaccaacaagtgcacctgctcaccctgagcaagacaaggtgattctccagtttggtaaagtagggaaagatatgttcacaatggactataggtatccattatcggcgtttcaggcgtttgcgatatgcttaagcagctttgacaccaagcttgcttgtgaatagaagaaaccactcgtctccttgatcattcatgctaatcccttgtctctctctctcttttatctatgcttttggttttttttaggcaaatgaaaatttgtctcaatactcagttgctgtactgtgagagtcagacgtctactattaacatcctcttctctattctagatcaattgaacatttaataggtagtctttaactaatcttacatgttactaacttctaagaaatccattgtacacaatgtatgatg

SEQ ID NO: 9191 - DNA, 613 bp, Arabidopsis thaliana columbia
agtaacggccgcagtcagttcagtgagcaaagaaaaaagctttggagctgttgagagtgttaaggccacaagtgagattctatctccaatctctggtgaagtcattgaggttaacacaaagctcaccgagtcacctggtttggtaagtttttacattttgaaaaatacctctgtttgtagtgtggcgcagatcaatctgattagtcgatttttcatttgtgtagatcaactcaagcccttatgaagatggttggatgataaaggtgaaacgagcagccccgcggagttggaagctctgatgggtccaaaggaatacaccaagttctgcgaagaagaagacgctgctcactagggtttcttcgccttttatctttcccaaatgttcgaaaaacagagcaaaacaagagaatccatgctttagtttcaatctttcatttctcaatgtttcttaccactctcaacttgtatcagtgtgatactaatttgattaaaagatcatccaatgagactcatcagagcttttaactttatataagacaggtcaaacaagcacacaataaaagaaacttcattgattttcaatcatatagttaaggaagaaacgttacatata

SEQ ID NO: 9192 - DNA, 603 bp, Arabidopsis thaliana columbia
tcaatcaaaaagaaacctaggaaattatactacaagctagaggaggaagggatagtacaatacaaaccccttataataacaaagaaagacggagctttcgcatgtaaagctatatactattgtatgaatgcatacttaacatataacgtatatgagcgcatacatatataagggaaaatgaggctgatgtggaaaaggtgctttaagaagcagtgaagttagtgggagaatatgataatggagattatatataaagacaagaaggtggcatgagattggtaataacttcacagttgtctccgaagaaacagagaaaccaaagagttaagtggggaacctcgaagctagttcaaactagtgggaggttgtttcacgtttcaactttcaagtcataaaaccaaatccaactctaaacgtaaacccaaacgtcaaatcatcagatagaaggaaatattctgattgagagatggctcgtggaaagattcagcttaagaggattgagaacccggttcacagacaagtgactttttgcaagaggagaactggtcttctcaagaaggctaaggagctctctgtgctctgtgatgccgagacaggtgttgt

SEQ ID NO: 9193 - DNA, 530 bp, Arabidopsis thaliana columbia
  unsure (1)..(530): unsure at all n locations
ttgtgatcgtgcggctctattatacgtgtctctaccttagacgcagcctccacatttactgctagcctaacatttcaattgccgactttcaaaattctagagcttacttgcttttaattctaattttactggcacggtaactattaccatcacgtgcatgtattcttgtgatttgattgatgactcattgggtttgtaatgtaacaggtgttcgtagttgctacgatgaaggaaatcgtacggcagagacgttgaccctggactatcgccgtggtgcccatgttgaggttggttactcttttttcatttaacctccttttcaagccattttacggtttgtctagttgagtatcaagagtttattgttgcttggccactggtcagaattgctaggatcttcaacacctatggtccccgtatgtgtatagatgatgggcgtgctgttagtaacttcgttgctctggttggttaatgatctagtgggccaaaacatgttatgattncagactggtttggtggtgtaatgattg

SEQ ID NO: 9194 - DNA, 580 bp, Arabidopsis thaliana columbia
  unsure (1)..(580): unsure at all n locations
caaatcaaaatacacgaaatgaaaccgtttaatttaggtgacagtcagagtgtctaccaaaactaatcgtacaaaaccgaactgaattgaaccgaaatggccatgcctgcttttcttcagctttaagggaaaagatcaaagattgggtcttcaacacttgagagagtctctgtctctgtaaaagatatttgagcttgagaagaacagaagaaacttccaggatcaatcaatcgatcaactttagtgaactaactcttgatttttcattcgaagttatggaatcggttcccgaatccgtaccatcgccgaactcgaatacaccgtcaataccaccgccggtgaactccgtaccgcctttcttgagtaaaacctacgacatggttgatgatccgttgaccaatgaggtcgtttcgtggagcagcgggaacaacagcttcgtcgtctggagtgcccggagttctcgaaggtgctcttgcccaagtatttcaagcacaacaacttctccagcttcgtcagacagttaaatacttatgtaagnatcattttttgtgttattgtcaatttatttttctagaaattg

SEQ ID NO: 9195 - DNA, 523 bp, Arabidopsis thaliana columbia
tgttatgactctcaattcattaattgctaatccttgcttgtgttttttttttcagaaacccggaggtattattgctcttctagatgaagcttggtgagtttgaaacccaatattagatgcttaatccatgctttgttctgcttataatttacttttccaatatttttatatttgttttaagagaaatgtagctgacgtgatgatttcgttttgcagcatgtttcctagatcaacacacgagacatttgctcagaaactataccagacatacaaaaaccacaagcgctttaccaagccgaaattggctcgtagcgacttcactatttgtcattatgctggtgatgtgagcatcttttgcttatctgctgcgttcattggttaaaatgattttgaaaagatatacaagaaagtcaataattggtttgtaaatatctcgtttaacaaccttgagtgtattgttccaggtcacgtatcagactgaactttttctagacaagaacaaggattatgttattgctgagca

SEQ ID NO: 9196 - DNA, 550 bp, Arabidopsis thaliana columbia
gaggatccccctgcagggaaatctgggtctccttcaaagtcaagacatgggaatggtaggcagggaaagcatggtagagaacatgcatcatggcaccagagaggttctggagcacctactaaagctttggaggatggacaatttgtaacctcaaatcagcccatccgaggaacagtgaactatcactctagtaagcaaaccgaacaaattgctgccaaggatcaaaccacatgtaataaggatggatggaacgatggctggtatatgactcctgaaacgcattactctgctgccgaagaaatggaatccagtgctgttggaaaagatcaaggaatgagcatgcacggcaggcagcatgcttcaagaagcaacaaggatggaggaagcaactatggtgaccctaaaaaaggcaataagagggatttcaataaagctcatacgcagcactctggccatgggtttagcaaccagatttgcctgctgcttcaaaagaaggtcgtgtcctggagatcatgtgtggcatcagctaataggacaggtaagtatggtg

SEQ ID NO: 9197 - DNA, 579 bp, Arabidopsis thaliana columbia
gtcgtttgctttatctccttcatactagacctgaattaagttactctgttcatgtcttatctcagttcatgcaaactcctcgtgaggctcatttagctgcggccatgcgtattgttcgttttttgaaagggtcacctggtcaaggaattttgttaaacgcggacacagaattacaacttgatgtttattgcgattcggattttcagacttgtcctaaaacaaggagatctctaagtgcttatgttgtgttacttggtggttcacccatttcttggaaaactaagaaacaggacactgtctctcactcttccgccgaagctgagtatcgagctatgtcagttgctcttcgagaaattaagtggctacgaaagttgttaaaagaattgggtatcgaacaatatgcgcatgctcgctttatattgtgataataaagctgctattcatattgcagctaatccggttttctatgagcgtaccaagcacatagagtctgattgtcattccgttcgtgatgcacgtcgtgacggcattataacaacacatcatgttcgcactaatgaacaattggcggacatattt

SEQ ID NO: 9198 - DNA, 495 bp, Arabidopsis thaliana columbia
aggatcccccaagcattttatgtatcacgtcttatgtgctattacttacagtgagaacgtcggctagcgtagtcttggtatcgtcagagccgatacgagcattaagagtggcggctgattgagctgaagccgcaacaccgccgggcatgatattggtccgccccgtagctctaacctcggccgcttgaatggcggctgcgtcactccactccaccggcttattccctgccgtgagaaccgctgcctctagagcctctccaattgttatggttccttccgatttcagaggattagctaccacctttttctggttaacttctccctccgcctacaaatttaacgttctaattatacaaattatgatattaacacaacagcgatgatactagcacaaaccactagattatatagtcacagatcaacctgttcaccggagcctcggctacaacacctttctctttgtcctccgccgccttaatgcctccctccgttgtc

SEQ ID NO: 9199 - DNA, 579 bp, Arabidopsis thaliana columbia
tcaattaattcgatggtgagcgttctcagcctgaccataccacgaagatcctccaagctgctattctttgttgagaaattctctaaagtctccaattttactagattactcaattctagttttgtcttcctctcgataaggcttggtaacgcaaggtatctcagttcttgcatccccatcaagacattgggcacaaagttggatcttgatgataatgagatatgtaaattcagatagatcaacaacttcagatttcctagtgagtaaggtatatgagttacctctgcatactctaagctcaagtatcttaagtggatgagctttccaatgcaagaagctaacttccctcctttcaacttggcttgaacgagatctaacacccttagaagttctaaccttgtaaagcttgaacctgccatgttccaacttcccaaggtaacaaccacgagagatcgaagttttggattgtttatatctttctcaacatgtaaagtagtaggatattggtagacaagcctgcgagatgtgacagtagactgaaaatttgcagttgaaggggggttactggtatttgtagga

SEQ ID NO: 9200 - DNA, 628 bp, Arabidopsis thaliana columbia
attcattccggttacaactttctgatacattagaaaaagcataaccagaacagaaccaggtttagatactcttggcactgttctggaaggtccaactccaaatgtcatgacgttcaacgccacggcccatggaccagaaaaaccggggtacatattttgaagaaaaccttagagagatctaaatgggcaacgatcaaaggcttcttaggtatcttaacagtttctggcgcgagagtaactgtaaccttggagtttctatactcaatccaagccttgtacctctctccattactcagcttgaactctttaaacgaccagtgtttcattttcccaattcctgtctgaacccaataaccagctttcacagcaacaacggaagtaacagagttgatattaatcccgacatggttatcattaatgtctcaaacctttgtctgaaaacgtcgaattcgacagcaaagatgtggtttttggggttgccattgttggttttgttgaatatcgcgaggtaatcagcgggtccaggaccgtcactttcaatggaagggacgacaacaaaagcaaggccgtgaccaggggcgggtttgatacgagtagagatggagaaagtgaaagaagttcaaatgga

SEQ ID NO: 9201 - DNA, 437 bp, Arabidopsis thaliana columbia
ctcaagcagcttgtacttatttctgaataagcagcaatcattaacacacgaatgaatgttctggtaacccatatcaaaggatctcaaaaatctcttcacctcatatagtgaggtgtgtaagacattatcctctagtagcatctccggcaatgtctccatcagctcattgaagctcttgtcagacaagccattctttgtcttaagtctgaataaggatactatagcagacagcttgatgtgattaacacaagttggatataatggcgtttcaacatctgcaatctttgcaaggaagtcatgttctttcttgtcatcaccctctgcaatctcaagtttcaagcaaactcctcatccacaaactcagcagcttcatataacccgacaatctcatcattccactgattgtgattgcttcacattcagccattggtatcaat

SEQ ID NO: 9202 - DNA, 547 bp, Arabidopsis thaliana columbia
aaagaaggatttcccgtcatcatccaacgcgatattcaggcgtaaaccctctaaagccgggtcgaaggcatagagctgcgcgcgaaatgtttcaacattgctcgcaggtacgctgatttgcgcgttaatgccctcatgcgccagatacactcgcccaaaaacattcagcgcggtaaacagctgatataaagcgtcacgggtcgccttaggatcggcgatgtggaaatacttgtaaaacgaaatggtggttcgcggttcgctctcagccaacattttggcttttagcgcgtcgttggaaatgcggttgtgtaacactggcatggtgtacggttcctgcgagatgggaaagtaaaaatacgcggcatgatatagcaattatcgataattaacatccacacattttacgctacatttgcgcattaaaaattatttgttatttacaagcgcggcaatttcgcccagtcttcagccacaaattttggttgcgggcgaaaaaatgcgacaatacatacaattgcccgaataggttgaaaaacaggattgatat

SEQ ID NO: 9203 - DNA, 572 bp, Arabidopsis thaliana columbia
tagacgattccccaagctgctcagaaacccgagagtgatgaagaaagtgcaagacgagattaggacaacacttggggacaagaaacagagaatcacagagcaagatctaagccaagttcactacttcaagcttgtggtcaaggagatatttagattacatccagcagctccacttttgcttccaagagagacaatgtctcatgtcaagatccaaggctacgatattcctgtgaaaacacagatgatgatcaacatctactcgatcgcacgtgatccaaaactatggacaaaccctgatgagtttaaccctgacaggtttcttgacagctccatagattacagaggactaaactttgagctgttaccatttggttctggccggagaatctgtcccgggatgacgctgggaatcaccactgtggaattgggactgttgaatttgctttacttcttcgattgggtagtgcctgtagggaagaatgtgaaggacatcaaattggaagaaccaggatcaatcattattagcacgaagacagcccttgagcttgtccacttgttcacattgaaatgac

SEQ ID NO: 9204 - DNA, 612 bp, Arabidopsis thaliana columbia
aggtctgaaggaatcagggtttcagacagcatcatgggacggatcatgaaccagagatcaaacaagaaccgaacacctgaggagaaagaggaggattacagaaggatggggctcgatctcgtctcgggtctaaacacagagctacgaaacgtgaagaagacggcaacgattgatctggaaggtcttgttacctcggtgtccaatctgagagatgggttggggcagttgagctgtcttgcgagtgagaagctgaaaggggacgaagaaaacagagcatttgttagttcgatgagctcgtttttgagatacggcgagaagagcttggaggaattgagggaagacgagaagaggataatggagagggttggagagattgcagagtattttcatggagatgtgagaggagatgagaagaacccattgaggatctttgtgattgtaagggattttctagggatgttggatcatgtttgtagagaattgaggtgtgttagggtcccaatagccctagccctttggctccgtttcgatgagcaatgttgactatgaacagaggtgtgactgtttggtttctgtagaattctttttatgaaattctgagttgttatgata

SEQ ID NO: 9205 - DNA, 544 bp, Arabidopsis thaliana
  unsure (1)..(544): unsure at all n locations
ctaaaggttccaccagcaccataaaattggcgtcgtcgaaaatctcataatgcagcgcctgtccggcatcattataccagacggagagcggtgtccaggcggcgcaggtggcggcgatcgtcggaacggcaacaaacggcagaccgagacggcgggcgagggctttcgcggtgtcgagcagtgcaccgccaccgacgccaatcaccacgctgcggtcgtcaccggactcagccgccagttgttgtacatcgctttcgctgcaatgaccgcgaaacaaaatatgctttgcccctggcagtccaaacgctggcggaagtttggtttgcgccgcagcaatggcgcgtttgccgtagatccacaccgcgcgagaaagttgttcatcagtgaaaaaatcgtgcaggtgattgaaacttcctggatgtgaaaagtagttagccgggccgacgaccacgcggataggattgtgaggcatgttgtgttgccttattgttttatttagacatctaaacgtcttgattgcanatactagcatcgtgttatagtg

SEQ ID NO: 9206 - DNA, 629 bp, Arabidopsis thaliana
ttttaattcttgtgggaataaaatttcaaaggcaggaacgggaagtccaccaaaaaggtgttattgtaaggaatcaaaacatgtcacgtaatcactaagaattatattgtaattatttttaatccaattcttattaattaccttttttttattaaggtcacttgtacttgtctctgtctctgcaagtctcatcagaagaggaagagaatcaatggcgagttgcttcagctacgtgtcttctcgtaacaaatgttaccaatacagcttctctcgtgctggtctccgatcatctacctccgatcttggcgacggcaccgtcttccactgttggatcccacttactcacatccacaccaagcccacgctcctcctccttcacgggatcggagctaacgctatgtggcagtgggaccgcttcatcgaccgttttatcccccgcttcaacgtctacgtaccggacctcatcttctttggcgactcctacaccactcgtcccgaccgctcagagtctttccaggcgacttgtgtcatgaaggcgatggatgcttacggtgttaggctcatgaccgtcgctggcctcagctacggtggttttgtggcctactccttggcgccgagtttaaggagag

SEQ ID NO: 9207 - DNA, 592 bp, Arabidopsis thaliana columbia
atcaaaaagcttcacgagtaactggttatttttccaaagtaaagctcacttttattcaacaaactttcacaaattggtacaccaaacaaatcagtaatcaatactagtatttcaggtcatcaaatattgtatagatcgaaaaacataagcaaccaaatgttgttgctctcaagagacacaataagcagaaggaaatcctcggtatgaatccgcaaatgcagctacgttccctggacgcgagaacaccaactgcaatgttttttactcaaagttgtcaaaacctcacatttgattgcaagaaactaaagaagcatgccttattttttatggtctatgccaatgttattacctggtagtctccaagagtacgagtcttgaatccagctgcgcaataatcaaaataatattcccatgtccttacgaatttatcatcaaatccaagagccatgatttgtctgcacaaataataatagttttgatagaaatgtgagtaaacaggacaaaaacagaggaaatgttttaaatatcttttatcttacttctgtctctccaagaagttcttcctccacaatctcaatgtttggtagtaatg

SEQ ID NO: 9208 - DNA, 639 bp, Arabidopsis thaliana
tagctgatcttttatctattctgacttccttcaaggttttttatttctttctctttttcttttcctcattatgtctctacaagaacataaatatatacatatacgagatagtgaatgtgaaattggcagattttggggacgaatattttgaagcgagagagaagggggactacaaagtagtggagaagaggaaaaagaatcttgagagatataaaagtgttcttgactccaaaagcgatgaagaagctttggtgggctactctctctctttctttccctacttgcttcacaattatgaaatcatttggattgattttgttttgatattttgcgtttaggctaattacgcagaatgggaaccgcctcatggacaatttaggtttaggcatccatggaaacaatatgttgccgttggtgcattactccggcagtgtgcctacaggattgatgccttgaattcatacatcagctcagattttcaggtaatcgctaactttttgttaggtgtttgcatatttaattaaaacaaaatttgaaaatacataaaagaagaaaaactaatatgctattatgctataactatttttgatctaatacaatatatatatctatatatatatatatgtatatatatacatg

SEQ ID NO: 9209 - DNA, 1041 bp, Arabidopsis thaliana
tccccggtaatgttcgacgcccggggaaagctcccgagaaatcatggatgcacagttgcacatccaacttggtttcaattggaatatgaatataaataaaaataatgccacaaacaaaattaaatgctccgagtatcgaaatgaggaactcgtttggaaaaaaaaactaatggttcaagtttgacaaagaattaatatcttaagagcatattggaatttcaaatttattgcatatgctttgacacacaaaaaaaagaaaaaagaaaaaaaagagaggcatatgctacgtttataactattttcttttaaaagattaattaataatctcgtaagttcaaaacaaaactcaacttctgatctgggttatataagcccaaacccaagcccaattgtaaaattctaatcccgataacgaacatgggatgatgcagcagttgacaaaaaaaaaacatatctgttggaaaaatcaaacaagtcattagttccaacggatataggctacagcaccggaatatccacaattccacataaactattgactattaatagctgcattattattgtaatctctcaagacaaaaaattagtatatcttaaaatcttattttattaatcttcgcctaagcgaacaagcataggactacaataaatttcaaagttttcaacattcttcgatttcataaaatttggctctactaactaaaaagagtcatttcagacaaagaggtcacgcggtagtccgcgatcctcctccgtctcctcctcctcaacaccgtcgcaatcgctctaccagtaagtcacttccttgcaaaatgcaaatacacctacaaaccgtatactacaaataaattgcgacatctttaatgataagaatgttatttaattagttggacaatgatgaagacaagtgcgtgttcacggtttacatacgaaccggtacggcatggaaagccggtacagactccgtcatgagcctccgtctttacgacagttacggtcaagacgcggttatcccgatttggtgcatggggaggttaatgg

SEQ ID NO: 9210 - DNA, 460 bp, Arabidopsis thaliana columbia
ggcttcgctttcaagaaagacactggagacactagagagactccagccattgatgtctgcaaaggtctgttaggtgacaaggctcgtctcagcatctacgacccacaagtcactgaagagcagatccaaagagacttaaccatgaacaaattcgactgggaccacccacttcatctccagcccatgagccccaccactgtgaagcaagtctcagtcgcttgggacgcatacactgcaaccaaagacgcccacggtatctgcattttaaccgagtgggacgagttcaagaaacttgatttccagcggatctttgagaatatgcagaaaccggcttttgtttttgacggtagaaacgtggtcgacgctgataaactcagggagattgggtttattgtttactccattggtaagccattggaccagtggctcaaggacatgcctgctcttgcctaaacaacaa

SEQ ID NO: 9211 - DNA, 847 bp, Arabidopsis thaliana columbia
tagagtatacccaaatttatagacatgttttctatatacatctgtctagcttttctttgcagaataaaaacgaacttatattgcaaaacgcggtaaggaaagcactcaaaagaaaactatgcatcatcctacaacttcttcctacagataaggaacaaagaaagtcttacaaatattagatttaaacactcctcaccgtgctagggaacggatgcatccactgtgggagaacgaacgaggcaaagtttgattctaagatgtatgtcatatctctcgggcaatcaacggaattcagaatgcgacccgcgctgctatgttccacatccttgtggagcacaatgtctccattgtgtaagttaatagataacaagcatttgcgactccaaaggtagactgttttagcatcaaaagggtctgttcccaacggaatataatcgaaaccagtcttaatagaatccaaagatatttcgaatactagtcgccattgccagctctctagcctccatacacataacttgtcctctaaattaccatcaacttttggtatagagaatatgttcatatacatgagacatccttgagaagttgtgcaagttcttctgaatttcggaactttatctaaatcaggaaatggcgtacggcggcatcgatcagagcggctatcaacaacatagaaatcgatggatacaatgaaatcttgatactcggaaccgtgggcgagccagtaaagacttccgttcaagctaatgggattgttgactcttgagatatatagctgaaaggaaaagtgtcactgttgagactcacaagcctgtctcagatgaatatatgaggaaagtgaagttag

SEQ ID NO: 9212 - DNA, 400 bp, Arabidopsis thaliana columbia
tcggctcttctgttataagatcatagtttaaatgtaaacagaacatgccataattctgttattgagtaactttacttactcattgatcaatttacaaaaaaaaaatgaaacagaacaattttaatcctaagggtgtctgatgcctctaagcctattctgaccattattcttgatgaaccaccctggcttgtacaaagcaacaacatgtccaattgccaatccaaacaacaccccgggtccatacgctattgccgctgctctccactccaatatttctacttcttcttcttcgggctcttgtgtcgatggtgcgtcttctcttaaacagctttcatcaagaggaagaccacataaccctgaatatacttcaaatgaggatttaggctgcccaaggattcgt

SEQ ID NO: 9213 - DNA, 570 bp, Arabidopsis thaliana columbia
cgatgcgatcatgtaacagattgcaagggagattcggctgagagatattggcggtatcattgtggtagatttcatcgacatggcagatgaatgtgagttagaatgtcatttttattcatccaatcacatattcaaatattctcgatgtgcaaatccctttcttgaatgatggatgtcctgtatactcttgttttttatttttgggtttcagcaaataagagactcgtttatgaagaggttaagaaagccgtggagagagataggtcactggtaaaagtatcagagctgtctagacacggacttatggagataacaagaaaaagggtatagtcccaacttgtggatgtttatctctttctgtagagcttctaattaattcttttggcatagcacgccccctcgatttatacttattgtagtgaatctatttttttcacaggttcggccgagtgtaacatttatgatcagtgaaccatgttcttgctgtcacgcaactggtagagtggaggcactggagactaccttttccaaaattgaacaagagatttgtcggcagcttgtgagtgttat

SEQ ID NO: 9214 - DNA, 539 bp, Arabidopsis thaliana columbia
gctgtagccttccgcaacgggcacaatccttggataggtttcggaagaagaggaatgctagatgtttcgagaagaaagtaagatacggtgttcgccaagaagttgccttaaggtcagtgtgtcagtcttgagttttaccaatttatgccaaaagctgttactctgaacaaaattctttcaccttttctgggataaaaatttagtattcttgtatagctaaactaaaaattttctactcttctggctatgctctggttgcttaactacttcctcactttcgtgtgctatggattgaaaggaaatctgttcatattcaactagtttactatctagctagttttcttttatttgtttcaagaagtttggtgaccatgtaggtgtttatgtagagtagtaggcttcattgtccatggcttgctgtagtatttgacaatatggttgtagttgagcaggatagacatctgagtctttgttagtgtgataagtagcttttactggaaataatcgacatgtctatttcaataataagggataggatt

SEQ ID NO: 9215 - DNA, 543 bp, Arabidopsis thaliana
caacagaatatcttattgtcgcactgtgagcttggtggatggccaactttagcttttatgcttgcttcgctcttgttataccgcaaacagtttagtggagaacagaaaacactagagatgatatataagcaggctcctcgtgagttgttacagctaatgtctccactaatctgctgccttcacagttgaggtttcttcagtatatctcgagaaggaatgttggctcacaatggccaccgctagaccaggcccttacattagactgtgtcaaccttagactgattcctgattttgatggtgaggatggttgcctacccatattcagaatatatggtcaagatccttttatggcttccgatcgaacttcaaaagttcttttctcgatgcctaaaagaagcaaagctgttcggcaatataagaaggtgatatcaagatctttatcattgatctgttcattcttatagattgttccagtatgagagagttatgattgtcctaacttttcatctactgttgcaggcagattgtgagctggtaaagatt

SEQ ID NO: 9216 - DNA, 386 bp, Arabidopsis thaliana columbia
actcaaggttcaatgtcatgagtaaatactttaccacgtcgacaggagagccgatgcagacagctaagaatcctgatcccagtccaggtagaatatgtgtgacaaggttgtcagttgacccggaatcttctagatcgtctgaacacaatagaaaaaaggaatgttggttgcttcaaatatcaggatctcttatttagatagagagacagagaacatattagtttcatacctctttcacttgatcgtaactcgctaattcagcagcattgataatagcgtttcttgctacgttaggtccaagaccagtccaaagagctcggactccttcctgtcagagccacattaataagatatgaagtagagttgaagcaacttatgcacaatct

SEQ ID NO: 9217 - DNA, 440 bp, Arabidopsis thaliana columbia
gattccaggaactcatctttttccgcaaagagaacgtattcagcaagagaggaagttgaaaggagtcaagctgaatggaaatcacgtgagtatagaacaacaagtcccagagaaggctactcaaatagagagcgaacttctgtggtggttctagggacctctaagataggattcaaaattcaacaagttatgtaagaagttcccaaaaccagtagctccaatggcgtgaaaagacacatacaagagacaattttaggcaagattcctctgaaacttctagaacaaaaagaccacctctggaaaaggagtttgaaaaaatggctttagctctcactgacaagtcaccatttaccacagaacaagtaataggagaattaagggaagtaacggtccagtataccagctgttcggttcgacagagagtgctgccgaaacaaagg

SEQ ID NO: 9218 - DNA, 600 bp, Arabidopsis thaliana
gaccatcatggactatcctcgccattatgaaggttgccctttgcttacaatggaaacggtgcatcacttcctaaaatcagctgaaagttggttattgttaagtcaacagaatatcttattgtcgcactgtgagcttggcggatggccgactttagcttttatgcttgcttcgctcttgttataccgcaaacagtttagtggagaacacagaacactagaaatgatatataagcaggctcctcgtgagttgttacagctaatgtctccactaaatccgctgccttcacagttgaggtttcttcagtatatctcgaggaggaatgttggctcacaatggccaccgctagaccaggcccttacattagactgtgttaatcttagactgattcctgattttgatggtgagggtggttgcgacccatattcagaatatatggtcaagatccttttatggcttctgatcggacttcaaaagttcttttctcgatgcctaaaagaagcaaagctgttaggcaatataagcaggtgatacaagatctttatcattgatgtgtcatttatcagactcttccagtatcagagagttatgatagtcctact

SEQ ID NO: 9219 - DNA, 585 bp, Arabidopsis thaliana columbia
gtacatgtgtaacgctattcttttcagtattgacactaacgtgtatcacctttgtttgtgaatttgcaggaccaggaagatgataactttgccattgtgtttgcagccatgggtgtaaacatggagactgcacagttttttaaacgtgattttgaagagaatggttcgatggagagagtgacacttttccttaacttggcaagtatctcaattaagatgtagatgccttgaaaagatatagcagctctaatgtttccttgacttcaggcaaacgaccccactattgaacgtatcatcactcctcgtattgctctcacaacggctgagtatttggcatatgaatgtggcaagcatgtccttgttattcttacagacatgagctcttatgctgatgctcttcgtgaggtgaaaaaaccgatataggcatttcttctgtttttttcaaggcttaatttagtggttaacgttgataattgcactaggtttctgctgcccgtgaagaagtaccggtaggcgtggataccaggttacatgtcactgacttggccacatatacgagagagctggacgaattgaggggagaaa

SEQ ID NO: 9220 - DNA, 608 bp, Arabidopsis thaliana columbia
ctggcctgtcaaggaggacgacaaatgccgttccatcaaattcgctgttgattggggcaacttgcatatgcgaaaggtatgatattacttaaaacgttatcgaattactctggggctgtgttaataactggttctcaaactcggtataatcttataatatctacaccaacacacacacatacacatgtccatttatttcaattaacacacattaggttgtgaatcctcacaccattagttgcacttcatgaatgtttgattgaaaatcgggtataagtactcctaatgttaccctctcaccgttcttttctcttaccaggcacaagacataggtaagaaggcaagtgagtttgtgcaacaagaactcaagatggactatgtgtacgattacatgtttcatctcttaatccaatactctaaactcctccggtttaaacccgagatccctcagaactccactgagctctgctcagaggcaatggcatgccgagggatggaaatgaacgaaagtttatgatggaatcctcgtaaaacgccagctgagacaggtcctgcgccatgccgctccgtatgacccggcacattttatcagtttgaaaggagcagag

SEQ ID NO: 9221 - DNA, 409 bp, Arabidopsis thaliana columbia
cataaaatcatattggagttgtaagtcagtacaatagctagcaaacttacaatcttttttattatataaaagacagactctaaccaaatccaaacctaaaaagctctcactaaagatatactattattatatagtgattatgaaaacaacaagcgaagataacaaaattatcacctaattaagttatacaataataagatattatcaacctcttccaaatggataattttgctcaggaaacttcgcctcaccatccaaagaaactccgccacgagcactgccgcgaccaccaccaccaccaccgcgatttacatttctcaccattcctccaactccaagaaaatctaacgttaacttgtccgagccgctcatatttccattgtctccaaattgaacgtcgaagatactg

SEQ ID NO: 9222 - DNA, 530 bp, Arabidopsis thaliana columbia
gtcaatcatttccttttatcatctttgagctggtgtcttgtcctgctaattccattgcacgggacattgcggagagtgttacaagggatggtcgttttaacccgtacctttctgaaggtggaccggtgtggcttcttaatcggttacgtagtgaggcgcaacgtggactggcgttgcttcgtaatcggttacgtgctgatgaggacgaaggtggaccggactgggttcaagatctgttaagtagtgagccacaaggtggaccggcccggtttcataatgggttacgcaatgagtcgcaaggtggactggcctggctttataatcagttccgtaatgagctccaaggtggaccggcctggctttataatcggttccgtaatgaaccgcaaggtggaccggcatggctttataatcggttccgtagggagccacaaggtggaccggtccggtttcataatggttactcaataagcccaaggtgaccggcctggctttataatcggttcataatgagcgcaagtggaccggct

SEQ ID NO: 9223 - DNA, 757 bp, Arabidopsis thaliana
gactctagaggaagtgtgctctaaagcgtattctgggccaggaccattgccagaaatgcgcgctggcgtgaccgccggaaagctcggttaaccgacgaacggcaagatgattgatccgggtctggttcatggcgacattaactcgtgcattgtcttcagcggagagacgcccccagagtgacagccagggattacgaccatacgaaaccagctcctggactgtgatcccctctggcgttaaatggtgctgaggcagcagcgaaacctgcgggccaactggcgcgatgagagcatatttatgggattatcgccgagaaatacggtgccagactgcggcattaaaagccgcgaaaaacagtttaacagcgtcgatttcccgcaaccgttaggaccgatcagggcggtgatcttccccgttggcagtgagagtgaaacgtcgttaagtaccttgtctgtcccgtaactgaccgtcagattttcagttcgtaaagtcatttatcgcattctcacaagcaaccagacaaaccacggcgcaccgataatggcggtcagcacgccaaccgggagctccagtgggggatgaataattctcgccagcagatcggcaaccaccaacagcaacgcacctgtcagggccgaaacaggcagcagtctgcggtgacgtccaccggtgatgtacgcatcatatgcggcaccacgagaccaataaagctaatcgcggcaggcgccacgccggtagatgtcatctttgatttta

SEQ ID NO: 9224 - DNA, 505 bp, Arabidopsis thaliana columbia
cgtttggatgattcacatctcgtaaaatctcgatctctctacagatctgacgtctcacagtctcctcgtggttaccgtatatcaccttaagtgcatatagacgagaactcggacggtgaatcactttgtataccgttccacctgctccgcttccgatacggttacctctcactaaatccgaatagttcttcgcttctatggagctgttagtgttcgttgaagacgccgaaccaccagaagacggcgcagatccactagagccaccggaaccaccggaagtaggtgggagaggaagaggtacagcgagagaaacatcgcgttgaggaagcggtaaggtaagatcaggacggcgacggggacggcttttcaccggaacggaaactcctggaggcgattgaatcggtctcatcgcttttggaatcaaaagttcgattttcttctacgatctgaaaatttaaaagctcgattgaagattgaagtaatgatcttcgtcgtttatagtagt

SEQ ID NO: 9225 - DNA, 641 bp, Arabidopsis thaliana columbia
  unsure (1)..(641): unsure at all n locations
gccgcgttactaacaatcacattatcgttactgtatccatggaagatattttcaccttccttaacatcacccaaatgagaacaagctcctaaagcagcaacaacagttacttcacttcttctaattccttccgtttccattctcttatacaactccatcgcctcactcgctcgattaccagacactaaccccgcgatcaacgcgttccacgacgcaacatctctcacaggcatttcatcgaacaacttatacgcactaattaaatctccgtttttagagtaagcatcaagcaacgtagtacaaagaagcgaatcagcggataatccccgacggttaatctgacaatgaagttgatccatagcggaagaacaaagcgcacgtgcacaagctttaagagtaaaagaacaagtcaaagcatcgactctacatatagccgacgatgacgaagattgctgcaacatggaacgataccatgaaaacgcaagtgaaggatgagaacttccggcgaatccgcggatgattgcgttccaatcattggttaaaggtttagggatgtaccggaaaatttgtacggcgaaggaaaggtctccgaatggtgagattgcgcacgttcgagaangacgagacggagaaaggaagat

SEQ ID NO: 9226 - DNA, 550 bp, Arabidopsis thaliana columbia
tttttgttcccaatgctcgaatttattcttctacttttgctgttacatttgagcagattggtttgcaccaaacacagtagatcgacttgaaaggcaagtggtgccacagtttttctctgggaaatcgccaaatcatacacccgaaagttatatggaattcaggaacgccattgtttccaaatatgtagagaaccctgaaaagacactgacgatttctgattgccaaggattggtagatggtgttgacattgaagattttgcacgagttttccgttttcttgatcactggggaataatcaattactgtgccactgcccagtcacatcctggccctttgagagatgtatcggatgtgagggaggacacaaatggcgaggtcaatgtgccgtctgctgctttaacatctattgatagtttgatcaaatttgacaagcccaactgtagacacaaggggggtgaagtctattcatccttgccaagtttggatggtgacaccctgacttggacatcagaattcgtgaacacctatgtgatagctattgaaccattg

SEQ ID NO: 9227 - DNA, 512 bp, Arabidopsis thaliana columbia
tcgactctccgagaaaatgtatttgagtaaaacaacatttactttaagttctgaaaattatataacacggtgaggatttttggttgcagcttatgtgcaactattacaccttcagacaagacggatcaagagcattcacaagattctggaagtttcaggtatcttatttttgctacaattatttcctgtcttcttaagacaagatgtgcttaggaaagttttgtgttgtcgttgtcttgatgggtttgaagtggatcgatggatgggaaaacatggacagacttgagagtccatgaggatgaccaaataatgtgcaaggccggtcagtttgcatcatggccaatcaccgcagctaatgcattactcccctttaggtttttcaggctggttctgaccggtccaactgcagatacatcaactccgtggaacttttgcatttgctacttggagctctacggttacgtccgttgaagcgctctgctatgattgaccttttgactgtgtctactaca

SEQ ID NO: 9228 - DNA, 521 bp, Arabidopsis thaliana
gcgtttgcgttcttgtattttctaatggcaccatcaaacgctagggttcctgattcttcccccaatgtggtaacgcattgtatttgaatatcgccatttgctcgatttcttcaatgtaatcctcgtatagacgcggtgccaatggatcatttttgcttctgtagtaagttaggtcaaaatctaaagctttttcttcttttccgagaaatgctagagaggatgtgacatagcggatgagaataccgttgctgccttcaagtacgcataaagatttcggttcgatcttcacaagtgctttgatgtcgttgatgaaacttttgacatttgtgagagaaacactgaatgttgtttggtgaaagaattggccttttatccgtggatcccatggacaagccgtgattagtccgtcttgacgactgtctagacatgaacctgacgacatcatatggttttgcattccgatgaccggatagcctgtgaatattaggcctgtccatggaaattactagtgaaagttttgt

SEQ ID NO: 9229 - DNA, 1784 bp, Arabidopsis thaliana
tagtaacgtccgccagtgtgctcttaattgtatttaatattacatgtggtgaacctataagtaatatataaacgagagtacgaggaaacatttcccttgcaatttgttttgaaaagtttcttacaaaatggcattttggttaagtttgatatttttctgcttttgcacatttgcatcctcaactccaccggatgatccggtcaagtgtgagtcaggaaacaacatgtgcactgtgacgaactcgtacggagccttccccgaccgttctatatgtgaagcggcaaaggtggagtaccccaagaccgaggctgagttagtctctatagtggctgcagccactagagccggccaaaaagtgcgggttgtgactcggtacgttcacagcatcccaaagctcgtttgtactgatggaaaggacggtgttctcataagcaccaagtttttaaacaacgtggtgggaaccaatcccgaagccaagactttgacagttgagagcggtgtgacgttaaggcagcttatcggagaagcggctgaattggagctggctttgcacacgcaccatattggtggggactcacggttggaggattgatggggacaggtgctcatggaagttcgttgtggggtaaaggaagtgcggttcatgattatgtgagtgagataagaatggtgagtcccggtttggcttctgatgggtatgttaaggttcgggttcttagcgagacaatagatcctgatgaatttcgtgcagccaaagtttctctaggcgttctaggtgttatctctcaagtaactttccagttgcaaccaatgttcaagagatcgttaacctttgttatgcaaaacgattcggatttcggagatcaagccgtgactttcggggaaaaacatgagtttgcagatttcttatggttaccaagccaaggcaaagtggtgtatcgaatggacgaccgagttccggtcaacacttcaggcaatggcttgttcgactttttcccattccgtccacaactctctgtagcgttagcatcattagatccttaggtaaatttattctttgtttctcaagataactaatacaaaatatatttgatcatttgcatagtttttttggtaaaaaatatttgatttgcatagttataatgtttcttataaacaactgcttcatgatatgaagaggagagtgaagagtcatccggagatgcaaacgacaagtgtgcgagacagagcaaataacgtcgtttttgttttccactcctacggtgtgactaacaatggtaaaaatattcgttcacttacttatgcatctttctattgtttccatatgtatgagactttacaactttctatcacatattcatttgtaatttccacgggcaggtatggaattcacaggctatccggtgatcggaaagcaaaaccatatgatgtcgtcgggtacatgtctagacagccatcaggacggactgatcacgtcttgtccttgggatccacggataaaaggccaattctttcaccaaacagcattcagtatccctctcacacgtgtcaaaggtttcatcaacgacatcaaagcactcgtaaagattgaaccgaaatctctctgcgcccttgaacgcagcaatggtatcctcatccgttatgtgacatcctctcctgcttttcttgggaaagaagaaaaagctttagattttgacctaacttactaccgaagcaaagatgatcccttagcaccacgtctctacgaggatttcatcgaagagatcgaacaaatggcgatattt

SEQ ID NO: 9230 - DNA, 536 bp, Arabidopsis thaliana
cccataaagaacttccgtgagcacctgtccccatcattcctccaaccgtaagtccccaccaatacggtgcgtatggcaaagccagatcaaacttagctgcttcttcgatcagttgccttagagtcacgccgctctcaaccgtcaaagtcttggacttccgggttggtggtcaccacatggtttagaaacttggtgcttatgagagtcccgtctttaccatcagtacaaaccagcttggggaagctgtgagagtacctagtcacgacccgcatttcttggccggctctagtggctgcagccactatagagaccagctcagcctccgtccttgggtactccacctttgctgctttgcatatagagcggtcaggaaaggcgccgtacgagttcgtcaccgtgcacattgtgtttccgaattcacagttgacaggatcatcaggtggagattaggaagcaatatgtgaaaaagcacaagatcaaacttagccaaaaggacattttgtaactttacaagataataattgacaatgtttgaa

SEQ ID NO: 9231 - DNA, 1084 bp, Arabidopsis thaliana
ctatatgtctcgttttttccccttcatgatcccaatgaaatacgccactatagtacatataatcttaatcatatatctctctttaatttgttatgccgcatctccggcaaaacctagatgaagatccagcgagttaatacttctcatctgatcagaacgagaactcagatctctctggaactgaatcatgttcggtcgaacaccgtacagcttacccatctcaccgctttgttcattaagatcttggcacgtgtcattattaccgaagttaatctgcgacgacctcgacgaccaatcttcgttgtacacacccatctgatcattattcacgtgcatggaggagaatgcacaatacgacggcgttttgtattgtctctgaaatgacgtcgttatgggttgttggtggttggtgagataatagccgatgctggctcgccgagcttgaagctgaagcctcttcttcttcaacctctccttcttgtgagcgttttggtgacctcctaaggcttgagaatttgcaaactctttaccgcagtattggcactcgtgtcttttcatcactgttaacgacgtcgtgtttgtggacgagctcacgctttccgccgtcgtgatttccggcgtacgactgccgctgatgagttcgaagccgaatagctttatcgtcttgtcggaggacgaacctgaagaactttcgccagtacgagacattgtcggatttatagacatatatgtgtgaacgtatgtgtttatcgatgggtttaatttgcttaaggagatgtgtaaatgatcttctttatatagcaagagagagacgggggatatttagtttaatagtttgtaactaatgatgcattgcatctgtaatagtataatatattgtatgtctaaagaaattttatattgtatgaagggttttttatattagtcatgaacagcatcaagttatagtattttagggtttataataaaattagttgtttgaatctaaggtgtgacgagaaatgatcttggaaaataaaccttgataggtacaataaatattacactaacatgtaataggttttatagagatatatgtggatac

SEQ ID NO: 9232 - DNA, 490 bp, Arabidopsis thaliana columbia
ttgtctctttttagagtttaaataagatgaattataggggaagctctttagtcctcaccctcactgaccattataattagactatagagcgagagagcatggagtagctaggcaagaagagcacacaaatcaagcatgggaaactgtttattcggagggttaggcgacgaagaggaagacttattgatcaaagtcataaaatccgacggtggagttcgtgagttctactcccccgttaccgcgggctctgtctcccacggattctcaggccatgctcttttctcggcccttgatatcctctggaaacccctggctcacgaccatctcctcgtgcccggtcagtcctactatctttttcccaatattgtcgccgacgagttgaagacttttgtgggaagctgccacgtgagatccatcagcgagtccttgtctgcgataactccgtacagaatgtctatggattacaaccaaagggtgttgaagcgatcat

SEQ ID NO: 9233 - DNA, 450 bp, Arabidopsis thaliana columbia
tctttgcccgtagaagtttaggcaacgttagagcatatgcagtcaattagcttagcattcgggcaaaacattctcaataggtccaatggtcatgcctaatgaccttatgcggatcactacatcgctgaacaaagcgtagagttctatgtcataagtcggatagttactgtagcaccatcgagattcatactaaagaaggcttaaagcttcttataaagtatcaaatcaactcgtctaactatactagcggcattacattcgattacatcggattaagaagatcgggtaagatcaaaataggggcattagtaagcatcactttaagtgcttgaaaagcattctcttgagcttctacacaattgaacacttcatctatcttgattgctaaggtgatgggtgagagcttggtgcataaatctatgcataacgcctataaaaatcggcaaggcg

SEQ ID NO: 9234 - DNA, 524 bp, Arabidopsis thaliana columbia
  unsure (1)..(524): unsure at all n locations
nnnnnnnnnnnnnnnnnnnnntaaaggtttggcttcgctttatagctggaaaggggatttagttcccgaaggtcgcgcgatggtctacaggaggcatctggcggggagcttcagtatgatcccaaagtttatgatgaatatcgtaagacgaagcgggcggggcggttgaacaatgaaaatcactcctgaacaggctcgtgaggctctggatgcctggatatgtcgaccaggaatgacacaggagcaggcgacgatattaatcactgaagcattctgggctttgaaagagcgcccgaacatcgatgttcagcgtgtcacatatgaaggtggcgcgattgatcagcgagcgcttggcgttaatcgagtgaagatatttgaacgctggaaggctatcgacaccagggataagcgtgaaaagttcacggcgctagtgcctgcaattatggaggctacactggatgatgaaaagagtgtccatgaacgagtggataatgcccgtattgatttacgctcaaaatactatg

SEQ ID NO: 9235 - DNA, 667 bp, Arabidopsis thaliana columbia
ggtcgacacgatccccaatcaacattcggctgttatcagtttgctgccttcttctcctccaaaaaccggatcatcagaaaatccgtatctttctggtgaaatagagtcagccgtagaaacaggtgctttggttgccaagggaaaagggtctctccaacctagtggaaggggatcttttatgtatggagggacacagtttatgggccctgccgggatggcagctggtcacggcaatccaaatttccctgcttttctacctggtaagttgttcttgaatgtcattgttcatcctacattgtaatggttgaaagacatctttcagaatcaatctatgcatgctagtgaaattgagagctattgatgctgagccgcttggcctggttgcccatgtctagggccgcttgagaacggcacctttttgtacaggtgctaatatgcacgcctgactagtttaaacttgtttgttttcattttcatgttcagttatgcaattcggtggtcagcatggtggggtccaacttttggaatggctcttccaggttatttccaccagaacatggtacaggaaatcctgagatgacatggtatgcagtccacagctatgttttaaaagttatatatttggtgcatcttagttgattgctgcatggttttgtaatttgagagg

SEQ ID NO: 9236 - DNA, 468 bp, Arabidopsis thaliana columbia
tcacctcaaggtatatagttcgaatcatttatgtttgttttcttttgaattcaacttttttcaccagatattgactctgttattggtatatgtaaacagatctacccggagtggttttcatcttgccagattcctacattgatccccagaacaaagagtatggaggtgagctggttttttttacaaactggtcttattttggatatttgttgttgggactctatcagcaaaattatgtttcttgttttcaggagataagtacgagaatggagtgataacacacaggcgaccacggattcagagtggcagacaagacctcgtcctagatttgaccgttcaggaggaggaagtggtggtccccaaaacttccaaagagacacacagtatggtcagcaaccaccaatgctaggtggtggagggagctatggtcctgaacagggctatgcgttccaggacaaggtcagggaa

SEQ ID NO: 9237 - DNA, 535 bp, Arabidopsis thaliana columbia
tcaaaggtacaacatctaaaaggctagagaagaaaggttccgcttttactctaccctcaggagaagcatgtgtggcgattcccaattcgcttattgagaagcatcagaagtcttgggactcgttcatcctcgggcaattttactctgatccccctgctcagggtactgtccataccattgtcaatggaatttggagcaagcagtttcgtgatgtctcagtctcgaagatggagggaaacgcgttcctgtttcgcatcccaaatgtgcaaacccgtactcgcgtgctcaaccaacggctttggcagattgatggacaaaccatgtttgttgccaaatgggaacctgggctccgccaggttaagccagagctcaccgtctgcccgatctggctggagctccgaaacgttcctgttcaatgcttcaatgatgacgggttggagcacattgctagtctcgttggtgagccgaagtttcttcacccgccactgcgagtaagactaatttggaagttgcaaaggtcttcactattattgac

SEQ ID NO: 9238 - DNA, 581 bp, Arabidopsis thaliana columbia
  unsure (1)..(581): unsure at all n locations
nnnnnnnnnnnnnnnnnnnnctaaaggctcgtcagtgggctcttctatcttgccccggggacaggattcatcgtggggagtttagtgggcgggcggttatcagaccatacggtgaaacggtatatcagaaagcgaaatggcctgcgtctacccaaggatcgattgaacagcggaatcgtctatttctttgcggtattgccgatctcaatggttctttatgggtggtctctacagaagcagtttggagggttggccttgccgatcatactggctttcttgattggtgctgggttaatgggagcgtggaacgggttgaatacgtattctgctggtgagttctgtctctttcttcttttttctttcatcccattcattctattctattcaatattctttctatattgcttatttattgattttcaatactaattggatacccgtaacagaagtaattccctctcaacgcgccgaagctgtctgcagcaaatatatcctgcaatatatgtttggcgctacggctaccgcggcagtggtgcgctgatagatgctattgggattgggtggtctttacgatatgtgag

SEQ ID NO: 9239 - DNA, 796 bp, Arabidopsis thaliana
tctcataaaactcgtcgctgcaacacttataacttgtctcgcttttcgtttcttcgtcttccgcttcggccaattttccccagttcaagtgtcggtgaccggaaactccaattcccagatttctccgacgtctgttatcttatcggataacgaagatcaaattcccgtcggtaagatttcaattatatcaataacattaacgatttcgctgtgtagaattttgttaaccttgttttttacggaaacttctgagatctagggttcttaaagatagtttacaactttagaagagttttaaatggttcattagcttctgttagtttgtgatgataagaatctgttttgttgtattagatattgaggtggagaagtgtgatctatttactgggaaatggattaaagatcctttgggaccaatctacacgaatgagtcatgtggtatcgttgtagatgctcaccagaattgcatcactaatggtcgacctgattctggttttctcaattggaaatggaagcctaatgactgttccttgcctcggtttgattctctgagatttctgcagcttatgaggaataaatcttgggctataatcggtgactccattgctcgtaaccatgtcgagtctttgctttgtatgctatctacagtaaggtttttagctattgcttgctagctatttgcagacttgaggataatgagatttgtgattgtaagttttgtttgttttttccatgtttcaggttgaaaaacctgttgaagtgtatcacgatgagaactatagatcgaagcgttggc

SEQ ID NO: 9240 - DNA, 481 bp, Arabidopsis thaliana columbia
tgcatgaaataggctttttgacccgccaacttcatcagagcttcatccacctgcaattgaacataatatgtaagcgtgaagcagtgtaatttagtaagagtaccgagcattgcaccaaaactaagccagattaaacttatgtttacctggaatccttggaatgctttccggcgagcttcggcttcatccttttgacccatactggcccatacgtctgagtacacaacatctgctccaataacagcttctttaggatcattggtgatctctatcttacttaatccagcttgctttgcctttgaaactctttccttgtctggttcatacccttttgggcaagcgcagacaaagtggaatggaataacggatgccaattctaaccaagagtgaaccatgttgttcccatctccaacatacacaaccttaagtttgttgaactggtgttagtatagatgacacttttgtatgaccttacatgtat

SEQ ID NO: 9241 - DNA, 588 bp, Arabidopsis thaliana columbia
  unsure (1)..(588): unsure at all n locations
ccggggctctnnnnnnnnnnnnnnnnnnnnnnnctaaagccgctgcgctgagagcgatgggtatcattgctccgcgtctgacagaactgacaactgatcgactccatcatcccggaaccactgggtggtgctcaccgtaacccggaagcgatggcggcatcgttgaaagcgcaactgctggcggatctggccgatctcgacgtgttaagcactgaagatttaccacatcgtcgttatcagcgcctgatgagctacggttacgcgtaattcgcaaaacttctcacaaagggtcacttcggtggcccttttttatcgccacggtttgagcaggctatgattaaggaaggattttccaggaggaacacatgaacatcattgccattatgggaccgcatggcgtctttcataaagatgagcccatcaaagaactggagtcggcgctggtggcgaaggctttcagattatctggccacaaaacagcgttgatttgctgaaatttatcgagcataacctcgaacttgcggcgcgatttttgactgggatgagtacagtctcgatttatgtagcgatataatcagcttaatgaat

SEQ ID NO: 9242 - DNA, 771 bp, Arabidopsis thaliana
caaccaaattcaaacgactccacccgattggcttttgaacgttatgaggaacgagaatggctacaatccgaagctgatctcaacgagggaattgtttaagtctgatctcgataaaggtaaagcacgtctccaagtcccttttaaccaagtgaaaactccggactttttgacagaggacgagacaagaatcatacatgaaaatgccatgaagattcgtgacgatggtgtgcctgtgaatttggtggatcctcggatgaataagcatgcgcttgagttgaggaagtggaagatgaagggaaactggaattatgtctttgttaaaggttggaacgatgtgcttgatgctaacaagtcgaattcgtttaaggaaaaagacgtctttcctctctggtctttccgatctggaacaggcaaactctgttttgctctcaccccaaaaattccagcaacggctctacttcaggagaatctggcagtggcggcgatggtgcttctacttgaggtgaatctggtcaggtaccgttacccattcctccggcaatagattctagccactctggccaaggctgttcaggagagagcagctctagttcttcctaatcataactctgcttattgcttaagccacaagtaaaacggatttagttttcaggcaaatctggcttggttttctttcttttttttgttcagttgatgaaatagtggggttttgtctaaattgtgagacccatgatatgatgttttgatttgagttctttctttatgtttgat

SEQ ID NO: 9243 - DNA, 443 bp, Arabidopsis thaliana columbia
ctgaaacatcaaaaaccatacaaaaacaaaatcgtatatcggaattcaattattttcgacaaaaagttaacattgatcttcagggagtatcatcattgattttacttaaatgtttgagacatttctccttgagtcaatgactttagcctaatggaatcgatctccgccactcgtaatagagactgtaaccattctggatcttcttgacccgcgattttgatcatgcttgtgaacctcttggacgttaatcctcttacggttttgtggcgaggttgcgccaaagacttcattatctcttgcttttgatgactttctctacctgagcaaagttcattaaggcggctatatgtgaattctctcgcaccgtcgagtgtttcttcaccttctacacggagctcagaagcttcaaacaattctgttagacccttgacgtcattttttac

SEQ ID NO: 9244 - DNA, 547 bp, Arabidopsis thaliana columbia
agttcaatggccagaggaagattgttctgagcttttgcacttgcagcaagcctcaaataagcatctatgtagccaggatactgcaccggataggcagtcagattaagttgacagaaatcaaaagtcgtcatcagattattgaaagagaaataaaaggatcaagcttatatcagggtgaacattcaaacaaataatgtaagacatggtaggtgtatccaaaaactataagaaacagaagaaatataaagcagaaaactatatagcacatatacgaaacgatgctgaacttcccaagagagcagaagccactcaattataaccaaggaagtcattatgccgaatcaatgttcccatttttatacttttagtacatgaatagatatttaacacaccgcgaaagaagggttttaagacaaaatatatttgtaaaaaccaagtaaccactcaaaatcatctatcagacaggaataatcagaaaacggctcctcaagtttttttccttcttttctcctcaagtctaccactagaaaactcatcacaaagtgaa

SEQ ID NO: 9245 - DNA, 515 bp, Arabidopsis thaliana columbia
tttgtgtttatcagggagaaggtatgaccagcattgaaccgactcaaggaggaataaacgacatttgtgtgttccgtggaagcggacttatgcttcttgctttagactctagcctaatcccatcttacttcatacctgaactcggtcctgcccccaaatggtgttctcctcttgaaaatctaacggtaaattgaaaattcttcctatccttttacaggtttaccattccagtgatgtcaccattgttacaaacacgtttcttgtgtttaatattgttctcaggaagagttggaggaaagtgcacagacaactatttatgataattacaaatttttggcaatggaagatctggagaagttgcagctaactcatttgattggaacagatcttttgaaagcatctatgcatggatattttattaattaccatttgtacaaaaaggtgagtccttaacattttcataatacttataccatcagaaaagtcttttttttttttcgggtcaaattggaata

SEQ ID NO: 9246 - DNA, 572 bp, Arabidopsis thaliana columbia
cacccagatactcagtcataatcttgatgtcggagagatggccgagtggttgaaggcgtaacattggaactgttatgtagacttttgtttaccgagggttcgaatccctctctttccgtactttcaacaaattcaccaatcttacgtgattgaccacaatgtatcaaatccaataaaaaagaatcgatataagatctaccttgttttgattttgaaatagattctctattcctaatttctttcatatggaaaatgctgggaagagcaaacaagggatcccaatctccctaccaatctatgatacatgaataggaaaaatattctttgacaaaatcccttaccttgtgcctttttatttttaatggaaaaggggagttgtccgaactcttgtttttagtaattttatgttttacttaagttaggtttattaagtctgtcgagagtaatattctacgacaagcaattcatttattttcaaaccgacgcatttcctatctattatttgattgactaacccttcatattggaatgtgtgaagagtcagatggtttggcaatcctcaggggcagatg

SEQ ID NO: 9247 - DNA, 556 bp, Arabidopsis thaliana columbia
tggtatactgagaaccctgagtggtggggcgatgtttctggagctctgcttcctcatccacggatgttgatgatgcccggtgaccgacactctgatggctctgacgagcacaagaatgcagatggtaatcagacattcacggtggttactcccaccaaggctggttgttccggagacaaaagatccttgaagttcctcatctatgggaagactgggtggctcggtggtcttctgggaaaactatgtgagaaacaagggattccttacgagtatggaaaaggaagactagaggatagagcttctctcatcgcagatattcgcagcatcaaaccaagtcatgtcttcaacgccgctggtttaactgggagacccaatgttgactggtgtgaatctcacaaaactgaaaccatccgagtcaacgttgctggaactttgactcttgcagatgtttgcagagagaatgatctgttgatgatgaactttgccactggttgtatattcgagtatgacgctgcacatccagaaggttcagggattggttttaaggaagaagata

SEQ ID NO: 9248 - DNA, 602 bp, Arabidopsis thaliana
tactttggggcagagtatctacccatgattcctattgagaagatctctcatattttggaacaagatcagtgtcgagctgattgactatttactcttctgaagccaaagattccttcttctatagagtatatatactgtatgtactctgtttttctttcctttctgcaatttgctatcccaagagatgtaatctttcttcaatatttcatttaaacaactttgccttttaataataacaagaacaagagacataaaggaaactgtcctcttcagtctcaacttttataaaagacacaagacccaaaaagtagtatctgtttactagtaaggagagtgtctgtttttcttgcggttccttggcggcttaacaaccaactcacttgaagtccaagaccggttaatctcggtagcatcctcatccgacttccagcaacatagtcgcccatcttcacccccagtccatccaaataaccctgcagctcctccatactcgcctggcatctgcagaacgctccttactacatctatgtgacctccaccaagaatagcttcagcggtaccgattgatccaggctgtttgtagttcacggaaaataaccaac

SEQ ID NO: 9249 - DNA, 705 bp, Arabidopsis thaliana
taccattggtgaatatccagttgataagatcaaggaaaagaaatagaagccacagctgcacaaaaacagtggatagtacataccggcaacagaaagctgagtaatgtctatagcaccaacgcatatccattttgcagtttcggtgccaaaagctactgggagagactgaagtcctaatgctctatctccttcaacacttttgaagtcgttaacaatggctattcctaactgcattatcacaaaggtacaacatgaagcaagagcatattacaacagataacgaaaaaagcaacataaaaggtttgccaaaagagtaccccagctatgctgtacaagagtgttagaacaacaacatctggcgtaagagtgccaaacaatgcttggccagcccacctatcagtcaagtgagcaagaaacaaatcaatgagatgagaacaacgccatatattattgatacacgagatatcttaccatggcaaactaatatagcttgctccaagtgcaaaatttccaacccatccattttgttttagctgcaatgagatcagttcagatatcgatattcaaaactccaaaacttggatggagtgtcttatcactagagagtggaagttaggaataaaacttaccttaagaggtggagcagagtatatatcagagtagcaatgatcctcccaaagcaagatagaagacagtggaagtggt

SEQ ID NO: 9250 - DNA, 520 bp, Arabidopsis thaliana columbia
tccctcaaggttttgctttattgtcaacgcttaagtgtcttgttgggattctttctcaagtaagaatttctcaagagttgcttctttctgtctgagctcagccactctactcctctcgccttcaagcaaaacgtccttgctttgtccaaccaaccgtaattcgtctatttcagatagcatagacgctatccttttctcaaatgtctccatgtagtggtttatatgactgtcagcatcagtggacagcgaatcttctataccaagtagtgaagctatcgtgtcgaaccaagacagtacagtttggatctcttctgaatctctcttagtgcccatctgagaagcagcaagagcctcattggtgcacctagtgacttcttgtcttaagaaagaaacctctgtatcccgatcttgcacttgctgttgaagtttctagatttcagcaagaagattttcagagaggtgatggagctcatcgaatttatccacagtaattgatagctttttggaaatctcccacgag

SEQ ID NO: 9251 - DNA, 1486 bp, Arabidopsis thaliana
aaatgaatcatacattcataatttaagccaagatagtgtaatgaaataacattcaaagctccatagagttccaagatacataatttaacctcaaaatcagaagaagaaaaaaaatgaaaagcaaaaacgcttacaaggcctcgttgtatgccatcaggtttcaccataatgtaagtctcctcaacgtcctcctgaaacaatacagaaaacaacgtaagaacaatcaaaaggtcactaaattgcattgagattcatcaaattagaatatatccaaactaatttgaatcctaaattcctgatttcggagtttaatcaatgtaagtactaagaaaacaaagtaattcgcataaatggaggggaagcacacaaaccatagaagctacaaggtgaggaaggaagattcccgattcggcggaccggaagcgcgaagacggcggcgagacgcggaattgcgagagaaaagacggaactgaggacgaaatgcggccaacgctgttctaaaattaaccctggctggagaacagtgtggattgagacttgccgagtttctctccggcggcgaacgacacataggggagtccatttactaactacagtcgctcccaccattttctgcgctttgtcttagcttctctcagtgtcttcgcatcatcatcttataagaacaaagttaattgacataaataccctttatccagaagcgaagataatttgggtttagttgatcaatcaaaaagtatcagtgctcagaagtaatttaaaaagtgatctcgagtacaaagagtgtctcgtttaaatggaggaaacagactctttctctttccctgtacagtttactcttctaaaagattaaaaaaaacaaaagtctgcacatttcaacagtcgcacaatttgctgctttaataccaaaccaaaccatctttcttgtagcaaaattgtttttttctttttcttttttcgtcgatttagaatcattgtcaacagagtcacgttgaaaaataggcaatacagactcatcgtcttgtcttctagatgtatctggctttgcctttcttttgcttgctttagccatttcacgccacatcaaatttacattttgtgcatagaagaatcaatgcgtaaacatccccaactttttcttttcatcttgttgcttttaacaagacccggaaaaaagacttcatcaatcaatttctacatctatatcttcctctccctggtcaacaaggtcagttttttgccctgccttgtccacaacttcggtttctacctttccattgccatcaactacagtttcgtttcctcccttgtccgaaacttcagttccttgcactccctcaccattgtcaacagcttcattttcttctacccccttttcgacaacttcgcttttttgctctcccaagtcgacaactccagtttcttgttcttctttttcagtaactctactttcttgctctggcacattcgccaattgttcttctcc

SEQ ID NO: 9252 - DNA, 976 bp, Arabidopsis thaliana
ggtttggttactggtggtgaaattgcttcgacctttgacaacccagagtctgttaagcttgggcattgcaagcttatagaagaaatcatgattggtgaagacaagttgattcatttctctggttgtgaaatgggccaggcttgttcaattgtcctaagaggggccaggtatccattttcactcccattacttgaaagacttcgtctaaactttattctgtttctaattcactaatcaatttttgtatgggttcttttttcttgcagtcaccatgtcctagatgaggctgaaagatcactccatgatgccttatgtgtactctctcaaacagtgaatgatactagagttttgcttggaggtggatggccagagatggtgatggcaaaggaagtagatgagcttgcaaggaaaactgctggcaaaaaatctcatgccattgaagctttctcacgtgctctagttgctataccgacaacaatcgctgacaacgctggtttagacagtgccgaattggttgctcagcttcgtgcagagcaccacactgaagggtgtaacgctgggatcgacgtcatcactggagctgtaagtaaactttataaacattaggattcgccattgaatgtgcaaggctagacttcaattgtgatgatgatgattgattgtttacaggtaggagatatggaagagagaggaatctatgaagcattcaaagtgaagcaagcggttctgtttcagccacagaagcatctgagatgatattgcgagtggatgaaatcattacatgtgctcctaggaggagagaagacaggatgtgaaaaactcaacacaaacacatgaacgtggtgggagcctagagattccatgattgtgttttcgatttggatcagaatacaacttttctaatatgtttaatgttttgctcctccttagaactcatctttttgttttgtttccttttaatcttgttttgagtttg

SEQ ID NO: 9253 - DNA, 562 bp, Arabidopsis thaliana columbia
gtcaagattaccaattgagattcttgtcgtgtaaaaccaacagggttggatactagaacctgaggaatcaccaaagaaaggaaggaaggaaactatagagaaatcaaaaagcaatgagagcgatgaagacccacgtctcgaagatttcaagtgtcccatttcaatggttaggatatttgaagtatatatatatatatatatatctccctgattttcagctcttgaaacaaaactagacttgttccacatcatcaacgctgttgttcgatttcatatgtgatgttgtaggagataatgcgagatcctcatgtggctgctgatggtttccctacgaggcagaggaattcagaaagtggctaaggtcaggaggtcgaacctctccaaagacaaacaagccgcttgatgaccgcgatctcgttccaaatcacactcttcgtataatcataaaagattggctggagaagaacccaaattgtaacgttgattatctatctatatgagagaaacaagaaagtcaatgattatgttgtgatttttggaatttctttgtgaaataccaaat

SEQ ID NO: 9254 - DNA, 459 bp, Arabidopsis thaliana columbia
tcgtcgtcgtgatctatgcttacaacttaaatccccattcctcttcttcttctccttcgtcttctctcttatcgagctctgtattaaaatccctgaatgattatatttatatctttccttctcctttccttgacccattagagcagtctggatcgtacgagacagaagttcatcattattaatcgagtctcgcaggtacatgcccaagtacttattaattcttgggttgtaattgctatcttattaggttccgcagttctagcgattcgcaatccacatacaattccaactgacggccaaaatttctttgaatttgtccttttgtctttaatccatcttctttgtccagttgcaccactacaggtctcagttttgattggatcatctttatcttagtgttaaatgagtccaccgatatctcaatcgctggtgggtattcgtttagtgtgttgttgtcgt

SEQ ID NO: 9255 - DNA, 429 bp, Arabidopsis thaliana columbia
gcaaatggtgcattcaaaaaagatatcattcaaaataataaaatataaaaaaaaaaaaaaaaactatggttaaaaaaaaccatttcaatacgttttcaatctacctctataattgtaatgctctaatgaaatgtgaatattacctgcgatatgagacggggatgataccagcattccagttagcgatcttcataaaagctggtttagtcaaatcaaaatggactcgtggcggattacaccatccaccattgttggatgcttggccatgatttggtggacatatgttggttgcagttaccacggtggctggtgacccgtagtagcagttaggcgacgacactcactttaactggaaaccttgaccgcatgcataaccctcgttgatctgggctgtgctcagcgcagtcgtggctaccccgtagccgctgt

SEQ ID NO: 9256 - DNA, 624 bp, Arabidopsis thaliana columbia
tgtcttagatgtatgatgtagcatatatgcctgttttatttttggatatacctactgatatagtttcctgattggctcagattatgttttggaagaggttaagaaggctggttttactgaacctacgcctatacaatctcaggggtggccaatggctatgaagggacgtgatcttatcggcattgctgaaactggttctggaaagactctttcttacttactacctgctattgtccatgttaatgcccaaccaatgttaggtaatgcttgatttctgctcctggagttctttttttttttcgttcttgtttgatggaagttgtaaaaggctgtactgattgaaataaaatttcccagctcatggtgacggcccaatcgtcttggttcttgctcccactcgtgaactggctgtgcagatacagcaagaggcatctaaatttggttcatcctcaaaaattaagaccacttgcatttatggtggggtccaaaagggcctcaagtgcgtgatctcagaaaggtaaattgctttagttcagtgcctttcacgacatttctggaactattagtttttcttaattttttgttgatcattctgattgtgattgttggcatgtggatataggt

SEQ ID NO: 9257 - DNA, 601 bp, Arabidopsis thaliana columbia
cagtgtgctgtaaagacccgctaacggaaggtgagattcgccttgatggtcgtccattaagttcgctaagtcacagcgcgctgcgcagggcgtggcaatggtgcagcaagatccggtggtgctggcggataccttcctcgccaacgtgacgctggggcgggatatctccgaagaacgcgtctggcaggcgctggaaaccgtgcaactggcggactggcgcgtacatgagcgacggtatttacacgccgctggcgagcaggggaataatctctcagttgggcaaaagcaactgctggcactggcgcgcgtgctggtcgagacgccgcaaatcctgatccttgatgaggcaaccgccagcattgactccggtactgaacaggcgattcaacatgctctggcggcggtgcgtgaacataccacgctggtagtgattgctcaccgcttatcgaccattgttgatgccgacaccattctggtgcttcatcgtgggcaagccgtggagcagggactcaccagcaactgctggcggcccagggacgctactggcagatgtataactgcgacttgcgggcgaagactggcagccacgtgcgtgaagagg

SEQ ID NO: 9258 - DNA, 799 bp, Arabidopsis thaliana columbia
ccaagatcactaacgcggaaactaaatcacttaatacgaataaccgatttcatctcttttcatgcgaattgatttctatgttgattctaggttttgttaaatttatcggattaatattgattctggagaagcaattttactggtgaatttagtcaatgttaaactcgatttgcttgatttagggttttgtttgatgaattagggtttaatctgcttctgaatgtaccaagtctcttttcagtgtttcgcataggaagaactgttctgggcataagctaaaagaaatgactggtagtgacatattctctgatgatggtaaatatgatccaaatcaccagacaagaatccattaccatcaggatcaggtacttgtctcatccatttttacttttgttaggagttagttgatgataatggtatcttatgtaatggttactggttctgcagctgagccagatatcattcagcggcgaagagaatgcaacaactcccatgaatggcaaagatgatccaaatcaccagacaagaatccattaccatcaagatcaggtacttgtttcatcctccattgtactcttttcaaggattcagttgatggtaatggtattctaagtaatggttattggatttgtagagaagccagatatctttcagcggtgaagagaatgtgactccaaagaaaccaaccactttaaacgaggctgctaagcaaaaggagttgagcaggactgtagaaacgcaagcagattcgaagtgtaagaagaaacagatatcgaacaccaagaataaagcaatgagt

SEQ ID NO: 9259 - DNA, 508 bp, Arabidopsis thaliana columbia
gatcgaacctttgatttaggaataactttaacagcaacttcttgacctttcaagctacctttaaaacccttagcagagcaagtatatccaaaaagtccacgacccacctcaccatcaatctcatagtgtgaagcaaactgttttgaaaagccaaaactcttatcgagaccgatctcacattctttaccttcgggaatcgaaacctcattaggcttgacagagccatagcgacgcgcgaggaaagctcgtatgtgcttagcaggagaaggaggagggaaaggactcttgaagatacgaagaggcgttgaactcacgctagaagatacagatggtgaggatttgaataagctaggtacaggactcgggctataaaacggaaagccagaggatttcagcggtggctgtgaattcgtcggagcttcattagtttcgccggaaactgggaggctttttgattgttgctcgacgggttttccatgacagatccccatgaattgtcgattcgaaa

SEQ ID NO: 9260 - DNA, 597 bp, Arabidopsis thaliana columbia
  unsure (1)..(597): unsure at all n locations
atatgttgtcaaaggccgatcataggttaagtgagattatgtttatcatgagtttctcaattttgcatggatgctgatgatcttggtaatgaaatggaacgcagcaaatagcatatgaatatgcaaaaagaggagcgaatttggtgttggtggcgaggagagagcagagactgagagttgtgagtaataaggctaaacagattggagccaaccatgtgatcatcatcgctgctgatgtcatcaaagaagatgactgccgccgttttatctcccaagccgtcaactattacggccgcggtacactactttctcgccattaccacataaaatgcgaaggataggttaacttgtaggtcaagcaatatttttggttttaacgaaaatgttgtttgtgcttgatgatgaattcgatgcagtggatcatctagtgaatacagcgagtcttggacacactttttactttgaggaagtgagtgacacgactgtgtttcccatttgctggtatgtgtacttcggtgtttgtacgtgatttgatccatttcaatggcacgatactanagtttgagatcttgagtaggcataacttctgggggaatg

SEQ ID NO: 9261 - DNA, 471 bp, Arabidopsis thaliana columbia
agaggtattcggcgtacaggctcatgaactttctcatctctaatcacaagccacatggatggatgtaccaggagaggtctctgtacaatgttggagttgagaaactaaaagatttagcaaccgccactgaacttgacccgacactgtcttttccgtacaagtacagagccgtaatgaaattcgaacagaagcagattaaagaagccttccaagagattgatagattaattcagttcaagcttagtccagaatgtctcgagctgagggcttggctgtatttagccactggtgaccgggagagttgtttgagagatcttagagcagtgctgtctttagagcccaattatgttgtgtttggtgggaaaatgagagatgatttggtggaggctctgaccgcgcaatgtattgaagtagagagtgaagcggattgttgggtgaggcttttcgatagatggtcagctgtggatgatg

SEQ ID NO: 9262 - DNA, 418 bp, Arabidopsis thaliana columbia
tctcctctctattctcttcatcatcaatttcctcgagggcttcgtttgctctaagaatttcagttaagttggaagtcagattgacgtcttttgagacatcattttcctttgacggctcctctgtatccatctcctgcacttccagattttccagcgcattctgatcactcataaatgtgactttttccttgtcaagtgaggccaagaactctagagctatcgcattctcctcaacaggagctgacggcttttcttcagcattcactgccttgttggactcaacagaatcatggccttttgagacatgcgaagatgttttggactgagttctgctccttagcaacctctggtgaggcaagagtctgtcttccagctcttacttataaaaacctttcacagaacttttagctttcgtagt

SEQ ID NO: 9263 - DNA, 396 bp, Arabidopsis thaliana columbia
  unsure (1)..(396): unsure at all n locations
cccaaaacatggcgaaaataaaacaccaccgctaccggtcccaacgtaaagcgggcagcgatgccgggaataacgactggattaacactttgcgtctggatgacgttatcggtaaagcgagtacgaatggaaccgggttcgatcaggctgactttaattccgctgtggcgcnctccatgcgcagtgcatctgaccacgcctccagcgcatatctcatggccgcgtacacctgtgacccggcgtggagcttcatcccatcaccgatgatgtcatcaccatacgcccttcaccgtgcggtaacatcgcgggtcacaggcgcatggtgagctggtgtgcgccgccccagttggcggcccactgctgttccatctgcgcacggctgttggtggcccgggg

SEQ ID NO: 9264 - DNA, 518 bp, Arabidopsis thaliana
cgccagtgtgctttaaagattgcagatgctggtacaacaatatgccgatgacaaagagaaagtggcgctgttaaaagcactttggcagtacgcggaagagattgtctaatttgaagcctccgccgctggtacggcggaggacaatgttgagtcaggctttttgaacggtgatgctccacgctgcatcgccaatctgctgataatcggtgatggcatgtccttcttctgccgcccactgtgggattgcttcagttgcctgggtgcaatcaaactcaatcactaactcatcgccgctgaccatttctgccagagctgcttttgcttctatgagtggaaacggacagacctgcgtcaccacatccagctttttaatcaccatctttacaccttacttaatttgccgcagcagttgccagtcgcgccttacgctgcggtcgaacatacacaagccaggacgcagtcagactccgagaatcataaatacaaggccaatccagccctgccaggtcatcattgca

SEQ ID NO: 9265 - DNA, 525 bp, Arabidopsis thaliana columbia
tgttgtttgtcttgcagttcatattatttaactagtaatgtgctcttggttgttcttcattttgttgtttcgattttactttctctagtcatgagataaactcacggaaacaaattatttacagactctgattagaatctttcccaaggacacacttctatggaagcttcaattgcttaagtctgcttcagcgtctgctaattctcagatggacacagtcaacgcccaaacactgatacttctgaggttaatacactagtaaacttctctgctctgaatataagtggaagttcagtgatctatttttttttaatgagtttagttaattggaagctgagttgtgtagatttaataagcctgtgttattgcagtggacgtgatcaatggttaatgaacaaggaagacattgaaagactccgtggtgcattgccaagatgtgaagttcgtgagcttgagaataatggacagtcctcttcttggtaaggagcctttctcctgatgcaagaagtttccctgtgtaaatga

SEQ ID NO: 9266 - DNA, 425 bp, Arabidopsis thaliana columbia
gaattattgcaagcaggtttaaaatgccaaaatatcaagaacatcacactcatcggtaaataatgtgatctcctaagtcaaataagttgagcaacggaattctaatatagagcagaggaaactaggaaagatgacggaatcacattatataaaaaaagaacagatgtcccagaaagacacagtgacacaactacgagaaaaagaaaatatccaaatcataaactgtttcatgttccactttccatttcaataagtttacacaaacaaaacgagtgtcattcactgatgttaaaactaatgttacattcaccaaaaaaatcaggaataatcgaagtctcacctcagtggcaaggcaaagttgaggacatttgctttctccacaccttccactgcagggcatatatccagcacagcgagtatacctg

SEQ ID NO: 9267 - DNA, 462 bp, Arabidopsis thaliana columbia
cttaaagcagcgtcgtatcatcgttctgctctcgctgtcgctcacctaacttacttccagtctctctccgacgtcggtgaagctattcaacgtttcgttgacgacgaagtctaccctggtttttcttcttcttcttcgccggattctccagttcttacacttccgtccgacgaagggaaaccgacgaaacacaagaggatttctccttcttcaaccacctcaatttctcattccgtcatcgaagaagaagacactgatgatgattcgcatttgcatctaagctccggatccgaatccgaatcagaagttggatctaaggatcatatccaaattactagcactccagaacaagagcggtcaacggaatcatttccttccggttatcatccaacaaactatgctccaccggtttacacaccgtggttatcaaccgcgttacccattcagttacccgaccggtta

SEQ ID NO: 9268 - DNA, 490 bp, Arabidopsis thaliana columbia
tatcttttcggaaagcccaaatccagaactgcaagacttcggaatgagatattcggatacacacagcagcatgtgaaaccttctatgaagcatgggagcgcttcaaaggttattagaccaaatgtcctcatcacgactttgatgaaggatgagagttagttgaaaacttggctcagtcagatggcaactacaatggagacgacgatagaagcatccacagcagctctgactctgatgataagcactaccgtagagagattaaagctctcaacgagaaacttgataaactcctccaagtgcagcagaagcatgttcactttatctctgaagaagaaccatttcaagttcaagagggggagaatgaccagccacctgaaatcagttatattcagaaccgatgtggctacaataaacggtacatcaactaccggccaaacaaccagaatctgtcatacagaatcaccaacttagccaacctcatgaccaagtt

SEQ ID NO: 9269 - DNA, 534 bp, Arabidopsis thaliana columbia
cactctttgtttcagctcttggttattgagaatatgatggtttggggatttcaatgaacatgaaccataaaatacatgacgacttcttatctaacaagagaaggaagtgaagcttcatagtaaagaaatggacaattatatatgaataaaagttgatacaaggcctttctttagctacattccgatcaagggcaaaacaaaaaactacatactgtatatagagaaacgtggaagataggactttgccttgacaactaaacaatttccttttagagctgtgacaattcgatttctcagagagaaacactttaaggtagactgagaagtgcaatcagtttactcaccttcccaacctgattgccgagctctcttctcccacaaagaagtaatcttcctctccttgatcaacaaagcttcagctctctctctagctgattcacaaatctcagtggcggcattgcacttctcagcctccttttgatactgagatgcaacccttttagcttctgcaagggtaacattcatatgacggct

SEQ ID NO: 9270 - DNA, 490 bp, Arabidopsis thaliana columbia
tctagtaaccgacgtatagtgcataacaagtgaattacaattaggttggtttgctgatattagaacccgttagaacggtcatttgccgttaaatgtgatgcttcattagctttgtctttcacaactcagtgtggtttctgtgtgtttgcaggactgggaaagcgagcaggtcacgggtaaagatgatgccaataggaacaccgagagtaccctacagaaaccgagaagaagggacttggcaatgggttgatatatggaatgcccttgtacgtatattcgacttgtaaataatcttgtgtatacattttacatggtcactggaaagtttgtaacttcaatttttgttgcagtatcgagagcgtgtaatcttcattggacaaaacattgatgaagagtttagcaaccagatattagcaaccatgttgtaccttgatactcttgatgactcgaggaggatttatatgtacctaaatggtccgggtggtgatgt

SEQ ID NO: 9271 - DNA, 592 bp, Arabidopsis thaliana columbia
gactcgatccccgagacatgattttctcacacgtcatgttggcgacttttgcagctatgagtgaactcattaagaagatgtgttgggaactcgtatccattaacaaggacactatcaatggagtaggtgttgctacttacagaaagccaacttcaaatgagtgctacaaaaacagatcagaaccggtgcctccaatttgtgcagactctgatgatccaaatgcatcttggtatatttctttttcagatgttaattactgtgcttaaagaatcagctggtctaggttaacgaatacatgttttgatgtgtggtttttgtaggaaagtgccgcttcaagcatgcatgcacaccgcgccagaagacaaaacgcaacgtggatctcagtggcccgaacaatggccagcgagattagagaaagcaccgttctggttatcaagttcccagactggagtttacggaaaagcagcaccagaggatttcagtgctgattatgagcactggaaacgcgtagtgaccaaatcataccttaatggtttaggaatcaactgggcatctgttagaaatgtgatggacatgagagccgtttatggag

SEQ ID NO: 9272 - DNA, 188 bp, Arabidopsis thaliana columbia
aaagtgtcacgcacgatgcgcgcgatattgccgccagcatctcttccggttctttccagacgctggggattgtgattttaccctgttcaatcaaaacccgttccggcattgtccatagctatactgatggcttactgacccgtgcggcagatgtggtgctgaaagagcgtcgcccgttggtgctctgc

SEQ ID NO: 9273 - DNA, 520 bp, Arabidopsis thaliana columbia
gcataccagttcgatgttttcaggtaacgtagctctctcagctgcctttgacgtccacaccttaatgtcactttcaattccactgctagcaagcacaggaatatgtggatgaggctcaatacagttaactacatgcctatctgcttccataacacggataagctccccaccctttttcctccaaataaatatcctcccacagtctgacccactaaccacatattcagaccgaggtccaaaaaagttcacacccttaactgtctcacagttcttgtgccccttataaaccaaagaaactgagtgttcgttctcatcttttggggaagaagatgattctgattttgatacaggactcttggatatcggggaggatgggatagggttagaccctaatcccataccgggtgtgaagagatagatgaactcatcattgtatgaaacaagaagctcgctttgctctgagaaagccaacccgttattcaacatcttcattgccaataagatgtggaggacaaaagtg

SEQ ID NO: 9274 - DNA, 244 bp, Arabidopsis thaliana columbia
cgccagtgtgctctaaagaaaagatgattctggtgaccggtcacaggcgtgagagtttcggtcgtggctttgaagaaatctgccacgcgctggcagacatcgccaccacgcaccaggacatccacactgtctatccggtgcatctcaacccgaacgtcagagcaccggccagtcggattctggggcatgtgaaatatgtcattccgatcgatcatcaggagtagttaccgcttgtctgggtgat

SEQ ID NO: 9275 - DNA, 317 bp, Arabidopsis thaliana columbia
aacacacaaggtaatcatccagtaagaacacatgtataaaaaaagaaaataaatccccataaataactactcaagaatcaggaatagaaccaaaaaaacacctttagctcaaatgtaggaaaaagcactttgaatcaatacctggatgaggaaaacaatgccagcatgttgggaatttaacaaacgaagaccggttttaaatccactaacaatattatcagcattttggaaatgcacttctaacagagatggtaactgtcgtagtatgctcgccgatgctgggataatctcatcgaaccatctctttgattctttct

SEQ ID NO: 9276 - DNA, 555 bp, Arabidopsis thaliana columbia
tcgcagatcacaagggagctacaatatcaagggttctacttgagtgtttgactgaatggggaatagagaggatatttaccatcacagttgacaatgcaactgccaatactagtgcactcaggaagttccagagagctttacaatcacagagagctgattctttggtgttaaatggagattttatgcacatgaggtgttgtgctcatatcatcaacttgattgtgaaagaaggtctgcacaaattgggtaatcatgtggaagccatccgcaatggagtgctatatgtgagatcttctacttctagatgtgactcatttgagcagaaagttgtgacaggtaagatgacaagggggagtttgcctttggatgtcaaaacaaggtggaattccacctatttgatgttaacaagagcaatcaagtttaaggtggcatttgacaagatggaggctgaagacaagttgtacaatgaccacttcttggaagtagtcgatggggaaaagaggattggacagcgtactacaattgattggagggaagtagagaggttagtaaagt

SEQ ID NO: 9277 - DNA, 531 bp, Arabidopsis thaliana columbia
attacaaattcaccttgactggctattcatgtttgtgctgcctgtagctcgagacaaagagcctcgtgctagaaacgagcccatctcctctttcgtcttgacttcagcctcagtaactccagccaatgttattcctccactggcagtttccctgatttgaattggagctcgtgagagagcagtgtgctttgcttgaacgccacggtcattcttaaggagggccgaagaatgtgagtccagcaaatcaaaaacttcttccttaaaaatctgcatttaaaggtagaaatcagcaagtggaatatacaaatcaaatctcaaataacagacacagaagctgtttctacctcaatagaagacactcgtatcaatagttcagatgaatctgtggttgtctccactcttctaaatatatcctccataacggttggtataacgccaccatttgtgcaatctccactataattagtacccatggtatagggtttacctgaaccagtctgtcaattacaacgaacagaccatgaatttgat

SEQ ID NO: 9278 - DNA, 300 bp, Arabidopsis thaliana columbia
tctaaagggcggtccagggttttcagggcccgttgaatgaggctgcgtcgccgtgcttcatctctcctctactttacctgcgcggatcttattcctcatggtttcaacagcgccggcatactgatcacgggggacttccagttgcatggggccagtatttcccatgtaacgatactgtcggggttgtccggcgaatgccgcaccgacgctacgggctgcagttgaacaatatttcgtcgggatttctgttccgctgaccaggctgtctgctccatttctggcattagtatcaccgtggag

SEQ ID NO: 9279 - DNA, 511 bp, Arabidopsis thaliana
gtgtgctctaaagagagggggcgctgaaaggtccttctattatgcctggtggccagaaagaagcctatgaattggtagcaccgatcctgaccaaaatcgccgccgtagctgaagacggtgaaccatgcgttacctatattggtgccgatggcgcaggtcactatgtgaagatggttcacaacggtattgaatacggcgatatgcagctgattgctgaagcctattctctgcttaaaggtggcctgaacctcaccaacgaagaactggcgcagacctttaccgagtggaataacggtgaactgagcagttacctgatcgacatcaccaaagatatcttcaccaaaaaagatgaagacggtaactacctggttgatgtgatcctggatgaagcggctaacaaaggtaccggtaaatggaccagccagagcgcgctggatctcggcgaaccgctgtcgctgattaccgagtctgtgtttgcacgttatatctcttctctgaaagatcagcgtgt

SEQ ID NO: 9280 - DNA, 549 bp, Arabidopsis thaliana columbia
ctctcaagagcaatacacgtatgtgaaaaaaaaaaaaaaaaaaaaaaatcaatacacgtatactctaattttcttttataaaaagaaaaataaaattagaggcttgacatttttttctttgggaaactaaaacaaaatcttcattgaatagaaaacgatatctatctaacttttgtaataagaaaaatatatacttaatagaaacagaaaaaagaaaaaaagagtttcatcactataaaatatattcacttaagttgatttggttctttgccaaatgagctcaagctctcgtgcaaagtctttttgtcggccgacgacaatggtgatgtggtctttgtcagggatgacgtggacagtggcacgtggcactttgctcttcacactgtaactacactccacaggaatgagctcgtccttgccaccgtggaaaatggcgacgtcgcagtccacatggtcacggacatggtcgagatacgagtcgagcttggctcctgacccgaagatgatgttgtgtaatgtgtgaaatgaccattatgtgtgtgacataag

SEQ ID NO: 9281 - DNA, 541 bp, Arabidopsis thaliana columbia
ccctttcgaaaatcatagatcaaagaagatggctcatggttgtagtataacaacaacactcaagtcacttcttgctttgtccactgccatgcaagttactaaagtaaccttgagggttactctcgaatccacctcttgagatgtaagcacccccatttgtccctggtgctaccatattacctgctcctgctcctccgccgccgctttttcctccgccactgctttgtccgccaccaccactcttacctccagcgccaccgctctttcctccaccgacattgctgcgttttccactcattcttcttatctgatattgatcaagaattttggaggtttgagagagtatgaaaattgtgtgtttaggaaatggctatttatagagaaagagacccgattcggagtgttggtcaaaagttgtgcttccaaaattatatcgtaatctctgcattacttaattgattcacatcacctcgtaaaagatataagtagtacaatcttacatttacaaagtgattagccattaatgggttgaaatttgaat

SEQ ID NO: 9282 - DNA, 557 bp, Arabidopsis thaliana columbia
ttcctaggaagactcttaagaaatttcttgacaagcttaggttcttcaatggtttctccaagtgaagctgattttgatgatatctctgataacctccctgggaactcatcgattgtctcattatccttcatctttattctgtcaaactcagccatcaacgtttgcaatcttgcctctttgactctctccgctcccaagtgcttcgattgtaaggtaagtgattcaggaattgattgaaacaacaaggctatagccataacgttcttctcgttgttgtccgatggttcctctatgatatcccacaccttatgaacttgaagtaagatactcatcttcatagaccatacggtgtaatttatagagtttagcatcgggcacttgagggatgatgatcccctcctcctccttcgttaacctttgctaacgccgtgtttgacgtctccgtaatttccccatgatgtcttgtggatcgtgagtgctctgataccaaataaagtttaataagattaagaacacttaggattataaaaataactctcttattagcttaggaaaat

SEQ ID NO: 9283 - DNA, 593 bp, Arabidopsis thaliana columbia
gtaatgtagctagtgtctaattaaacactaaactttactcacacataaaaataaaaatagaaacctatgtatacgtattttcccatagttattacctacaccaatctggcactattttttgaatcatattaacaaattttccttattagttagcatgtaggcttttgaattttcagctcatatatatattttaccacacatcactccccccttaagattaagtacaatgtgactcttttgatgacatgtgattactatatgtataagttggcgtttgaaaaacaatgagataaaaatttcgtatttaaagatatatgagtcacatatttattgccaattcattttgtaatcgaaacttcacactatacaaaattatccttgttttcttttagatgtacatgacatttctatatgatcccatttagttataaaatgtatacatcatggtaggaggagaagaaagaaaggctgccaaatccagggcaagcagcaattgcatcggcgttacggttttcagtgggtgcagcaatgctgcttctgggcgctgtattcatagagaatcataaggtaagaatggtggtggtagcggttgt

SEQ ID NO: 9284 - DNA, 508 bp, Arabidopsis thaliana columbia
gtttgcatcacaccggattggattgacatcctaaaatactacaacgacaagatagtgttttagggattaattgagtaaaatcctactatcagtttgcaaagccatcatgcataattcgtcgatcatactgccaaggacgacctaatagcagatgataagcatccattggaagaacatcacatcacaccaaatctttataattcagaccaatagaaaacgggacacgacaacgcttcgagaaataagaatttgttgatgaattaagccaagctaagcgatatggtgttggatgagactccgtgaacaaggccaatttagtaactgcttcttgagaaatcacatttgtgcaactccctgaatctatgatcatgcgacaaactttacctcttatggtgcaagtggattgaaagatattcgttctcagccatgattcttctacaccacgcggtaagagatgattccacgcaacattaacattggacctgaaccccatcaagtcctctgtaac

SEQ ID NO: 9285 - DNA, 580 bp, Arabidopsis thaliana columbia
  unsure (1)..(580): unsure at all n locations
gattgacccaaggctgcttaaccggcttcaaacctcgtttcttgatcgcggctgctataacacgagcaataccagccaatggactacccgaggctttcacttttacatacaatctatcgccagcaaagaaaatcacacacgccaagaacataagagccaccggaatgatcaaaccgattgtccaactcacatttgactggatatacacaactgctgtgagcgagatgatctgcgcgaacgtgaaagtgaagaaataccagttgaagaaactgttgatccctttctttcctgattcggatttggggttgaactgatcagcaccaaacgctaaattacacggtctgataccaccagcgcctaccacaagaaagcctaaacccatgagcagaaacagtatctgtcccacacttggcccttcgcacgagattttgtttcgcaagcaacggggtgcaacgacggaattgcagcagtaagtagtatcacaaacgatccctacagagatgaaaaatggtttagaaaacattggcgaaaacgaaaccggagtcatganagattatatatagaagtagtaccagaaaac

SEQ ID NO: 9286 - DNA, 673 bp, Arabidopsis thaliana
gctcgaattcgtgaccccttcttcttcttcttcttcttcttctctcgtagcatcttcccctcttttctctccgattccttcaaccactgtttcccttaccggaattcgccagcgatgcctcaggatggtcacttcttgcgtctccaacgctcagaaatccgtcctgaatggtgccaccgattccgtctctgtcgtcgggcgggacagattcgtcttggtcttcctagcaaaggacgcatggccgccgattcgctggatcttctcaaggtgagtgttttggggagtggttgtgtttcccttacaaaattgaggattgtgctgacaaatttccatggagatttggagttttttttgtatctgagttgccgaaacttgaatttgttctgggaattgctcctcacaatgctcgccatttttggcactggagtctcctttaattctcagtttatcactggagataatcgtagattactgggatataaaatatcactggagaagatatagtagggagctatacttactcaaggactagtctttcttatatttgagctattgactctgttttgaagcctaaatattgattgctgagcttgcacatcgctcccttggggaagttaggtatttgagtgtctactgttgtggttttgctctgtttgatggtccttgctgatag

SEQ ID NO: 9287 - DNA, 898 bp, Arabidopsis thaliana
tactcagagtatatcaatgtaaatagtctttgttctgaacgagataattgttgtttaaagtttttgcacagtaattaaaaaaactattttttttctttttttttaacactaaaaaacaattaatttttatttttattttatccttatttaatgttttttctaaaaaaattagtagacataatatttagaaatagttaaaaatatacctaaaatctatcaaataaacctaaattatgtgacatgttagaacattatttgggacaagtttattttcccaaaactataattaagaaaatactatacaccagtttaaaaattggttatactggaccaaatatcagcgacaccaagattaacttgtacgggttacaccaaaacaagtaaaagaccattaaaaacaaaaacataaaaaataacaaagaccggatgatttcacaatattgtttatacaatattttacaaatcatcaaatcgaaacaaccacacaactgtagcacaagtcacacaacttggggaccgtaagcacagaattaatccactctatcttaccccagatctcatctttactgcgcttctctaacgcaatctgagcacaccaaatttcaattttatcttttccgtcgctttgcaccggacgccacataactacaagtttcccaccatagttaactattctttccgccccactgaaacccctcgtagggtggtaacacaattcttccaaaccctggatctctctccaccgtctatcctcgtaatcataccacctcagaaagacgtcatggcaagcgtacattacattctctatcacacaccaaacctttactcttcttatacttgatttgcttacaactttccatgtatcatctttgggctcgtaagtgtagtcatttatctg

SEQ ID NO: 9288 - DNA, 689 bp, Arabidopsis thaliana
aaccaaaatcaaagttctgggaaccaagatccatggcatgtagctaaaaatatttgcatcaatcaggaagccataattaagatttcttctctttactaatgataattcaagatacaagcaatacatcaataggccttctattaacaactctacaattaaacctaatctcaccaggtctcccagattgcaaatcacccaacttcaccatgccttctgcaaaagccctaaagaactcatcttgatcctcactaaacatcttcacatactctctcgtcactagattcgtgtacaaagtctgatcagagttaagaaaccctctccctgaaaccaagtctttgaaatactgattatcaaaaacctgaggtgttgcatctagatctccagtcacattctcatctccacccaaaggacaaagcttatcaagcttcttacggtaactcggttcaagagctggatccggtttaccagaaccggattggttataaagtctgaacatgattgaaaaacaccgaccttgacctattgagtgtgacctgataaagaaccatgtcttttacagaaagattgaatctttcgaagagatcaatcaagaaagttgcgttggctcttggacttggcattatatcgtcggaatcttgctgactcgctgttaaactgtctttcctcctagcttcacttcccaatctggt

SEQ ID NO: 9289 - DNA, 1049 bp, Arabidopsis thaliana
ccgagctgcgtatgattaagcaacgggagtggagatccatgcgtccctaaaccatcccactatctcaaatgcagcaacttcacggatacgtccgtagtacaattgagaatcatttccctgtaagtgtattctttcacactatgattcatcatataatatatgtcctaataaacagttcatgagcttgaaataattttctcatcatgcaaccagaaatttatcctcaatgagattatccggtgtcatatcacctagcattcaaactctgaccaagcttcaagtgctgtaagtatagcctctcgatcttatgttgactagagttatgaaattatgaccattttgtttttttctgcaatggctagggacttgtcgaataacaatttgaccggaggagtacccggatttctatccaacatggtgtccttgttgtcaatgtaagtaactcgagaaagaaaccaaaacatgtatacgaataatagtttttttcttccatatcctgctaatcttgacataattcgtctctttgataacagagtcttaagcaataatagtttaagtggtccgattccacaagctcttcttgatagacgaaaggaaggattggatttaaagtaaactttcctcttgtaatttcctgctggctcttatccaactactctttgtgttataagtaattgtagaaatgtctgttgttttgtaggtttcatggaaacacaaaactttatgagtttatttcacacaggaaaaagaattttccattagtagcagttgttgcctcagcttctgccatcgccattgtcctggttgttcttggtgtccttttcatctgccttcgaagaaagccaccaagtagagagggtattgtatttgcagcaaactcatcaatctagatatttgattaagtaccataaaaaactatcgagttattacatagattttgttgaattcttgcttgcagctccacactcatcaatcgaaacagtaaagagaagatttacttattcagaggttatggcaatgacaaataatttcaagaaaattattggtga

SEQ ID NO: 9290 - DNA, 535 bp, Arabidopsis thaliana columbia
aatctccccctttgtttcttgctttataatgttttccagagactcttcagctttagatgataacgagacctgtctccacaacaaaagtatcatcaaacagtgtcaaagttacacaacggatgtaaagatggatacgtgttggtttcaaaaagtaatcgactcaagcattcaaataagttcaaatagactgatatatatataaactgtaactttgtaaattagttatcaacaacactacttttaaagaactaccttcctaccagcagcacgccatgactgaaatccaatccaaggtctcatgtgaatgctatccactttatttgcgacagaaaacattcctccaatttcacaaaggatatctcgataataggtatcattcagtagaggtaatcggtctgctgcatctacgtcgtctgagcttagccttcgatctttgctggactatagtgaagatatgaccaaaaatcaaaaccagcaatatgaataagcacaagttttaaaaactgtcaactggaacatcacaaaccaatagaga

SEQ ID NO: 9291 - DNA, 1022 bp, Arabidopsis thaliana
  unsure (1)..(1022): unsure at all n locations
agtcaaatggaatacttatataatccaaccaataccagaatttataccttcaacagctcatagatgtagtaacgaatgtcgtaatcagtcaacgtaggatacaaaactttaaagtctgtgctgttaacatattcaaatatcaagcttggagttttcgaatgttgatctctaacaacatccagcagcttgacaatatttggcccaccgcataggttctgaagtattttaatctctcttcttatctacgaaaaaaagatcatagagagattcaagaaacaaccccaatcatccaaaacaatgtaaaacaattcaccttctttttcttaacaggtttgaggattttgataatgcacttctccttgctgttcacatttataccctcgaaaacttcactatattttccacgccctaccttccttactacctcataatcatcttgctccctgagagagcaaataacaagatcaaaatgttaaactaaaaaatcattgctttacaatagaagaactaaaaggcaaaataagcacaactaaaaaatcaaattcatcaatagagataaaagtaaagttttttacattagcagcatcaatttgattagattagcttcatcaagaagcaaatccagagcaagctgaattcaaattcaatacaaacactacaaaaatcgattaaattactttagcaactaccaattcagctaattctagggtttaacaatcttacccccattgaacaatgagtgactcgtaatcccaataatccttgggtcgaatcacattgacttcggtgtacacacgagctttcgacatcgcccgcgtctggttagaatcagagatctctacgagaaaatctggatcgatcgtagtacaaccggaaacttccgagacagtctcgctgtgggagtgacgatagatgagcgtaggataggatgnaccgttggcgcacgtaaggctaagacggcgcacagtaacaagagacgtcgaagaggagaatcgaagaagaggaagaacaagaagaaaagc

SEQ ID NO: 9292 - DNA, 670 bp, Arabidopsis thaliana
gcagccaagtgacagttcacaaagcacataatccggtcataaactctgattctcaaacccacacctccctgtttttgacaaagtaggaacattaatatgtgagcagttagatcaacaatgaagattcatcctaatctgaggttagccatcaaaatccactatcattgactattggatcatacatcatactacctgattttgtattagacataaccaagggaaatatagctgtaaaggtcaaaccttgttccctatggcgcggccaaatccacatggaactgctgcgacatcaagatctccgacatgtgtcctaatactcttcctcaccctaaagcagaaagttataagatatgaggtgacaaaagatgattaatttggaatatatgatttaactttacactcttaagacaggtgaaagatttttggtgctatgtaaggaaataaaactactttagtctggtccacctgcaatcactcgaaaacacacaaaatgtaacacgtctgaaatgacttttttgcctaccaaagagatattagcagtccagccaactgccttgaacccatacgttcgaaagtatttctctcatccagtgcatttccaattgcatcaagccaccattgccccacggcacttccttcaaccctacctacaactgaaacaccaatatga

SEQ ID NO: 9293 - DNA, 604 bp, Arabidopsis thaliana columbia
cgaaaaccaaaaacaagttcaagatagctgacttaccagtcattacatattcaggggcagcataaccataagttcccatgactcgggttgatacgtgggattttttctcgtctggagcatcttttgcaagcccaaaatcagagagctttgcattatattcctgcaatgggagcatttttttctaaaatttataaacatagagagaaaggacagagttgaggttatcgggttaagtggctttcagacataccccatccagtaaaatattagatgttttgaaatctcgatatatgactggcttctcagcttcttcgtgaagaaaggcgagacctttagctgcaccaagtgcaattttcattcgaacagaccaagggagaggtaaggtccctgaacccaaatgaaaaaagaaaaacatggtaattagacgagacacctcaaagccctcagaaagaagaagatgtgcagaggtttgcgatagacatacttctgaaaagatggttcccaaacttcctcgtggcataaactcgtaaacaagcagcctttggtcttcttccatgcagtagcgactaatgtaccagactggggtgacaaggtgtcaaggaag

SEQ ID NO: 9294 - DNA, 507 bp, Arabidopsis thaliana
tactactagtcaacgttaaacttttgcaggaaatgttttatcagacccaatcaaaacacataacttgactagtcaacattaagataaaatgaatcaaacctcatagaaccagtcaaaactcctaagcctatctaagacttttagtaataaaaattcaaactttatactacccattagcttgatttcattgttctgaactcaaaagacaatcaaaatctcacattttttcttcagtcacttagatatgtacatagctttaagaattcaactcattactactgaacaaagcttgatactttatctaaacatgcactaaattcgcttctaaaaatcaatcaaaactaaaaccccaatccaaaaaagcactctttctaaactaaagggaacaaaaatctgaccgcagatcttgatgggagcttccaattcaagcagattgggctgttgaagaaatatttctttggagacagcacaaagctgacgaatttcaccttcactgagatgaacttg

SEQ ID NO: 9295 - DNA, 629 bp, Arabidopsis thaliana columbia
ttcttggaatctccatttctggtggactcatcactagaccggctttcacgtcctccagatttacggctcggggagcacggataggaggtgtaccaggtggtggtggaggtgcaggtccagtattgaatgagttgccatcttttctgtttgcaagaaacaagaaaagtgagattaaaggtttaaagaaacaagcaaatgtgtgtgaaatgagaacttacattaatgtgatgccctttaaagaactggggatccaccccgtgaagtcattgttcgcaatgttcctgaggaacattcaagaagaaccaaacgttaataaatgtttaagaaaaaccagcttcacgtgtaataaggtttagttactcacagagtctcaagaggaagaccggctaagacatcgactgtgcctgagaactgattgttctgaaggtatctgtgagaagttaaaagccacatgtttagtaactggtaaactttcagttcagtaagaggttcctgaaaacttacagtgattttaaacttgttagagaggaaaacgttgccggtaaagagttcgtgaaagaattgaaagagaagtccctgaaacacatgtaatcttgtcaaatatcttaatgtgataaaaacccttgagt

SEQ ID NO: 9296 - DNA, 595 bp, Arabidopsis thaliana columbia
cgccagtgtgctctaaagaatttgactcctgctgcgccaccgccagcaccgagcagacgttttccagcgtcggtgccagcccctgactttcaaaggtggtggcgagatctttcgcccaggcatcgcggtctttcacgctcgcaggcatcttctgccgcacgacgctcgctacatctatcgctttttcgccctttttcaacggttgcggacctgactactacaccccgctaaaaccagaaccgccaacaatgacagcgaagatagaggattgacgcgcgacattacttctcctttttagctcaaggtatgggttacttcctgaattttgtcaccatccagctcatgttcaaagctgcgcagacgtttgtagatagacatcaactcaaccagtgtggtccatgagttaatcaggtactggaaagcaccgcgaacctgaccaaaaacgttggtaatctgcgtcatcaggccgagcgtaatcgtaccggcaacaattgacggaaacagcaagaacaaaccgaaaacgttatcgacctgcaaatagagaatgcgggcgatgttgaaatacatatagtgaaaatagaggcggaaatagttt

SEQ ID NO: 9297 - DNA, 644 bp, Arabidopsis thaliana columbia
ccttcggatttaagcacagagaaacggcaaaacaagtgagagccaattttgcttcaatagggagaaacgtagtagtggcagttttattttaaatgtataaattgaaacaaagtgtttttctcttgaagctgaacatagatggtttcacttttgtctcatgtaaatatggtcatatggattttgctttatccacaaggtatcacactttgaaataactaaaataaaaaatatgaatcaagaaaatcaataagccgctacatgtcacttccaaaattatgaaatatgagattcgaatctaagaggagtcttaaactgttaaacagagacgtgtttacagtcaagagaaatttataacatgggacaaattttattttattttatttaatagcgttacaaatttacaatgatcatattacataaggaggatacaaaagtagaagaagagctagtttaaaagtcccaagagtccaacactgattcatgactcatcgtctcttctatttctgcgcttccactatacaaattagaaccatcgattatttaacctttagttttccaaataactcttgagtttaatttaaaaatatattttcaggctatatgtatcctaacagtgcaatgatgttctaagattaaacctttat

SEQ ID NO: 9298 - DNA, 526 bp, Arabidopsis thaliana columbia
tgtgaatttaagcagtgaagcttgaatcatggcctcgagaattgctaaagatgtgactgaagtaaggctttcaagttctttcactgttcatttcacgaaggagtgagctttgttccatgttcatgtattgattgattctatttggcagttgattgggaacactccattggtgtatttgaacaatgttgctgaaggatgtgttggtcgtgttgctgctaagcttgagatgatggaaccgtgctctagcgtcaaagacaggtttcttctctagtccagaaactatgtgttgtttctcgcttcgagtttcggttttgtgaagaccttgtactttgtttatttctgcaggattggttttagcatgatttctgatgcagaaaagaagggtcttatcaaaccaggagaggtcagtttcgattatctgaatcttcaaaccactattttgtttttgttttcattgtttctgactttttgtttgttctttagagtgtgctgattgagccaacaagtggaaacactggagttgggt

SEQ ID NO: 9299 - DNA, 647 bp, Arabidopsis thaliana
tatggtaatataagttttgtttccgcttcattttccacactgatttattaactgttattggaatatgactttttaaactaggctcaatctcataactttgagaactattgctaagtagttaggactcaccaaaatagtcaaaactagtcaattatataatgtggtccttgctttaacatataactattcttctatttcactaatatgttttaacatatatccccttttttatcctctgtttgttataggtaccgtcgattttatattcggaaatgcagccgcaatttttcaaaactgcaacatatatgctcgaaaaccgatggccaagcaaaagaacgcaataacagcgcatggaagactcgatccaaaccagaataccggaatctctatcatcaattgtacaataaaagccgccccagatcttgcagctgagcctaaatctgccatgacattcttagggagaccgtggaagccatactcaaggacggttttcatgcaatcatacattagtgacattgttcaccagtcggatggctcgaatggaacggtacaattggactagacacaatctactacggtgagtatagtactttggaccaggtgctacacagaccagagagtgcagtggttagggtcaatttattgac

SEQ ID NO: 9300 - DNA, 575 bp, Arabidopsis thaliana columbia
gctagagtagaaaagttgaaatcagccaccgtaactgaattacaggcgaacaagaaagagaaaagtgatttagctgccaacaaaggaattcagctcaggtcacaggacatgtgacctcaccttggaggtctccgagatcgtctcatcggaaattagggactcttgagagtgttctttgtaagcaaacatctagtttgtctggtagcaaaggattaaacaagggacttaatggagcacatcagacaccagctcgtgaatcatttcaaaactgtcccatttcgagtcctcagcacagtcttggtgagctgaatggtggcaggaacgatagagtgatggataggagtccagagaggatggaagaacctccatctgcagtcttgcagcaaaaggttgcctcacagagagagaagatggataagccagggaaggagacaaatggaactactgatgttttgagatcaaaactgtgggagatattgggaaaagcttcaccagcaaataatgaagatgtgaactctgagacccagaagttgagaagccaacttcaagttgagcaagacaagggttccatgatg

SEQ ID NO: 9301 - DNA, 486 bp, Arabidopsis thaliana columbia
ctaaaataaaataataaatcatatactatataatagcctataggaagaagactgtctttgaaagtgattctctgatgaccccaccactaacagtttctggtctggtctttgaaaggatctgatttcctccttctccctctcagtagtttctgatcagacaggagctccgtgaggtttttgtctgactgagtaatacaaactatctacatggttctgtgctaaaaaaaattagcaatggtgacagtgagactatgttcagagtgtatcaacaatggctttgtctttaagaaaagagttttcagctttcaagacctttctagaataaggatgctcccatccgtcttcaactcaggtgaaacagagagtgctcagtattgttgaggatgagctcttcgagtaactcgttgagaatcagttcactagtttcgaagccaatgcagtcaatgtcacatctgatgtctaaccagtttccagctctagccatat

SEQ ID NO: 9302 - DNA, 434 bp, Arabidopsis thaliana columbia
catatcacaaacaagatcaactttgattaatattttacctctaagtagttcttgccgcgggtgtaacaaacttcaagtacctgaccaaccaagcaagccttctttccaacactttgtttcacaatccatgaacctttggagatatgagggatgagtttaaagcgcgagtatcgataagcatcgtcaccattcacaaaactctctaacaaaggatgctcctccaatggtgttttcagcatatagtacaatgctagactgtacatagccgaaccagggacctgactcaatacatttgctacttattagtgtctcttaactattataaaaccattgcttctttagatttaaaagctctcaaattttcacctgtatgtttacaatgaagaaaaactcgggacttcctttcgctgcgtattcgtgaactagaccaccta

SEQ ID NO: 9303 - DNA, 821 bp, Arabidopsis thaliana columbia
  unsure (1)..(821): unsure at all n locations
tccagtgcactcgacgcattactagatctactaagatcacaccactgcgaagaactctcagcaagattactcgaattaatactacgcaatccaaaggttagagagacaaagatatgtcagtttgtacttacccctctatcagagtacatactagacccagacacaatatcagaatccgcaaaaattctcatagcaatggctctaggtgacatctctcaacacgaaggactcgctaaagccacggactcgcccgtggnatgtcgtgcgttaatcagcttgcttgaagatgaaccgagcgaggaaatgcaaatggttgtgatgcgtgctttggaaaactttgcaatgcatagtagaacaagtcgtaaagctatggctgaagctggtggagtatattgggttcaggaaatgcttagatctagtaatccacaagtttctacacaagcagctctaattatcaaatctctcttctctaatcatacacttcaagaatacgtctctggtgaaatcatcaaatctctaacaagtaagtttcaattccgaattcaaaatttatgatcggattgagaatcaaacactcactgatttcaatgcagatgcgatggagagagagttttggacaacgacggcgataaacgtagaaatagtgagaacgctaaacacgattctcacaacgtttccaaaactccgttcgtcggaagcagctaccgcttgtatccctcacttaatcggagctttgaaatccggcgagcaagaagcgagagattcggcgatggacacgatctacacgttgcgacaatcgtggacaacaatgccgacggaga

SEQ ID NO: 9304 - DNA, 537 bp, Arabidopsis thaliana columbia
tgtcctggctattttgctcaggggaagaaccaatcgagcttctggctgaaccttgtgccattaacagttttgacatcgacaggcaaaatccacaggtgaaaacatcacctaagtctgtttcaacaaactagttacttacattatgtgttttctcaagctggtacatacaaatgtgcaggatgtgatatgtagcttggagtgggaatcaatagcagttttctcaaggccttagtataatatggaactgtgcacggtatgctatgttttcttctgcgagctacaacgaagaaattgaggaaggtagtgatagatgatgagagacaagtttaaggaagagggtgtggaatgtgtttataagtttcattataacaagatcttaaaatacagtctgcacaaacagagttttgtattcatcttaaagttagtgtgatcttgaagatttgcaatcctggcttgaattgtacttctgaatctctgtcgctgtataagtagtgtgtgtataccgcaccaagttaacctcaaacccactatgcacgt

SEQ ID NO: 9305 - DNA, 509 bp, Arabidopsis thaliana columbia
ctaaagatcagctttttcccgctgtcacgcatgcagaaaagtaagaaagcccctgctcatcggatgcattccacgcaattttcagcgtattgagtgggttagcactccacagcaccacgacatcgctatgttccagcaccagcggccaactggtctgctgttgataaacttcactaccacccacgacatacggcatgatcgcctgtgccgcgccggtcgaataatcccccagatgcccggtataaccgcctgccagcgccatatagcgttgtaataatgtcgaggccttatgcagcacgccgtttgaacgccagccgtaggaaccagcaaaaatcgatgccggaccataagcctcacgaatgcgtttatgttgttggtgaataagatccagcgcctcatcccaactcacgcgaacaaattcatcctgcccacgaatgccttgcgggttttccggtgacgcaagaaagccttttcgcaccattggaaatcgtacccgcgtattgctgtga

SEQ ID NO: 9306 - DNA, 508 bp, Arabidopsis thaliana columbia
actccacgaactcttccacgcgtcatgactgttccgggaatcatcaccgacgtagacggtgatacaacctccgaagtaacttctacctccggtggttcacgtgagaggaagatcattgtagctaacatgttaccactccaatctaaaagagatgcagaaactggtaaatggtgttttaactgggacgaagactctctccagttacaacttagagatgggttctcttcagaaacagagtttctctacgttggatcacttaacgtagacatcgaaactaacgaacaagaagaagtttcacagaagcttttagaggaatttaactgcgttgcaacgtttttgtctcaagagttgcaagaaatgttctatcttggtttctgtaaacatcagttatggccactctttcattacatgcttccaatgtttcctgatcatggtgatcgttttgatcgacgtctatggcaagcttatgtatcagccaacaagatattttcagatagagttatggaag

SEQ ID NO: 9307 - DNA, 632 bp, Arabidopsis thaliana columbia
gtttatgaatgatccattataagctgtcaaaaacggctcatttccaacggcgacatatctgcaaagaaactaaatttagctccaaaattgaagaaccttcgatttgtggtgaaagatcaaaacttgtttacttgattttaacatcgtcattgaaacgagtgatgtttcttcgaacccaatctttagctctgttataacttcccatggctttgagctgatcgttagggattgcaaccataacttcgataccagagccggcaagagctaccatggtgtttgtgtccgcatcgaaaagcttcacttttttgacgttgttgtcttttaacatctgtaccaccgtctttggagggagctggtgagttgacatcgttccccagtttactcccaaggcggagacgtcgccggataataaagatactatggtgatgcagaggaagatgccggcagtggtgctctgtttccgtcggttactcattttggatgtattctgttttttgccgcttgtagaaaaaactgatcaagttttgggattttgataagttatcggtaatgttttagattcgctttgcacgagtaaaaaactggttgttgtattgttggtttaactatgagacaatcgaagagaagttttg

SEQ ID NO: 9308 - DNA, 858 bp, Arabidopsis thaliana
ctcgagaagatccccaaagttgagtaactccggttaagtattagcccaggaagctgaagtgtcttatgctacgtaaaggctgtgtcaagatgttgttgtggctaaaggatggttcacacaaaagtagaagattaatagaaggaagtggcacttgaagctgtttttagaacttgtgtgattgggagtgactgcatgatgaaacatgacattggaagtgacttaagatttctaaacgaattcattggtagacagtcctgtacgcgcaactgctgagaaaaagtcaagagggaaaagcaaaggagaattctacgtgatgattcactctagatgagaagtttgtcggcgtcagcctaaattttgaatacatcgtgttaagtttctgttgcaactacaaagattcagtgtaggttacattttccacttcaaaaaattactgtcatgtgcgtacggcaggctcagatcctgttcctattggcgacagcggtacctttttgaaaatggaacaactactaagcttgaggttatatggctcgtgacaaggaaacgttttttggattcacacaagagaatgaaagcgatctcctcacaagggtaaaagagaaaggcagcaagtatgacattaaagaaagttgttaaaacagaagaatgtcactggattagttggtgtaaaattatctagtaaggctctgtttaaacatgatggttggaattgtgtcaaggtggtttggtaccttgataaagtaccctttggttcaagtttactgcaaataattcaagaagcagtctgttcaaagagaaagactgaaggtatgtagttttgtgacttttcttgtgctataacagagttatttatgggag

SEQ ID NO: 9309 - DNA, 575 bp, Arabidopsis thaliana columbia
atttttcaatgttttttgtttaagatcaaatgttattgttttggtgaagctaaacactgataggtttgataaatatattacagacggcgataccagttatggtaggaaccaagtttgatgagtttattcagcttcctattgatctgcaatggacaattgctagccaggtaatgtttttaaccatatcttttgaagtcatttgaattctagtaacaaatcaatacagtgaaattcaatataatttattttacatttggaatgttttgtgtaacaggcgagaacatatgcgaaggcgtttaaacgcgacgctcttcttctcgagtgcttcatacaacataaacgtgaataagatctttaagtttgtgacggcgacgtcgttcgacttaccatggacggtggagcgcaatctcacaatcggagaaccaatcatcgacttctagaatatgtatttgtatataatataaaagaagcgaatcctgaagaatgcgtttttttttttttgttttaattcccgctaaagcttgtcgccgtgggactgatcggactagtcgaatttaagcgaaatggagagatga

SEQ ID NO: 9310 - DNA, 771 bp, Arabidopsis thaliana
gtctatatcatgaagtcggaatacgaagaggcgacgtcgtcctcatcctttctccaaactccatcttcattcccgttgtttgcctctccgtcatgtctctcggcgccgttttcaccaccgccaacactctcaatacttccggtgaaatctccaaacagattgccgacagtaatccaactctcgtcttcactacgcgccagtggcaccaaaactccccgtcgctatctccgtcgttctcaccgacgacgaagtttaccaggagctcactagcgcaatcagagtcgttgggattttaagcgagatggtgaagaaagaaccgagtgggcaacgagtcagggaccgagtcaaccaggacgacacggcgatgatgctttactcgtcgggaaccacgggaccgagcaaaggagtgatctcgtctcaccggaatttaacagctcacgtggctagattcatatcggataatttgaaacgagacgatattttcatctgtaccgtcccgatgttccacacctacggtttattgaccttcgctatgggcaccgtagcattgggttcaacggtggtgatcctccggagatttcagctccacgatatgatggatgcggtggagaagcaccgagccacagctctggctttggcgccactgttttggtagctatgattaacgacgcagatctgatcaaggctaagtacgatctgagctcactgaaaacggtgaggtgtggtggacgccgttgagcaaggaggtgacggaagggtttctagagaaat

SEQ ID NO: 9311 - DNA, 501 bp, Arabidopsis thaliana columbia
tccgctcggacgtcgattaaagttatgttactaacggtgttgcaaatgctagagccagatttggttagtgattgtacaattggtaaccatttttaacagaaactcgaaccatttggtctattaacttcatgttttatgagatgtccaattcataggttctcactcaatctcatcaatcttccattgacacataaatcctttatccacgaaaaccccatatactataataagttgtttataggcccaaatacggcccataactggtaaccgcctcagccttttatctgtatgtgtacgcaacacatttcatgactctactttgtgaggcgaagaagaagatcgtagtagcccgataatgaagctacgattgagacatcacgagacgagagaaaccctaaaacttgaattggccgatgcagacactctccatgatctccggcgacggatcaaccccacggtgccttcctccgttcatctctcgctcaatcgtaaagacgagct

SEQ ID NO: 9312 - DNA, 2137 bp, Arabidopsis thaliana
ctttgcgaagtgttttgccggatgcagtctttggtatggaacttatgaatgcaacctttcttattttcttatacggtgccacctgctcatcaaattatttaccacccaaaaatagtttaacttttaagtaaaacaatatatgataaagaagatgttgtacgttttgtgattatagaagtacctgattagagatgaagtcaataacttctttttcggagagattgctctcgggctttcgggctacataagccatcggatattgtccggcttctctatccggaaacctgtacaatgcacaaaagaaacaaactacatgtttttcgatatttgaatggcaaaaatcatggtgttttagttgttaaatattttacggaataacagcagcatcaagaatgtgtggatgagcgatcaaaagagcctctagttcagctggaggcacctgcttatcatatattaaccattagattttcatttttaagaaaatttacactattagtaaacataacgatgatgaacctgatagcctttgtatttgatcaattctttcagtcgatccacaacaaatagaaacccatcttcatcgatatagcagagatctccagttttagccatccttctagattaatagtttcatttgtagcttcttcatttccgaaataacctttaaagcatataaatgttagtttaattcaaaactatgtctttgccatgcaaaaaattgttttcgttttgtcccaagacagatttaagagtgtttcttttgttattcaatagtattgagttcacttaaataagtttcatttaatttgcaaatgaactgaagccattcttcggttagggtgtccacgttacgaatactaatcatatcgatgtatacaaaactcaattactcacaccaaatccaaaacccattttactgcttaaaaacttgatcataatatttgttttataaataatttcccaataataaaatgtctatttcaaataatctaattattgccaaatatttagcgtttattagtgtttgtttacctttagaaatagaaggacccttgagccagagctcaccgggttggttcacacccatgacccgacccgtatccggatccacaatcctcgcttcaataccggacgacaacaacccaaccgcaccgtatttcagactctcctccacagattccgtcgaagctcctgaaccgtgcgactcagtcaacgcatatccttgaaaaatattaaccgttggatatttctctaggaagctatccataacctccttgctcaacggtgctccaccacacctaacctttctcagggaggtcaaatcgtacttggccttgagctgatctgcaccgttaatcatagctaccaaaaccggtggagccaaactcagaatcgtggctttgtacttctccaccgcttgcatcatatcgtcgagcccgaatctccggagaatcaccaccgttgaacccgatgctacggagcccattgcgaacgccaataacccgaaggagtggaacatcggcacggtacatacgaatatctcgtctcgtttccatttatcgtcgatgtatttcgcaacgtaagctgttaaattccggtgagacgagatcactcctttgctcgtccctgtggttcccgacgagtaaagcatcatcgccgtgtcgtcctggttgactcggtctctgactcgttgaccactcgtttctttcttcatcatctcgctcaaaatcccaacgactctgactccactagtgagctccactcgcttctcgtcttcttcgtcggtgaggacgacggagattgcggctgcgagtttgggtgccagctggctcgtggtgaagacgagagttggattactttgggcgatctgtttggagatttcgccggaggtgttgagagtgttggcggtggtgacgacggcgccgagagacatgacggagaggcaaacgacgggaatgtagattgaatttggagagaggatgaggacgacgtcgcctcttcgtattccgacttcatgatatagacagtcagcgacgcgatcaacgactctccagagatcggagaaggttaagcggtggccgtggaggcgtcgatgaaggcggtggtgcgcagttgcgttgagatgatatgaaagtgt

SEQ ID NO: 9313 - DNA, 575 bp, Arabidopsis thaliana
ggccgttattttgggcagcttggaactatggtacaactcaatcttggtactgctcactggaaatttgaaaaacgcagaagtggctcttgatgcactagcaatctggtaaactaacacgacatgaccaataccgattaattcaaacatctattcattttatttaaaatgtagtatgcgtaaataaactattcttaaccatttattttatatagcctcaacataaatggactggagatgatgatagcacttgggtttttggcagctgcaaggtacatacatatattaattcatacatatacacttcactttattaattctatttatgtatcggtcttcttccttgtcttttctctagcgtaagagtgtccaacgagctcggtagtggaaacccaaaggagccaagtttgcaacactaaccgcggttttcacatcactctctttaggaatagttctattcttcgtcttcttgtttctgagaggaagagtttcctacattttcactacaagtgaagctgtcgcagccgaagttgccgatctttctccgcttttagcgttttccatcgtcatgaatagtg

SEQ ID NO: 9314 - DNA, 633 bp, Arabidopsis thaliana
acgaaaggacaaagcatattgatatcaggttgcatttcatcagagatatcatatgtgcaggtttaataaaggtggtgaagattgcaacagaatgcaatcctgctaatattttcaccaaaactgttccactggctaagtttgaaggaggcatgaatatgctccgagtcactgaaaactgagaggtaattctcaggttccggagaggagatccaagaactagaacaagttgagacaaggaagacaatcagagtcaaggtggagaattgtaagaagtgactcagattttagtcttcgggtctaagtgtgggagaaactcggtgaaagagagggttcgaagtctgtcgtgattcaagcgtaacacgtgaggcgagctgactaaagtcataacacgtgaggcgagctgactaaagtcataacacgtgaggcgagctgactaaagtcataacacgtgaggcgagctgactaaggtcataacaagcgttgagggtgttttggtctttttcgcatgagctctgtaactatatcttcttcttcttctctgtaattctgttagatcggagatagagaaaaagagagaattgtaatcaagtctagagagactagagagagaaacttgtaagatcattgtaagaa

SEQ ID NO: 9315 - DNA, 421 bp, Arabidopsis thaliana columbia
cagcccactggcattggttaccggttgatacaaaccggcattgtcttcgatctccagcatcaaatgttgcccctcacgtcgggcgctgattgccactcgccctgtatccagcagttgtgatgtcccatgtttaatggcgttttccactatcggttgcagggtaaacgcgggcaattgctgctgggataattcttgcggaatagcaatgttgacctgcaaccgcgactggaagcgcgccttttcaagttgcagataagcattcacatgttcaatttcgtcggcgagagtaacaaactccgaagctcgctttaagtttttgcggaaaaaagtggaaagatactgcatcatctggctggcctgttcgctgtcgctgcggatcaccgttttaatggtgttaagcgcattaaacaaatgatgggga

SEQ ID NO: 9316 - DNA, 531 bp, Arabidopsis thaliana
tttgagacgaatcgctgcaagatccgctgctgccaacattatcgctttaagccgcttcgcctaaacatgaatttaaacaaacaactcaacctcctaaatttgccaaactaaaaaatcacagaagtgcttacctcttttgggtcggttagaccgcctttatacaaagaatgtgatgctgttccagcattagcggatccatccatatccattgtccgtatttgtatctccatcaaaggtcttatctgatcgctgtcgctaacatcaactgccatgtgtaaactcctatacccattttcctttggcctagcaatgtagtcttttgttctatgcggaatctccttccacaaagaccggataatctcacttgttctgtaacaggctttttcgccaacttcaacatcgtttactacagaattaggcattaatatgacccgtagaccaagcacatcgttcacttcttccggtttacgccatctcttaggagcttcttcatcatgctgtaccgacttttatactgacctttaatatata

SEQ ID NO: 9317 - DNA, 1026 bp, Arabidopsis thaliana columbia
attctgtggtcacgctgcatattggtggaatcagacaaagacaactcgtgcccgcattggaaaagttctaattcatttttgggagaagctcaagaaaaagtttaaggacacgtatgacaggactgtaaggatttgaactataaactcagctcactaacactcgattcgaacttgattcttgtttgtaatcgatttgtgtaacaaagaaagtaaaagaatgttgacacagaggtttaacgagttcacgtttccttcaccgaaaacgctacgtctcgccggagtttaccttcggaatccactagaactttaatgggaacaaagtatcatacaatcactcaatctcagagctttctcactctaatctctctctctttactctcgaaataaactcaacaacaactctaacggaatcgaagaagagaagaagaagataaagaattgcagaggaacaccgaaattaccaaactgccctcattgaccgttgcagcttcagcgagtcaacacacgtgcttctcacgtggctcttcctctaactcatgaaatgaaaccctctgaatgcttcagagtctctcccatacttaagacattccttaagaacaatatgagccacttccttcaaataatgtataacaagttgcaaaatctgagacatgaaacacggtctgtggaagaatatgctgaagaattctacctactactcacgtttaatgacatcaatgatagtcagacacaacttgtttcaagattgatcggtgaattacgctctcagttacaaaattctttgtcacaattcgaccctacaaccgtctcggaggctcacaggcgagcagcttcttttgagaaacaaatgaggtcagcctcatggaactttactaacactcgtcctcgttcactagagcagcaaacacctccaacgaatattgcttctcgtgaaggggatgagcaaatcaaaatagtgacccgtaatacgaatgacgaacaaggtttgcgtcgatcagcaaggacagaaaacggtacaataaaaaa

SEQ ID NO: 9318 - DNA, 744 bp, Arabidopsis thaliana
gtgctctaaacgaggcgatgggttttgagtccttaagagatatgacacaagcttgagacggagcaatgaaatcgttgagatctccgagcctcaaagtcggtgaaaacttctctgacatatcgctttctattcaaaacttaaaaatctaatctttagagacgaagaaactagtataaccaaaacaaaggagcaaagattaaggattggtgtcggagaagctgagggtatcggaaaactagaacggcgtcgaaaggtgctttcttcctctattggttctaaaattgcaaactggggtctcaaattacgtaaaaggggttgaaaaagtcaaaaatgtaaattgcatagcgggcctagtaataatcttattgtgtaagggcctaaatgcaaatagagaagcaatagaggtcggtgacacaatgagggtgatgctttgctcaacaataagtcaataaccttggtctcgttttttatcacagcatatggcacattgacacagaacatcaatagtctagttttacatattgtatgtcacatataacatcatgatgaagcagatggcgtctatgcaccagagcctagacttttgttactatatgttatcgtgacaacaacattttcaacactactaaagacaaagccgcattcacttcaccacggcgtggttctgcggtctttggtggcacgtacaagcggaagagactaaaagcagaaatgcaggagacgaaaaccatagcaatggaggct

SEQ ID NO: 9319 - DNA, 971 bp, Arabidopsis thaliana
gggtacaaagaactctgtacatcacgaaagaacaaagcatattgatatcaggttacatttcattcgggatatcataaatgcaggtctggttaaagtggtgaagattgcaagtgaatgcaatcctgcagatattttttcaaaggtattgcccgtggagaagtttgaaggagcattgcatatgctccgagttactgagaactgagaggtgaatctcaggtaccggagggggagatccaagaactagaacaagttgagacaaggaagacaatcagagtcaaggtggagaattgtaagaagtgactcagattttaatcttcgggtctaagtgtgggagaaactcggtgaaagagagggttcgaagtctgttgtgattcaagcgtaacccgtgaggcgagctgactaaagtcataacacgtgaggcgagctgactaaagtcataacacgtgaggcgagctgactaaagtcataacacgtgaggcgagctgactaaagtcataacaagcttgagggcgttttggtcttttcgcatgagctctgtaactatatcttcttcttcttctctgtaattctgttagatcgggataagaatttgttgaggtcaaaaagagagaggagtgtagtgagaaaaagcttgaaagcattgtaacagagactaagttttcaagttctagtgaatttccggagaggtttctccggcgagacgtagcgttccggtttggaacgtgaactcgttaaattctctgtattcagcttttcttttactttctttcagttctggtcaattcgattcttagtgctgaagttgattcgtgtgtttgtgagattgaagtgaagttagatatttacagttatgaacttctaaggcaactctattatcaaaaatttaacagcatatcttaaacggcctagtatacaaaacttagctaatttattgacaaatcaaccaaaatgaaaattaatttttaatccca

SEQ ID NO: 9320 - DNA, 310 bp, Arabidopsis thaliana columbia
tgctctaaagattcgcctgactgaccgtattctgggcttcacctggaaccgactttaccagggcatcaacgtccataacgctgagcgcgttcgccagctggcccacgacggtcatgagctggtatatgtgcctggccaccgcagtcacatggactacctgcgtctttcttacgtgctgtatcaccaggggctggtgccgccgcatatcgccgccgtgatcgacctgaatttctggcctgccgggcagattttccgccgtctgggggcggtctttatgcgccgtacgtttaaaggcaataaacttgattcc

SEQ ID NO: 9321 - DNA, 1711 bp, Arabidopsis thaliana
gatcttgagaaaatcatcaatattctcatcgatcttcttattttcttgcatcttgaatgtatagaaactcaattgagtatatactctatgcggtaaagatcgaatcatgaatagtcgatccaacgtttcccaagcttctgctgcggttttacatagctcaatctttctcaagaccttatctgcaacattcagaaaaatcacattcttcgccttgtcacagcgctcgagccttgctacttcatccgcatctcgcttcttacgtttctctggatcttcttcttcttcctcggttagaggtttcggagtggtcccaagcacaacgtctttcaaaccaatgacgctgagatgagccatgatccttgtcttccagagtgagaaatcaccggatccatcaaagatcgcgattggattaccagccatactccgattcgaactggctcaagaaccttgagctctgataccaatttgtaaggttttgatcaacacttagctcacaaaactctcgaatcaaacgacttaaactttgagaatgaatcgaaactttgaagagaacttaaagaaacaaagacacacacgatttaacgagttcgcgttcctcaaccggaatcgctacgtctcgccggagaatctctccggaaatccactagaacctttctttacaatgtatctttacaagctttctctctctagttctctctagaacttgattacaattctctctctttctctatctccgatctaacagaattacagagaagaagaaaaagatatagttacagagctcatgcgaaaaagaccaaaacgccctcaagcttgttatgaccttagtcagctcgcctcacgtgttatgaccttagtcagcttgcctcacgtgttatgactttagtcagctcgcctcacatgttatgaccttagtcagctcgcctcacgtgttatgaccttagtcagctcgcctcacgtgttatgaccttagtcagctcgcctcacgtgttatgaccttagtcagctcgcctcacatgttatgactttagtcagctcgcctcacgtgttatgacttagacccgaagactaaaatctgagtcacttcttacagggataaatgtatgtaaaattcgaggacaactagtatatttttttaactgttttttatctccggattttaattcattgtcccttgattttaatgtttccaaattctaactatggtcttttcatattgttgatgtttaattgtttatatttcgtttgatttggtcctcaaataggatttattaaaatcatttactggttttttcattcggtctttttgttttggtccagatatttgttttgtctccggatgttgtactttaactgacataaacctgttacaacagctgagggcaaaactctttttcatatatggcatgaatgaaaaaaatttatgagatgtagaaataaaaagtttttggaggaaagtgatagagttgaccaaaatcccttaaagacatgtacatggagtattgtttagtttctctgcgtatttcttatctgaactgaatgatacattctgatgtttaaggaaattattaacaatatgatctgtatttttaatttatccactaaattttgttaaacagctaagtcgaattccaatagagaaaagagtcgtataagtggatcgtggatcacttcactcgagtaaaagcattcttcacgtaaacacctatag

SEQ ID NO: 9322 - DNA, 396 bp, Arabidopsis thaliana columbia
gtgtgctctaaagaacattaatctccagtttctggcaaacattcaggccattaattaatgttttatcaagcgtctgattacccgctacaatagtgatgcctaataaatctattgccggatgtttcgccgccatcattatagcaatagcatcatcatgacccggatcacaatccagaataatttttctcttttccattgtttatttcctctgtttccagttgcgttattttttctacagcaaagaaaattcgaccgggccgatgattgaatcttaacaacagcgtacgtatgctaaatatgagaaatctcatagcggataaacatcgtgaaaggaaatccacaataatgatcttaagcagcaattgatgagtgaatccgcgttaaagaatgcttttt

SEQ ID NO: 9323 - DNA, 573 bp, Arabidopsis thaliana columbia
atgaaggaattaactttacgctcaagagactacttggtttcatttggagaatgcatgtccactaggctatttgctgcgtacctgaacaaaattgggcacaaagcacgacaggtatgtatatatatgttacctagattgatcaccttatagattgtttcgtgacttgacgatgagttttgtttttgcagtatgatgcatttgagatcgggattatcaccacagatgacttcactaatgctgatattcttgaggcaacatacccggcggtttcgaaaaagttacttggtgactggagcaaggaaaatgcactctcccgttgtcacaggcttccttggaaaggtatataaaataacgattgattacgagtctcgtgcacgccttgttgtgacatttttagaatttcgaaaacaaaaggcctcactttgagtttgtgcagggatggagatcttgtgctgtaactacgcttggtagaggaggtagcgatttgactgcaacaacgatcgggaaggctttaggtttgcgggagatccaggtaccattatacccgggggttattgtctacaatgaagatgt

SEQ ID NO: 9324 - DNA, 551 bp, Arabidopsis thaliana columbia
  unsure (1)..(551): unsure at all n locations
nnnnnnnnnnnnnnnnnnnnctaaagcgacgcagggtgcgcaggtggatgacgttctccccctcggtaatccccagtgcgtcacgacgtggccggacgcggggcgcaataccgaaagcagtttttcgctggtgggatggctgccctgatccagcagattctggctaaaacgcgcctgggcgttgagcgggtaatcgaacgggcgcatcagcaccagcacgccgacgccctgacggcgctgtacccagcctttttccaccagttggtcgatggcgcggcgcagggtgtggcgattcacctcaaagcgcgctgccagttgctgctcggcgggaagatagtcgccgcagcggtagtgttgacgaagctcctgctcaagttttgcggctatctcttgatagcgtgttgggtagctggtcggatgtgtagacaagtgcatagatatcaatgcctcgcttatcagataaagtgcttacgcaaccgttgagagaggaaatcagcaggctgaccgtgacgatgataacaccatcagggcgcaggtttgttggaactgga

SEQ ID NO: 9325 - DNA, 620 bp, Arabidopsis thaliana columbia
cacaaataaatcttctcttctccagtactgcttttgtgacttttgctacaaaggagtcagttggcaaagcagtagctctgagcggcacaatgttctattcaagacccatcaaggttaaattcaattcttctctatctccaaaaccatattacttgtttctgacacaacctaagtaatccaacttctctgttttccaacattccaggttcgcatgcacgtgatagcttctggagtagtgtcagcagcaccacagatagttactggaagttaaacccaaatgaatggtaatacacaaagagcctacaaacatcaccttaacaacgccgttgtacagtccctacgtgtaggaaacaagtgaaagtcacaatcagttccactttgatcaaattttagctcactgtgaacatatttcagcccttttgcgtttcatgagacagaaacatagtggtggatgatgaattgactgagaaagcttataagaaagagaagcgaaggaatgctaataaacaaacacttgttgggacacagagttcccactttcgatttcttcttaatcaacacaaacgaagaagagaaaaatataactagatatcagtaagtctaaaatggtggtggtgggg

SEQ ID NO: 9326 - DNA, 625 bp, Arabidopsis thaliana columbia
caaagggagattctggtgcagaggatgaaaattcatctccaaagtttgcggaaatacacatacgggaaacacatagtagcccgattcgaacaactgtttggtgaaggtacttttctctaaaactaaaacttgagttgtcaatatgactctgctaaagaaatctgaacgttctaatatgttattgttacagagagtgaagtctcagaagagggaacagaaggttagacagaagattttcttttgggttgcagatttgtacaatgtttgacttagacaaatatgtatttgaaaatgcttatgtatatatgcttgtatctatgaatggaagtgtgatggtattacaatatgtatatggtgtggacatgatctgtgattaataatttgatttgcttcttacttctttgttttgacgagaagaacacagagaattagcctcaagaattaaaaaaaactcatcttctacttctcatgggaatcataacactcccaggtgccaaaaaaacatctcatgtccaagccaccacattccctaaatcataacttagaaatgtgatgacaggctttacgtttaaagaaacaataataacttaggttacaattcgtcattatatgagtggtttggtgt

SEQ ID NO: 9327 - DNA, 378 bp, Arabidopsis thaliana columbia
tccaacgtccgccagtgtgctctaaagtcatccgcaaatggaaaaatatgtggttaaaccgatcttctcccgtgaaggcgcaaacgtgtcgatcattgagaacggcaaaaccattgaagcagcggaaggtccgtatggcgaagaagggatgattgttcagcaattccacccgttaccgaaattcggcgacataatatgccgaatggtagctggctggtgaacgatcaacccgccggaattggcattcgtgaagaccgtgcattgatcacccaggatatgtctcggttttatccacatatttttgttgaataagccacgataccggatggcactcgccatcgggtaattgttagcctatctgcaccgacagcatactca

SEQ ID NO: 9328 - DNA, 646 bp, Arabidopsis thaliana columbia
tgcctgcagctagaggatcccctttgttctaaacaaaattgtcatttctgatacaggtttgtgctaacattcgccttaggagctggtccagtaccaggtttactcctccctgagatcttcccaagtcgaatcagagcaaaagcgatggctttctgcatgtctgtgcattgggtaacaatagtaaactcgttgattttatcatcgttgcgttttcgttcctaaggttgcttaacattgttgaatcttgttggacaggtgataaatttctttgtgggtttactctttctgagattgcttgagaagcttggtcctcggctactatattcgatgttttctacgttctgtttaatggcggtgatgttcgtgaagcggaacgtgattgaaaccaaaggaaaaacacttcaagagattgagatttctctactagccaaaccatgaatgtgttttcagtctctcatcttgttggtcactgttgtataatcaaataaaaagattcgagttttcggtagagttcgttaaatgttacatttcacgtaaactaatcaatttcaagatttgaattattcttattgtctctattagaaactcttgggtttaatagcccaatgatcaggcatgtagtgcaggcaaaattcaaaagtgtgct

SEQ ID NO: 9329 - DNA, 778 bp, Arabidopsis thaliana
tcagacttttctcttaagcttctgcttcatcctctcaattgcaccacgcaacgtctcttcgtctttacagaacgcaaacctaaccaaattcttcccttcttctggattcagataaaagacgctcgttgggatcgcaacgaccccaacttcttcaataagatactcacagaaagcaacatcgttctccattccaaatggagtgtgatcagcaaccacaaagtaagtcccgctcgatgggaacactgtaaatccgacttccttcaaacccttaaccagagtctcctttttcacattgtaatctcttttcagctctttgaagtaagactctggtgccttgagagctgcaacggctgcccattgtgctggtgttgatgtggcgaatgtgaggtaagagtgtgcttgtcgaactccccaagtcagatgaggcggcgcaatcgcccagccgatcttccatccggttaaagagaaagtctttcccagggaattcatggtcacagttctttcatacataccgggaagagaagctatagaaatgtgatccatttcaaacgcaagcttatcgtatacttcatccgagaacacaagcacatcgttttcaatgcagagagatgcaatggtttcaagctcctcccctagtgaacatcttcccggtcgggttgtgcggagtgttcataaggatggctcgagtcttgttagttacgcagctttaagctcttcaaagggatggagaagtcggtggcgtaaagtgatccttttactttagcacagcatagagagt

SEQ ID NO: 9330 - DNA, 546 bp, Arabidopsis thaliana
atccataaaccaaatcagattcccattgctcgggtggactagccttgcaggcagagacagagagctgtctggtaagggcaaatcatcgattgctaagtggatagcattggctttggattcgccggttgctactacgacaacgttagcagctgagttgatgacgggcaaagtgaatgtgattctctctggtggcggtttatgagagtcggttaggaatgtgacccaatcgtccttcacctcaagtgctgggtggttcgggaagagtgaggctacatgtccatctgagcccatcccaagcaagatcagatcaaacctgggactgtcactgttgtctgacgcagccacggttcgtgatctcaccatctgtctgatggcgaattcatactctgttgcagcttcctccgctgaaactgtgtcgttaatggaacatatatgtctcggaaacacatttacctgaaaataacaaaaaaaaatcaaagtcaacattataacaagacaaaatacacagctgtagtgacgaacaccatgattggataagtttccaga

SEQ ID NO: 9331 - DNA, 581 bp, Arabidopsis thaliana columbia
  unsure (1)..(581): unsure at all n locations
nnnnnnnnnnnnnnnnnnnnnnctaaaggagtaccgttgccaatgcgtttgctgatctcggaattaacgtcattgatgccgatattattgcgcgtcaggtggttgaaccaggtgcacctgcgctacatgccattgctgatcactttggcgctaacatgattgctgctgatggaacattgcagcgccgggccttgcgcgacggattcttcgccaacccggaagagaaaaactggcttaacgccctgctgcatccgctgattcagcaagagacgcaacaccagatccagcaagctacttccccctatgtactgtgggttgtgccattgctggtagaaaactcactgtataaaaaagcgaatcgagtgcttgtggtggatgtcagcccagaaacgcaacttaagcgcaccatgcagcgcgatgatgtaactcgcgagcatgtcgaacaaatccttgctgctcaggcaacgcgcgaacgcgccttgccgtggcagatgacgtcattgataataacggcgcaccggatgctatcgcatcggatgttgccgcctgcacgcacactatttgcagcttcgtcgcagttt

SEQ ID NO: 9332 - DNA, 518 bp, Arabidopsis thaliana columbia
cttacacatcatgcttcactgcaaattcggataaacaaacagagtgaagaagaatcagttatctcgcaaaaaaacagaaaacatagatacttttcattcgaagatattcagataaaaaccaaagaatgttacctgctgttgctgctggtatccaccaggctgctggtagtttccatagccgcccccagcataaccaccgtagtaggcgttagggtcctgaggaggaggtgcatatccgtatgcttcatatccttgaggaggatacccatagtatcctccaccaccatcatactgggcttgatcaggttgagtctgtgaaattcgtggatcaacaagtcatcagatcacataacgtatatgatagcgtagtaagcttggtgcattgtctaacagatacaaacctgtttgttggaaggactgcgacctcatgaaagacgaatgctttgtccccaagttgtgtccgttcacacagaaagtgcttgtcagcaatgcctgaagcatcagcagattaatatgtg

SEQ ID NO: 9333 - DNA, 1295 bp, Arabidopsis thaliana
tgatttcttcatttctttgtactttaatttagtttaaaaaaatgcttatcaaaagattcataaaagaagccacctagtgaatatagtctatggacatttgatacataaatctgtctttaaagatctacagctacatcgtcatcatcagtatcatcgtcttcccagtcgaggttgaatgaattagcagctttcttaagctcggttaaaccagtaagatcctccaggtatgtaggatggttaatagcttcaagtatgaaactgtttcctctctccctatactccgatatcacctgaaaatacaagtttataaacatcatcagattctcgagcgcagttttctaagaatgatgtcatgtggaaacttacggtttcagagcaagcggtacagctgttggaagcttgaccaagcagcgtgatctgtgagaactgagaaactgagcctcgtatctgatgaggtaatatcccgagaggcgaatcatcattgtttcctgtattactcaagctcgaattgtcgccttttgcattgatactgtatgtaataaacatatgtaagacgataagcctgaggattgtattttcaatgtattcgagtttcgaaaggcttacccaagtgggtgttgtaggactccgactaagagttcaacggcgagagctcctgcaataggagctagacccgggcgtgtaacagtgcattgttggtctagagttcgatcagtcattgactgcaaatacaagaaaagagtgggtacgacgaatcaggactgaactggaggtaacacgaaacaaaacaattcaaaatgaagaaaccagggaattacatcctgaggtgcaaccacgtcgttgcagaagtaacaaccaagtctctgtgtatttgtcttgtttatgtcaagattctgcatatcatcagacagagaggtggggccagcaccatggcgcattaccatgtagctgtcaaaacctaaagccgcgtttatagcgatctgaaattcacatcaaacaccgacatatcaagcagattgttatacttatataaccagtaagaagaaataaagaaacagagttagttaccttattggcattagcacaaagaagagacggtaaccacctgctttctcttgtatcggttaacaagaacaccgcatcatgagattcaatcaactcgctaaggcgtttacaatcaccgagaacagaatcttcttcttggctagaaatcggatgtccgggcatcggtatagccataacaactccactagtttccattgctggaaatatctgtttaaggcttttaacagcag

SEQ ID NO: 9334 - DNA, 590 bp, Arabidopsis thaliana columbia
taatgtttttctggaaaacttgattacaggatggtaacccgagattatcttgctttggtcttatgaagaatagtagggatgggaagagttacagtacaaatttggctttcacacctcctgaatacctaagaacaggtcagttactgatttgagatgcaatggcgtcaagttatgtgtttgctgtttgacaaagttatgatattgatctgatatatggatgtgcgtttattaatctcttaagggagagtgattccggagagtgtggtctacagcttcggaacgctgttgctagatcttctcagcggcaaacacataccaccaagccatgtaagtgcaccaaacatggctcaacttctcttgggaggaagttcttgatcttttagcttcttctccttatcccagaaaatgttgataaagttctgtatgctctaccattgttctgcaggcgcttgatctgattcgtgggaagaatttcctgatgctgatggactcgtgtctagatggccatttctcaaacgatgatggaaccgatttggttcgtttagcttcccgttgtttgcagtatgaagctcgtgaaaggccaaatgtga

SEQ ID NO: 9335 - DNA, 530 bp, Arabidopsis thaliana columbia
aaagaaattggaccagattcgtttcccagtcaactggatttcgaaatcgaaattgaaaaattagaaactcgcctgatgattttcctaacgtgctcaggtggcatgtcctccttctgagtttccacgaacccaaacttcctcttgtcgccgtaccgtttggaatttagctgcatccatgttctcgccttcttctcaagcttcgcctctgcatcctcgggagtaggaaccgtcggagtattccgattagaaggcgccgtgtaagaaggatgatcagcgggatgtgaaggtgtctgcatcctcgaaccgtcggtaccaggaggagctaaggacgtaccatcaatgttccacatagcttcagatttcaaatccaaaggcccagcaaaatcgccgaggagcaaaaccctaaaacctcagtgcgagccttgacgaacacgaaaatccctacaatcaccgtcgtcgggtgatgttggtaagaatgacgattagccgagcgaacatatatatacgaaggcattcatgggccttttaga

SEQ ID NO: 9336 - DNA, 1415 bp, Arabidopsis thaliana
tgccctggtagaactgtatgtgcagccccgcaagaaacctgaaccgggtcacgaaatcttgacgacccacctgaaatctttcttggtacactatcatctcctgcttccacctctgtgaagttgacatcggggcataatcctaatcctctttccattccccacgaccacacgtatccctcagaggacaccacgcttgtgtggaataatccacagtctacagaaactaagtaagcgtgttctgggagatctgaaactggctctggaagcgatgagctcttgttacttctatgcccaagctgaccattttctccaaagccgaacgtccagcaaatgcttggtcctttaggtgtctccttcctgtaggtgagaagagctgtgtgatgagcaccacaagctatgtcgtagactgtaagacccgacttctggttaaatgtctccacagtctgaggccttgcacggttcttatcattactaagtcctaactcgccatgatgattatttccccaaaagtacagcacggatacatcataactgttgtctttgtggatatccccaggaccaacgagggcaacaacgtgttcatccccacatgctacctacaaaaccgtccgtccatggaagtcgagtataggaaatggaatcgggatgctagtaaaagacaaacgagggtcaggttcactgtcttgtggaggaacattgccccacatccaaagacctccgacattatcaatggcaagagacatcatggagccagcctttacagtacaaacctacaagacataccgaaaatcattatgctacactttttttttacttgtaaaccaacacctaagaatgcatttctaggaccatacctttaaatctgatccaacttctctacctgaatcatttagagaagaactagatgtttctcgttcaaacaaatttttgatcaagcatggtgccaaggagttttccccatcaaaaccaagttggccatctatttaccagtcaaggattgaagcaaccaatggagagttcaggacactagaaaatgtagttatgaaacaatcatatcaagctagaaacactcagataaaggatacaaatgttgtaaccccaacaccaaaccgagccatcatctgccaaaagcttacaaggcaaaagaaacaaaaggcaagagaatggtcaatacagatccatatcataaacatacaaagtaaaacctatagtcacaattcaagcatatttattatttctcaaaaggaagttcatagatgcaaacaaaggaactaatttgatcaaacaaaatctttgatcatcacagtcaccaatttctcaaaataaatcatatggtcaaatcagcaacacaagctaatagaaaagcgaaattagacatatgaatagaagaaccacctgagacagcgagactgtga

SEQ ID NO: 9337 - DNA, 524 bp, Arabidopsis thaliana columbia
gtaacggccgccacccctcttcttcggagaagaagaaaaccgggtcgggtccaagttcgggttcgggttcaggagcggactgaagtatcaacatttggccgttttcaagaagtagatccgctggtaacaacgtgacccgaccgagaatgtcgtttggagctccgacgacccggaaagtaagcagtgcgccgtgttcacgtagcaactccaccggagaatccaaatcgaggaagtggccgagtagtcccagtcgtaacggcgtgcatcttggtcggaatagtccggtttggcaagtccggcgtggaggaggagctccggttgggaaaacgataccggaaccgatgggtcgggttgtgggtaaaagggagattccgagacgcgtaagggtaaaacagtaattgagagcaataaagcaaaagtcttgaacttgaacgtgcctatgtgcatcggttatcggagccggttaagctgcagaaccgaagagagtagtggtggtggtatactacattgggagtgctacaata

SEQ ID NO: 9338 - DNA, 938 bp, Arabidopsis thaliana
gtaccagcttgatagtcctagtaaccgttgccccttcttttttgcttcctcctccatcaacaatctcggaagcaatgacctctttgtccataacaacgaccttatcctccaccttcctctcttctcctgctttattaccaccacttttctttttctgtcctttatcactcttgaaacttggtgttcttttcttctctcttgccaccaatctttccatcaatgtcagacttatcgctcttctcctcctttcggcttacttctgtcctctggttcgtctcccttgtcaacaacaacaacctttggactcttcagttcctcatccttcccaccactctctctcttcttcttactcttcctcaacctctccttcacaatcttcttcaaacgagcagcgcaaacaggctgtacatcgacaaagtccttctccatttcatccacatcaatacctttatccaccaacactttcttcaccctatcaaagatttcatttgcagacacatttcctggctccatattcaaaacaatacgagcatccctaaacgcgtaatctaacttattcaaagcctcgtaacaccgagaacgtctgactaaagccttactgtacctaggagaagcttcaagagccaaattacattcgctaatcgcattcggatactcacctaatcccatttgcatataacaagaagccatactcgttctaagataagctacatcgatatgatctttgggcaagagcttcaaggctttgtcgaaactcaacatcgcaccttcgtggtcgcgtttctggaacaacttgttaccttcttctttgagctcaagtgctctgctaatgaaaatctccatatcttcgtcaaataccctcgaagtagaacgatggtaagttttccctgacttgcctccatccgccgccgccgccgccggaagcatcttttggcgtc

SEQ ID NO: 9339 - DNA, 473 bp, Arabidopsis thaliana columbia
gttgggttccacaggctcgaaaccaagcgcaggagattcttctgtctgatgtacgtgaagcacatgctttgccaattcaaggtcactgtccatgtcagctcgatctaagatcaaccacagcagatcgaatcttgaaagaagggccggtggaagattaatgttttcagctggagttcttcgcaaatcatatcttccccttcataaacacaaagatacatagttcaataatgatagcaatgatcactcaacattcatgagtttttaattcatatcatgagagttcacttaccaggctggattggctgcagcaagaacagctgttcgagcattcaaagacgtggtaatcccagcttttgcaatgcttacagtttgctgctccatgacctcatgaatagcagtacgatctgattcatccatcttatcaaactcatcaattgcacagattcccatgtcagccagcacctgagatagag

SEQ ID NO: 9340 - DNA, 485 bp, Arabidopsis thaliana columbia
tgcctgcaagtttcaaggtgcttcatgatcctatccgtgaaacggataacattgttgcggatttcggtgagagtgctattggacgtgtggctcctgtagattcagggttctggtggattattcttcttcgtgcttataccaaatctactggagatttgactctctcctgagacaccagagtgtcaaaagggaatgaaactgatcttgtctttgtgcttagctgaagggtttgacacgtttcctacactgctttgtgctgatggatgttccatgattgatcgaagaatggtattaaaagcaatctttgatcgaaactgattgttgtttcttgttttgtttggctattaagattgatttcttttttttcctgtatttgaagggtgtttatgggtacccattgagatccaagcgttgttcttcatggctttgagatctgctttgtcgatgttaaagcccgatggagatggcagagaggtcattgagag

SEQ ID NO: 9341 - DNA, 612 bp, Arabidopsis thaliana columbia
cttcctttgtcgcaccctctgtcatttctccgccgcatgagataattcctattgctgacggtggtgatctcgccgtggatctggatggtgatgatgatgttggcgatgatgtcgttcgcgatgaagttgatgagaatgatcttggatggtctcagcagcggatgatgtttctcggtggaggttctggttattctgttggaattacgtacggagatagtgttaatgacgacggcgaagaagatcgcgagtacgacgattcgtatgatcttgacgaagagttggttccgcgtagtgcagtaagaaggtggggagacaaaggatgaggaaactggggaaaagagcaatcgccaaggtctatgcctcgaagatatctccgtttttgaagcctggtatcgttcgtggtaagcatggtctcggcatgaaattcaagtgctgattgtgttgggatttcgaagtttcacaaggcgatgggatggtttcttcaagaactctcggtagaatttctcagtttctgggtttaattgatgtgtaaatttgttagttcaatttcaattcctctttagtagtaagtaattcggatgcttctgaagatctcattgtacatgatggaaa

SEQ ID NO: 9342 - DNA, 342 bp, Arabidopsis thaliana columbia
tgaaacttaaaaaacgaccaaaatgccctttggttgcaagtaaaaagacttaggacctaggacgaagagcgtcaaaagtcaagccgtgagatatcctcgtcgcaggagcccacgcattgaccggcaacgaccggtggtgcgctgacgtagcagcctgaggttgtggtggagggaccgacacgtgttcacatgaagggcacatggtcaaagtagtgggtgggctcatgtgcatgtagaactgaggagagagcttaagtgctctcaattccgttacttctttttgtagcagacggttctctcccgttagattctcgcagcatctccgtaagaactcgcagtcta

SEQ ID NO: 9343 - DNA, 512 bp, Arabidopsis thaliana columbia
ccccactgaaagtttgctatcccgccatagaaagccatgaatggagaatagtaactggttgtgaccccaaaaacactcggtggagctaccacaatggaggatcgtggccaggtttgccttttctcttgtacttttgattggactacaaaggaatctctcctttcccagtgttcttctggttcctctgtggtatcttaatcctagtaaattgctattctgacccttattgatgtaattatgtttaatggtacacagtgctgctatggcttctgacggctgcttgtatcaaaactggtcgacctcaaatagcaagacgagcaattgaagtagcagaggctaggcttcataaggaccactggcctgaatactatgatggaaaggtagggagatacgtggggaaacagtcgcgtaaaaaccagacttggtcagtcgcaggatacttagtagccaagatgatgctggaagatccgtcacatgttggtatggtttgtcttgaggaagactaacagatg

SEQ ID NO: 9344 - DNA, 636 bp, Arabidopsis thaliana columbia
tactatgcttacttgatcaatatggtttctgctgcagaatgatgattctatggaaggtagtagtggcaatagtgattctgtttcggggacagatgttgaagtagctggtgagaatttaagagtttttgttatgtgaaagttgtcttaatagaaaggagaggctaaatgtttttggttatgaagatgttgccaaggataagaaaaaagtggtgggcaagagcaagaaagccaatgccactcacaagctgaaagaggagattcagtttgaggctcaacttcctcagggtataagcttgatttctgtgtcaggcgttgttataccaactgaagaagctggaaatgtattccagcttttcgagttttgctcagcctttggaaaggtatggtaattgttctctttaactcggtaagtaactaaagatatgtaattgttaactcttaatctgattcattgtgaatttcctaataggctcttgagttgaaggaaggacaagctgaaactgttgtccgtgagctcttctcatgtgggcgtacacaaggagacaacaatactgctctattaccagctgatgatcaattgttggatttaatacaaaggatagagagatgtatgactgattttattctgtctgaagt

SEQ ID NO: 9345 - DNA, 623 bp, Arabidopsis thaliana columbia
gcatctaattttgtttgtttttcagtttctctcttcaggaaaagtgtagttaaacgattgagtattccaattttgttctttggctatgtaatttacagaaatgactgaagcagagtccaagactgttgttcctgagtcagtgttgaagaagagaaagagggaggaagaatgggcacttgccaagaaacaggagcttgaggctgccaaaaagcagaatgctgagaagaggaaactcatatttaaccgggctaaacagtactccaaggagtaccaggagaaagtatttttctacaagcttagtttgcaattttttctaatgtgagaaatgcaaattcattgagcgtttctgctacttgttttcttcaggaaagggaattaatccagctgaagcgtgaggcaaaattgaaaggaggcttttatgttgacccagaagctaaactgcttttcattatccgtatccgtgggtaatatgatctactattactatctcccaagtataaggatgatgtgtacttctataactgttttccatttttctactatttgtttctacatcagtacaatgccattgcccaaagcaaagaagattttgcacttttgcgtttagacaggtacaacttatg

SEQ ID NO: 9346 - DNA, 638 bp, Arabidopsis thaliana columbia
ctggacgagatgaacttcgatagcaggccgattctggggatcgtaagcagaatgcagcaatcgcttgtgcatcaagacgtcttcagccctctccacattcacatccaaagcatacctaaaccataatttaacaaaatcagtcgtctattgaatggggcacaacaacatgcaagaagaagaagaagcaaggaaggaacctggcagggaggcgattgaagtgattccagaggtcgtcttcgaaaccagggagatgggcgtcttcaatgtccgattgacggagacggcggagaacctcatcgaagacctccattttgatgcgctcacggcggtccatagtggcctgggaggtaggtaaggcgtcgaaaataactctactagcgcaactctcgttgtcctccatcaccattgacgacgacgacgaaagggaaaatggaaaagaaaggaaagtgaatcgaagaagaagaagaagatctgtttattgaacccctcgctagctcctcctattgatgattgatcgatacagagagagaggggcttggagaagaagatgaagaagatattcagatgataatcttaaagagaagaagatacgatcagaattcagaatttgagaattgagagaggcacagagattgata

SEQ ID NO: 9347 - DNA, 637 bp, Arabidopsis thaliana columbia
taatttaaagaggttactaattttaaacttcataagaacacatacgagcgttaattaacggttgacttctcgacattcttcatacaatacgacactatgctctgaaaacccttatggaccttaaaaaatgtagacccataaaaagaactataattctttattttggtatacaaactaaaaaaatattggataaacactacaacttgcggaatctctcaactctcttttcctccatataaggagcctattttggcattcgtttgtattcgtaacttagtatcgatcccttttctttctcttttcttgtttccctatatatatctcatatattcccaaaagaatttaaataaaatggcctctagttctatgagctcgagctcttcttggacgtctaagcaaaacaagatgttcgagagggctttagccgtttacgataaagacactcccgaccgttggcaaaacgtggctaaagcagttggaagtaaatctgcagaggaagttaaacgtcactacgacatcctcgttgaagatctcatgaacatcgaacaagacttagtacctttgcctaaatacaaaaccgtcgatgttggaagtaatctagaggcatcgatgattttgatttgaggtgaaacttttt

SEQ ID NO: 9348 - DNA, 623 bp, Arabidopsis thaliana
ttcaacgtcttcttgaaactagaagaacattgcttcgaagagagcaagcaatggcttatgcacgaggggttgttgctggttatgaaattgatagtattgatgatctcattttatttgctgatgctttcggggcttcaaggttaaggtatgtaatgtaactactactaaacatttcatcgtttcttaacctctttcatttgctttactatgagatcagtttgaaatctaatgtccttttccatcattatgcagagaagcatgcataatgtataaagaactatggaagaagaagcacggtgatgggctttggatggcggaattagcagctgtgaaagcgtgtgctccagtggacatgtcattgttgggttcctcaggcatcatcctcactaatgaaggtgctgctctatcactaaatgggacagactcaatgccatctaatacaggttcggaaaataaaccaccttgtagtatttcatctcagagattccaataaaggttagattgctaatgtgaagaagttttgatttgtagatgacaagtcagttaatttagagcaacatccgtccggtgttccaaactttcaagcaccaatgggatggccaaccatatgctcaatactttta

SEQ ID NO: 9349 - DNA, 474 bp, Arabidopsis thaliana columbia
  unsure (1)..(474): unsure at all n locations
nnnnnnnnnnnnnnnnnnnnnctaaagaactgtgaagtgactggctgggcgcaaacgtcggtgatgtcacatcagtgcgataccttgccgggtgacagcggttcgcctctgatgttgcataccgatgacggctggcaattaattggggtgcaaagttcggctcctgccgcgaaagatcgctggcgcgccgataaccgggccatttctgttaccggttttcgcgacaagctggatcaactgtcgcaaaaataatgttcaaacgctgcccgacagcgcgggcagcgtcttcatcaggcaagtttcaccatgatcattccagccaacagcaagaccaggccaatccagcctttacgatttaaccgttgaccaaacaagatccaacctgcggctaacgtggcggcaataccaaacccgccccacaatgcataagcgacagacaagtcgatccctttaacggcttgagaaagcgcacta

SEQ ID NO: 9350 - DNA, 572 bp, Arabidopsis thaliana columbia
ctgtggattgattatgtgtgtgtttgtattaggttgatgtgagaaaggcgattaggaaacatgaactataccaacagccgtttagcatgcagtttttggagagaaaagtgcaacagatgaatggtggtttgcgtgagatgtcgagtaatggtgtgaccagtaggactaagaagatatttgttgggggtttgtcgtctaacacgactgaggaagagtttaagagttactttgagaggtttggtaggactactgatgtagttgtgatgcatgacggtgtgactaacaggccaaggggttttgggtttgttacttatgattcggaggactctgttgaggttgttatgcagagtaatttccatgagttgagtgataaacgcgtggaagtgaaacgggcaatacctaaagaaggaatccagagcaataacggtaatgctgttaatattcctccttcctacagcagctttcaagcaacaccttatgtccctgagcaaaacggatatgggatggtttacagtttcccctcctgtctttggttatcacacaatgtccaaccgtcaatatcttatggttac

SEQ ID NO: 9351 - DNA, 582 bp, Arabidopsis thaliana columbia
tgcacgctgaaacatagaacaagaaaacatgggtctcacaaatcaagtaccgggtcctagcagctatgagggaaacttgaggagtattttaaacctcgttttcgatttcgtcctcaactgccagcttcttcgatgactcctcttccaagagggctttcatttgagatttaaggacatatccaggaggaagcgcgtgtctgtaatgacactctttgccaccattggggcatgaccagaaccacccatactgtttcttttccacagcatccagaaaatacttgcaaacctattatttttcagtaaacacaaaaacaattacaagtcaataaaactcagcgagacaaataactcatgtgtttaggataagtttatgagatgattattgagatgagacgcagagatattatttctttcagcatagacgtatatagttcagacacatttatctcaaaattatgattagcactaacatcaccaaaagcatgagttcttgtcaggcatgaaccaagtgcgcagaaaaacacaagggaacaacgggaggcataataacatctaagaccctaatggctcttaatatgaacc

SEQ ID NO: 9352 - DNA, 525 bp, Arabidopsis thaliana columbia
tgatatttattccctactgttgacagagtctggttggtttaacccttttatccagttaaacccaaattatcaacaaaaatctttgattaatttattaatcaagtgatagatagtttatttataaaccaaactgcagactgaagaaaatgagattggggtttaatgttgcgccactgcatcaaaaagcttaggagaaatggtatagatgattttaactctatccaagactcctcgaaaagctatggggtgtttactataggttatacatggcttgggaacgacgatctccgagagtcaggcttgaggtggattctgagattgtggtgggctttttgacgacagggattagcgatgcacatccactgtctttcctagtacggttgtgctatggcttcatttcaaaggactggataatccgagtttcatacgtgtatagggaggctaaccgccttgcgagtgggttagcaaactatgcgttctctcttcctttaggttttcattttttttatactaagccagattttg

SEQ ID NO: 9353 - DNA, 627 bp, Arabidopsis thaliana columbia
taaattttatttcttaaagggttagagatgtatatttttatgttgaacatgtacaataaggttgcatgtagctttgaggaaaggttgttattgacctttcattacaattgtagggtctagttccggtcacatgacttatgaacccattattgttcaacaactagacttttaaccactttaacttccctttcacattttgcaaaccagatttcatttttttccatataaaattttcaaaatatattattttaatacaaagaacaaaaacatcattctcttaatatctattaaattagatatccttataaatccttggtattaattactgcaaaacattactaaatattttctgttgtttaaattcttttatagtgtaagtaagcgatattttgtgttaaattgtcctcgtttataattttgatgttaaatatctactcatgtacacacgtgggtaatgacatattgtcatagacatatgaaatacacacgtgtaacggatagagaaagaagaagaagaaagttagtacctgcaagaacttaataatgttgctagctccaaagacacggtgagcgattgtgaactcgccgggtccgtagaggaaagtacggtgccaaacacatttatcg

SEQ ID NO: 9354 - DNA, 618 bp, Arabidopsis thaliana columbia
tcaaggagatattggagacatgctgctcctcaaggctccaaatacggttcagtactttaagaagttcggttgatgtcttgagattgtagtgaggttctctagacggtcttcctcggaactccaatgaactacttggagttactgctttgttgtatgtcgtaacctgcaaaaccgtaatcatccatatgtaaaaaaacaaacaaatctccaaaacacaatcaaatactcaattgtttaaacctcgagagagcttccgtaactagcaggagatacaggctgaagagcgtgattgtttctatcgattgattgatgatgctttatcaacatttgaccaatctgtctccttagacttcccgcactatctggctgagaaagtaggaccatatcagatagtcaagaactgagagatccatatccaaaaccacacggtggtccacacctactcaattgatcataaaagaaccttaaactctgactgagaacaccacatcaatcgcattgtcttaagattcagataaaactatagtttttcatatagaatcactctcctcactaacctaactagcgtatactatactgaggtgatatgaacttataaacgcaacttttacattgtga

SEQ ID NO: 9355 - DNA, 943 bp, Arabidopsis thaliana columbia
  unsure (1)..(943): unsure at all n locations
ttctttaaagccttgtcctcgtttctgcttcaatgctcaaagcaagaatgttgcaatgtagcctgttaaacatttcttggtcttgttttcatgttgcagcaatgatttttcaaatgtagcagagatctcactcaagtgttgtgccgttgcgttagtagaggagatggaaacgcagaccggtctggccacagggatgcaattggcaaagctattaccacagattgagaaaaccatgccggagatttcagctgagccggagaagaaccggttcttgcaactcatccgagatttgcctgaagttaaactcttttttactcttttatacgcaaatatgcctcagtagcattattaaaccccattgccaaaaattgtttcctgatcactttttatcatatgtttcgatttacttcaaaatagtaaaaccaaacatctctagaataattgttcaatatctatatcaaatcatttactaatatagtaatattgcagcaacaaaaaaggacaccgtgtattacatatctttcagtttttagggccctagaagcccaaggcccaataaaaccgggtcggtgatattaacttcttcttttttattaacttgggtctctccatctttctcagttctcactatctggacactttcgatttctgaagttgagagacgactatggcgacgaacaatggtgatgtcttgatgttggaggcgacccggnagcgtgcgaggccctgggctagtgcggcgaatgagaagttatcgatgcgcttccttatatagacgacgactatggcaatccattgattaagtcggaggtagaccgtttggtggaggaagagatgcgtcggagctctaagaagccagctgactttctaaaggacttgcctcctcttccgaagttcgattttaaggtgaatttcactgtgaatcgttttatcgatttgtttg

SEQ ID NO: 9356 - DNA, 965 bp, Arabidopsis thaliana
cctcgagaatctgtcttgtcctccttttcatccttatttatcttggattcaacatcacttttcccattgaatgcgggggaatgtcctgacaagctaggaatgtaacctcttgagagagatcgattatgcaccctaacacatacgtcatctttttctcgtttcgcccaagcaaaactgtttcgatttagagacttgtaacggccctgagaaaggcacatctccttgtgatgcatgcttcacatgggaagcttcgtctttcttgtgatctaacgggttttgcagtttcccacataacctggcatcactttcaatcgaactatgaactaaatgaccaattcgtttctgaaatgtttcagtttggtgccgcacatcctgcaaacagctaaagagggcacattcagtttcttgaacgagaaattatactcccaagatacagataacatgtagaaaagtgagtaagtaggaagtaactcaactggtgccaatctattgaatgaatgggccttccttgatggcttcctcggatctataccacgtctcccattcccgctaatttttttcctgaaagtcagacatgaaatatacggatgttacaaatgctttcaagacctgacatataaggccaaccaaaatggtacactatgtaatttcccagagctgtggaacagtagattctgtgtatcaagcttttttttattctgattaaagagatgatataagcataactagaaacttctctatcaggtaatgaaagaaattactgaccttgctgcttcgtcccgatgctttgtatctatctccttgctaggtgggtatattggcaagcttgagggatcacaagcaaaaggctttgtagtaaaatactgaaaacacaaaaggcaatgtcttcatttgtaaaagatgaacaaaatacagcaatatgctgtgtttccacagatatcaaattcttagctttttaaacttga

SEQ ID NO: 9357 - DNA, 818 bp, Arabidopsis thaliana
  unsure (1)..(818): unsure at all n locations
tagtagcggccgccagtgtgctctaaaggcaggggctgctttccgtcctgcgtcttttctggggcaacctgattaacttcatggccaactggcgcgcgctaaaacaggtacttcaacacggcgatccacgtcgcgtggcgtgggataaaacaacgcatgacttccccagcgtgactggcgatacccgctcgttgcgcccgttaggtcaaattctgctggaaaatcaggtcatcactgaagaacaactcgatacagcactgcgtaatcgcgtcgaaggtctacgcctgggcggttcaatgctgatgcaggggctgattagcgccgagcagctggcacaggcgctggcagagcaaaacggcgtggcgtgggaatccatcgatgcctggcagatcccttcctcgctgattgccgaaatgccggcctccgtggcgctgcattatgcggtactgccgctgcgtctggaaaatgacgagttaattgtcggcagtgaagatggtattgacccggtttcgctggcggccctgacgcgtaaagtcggacgcaaagtgcgttacgtcattgttctgcggggacaaattgtcacagggttacgtcactggtatgcacgccgacgcggtcacgatccgcgggcaatgttgtacaatgcggttcagcatcagtggctcacggaacagcaggccggtgaaatctggcggcaatatgtgcccatcagttcctgttcgccgaaatacctgccacgctcggtcatattaatcgttcagcaattaacgtgttgttattgcgcgnatgacgcagttctctgcgctcggcaagttttt

SEQ ID NO: 9358 - DNA, 790 bp, Arabidopsis thaliana
tccagtcctttgagataaagccatggcacaaccgcaccaggaacgccagcggatgagagtccccaatccctgactgcaaaaaacccaccaccaatgcggaatcaacctccagccgcactctcctccaacctctctcccaagccacgacaagaccgtagtagacaccccatagttccgccaaaggggctgagcagacgccaatgttcaaagcgaaacccaccagccatgaaccgtgctcatcccgtatcacgccaccagccgtagcttgccccggattgccatgtgaagcaccatccgtattcatcgtgacccatccctcagctggcttcctccacgctatcattctctccaccaacacatcttcccgagcgtctccattagctgctagatgcgccgcttcgacctccgccactgcactcttaaggaacttaactcgatcccggcaccgcgaatcctcaccaaacacgtagccacaccgccacttccatccccaccacacggttaaggcaaagagtgtaggccagctcctcctctccgaatccgacctctccttaaggttcccatacatccactctaacaaagatgtctcgaaaaatcttcgttgttccatcactggtaccacccgcatccaaatgcccatcatcgcagggcaatctcgtaacacatgaatcaaggactccgaagctcctttacacagcggacacacatcagagtcggccatatgtcgccgaactctctccgcattcgtgagaaccacttgattccctactactggcggtcgttactagac

SEQ ID NO: 9359 - DNA, 849 bp, Arabidopsis thaliana
cacattctaatagatcctctgttttgtctgtttcttatgttgttaaaattgcaggttttatgcttctgaagtacttcttgcgctagagtatcttcatatgatgggtgtagtctacagagatttgaagccagagcatgtactgttgacagaagatggtcacattatgctttcggatttcgatctttcgttgcagagtttcgtgagtcctacattgattcaatcaacttcacaaccttcttgtcatatagcttcgtactgtattcaacctccttgcatagatccatcctgcaaattacctgtagcctgtatccaaccatcatgcttcaagcctcggttcctcaacaacaaaccacgaaaggcgaaaaccgaaaaagctggttcagattcactcccaatgctaatagctgagccaacggctgctcgatctatgtcattcgttggcacgcatgagtatttagctcctgagatcataagaggagatggtcatggaagttctgtggattggtggacttttggtatatttctctacgagttgttaaccgggaaaacgccattcaaaggaaacggaaaccgcgaaacgctcttcaatgttgttggacaaccgcttaagtttccggaaggatctataagctttgcagctaaagatttgattagaggtttgctaactaaagatcctaagaagagactagggttcaagaaaggtgctacagagataaagcaacatcctttcttcaataatgtcaattgggctctaatcagaagcacaatcccatcccgaaataccgaaaccgatcgatctttcgatactatatgaaccctcaagtcatcagtgcaacaacaaggcaagca

SEQ ID NO: 9360 - DNA, 501 bp, Arabidopsis thaliana columbia
tgtacctaaactccatgctttgtttgtctccaagtctcaaccagttctccgagccgccaaagttaccaatgaagaaaggtccaccaaatcaaaactcgccaggtccttggcccgtgccgtgaactctaacccgtggtcggacgaactcgagtcttcactatcatctcttcatccgtcccaaaccatctccagaaccaccgttctccaaaccctgcgtctcatcaaggtccctgcggatggtctccggttctttgactgggtttccaacaaggggttttctcacaaagagcagtctttcttcctcatgttagagttcctcggtcgagctcgcaatctcaatgtggctcgcaatttcttgttctccatcgagagaaggtctaatggctgcgtcaagctccaggatcgctacttcaacagcttgattaggagctacgggaacgctgggctcttccaggagtcagtgaagctgttccagaccatgaagcagatgggcatctccct

SEQ ID NO: 9361 - DNA, 527 bp, Arabidopsis thaliana columbia
cctgtctctacaatcaatacagaccaatcaatcaccgagactatctaataaggaagatatgtctctcgacctaaacaaaaactgtacaacttacaatgaaccagactcaacagatcagagaaaaatgacactggaacggcgaaaattgagcacgcgacggtaaaaaaaagtcgaattagagatgaaaatcaggacaatcatctctaagagataagaaatactaacgctaatttggcttgttcgagagatcgagcatgaccaaagtggaaaagatcgtagatcccatcggcgtagacgcggacaggacgatcagtgggaggagaactctggacagccgtagagccagaggcatgcagcggcggtggaaaggccgtcttcagtgcgatcgccgataacgttgctcataatttccgatgaaggagccgaaatcacccgccttatacagaaaataaacggaaaactacaaaaggtgctagtcgcttccctcttctcctactctttttttttttatttttgtgacgaagaat

SEQ ID NO: 9362 - DNA, 404 bp, Arabidopsis thaliana columbia
gtggttgcccgttcaatgcaggagagggagagcatgatcttgtttcttaagtttcatttgatgagagctcaacacagaatgaaacaattggctgatcaacacataactgagagagaatttgaagttggagattatgtgtttgtgaagcttcagccctataggcaacaatctgtggtgaagcgaagtacccagaagttgtctcctaaatactttggtccttataaggtcattgaccgttgcggtgaggttgcttataagcttcaattgccggctaactcacaagtgcatccggtgtttccatgtgtcacaattacgggtgttggttggtactgtgacaacttcaacacacctacttcggtgttaatctgatgtctttgagagagaacctgatgtgaatttggaga

SEQ ID NO: 9363 - DNA, 496 bp, Arabidopsis thaliana columbia
tatcgaactcagcttctaccttttctctctaagcctcaaggttagttttctcatattttgattcttgatcatgattatgatttcttgccaaaaacaaaaagttgaaaagattcattgttttgattcttttgattgatgatttggtacagttggtaaccaaagatacattctcaattctagtcttgtccattgtcctcaactctctgctcataccaatggcgatcgggtttctctacgacccatctaaacaattcatatgctaccaaaagagaaatttagcgagtatgaagaacatgggagagctaaagactcttgtgtgcatccatagaccagaccacatatcttccatgatcaaccttcttgaagcttcttatcaatccgaagacagtcctctcacttgctacgtccttcacctcgtcgagttacgaggtcaagacgttcccactttgatctcacacaaagttcagaaactcggagtcggggctggaaataaata

SEQ ID NO: 9364 - DNA, 563 bp, Arabidopsis thaliana columbia
  unsure (1)..(563): unsure at all n locations
tagtctctagatggtaaagctttggtgctaggctcaaatccacgaccgttactttatctcccgccacgaaaggaccaacgtgagtcttgaggtgatggtctaacgcctcaagttcatccaacaaagccatgtcggacccgtcattggcatgatctttgctcgtcaaaaacatcacaaaagcaccaatgatcttggagcccacagatgcaaactcaggaggaaacgtcacgagagaaggctccggatatttctcctcgatgattcccactataaggtcggaatcagccacccaattttcgtcttcatcgaacttcaccaatggaagttttcccttgggactaatagccaagaaccaatccggtttgagagaaacgtcgatgagatgagttttgtaaggaagtttcttatcctcgagagtgagaagtatcctttgaccgaaagggcagtcactgagaacatcaggtgcacatgatgcggccttcacgcagacttcgatgcccatttctgttgtttttgtntccacataaattgccatacgactatatatcattttatagaggaaa

SEQ ID NO: 9365 - DNA, 967 bp, Arabidopsis thaliana
gtagaggttgttctcggcacttttaccctcctcaagggtcaccacacctttcctgcccactttgctcattgcttcagcaatcatatttccaatttcgtcgttgttacccgcactaacagctgcaacatctgcaagttcactgtcttcaacctacatcgacatgacttacattcagaaccttttgaaaaagactcttaacatattaaaagaaagagagttctataaatttgaaacctccttagacattttcttgagctcggtaaccaaagcctttgctgtcttctcaatacctctggtgatcaaaacagggtttgcaccagcagctaccacctgaataagataatcttaaaattagtacaaaagtttttgaagtttcacatagagaaagctgaaagaagaatgttacacagaccttgacaccctcagcgataaaaccttgtgcaagaacaacagatgttgttgtaccgtcaccagccaagtcattggttttggcagccgcttgcctcacaagcttagcgccaatgttctcaaccgggtcttccaactcaacctacaggagaaagtttgaaactctaagactcagttgaatgagaacaaaaatcattatcagaggggtaataattccatacctctcttgcaacagtcacaccatcattaacaattcgtggtgatccatacttgctctcaagaacaacatttcgtcctttgggtccaagtgtaacaccaacaagatctgcgagcttgttgacaccagcctagtacaacacaaaattagaaaccacagaaaatgtaaacctttagctccggtttgggaatgaagtttccattaactttttttaaaaaagatacttacttgaagtctcctaatggtagtcccatctttgttgaaatgtaattcctttcgtgcgcacacaattgcagaactggatcttctgggtctaggacacacacttgtctccttccaaat

SEQ ID NO: 9366 - DNA, 569 bp, Arabidopsis thaliana
gtgttgtttacctctgttgtctttaactgaagcatggaagaaagaagtgtttttatctcccccatgcatccatttggctctactcttctgactccagaaggtttcttcatcttggttagccttgcaaagatcatttttcagagtaaaaaccaccttagacctgggaaaacctgaagattgttccagctctaaagctgctctagcttgagaaatacaagttaaagagttgctgttattctcctgcttccaacgacttagagctgatctgcactttttcaatctttccaaaacctgcatgcccccgaccctttgatttccattccaggcctgctgaattgcctctttaaccaggggttggttgaacaaccttttgtcaaacctgaaattacctttgtactcttccttggtctttgataacctcaccaagactggcctacgatcagagcctctcttatccagaaactcctgattagaaactggaaaatgccgaaaccagtttttgttgcaaagcatctatccaaacggcactgaatccacaagctgtttcttttcctccccacgagaatgga

SEQ ID NO: 9367 - DNA, 576 bp, Arabidopsis thaliana columbia
  unsure (1)..(576): unsure at all n locations
nnnnnnnnnnnnnnnnnnnnctaaagagcactcgtgatccgggtcatacatctttttatagttaatggcgcggcgcttaccctcaggcaggataatgcgccgccatccgactattacgtttcactcaccggcgttctgtcaccatcatacaacggcactttgcgatacggcggatcagataccataaatatgcgccgcctaacgaagcccataccagaccgagtgtcagtgacgttgactcgaggttaacccacagcacacccaccgtcagcgcgccaaccagcggcatcagcaaatagtggaagtgatccttccagcttttattcattcctttacgccgccagaaatgattaaacaccgacagattcacgaaggtaaacgccaccagagcaccgaagttaattaacgctgtggcggtaactaaatcgaagaacagcgccgacaacgcgacaatcccgaccataatgacgttgagtgccggagtccgccattttgggtgcacatagccaaacacgcgctccggaaacacattgtcacgccccatcacatacagcagacgcgacacgctggcatgtg

SEQ ID NO: 9368 - DNA, 1252 bp, Arabidopsis thaliana
gtacgttttctccattttggatttgacccttttgctataagatcctgaaactacatgctctgttttgagtattgactaaaggtttcaactttttttgattcgatcatggattagattagttagggttttgaaacgcaggaagatttaaactttatgttagttttgagattagtagtttcatgtgatctaattttgatgatcttattgtgtgtgttgttgtatataggttcaagagctttatgagcattctgcagaatacgaagggaagcatgaacctaagaagctagaggagctagggagtgtgctaacgagtttagatccaggagattccattgttatcgctaaagctttctctcatatgcttaacttagccaatttggctgaggaagtgcagattgcttatcgccgtaggatcaagaagctgaagaaaggtgattttgttgatgagagctctgctactactgaatctgatcttgaagaaactttcaagaagcttgttggagatctgaacaagtctcctgaagagatctttgatgctccaagaatcagactgtggatttggtcttgactgctcatcctactcagtctgtgagaagatcattgcttcagaaacatgggaggttagtctttgaggcttcaccgggcttgctttggatcgatgttttgatgttaaagttatctactttgtgcggtttttcaggataagagactgtctggctcaactatatgctaaggatattactcctgatgacaagcaagagctcgatgaggctcttcagagagaggtaaaatcttattggattcttcatatttacatgattttggaaactaatggaaaaaaaacttgggtttttgttagattcaagctgcattccgaacagatgaaatcaaaagaacaccacctactcctcaagatgagatgagagcgggaatgagttatttccatgaaactatctggaaaggtgttcctaagtttctgcgccgtgttgacacggctttgaaaaacatagggatcgaagaacgtgttccatataatgctccattgattcagttctcttcttggatgggtggtgatcgtgacggtacatttctacaagtccttctcgcatagctctcttattgcgctccctctcttaatggtttactcatgtcacaaactacaatatatgtgtatttgcaggtaaccaagggttcacctgaagtcccagagatgttgcttgttactagatgatgctgctctatgtctttacca

SEQ ID NO: 9369 - DNA, 589 bp, Arabidopsis thaliana
tcctttccccttaaactaagaggtcgaggtctcagtctagcagtgcttgctgaatttctggtgcaaacgcacttgtgacatttgcgttttcacccctaaaggtaacctaccattcccttgaggacaaaaattctcgtttgtttaagcttggtatggccattactgtagaaatggtagcaacccttttgcaagacttttttactttagaagaaattgtcaatcatatggttagtcgtggtgaaattctagtcgaatgatatcgacacccacagttagagtagtttttcttctgatatctaactggaacttttcgtttggctcaaatggctctgttttgcaggaactgctgggagctgggatactgttttgtgggtttggtgtgatatgtgtattgtctctggtattcatattcttcattgtgccagagacaaagggtctcactcttgaggaaattgaagccaaatgtctctaaaaaagaggtctgttctttgcttagaaacacaaagtcgtgtgctcctcacatgattttgattcatattgttaacagtgaggaaaataatagtgcaggttcagaacaaataaacatatg

SEQ ID NO: 9370 - DNA, 542 bp, Arabidopsis thaliana columbia
tgtcatatatcctttgctattaaatcttttgttttgcttcccgaaacaactttaactgtcaacagaagatattcgttagaccttaacatagttacacgtatgcttatttcaagaagctggactacttctccactgaatgtaagttgtgcattttcaaagttttgttgcttctgttcgtttttatcacttaaagagagctctagctaactagctttttattataagtccactacgagctgaatgcataatttggtcatttatgttggagttgaatcatttattctgattgcaggcatatactcccctaatgcttatcgtggattcgcctgtgagttcatcaatgacttggaaagactaaggtacttgttcaactgttgccgtatatattcaccacaaccaaataagcaagtaattctccaatttatattatataaactacaggccaagggctattctggatatcatcaagtcaggtgaagacttcagaattggcacaaccacgaaaatgcctgagcaagggacttgtgagcgatgtgggtata

SEQ ID NO: 9371 - DNA, 498 bp, Arabidopsis thaliana columbia
ctttcactgcttacatcaggcccagaattcctctctgaagttccgttatcgaatcctacatgtctatcaaaaaccattcggcttgcaccatccgactgacagtggataaactcattcttcaagtcatttagcagttcttctttcttgggaaagaactgaaatgcgtaaccaggaaccaaattgggagaaacttctgataagggtgcatccattgtatggtggccatatggttcagaggaggcacagtccacaatagaactggaattaggggagaaatgagacatcagggaagaattttgcgtggctccaattcctgagtcatttccaggcatgttattgagataggtagtcatcgtagtgggactgcaaggtgtaactgcaacatgatataacaatcagtgagaaaatctctcaattttagctccaaatgataaggaacatgaaaattttaagagaataaaacctgaaaacttcatagagaaggttcatacatttgga

SEQ ID NO: 9372 - DNA, 562 bp, Arabidopsis thaliana columbia
tatcaaggtttggctttctgccaatataaggttttcacaattgatgatggatgctgcgttaatccgcttaccctttcttctttggaatcaggatcctcgtgattactttgaatctcaacaaggaaacgtcctcaatgtacccagaggagcaaagggcttgaagagaaatgtccatgaagcttatggattactaaaggaatccattttagagattagagctacaggattaagtgatccgttgattaagcctgaagtttctttcgaggtgctattctgtcacataataaaaagtgtgctgacaaaagaaatcattacttattgctttgttgcctgagctaaaaattgctaaccctattcaggttttcagttcgttaacccgaaccattgcaactgctaaaaatattaatgggaagaaccacgagagagctttctggacagattaccaaagtccactaaggatgaagttctacacgtaagtccgacattttccagtgtcctaagtgacaagaagctctatatgtactagttagtgaagattaggtagtaatgcatatggataaga

SEQ ID NO: 9373 - DNA, 566 bp, Arabidopsis thaliana columbia
tgtacttcgctcttcctttaagttcgcttcatcattctcttaaagccgaggaaatggctgcattggctgttaaagctagctctgctcttatgagaagtggtggttcatgtggccgagataaatgtcggtgtcgtcggaaatgtgtgtctccggtgatcctttctgctcgaagagtggcggcggtgggagctaatggagagacaaggaatgggaatagacgcggtggtggtggtagcgggaggaggaagtatgcggcgaagttgagtaagatagaagaatgaagggtagtttggtgatttagttattattgtagggttaagtttgtaaatatgtagttattatcggagaagtattgttgtgcctaatgcaaattgcgttttgcaacgtgggaaaacttattgtacttggtttactagtcatatgagttgagaaagaccaaaaatctcgatattatggatttaagttacaattttacggttgcattttcttaccaatcattcaaaagatatatagtgtatatgtggtgtgattttaatcaatgtggttctatgcggtcaaaattatta

SEQ ID NO: 9374 - DNA, 522 bp, Arabidopsis thaliana columbia
cccatgtcaaggaagagataggccatactgtagaacagaaagctgataagtgaaacttacttaacggtatatcagaattctgtatcttacctctctaccaatgatggcgattgaaggtactgtcactaaccatggaactggtcctaagacaacggcgaccattggtttagtgcacaacaatatcaatgtagctgctacgataagctgcataccaatgacataaatcagaatgatacaaatcattcctttctggtggagaacagataaagaggatagaggtagctcaggaagaaggtatctgaccttatctgccactggatccaaaaatgcaccaaattcagaacccaatctcatctgagaaggcacgtctcactgttacaagcctacaatttcaactatgcagaagaacatgagagggtaaagaaagaagttaccttccgtgcaatatatccatcaagccaatctgtaatggctgctgcaatgacaatacttgtcgtagcagttcttcccaccagcaatcaa

SEQ ID NO: 9375 - DNA, 615 bp, Arabidopsis thaliana columbia
ggtaatgttgttcgaggaaattacccaaagaacaacgaaccggaaaagatcaatcatcgtcctcgtacacaatctcaaaatcccacgcttcttgtggaggataatctcaaagtttgttccttttcccctgtattttggtgaacaaattaggtttcttcgttagatttgttaaactcatgtcatatgtgtatatgtctttgatctgcagaaacctgtagtcaagagaaacgcagtaccaaagccgaagaaagtggctgggaaaccaaaggtagtagacgtgattgagataagttcagacagtgatgaagaacttggtttagttgctgctcgagagaagaaggctactaagaagaaagcgaccacttacacatctgttcttactgctagaagcaaggtaattttttaccttgtgaaatgatgattctttagtgtgaagtaagaaaatgttttggtctgttctgaataaacttcttttgcttttcaggctgcttgtggtttagagaagaaacagaaagaaaagattgttgatatcgattctgctgatgttgagaatgactcgcagctgtggaatatgtggaagatatttacagtttttacaagtctgttgaggtttgt

SEQ ID NO: 9376 - DNA, 509 bp, Arabidopsis thaliana columbia
atcttcctccacaccaagtcaccaactgtggatgagtctctctaaaaccttggcttccttcgacttcttctgttttctccggcaatgtcgttaaaactcaacactccttttccaattttcgcgccatgtctatttcctcaagtataccccagaagcacccagcgagatccgattctctagatggggcaacgctaatgccgaacggttcgagcagcgtcgccggagccaagaagaactcgaggctgagatccgtcgggaccgccgattcgacgccgctactaaaatcgtccatacccatgattccgaagcagcagctgctgagcctaaaacgtcaccgtttagatgaagaggcacgtccttcacttcgctgtgctcgttcgattccgggtcgaagatgcaaatactccaaacccgattcaggacccaatagacccaagaagaaacctagagtacctgattcgccgccgcaactagacgctaagcctgaggttaagctaagcgaagatgga

SEQ ID NO: 9377 - DNA, 601 bp, Arabidopsis thaliana columbia
caacttctttattgtttccattcaatattctccaatccgagtggttattaatcttgacctctttgtcttttagagtaggatcagattcatatccatctccagagctaatagaagaatcagagtcatcttcaatatgttcattagtcacaacagacttatttaacccctctgcaactgcaggtgtcgtcaaacccatcctgttgttggcttggacctcttttgctttctctgaattctggatttcaggtattgatggcatttcaggtacttgtatttcttttgctttctctgaactgaaaacttcaggtcttgatggcatttcaggtgcttgtacctcttttgctttctctgaactgtaaatttcaggtcttgatggctcttcaggtacttgtacatctatcgctttctctgtagtgaaaatttcaggtctggatatggatggcttctcaggtgtgttcaattcttttcctgtctctggattctcacttcaggtctggatggagcccagttgtttcccagagttgatggaaacagaacttcatactttgatcattagtagaacaaagttgtcacacctcaattcatcctcattgatgtggct

SEQ ID NO: 9378 - DNA, 531 bp, Arabidopsis thaliana columbia
tttgttttgtaatttaaattcttatccgatttgtttattaagatgtaattgtgtggtttggattatttgattggatttctactagaaccctttatcatttatattttgtgtctcactacaatatacataattatactattataatgttttaagaatacacttccaatgaaattggtagaaaaatcctttaggtttgttcatgtattactcttttctttactaatcgtttcatcaatctatgtaataaagactacagcgacccaaaacatttggaacgttttgaacttttttttatagcactagaattttagtctctatgattacaaagttaagtaatagcatattgtaaatcattgacaacaaaaacagtttaactcagtttgcactcatattaaaagctacaagcgatgcataagcaccacctgaaatctccattaacgtttcatgtctcccactctccgcgatcacaccgttcttcacaaccgcgatcatatcagcgtccttaatggtagtgagcaggtgagcaccaca

SEQ ID NO: 9379 - DNA, 588 bp, Arabidopsis thaliana columbia
atgttttactacggatttgccaccctaattccattttttgtttggttacagttgtttgatttcgccgacaaatacagaggaaaatacgacagcagtatcactgttgcccagaaatactaccgatccgtcagcggttacaatgtaagatcccacaggttttgtaatctgagattaaaattaagtgctttatcaattgttccgatgtctgaaactgttcttaatttcaatgatcaggacgagttattgtgggccgctgcgtggctataccaagcttcgaacaatcagttctacttggactacttgggtcgcaacggtgacgccatgggtggtaccggttggtccatgactgagtttggttgggacgttaagtacgctggtgttcaaacccttgttgccaaggttagtattagtagcgtaaccaatttttgaattttgtggttaacggttttgacaatcttggtttgatactaaaccggttattttgtttctttctttgacagtttttgatgcaaggcaaagcaggacgtcacgcacctgtgttcaggaagtatcaagagaaagctgattcctttatgtgttccttgttgg

SEQ ID NO: 9380 - DNA, 669 bp, Arabidopsis thaliana columbia
ttgactgtgtagttttttggtgtagatgttcacaacaaataggaaaagaattgaatttactcttccaagttgccacatgaatttatcaaccatttggagatgaatgataactaatcttctcaaaccatgatgattgtcgccctaagaaaattcatagaaacctaattaggcttcgaaacataactagaatctagagtacaccagttacaagtctaatcctttgaatatgttttcctttactctttaccaattttcaaactattttcttgtagtccactaacattcagtgaaaattttgtaacattgatcaaagcttctgtttcagatttcaaggaggaccaagtgtatagtataccagatatgtaccactgtctctataattagaatgatttttttgtttgtttgttgaaaacaatataaaaaggtgataaataaatcagtaataaataaaacaaggatcacatacacacattacacattgtttagtctttaatataggacatgctgactctcctcacaaccctgacttgaaaggcacgccagtggctggcaaccatgaaccgccggctataaggcttccaacgtaaaccgagaagaaccgcggtgctcgttatggcgtggaatcctttccacggacccgccatcttgtggaagaccccggccaaaatt

SEQ ID NO: 9381 - DNA, 598 bp, Arabidopsis thaliana columbia
actctagtccccataacacaacgcaaataattgtatgcttttaatgtttacaactatttaaagctaatggcttttgtacttggtaggtgaaagaccctcatctcaaaacagtctgcctcttagaggtgaaaatgagaaacccgatgtgactatggggactcctgttatgcccacagcaatgagtttccaaaactctgctggcatgaacggtgtgccacagccatgggtatagtattcttgtgccactctcgttgacttcatttattcgtgacatccccttttgtttgtttattggtgttagtgtgtgtttatctgcagaatgaaaaagaggttaaacgagagaagagaaaacagtcaaaccgagaatctgctaggaggtcaagactgaggaagcaggtgattgctactaaacattttgtaactaaagactaatgatgagagctgatagattttcatatttacttaatggattgtttgttgtcacataggctgaaacagaacaactatctgtcaaagttgacgcattagtagctgagaacatgtctctgaggtctaactaggccagctaaacaatgagtctgagaaactacggctggag

SEQ ID NO: 9382 - DNA, 584 bp, Arabidopsis thaliana columbia
tgctagaatgatcattgcctgtattgaaaagtcgaaatgtcattttgactggctcatgttattaggaaacatgctatagattggccagattgcttgcttacctgcagggctaatagatagaatgtccagagtcggtcaaaactatgatatatgtgccaaaatgtccgagtttcggtgaaatttgatttgcctgtgcgtcctgcttttctaaacgatcctttctttccctggaaattaatttaaaatcgaaaaaatactgattagatcaatgggggaagagaaacagcaaatgaaaactacaagagactacctgtgtcgtatcacgggttgatttgaaaagatccccatcatcacgcattggccagccaagagagaagcaatcaggagtcctatataacagtaatgcgcaaatgatataataaactcaggtgtcctcaccaagtaaaggtgcaatctacagacttaagttcaaaataccagaaatattcgttcagatcatcatagttggaccaatctgagtgagcagccttgccatttgcattcttgtttgcttcatagttcagtaaaaaggttagctatgatgt

SEQ ID NO: 9383 - DNA, 533 bp, Arabidopsis thaliana columbia
attcccaattcctgaaaacattcccgtgacagatccggtggcaccaggacatggcggagtaaacttgttgggacggagaggacgaagacaagttcagggaattgtgattgatcctgagtttgctacttttactagaagcggttccacttcttcccgacgtttttctagaagcggttcttcccgacgtttttcatcgtgaattgaaatataatccgcccgcatacacatacactcacagttcttaacttaacggattgcgctctacaggtttttctggttcgttgttgtagttttatacgaggaaaatcacaggcgtgtttatttgaaattgtgttttacgtaattatgatgtaaattagactgaagtttgcgattaccaaaacaaatattaaacactactatcagtgtgacacatccaaattctagtgtaatcaacattgtagctaataaacgactactctttatatcgatgcgtttagcacgctgtgactgtacatttatcggagaaacataatcgaagaactagcattgtg

SEQ ID NO: 9384 - DNA, 476 bp, Arabidopsis thaliana columbia
aagttcttgagccctttgaacgcgttttcaggaatcgttgttgagaattttgtgttgcctttgagcattaaagcttgaagagagtttaggccttggagagaagacgggaatggacctgataaccggttatagctcaaatccaaaagcactaattggttgagccggttaatcgattctgggataggaccagtgactctgtttcggctaagatcgattttgatcaacgatccacagcttgtgagtgtgggtggaacggtccggttaaaagattctggttcaaatccagaacgctcagcgccggaagaacaaaaccgggaatggaaccagtcaaccggttaccactcaaatcaagcgatcttaaaccggagaaccggttgaacgacaagggaatggagccgttgaggtgatttttatgcaaatcaagaactttcaaattggtgagattgccaattcgtcagggataggtccaaaaaaca

SEQ ID NO: 9385 - DNA, 548 bp, Arabidopsis thaliana columbia
tccgctattttagggttcatatcagcatctaaaagaatgttacttgctttgatgtcacggtgtatgatggttagccgcgagtcttgatgaagatagagaagccctcgcgtaatccctcctatgatgttgtaccgtcttttccaatctagctgactcttcttggttggatctgcataagacaaatatttttaaaaacatttggtaaaatgcacataattaaaccaagtaagtgtttttgtttattaccaaagaggaaataattaaggctcttgttgggaacaaactcgtagacaagtatctgttcatctctttctaagcaaaacccaagaagcctaacaagattcttatgttgaagcttagccacaattacaactctcgttcttgaactcttgtgtgccttgtcctgaattactcgatagccgcttcaccgcaacttctgtttcgtttggtaacatccctacaaatatacaatattacaattactgacgaatgaaaccaaagttgcggtgaagcggctatcgaagcttcttaagtgattagtatttttg

SEQ ID NO: 9386 - DNA, 478 bp, Arabidopsis thaliana columbia
ccgataatagaatagaagactttcttcgtcgacttactcgctcgcatgacagcatttagtggtctcttcactggcttaggctatattggggaacgctcggctacaagattgaaaagaccgatatgatagctccacggccggagccgatacttctctctcaaaccattacctttccccgccacattcttttttgacggagagacgattcaagaggatccagctaggctgaaagcggaggattctttctttacctgtgccccggacccaagctcggctgaaggcaaggaattctttctagactgaaccgcaacctaggcctaatcaaccccggtagcttcgacgtgaatctcaccagcctcgcgaactccttccacatccgcgggcacttcctcaaatgtgtcgatcactttctgaattgctccctggtccagaaagtggaacggttcatcgactcctagaatagcgactgtgcagagag

SEQ ID NO: 9387 - DNA, 1249 bp, Arabidopsis thaliana
tacatttgctgtggaatctctgttggattcataaatgggtctgcttaagacatttacttctgtgctggtcttgatttttgattctttgtttgtagatatgtaaacgatgcaagacctttctggcagtatatagtgactgcatcaacaggctgctcggattcacagtactttgaagagctttacagctattttactacagaacaggtttgatctctactactacttctccatatgcttcagtaatagttttggttctttctcttgagatttctccatttgctttcccaggcgtggaagttatgtgatccagatgcagggaaagtgtttaaggctattaaagaagcgggtgtaaaagttgcaatagtctccaacttcgatactcggttaagacctctcctacgtgcattgagatgtgaagattggtttgatgctgtagctgtttcagcagaagtaagataacctcttttcgtttatatatttttgttgatgatccgaaacgttttgggagtgagtgtgtaaatacttaaggtttttggttgaatgtttaacaggttgaagcggaaaaaccaaacccgactatcttcttaaaagcttgtgagttattagaagtgaatcccgaggatgcggttcatgtaggagatgaccgtaggaatgatgtatggggagctagagacgcaggctgtgacgcttggctctggggaagtgaagttacgtcatttaaacaggtaaacgaatctctctggttttgctcaaatctctcaagaatttaaaaatcattggtttacttgaaatgaatgtgcttttgttttgttctgcaggttgctcaacggataggagtgaaggtctgaagcaaaagcatatgagagaaatggttcagagacatgttcagacttcagttttagcttcttctttttttgtgtgagcagttttgtatattccatttctcttttgtagcataatgtgtgtaatatatgttgcggctaatgtagaaaaccagaaaacaatgtataataaaagatcaataataagcttcatgatcgttcttaatccgaaccgaagtgttgtactgttttcgacatttgcttataaaagaaggagaattgagttctttaaatatgtgatcaagaagagatcaagaaaaatggaaatttagagttgaacctaggcaacgtatggacaataccagaagttgccatcatatcaatggataaatctaatcaaactgtatctgtgattattgtgggttgta

SEQ ID NO: 9388 - DNA, 537 bp, Arabidopsis thaliana
gcgattaaagataagtttcctgctcagtcaagcaagtctagtgtgattatagttggtgctggtttatctgggttggctgcagctaggcaactgatgaggtttggcttcaaagtcacggttttggagggtaggaaacgacccggtggacgggtttataccaaaaagatggaagctaatagggtaggtgctgcagcggatttaggtgggagtgttttgactggaacattaggaaatcctttagggattatagcgagacagcttggttcttctctctataaggtacgagacaagtgtcctctttatagggtggatggtaagccggttgatccagatgtggatataaaggttgaggtagcgtttaaccagcttctagacaaggcaagtaaacttaggcagttgatgggtgatgtttccatggatgtctcccttggggcagcactcgagacattcaggcaggtttctgggaatgatgtggccaccgaggagatgggtttgtttaactggcatcttgctaacttggagtatgcaaatgcgggc

SEQ ID NO: 9389 - DNA, 491 bp, Arabidopsis thaliana
taagtgtccctgtctgacagctttgaagagagcagtggttctcccagcacgcagctggagatctgagaacgggcagactgcctcctcaagtgggtccctgacccctgacccccgagcagcctaactgggaggcaccccccagcaggggcacactgacacctcacacggcaggtattccaacagacctgcagctgagggtcctgtctgttagaaggaaaactaacaaccagaaaggacatctacaccgaaaacccatctgtacatcaccatcatcaaagaccaaaagtagataaaaccacaaagatggggaaaaaacagaacagaaaaactggaaactctaaaaccagagcgcctctcctcctccaaaggaacgcagttcctcaccagcaacagaacaaagctggatggagaatgattttgacgagctgagagaagaaggcttcagacgatcaaaatactctgaactacgggaagaaattcaaaacaaagga

SEQ ID NO: 9390 - DNA, 551 bp, Arabidopsis thaliana columbia
ctaaacgatcaactgtggcgtttcccgagtctgagatatgagtatacagaaagcgagagagtgggtaagttatgcggggctggcaagagtcgccccaaaaggaaaggaaaccattaccctgatgctcaaacttcagacatgagatttgtcatgtcagtcaaatattctggagaaggtaatgtcttgagaactgcccgtgcaagtccttactttgtgggagaccgtttgtatcgggatcttttggttcgtgggcaaggggttgggctaactggaatccctatgaatgtcaacagtgtcactaaaagctttacaaatatcacttatagaatccgttctttgaatccaaattccgaatctcgtggagatatctacgctgagggaacatatgatagggatacaggtgagctatgcatggtaggatgtcaatcagttaggctaaaaaacacagtggctatacaaaacgagactgtggattgcagtcttgcaatcaagattaacttttctccaattgattcgagaagcgatgaccgtttaaagggaaccatcaaaag

SEQ ID NO: 9391 - DNA, 358 bp, Arabidopsis thaliana columbia
tcgatctcagaggcaatctcagctggaatcttctctctgtattcactcaagctcttctctacactgtaaattgttgtatcagcactgttcctaaggtcgataagttgcttcttctcttgatccttctgtgcgttaagctcagcttctttcaccattctgttaatctcatcgtctgagagaccacctgaagatctgattgtgatattctgctctttacctgttgctttgtctttcgctgagacagtagtaataccatttgcatcaatgtcgaatgtaacttcgatctgtggcattcctctaggtgccggtgggatgccaacaaggtcgaattctccaagcactttgttgtcagccgcca

SEQ ID NO: 9392 - DNA, 451 bp, Arabidopsis thaliana columbia
tcgacgatacgcaacatcatcaagggtataaaaaccttgtgtcgaatagcggtaacccattaactgaaaattggtgccgaagtgttcatcgatttcgcatagaggaagcgaatagaatccccctcatgacgactggcgtcggctaactgactgcgcgcatgcgttacatccagcgacactgcgccccagttcccgagattgcgccccagccctaataaaaaggcggtgtaattggcagataattgcgtcccgccgtacagtgaaattcctgtggtaaaccgccgagtgccgtaccctgaaaaaagaaaggcgatgattgctgactattaccgctacgaaaatcgcccgccgtcaggtcaaatttgaaaacccttcgcgttgtaaaattggcactgttgaatacggaattgtgtaattctgctgattgccatcgcgctcgtcgatggtgacg

SEQ ID NO: 9393 - DNA, 433 bp, Arabidopsis thaliana columbia
ccccatgaaattcctcggccccgtcacatcaggtttgtacaatacagatatcttatcagttccatggctgatctcaacactttgaacaccaggaagtgcttcaagcgacctttcaataaccttcatggattcatcagtaagctcaccatcaatcttcaaatcaatcttgctcacatcctcgcctgtccttatcagcacagcttcacaaccagcatttcccatctcctccaatagtctatcatagctcgagagtctaggatcataatgcatctcagcttcttcaattgctaaagccacatgtgctctttgtacaccattaaccgattgccaaactctttcgattgttgaagaacacgaagtacaagtcataccattaattcttattctacaaacttgtctcgacctctcatccgcttcactctcgatcaacgat

SEQ ID NO: 9394 - DNA, 527 bp, Arabidopsis thaliana columbia
tgatagctaacaagcgtgaattaaaaagttcaccttggaagaattggatctgtgatgaattacatcgcgagtgatctgatttgcatgccttccagataccgcctggatcagcagtaggaggagctaagctctcttggatctaacagaaaaagttcatacatatgtattctcaagaatcaaacactgtggaaggacgaagtaattcacgagctagatgcatcatgaatgacatacttctcccctgccaagagtcatatgctgtgttgagaagacacattggggttttactgtctgacaccaagttctggggaaaaaagcactgaggaaaagagaaaggacacaaaggacaatgtcaaaagattctctcaaaccttgtctacctggaaaactttgctactgaaacaatgatactaataaagtgaaagagatataccgaagtaggatccaaatggtttgtacaagtactggacaagtccttttggaggttctataaatcaacagagaagagtattaagagttagagtaag

SEQ ID NO: 9395 - DNA, 555 bp, Arabidopsis thaliana columbia
  unsure (1)..(555): unsure at all n locations
caaagtaagagcttttggattgtctgaaggtgagagcgtgttttcttttgtctcccttatgcccagtccttgaggtgctttatatagaattcttaaacctcttttttagcgatattctcagaagatatccatttatccttaagtcggctccagaaaataatcggcttatggatatattccttattctccggagacttcaggaaaacttcttgatttgacaatatcctcgaagattctcctacatcatacgcttcgcccgttaaaaagagaaagattatcggcgggttcccgagcaaagatgagccgtataccgaccacttccttttaatggccctcgacgactcttctattcctgaagacctcctcggaaaatctctatcgagatacagggtactctttagatacgtagttagtgtttatttgtccgcngagcgccagctaccctcgatacttaccttgtttcttgtctttcgcagatcatgccatcaatttctttgaaccttgtcctgacgatctcattcgggcccaaaagaaactgtctgtcggaagtgtgat

SEQ ID NO: 9396 - DNA, 501 bp, Arabidopsis thaliana
tatttgtttaggtaatgatctaactcattggttcccaacatctatgcacacgtttcaatcagaaatcatatacatggatttaagtttacaatgtaattttatgccaataagtcatagactagcaatataccttggcaattttgacaagttgatcatgattatcatggccataaaagaacggttccttacggaatatctgcagcatcaatatttgacaagtgaataagcaacagcaaagtattaacgactaccattcggaaattcaaatgcttgcaatagcttcagcattgaagctagagagaagagtgaggggattattagttctcaccatgccagcaaacatgcaaccaagactccacatgtctaaagaatagtcataatcctgtagatcaactaaaagctcgggacccttgaagtatctggcaattaattcacaggtttttagtctaatgcatttcacaactaccagaaggtttgattgacagctaaaagtttcaatca

SEQ ID NO: 9397 - DNA, 487 bp, Arabidopsis thaliana columbia
cccacaccaatccaactcccatagctcaaagtaaatacaaaatccaaagaatcacgcatctctcaagaatatatcagacacggagcaaaaaggaaagagagggagagagattcaggtgtctcgaggtttgaagaaacagaggcacccctgaaactggtccggagctatcattccaccacctttgcttgtgtctatggcttcaagcagcttcaccacctcctccatctccggacgcctgtctggattcgggtcccagcatctcttcatgatgtttgccaccgcatgcgtgcagcatttcggaatctctggtctcagattctgagcaagatgcaccaaacagtgacttcattagatttcctgattagctttaacataggagagattgtatgtatagacagagagagagagaggatcctatgaacaacggcgtgagagatctcagcaaaactacagtcagcatagggcatgcacagcagtatatttccag

SEQ ID NO: 9398 - DNA, 1142 bp, Arabidopsis thaliana
actcatgtgaacagaacacaagtctaagtactaaattaacgactaattaataaaaagagaaggaaaaaaacaaaagaatagtcatcactgtcaaaaagaagaagagtggacacaacagagtctctctaatgattccttcgtacgcatcctcatcttcttcttcttctctcttctactgtatttaaacactctctcgtcttctccttggatccagagagagacacaacacaccatctcaatcatgtcttcttcgtttctctcctccactgctttcttcctcctcctttgtctaggattctgccacgtgtcctcttcctcctccgaccaaggaacttacatcgttcacatggctaaatctcagatgccgtcgtctttcgacctccactctaactggtacgattcatctctcagatctatctccgactcagccgaattgctctacacttacgagaacgcgattcatggattctcaacacggctaactcaagaagaagccgactcgctcatgactcaacctggtgttatctccgttttaccggagcaccgttacgagctacacaccactcgtactcctctcttcctcggtctcgacgaacacaccgcagatctgttccctgaagccggctcttacagcgacgtcgtcgtcggagttctcgataccggagtttggcccgagagtaaaagctactccgacgaaggattcggtcctattccttcctcctggaaaggcggatgcgaggccggaaccaatttcaccgcttctctctgtaaccgtaaactaatcggagcaagattcttcgctcgtggttacgaatcaacgatgggaccaatcgatgaatctaaagaatcaagatctcctagagacgacgacggtcacggaactcacacctcatcgaccgccgctggatccgtcgttgaaggagctagcttattagctacgcttcaggaacagctcgtggtatggctccacgcgctcgtgtcgctgtttacaaagtctgttggctcggtggttgtttcagctcagatattttagctgcaatcgataaagccatcgccgataacgtcaatgtcctgtcgatgtcactcggcggtggaatgtcgggatattatgagaagagctctcagtctgtcaatccttacta

SEQ ID NO: 9399 - DNA, 590 bp, Arabidopsis thaliana columbia
  unsure (1)..(590): unsure at all n locations
aatcgagaacttgaagaataagcatccaaaaccagatttgcccaccctacttaccccgcaactagcttggcgctacaacaagactcagtttacagaccacctcaacaaggtgaaagtctatagcattgacgtctacaattcactgatgaaaaagcaacccgagatgtggtcaagagctttctttagacttggaagcacctgtgaggatgttgataacaacgcgacgcactcattcaacgcatcacttacgaaagtcagagctaaggcaatgattccaatgtttgacacaattaggaggcaagctatggagcgcatggctaacaggcataacacatccaatcatgaagggatgtatatagagtatgttgccaagcctcttgcgaaacacaagacagatgcaaacaagtgtgaaacacttccggcaactcctggcattcatgaggttatgctttatgggaatgattatctggtgaatacgaagcaaagcacatgtacatgtggtacatggcaaatcagtgggattccatgtaagnatgtgtatggcagaatgattgactangatatgcatgttgaaaatctatgtataggat

SEQ ID NO: 9400 - DNA, 668 bp, Arabidopsis thaliana columbia
gtggattgccttcttaacaaaataggattttctcatgatgcatgttagtgatttcttttgagcaggaaaatgtatacctataactagaggtggtggaatctaccaagaaaacatgaatgaagctctccagcgattaaaagatggatcttgggtatgttatcttgcacctttaaactaattgtacttagatcttttcagacctctgacctttggatttaaccatgactagtagctgcataccttcccagagggaaaggtgtttcaagatgatgttcctataagacgacttaaatggggaactgcaagcctcatcgcccgttccccagttaccccaatcgttttgccaataattcaccgtggttttgaggaggtaactcgtccagttcccttctaagtctgcttaactcaataatcgtttaaacttcgatagctaaatgtctgcgggaaagagaaaaagccatgaattatgtatccattttccaaacttcgaatttctgcttgatagtattattatgtcttcattcgaaggtcactgtacccacattgttgtaacggcttagatgatgccggagaactacaataatggacgaagacactggtacagttgctgacaaacacattaaagttgtggttggtgaacgaaatgagttgatgttccatgatggttg

SEQ ID NO: 9401 - DNA, 609 bp, Arabidopsis thaliana
tgacgcctttcgctttgagacatcggaatgtcacttcaaggtcggagaggaggtcggaagccttccttgtcttgactacgatgtcatcgacgtaggcctcgactgtgcgaccgatgtgttcgccgaacacatggttcatgcaccgctggtacgtcgcgcccgcattcctcaaaccgaacggcatggtgacatagcagtacatgccgaaggcgtgatgaaagaagtcgcgagctggtcggactctttcatccggatttggtgataccctgagtaggcatcgaggaaggacagggtttcgcacccagcagtggaatccacgatttgatcgatgcgaggtagagggtagggaaccttcggacatgctttgttgagaccagtgtagtctacacacatctgccatttcccccctttcttcctcacaaacacagggttggcaagccattcgggatggaatacctctttgatgaaccctgctgccattagcttgtggatctcctcgcctatcactctgtgcttctcctcgtcgaatcggcgcagaggctgcctgacgggtcggctccggcccgaatatccagcgagtgctcggcgacatccctcggtatgccgggc

SEQ ID NO: 9402 - DNA, 248 bp, Arabidopsis thaliana columbia
tgaactctcactacgctaagctccatcaccaaaccagtctcagagtttgtttttgccgggcgcaacgataagaagaagccaatctgcgagaacgcggaactgcttgtgatcaaacaaatcggctatgagggtctggaaagcggtaacggattcaggcatgaattaagcacgataatgaacgagcacgaatggcctgctgacgctattgaagtgaaactggaacatgcaaacggcggatctgtgcgtgg

SEQ ID NO: 9403 - DNA, 525 bp, Arabidopsis thaliana columbia
tggcattacaaagctcttgctcgatgaagtgaatcagctcacaatataagttttctttgtgttatataggaaaaatacttccgcagcaatccccaccattgtccaattttagttaatgtatatactagaacttgtcatgtgtatccaacttgttctcagtctggtgatatgcaggcgtatatagactatgtgctattaactaaataaagctccagttgatcatcctcagctcttcaccttcatcccatttcttgaagaagttcttcatctgaactttgcaccttattgatggcataaccagcattgtctttcatcagctgattcagtccatctaatagaggataagtattacatgcttcagggcttgatgtgtccccaccgaaaacagtgaaaatccagaatctgtgtcgatccaagcacagccaggatcctttttcacacccaagtccctcattatagtcctcacttcagcaagcttgctccaagaaccagcagctgcatacatatttgcaattaacacgtagt

SEQ ID NO: 9404 - DNA, 1421 bp, Arabidopsis thaliana columbia
tgtgaagccaaataacaataaaagtattgataccaagatacatgatttcactgtaaacctttttggatacatttgtgttacacacttacacttgcacatataactcgtcgaacgatgagaaacaatggacttcctctattagatgaacaaaaacagattgagtctcttacttctataacttgtcggtccgaatgcatctcaaatccttgtcaaaagtaaagactttccctggcaacaattcggcagccgcagagattcctctgtacactattctggtggaaacaatctgttccgaccaaagaccaaactccacaaggttcccttccatccactttatactaaccgtcacaccgccccttgcccttagcccattcacaatgccgttaggcatttatctgctggaagtgccgggagcaaatatagatccttcgtagtgctctgcactaacatttctgctaccgctgctgcgaatctgccaaggaaaaaagctcatgtgtaagtttagactagtcatcaaatggtatagtgcgttggaatgtgaatgtaaacattccacatatcttataggtaagtgtttgcaacaacttacccaaaattagcatcgatctggaatggcgggtgtgcagtgaacatgttactatacagtcctccttcatagttacgttcgttcaacggatccacaagatcaaaaatatgtgtaaccatccgatatgcgtgctcgctattgtgaagccttgcccacaaggcggctttccaggtggttgaccatcctggtccttcctctcctgcgtcaatcagtggaacattatatattgctccaaccacgtcgatgaaattgtggaaatagtaatgggagagaagaaagaatcacacaaacctctttttttaagagttgcttccacagctttagcaagttctggagacttctcaacagtgattgtgtgacccgggaagaggccaaagagatgtgaaacatgtctatgatgtacctctgggtcctcaaagtcttctgcccattccctaatggaaccgtcctttgatattctagtgggtggaagttttgcttgagcagcaatgacttttccaataagagtatcatttgtttttcccaaaatctgttgataaaccagaaaccataagctcagtatccatgaggtgatatgattgttttgttgtttatgttgcttcatgttacctctgaagctgaaacgatatcagcgaagacttcctttataatggcaatgtccatggttgatgagtagctaacactagcaggtttgccaatgggagcagtaaacatatgctcaggggaagtcgatggattggtctggagaaatccatctatacctttgatcagccagtccaaaagaaacgacgtacatccttccaacaatggatatcctttctttttaagaaattcc

SEQ ID NO: 9405 - DNA, 609 bp, Arabidopsis thaliana columbia
tccctgatcaatgtttgatattttcattaccaagagaaattttcaaaccgtaattccatcaaactgaacgaaatcgagttttaatactgagccgaaaccaaaccataaaccaaactacacatcctaactaaatctactactcataaaacaacaaccaaaatatggacttggataaagatacctgagtgccaaaggagtggagagtttggcaggagcgaagtgtccaaacaagtcactagtttcacacatatggagcaaaaccctccttacaatttcaccaaggtacatccctgagatcatcttctcatataacttcatccacacacaaacagtaaacaattgtaaaacatgtgacaccaggcaaaaaacataatgttactaaagaaaggataaaattttactacatgttcaccaggattcaggcttgtctcatccatctctaggtcaaaaatggtttgcggaagaatcttagagaaccctccccactcagtgtttatgatctgattccaaatgtaaacagttttaagcatgaaaaattgacatacctatctacatatataaatatcaataataccgttggtccagaagaagatttgcttcggagtttag

SEQ ID NO: 9406 - DNA, 546 bp, Arabidopsis thaliana columbia
  unsure (1)..(546): unsure at all n locations
nnnnnnnnnnnnnnnnnnnnctaaagcctgcgcttccgagacaaacacccgcacccggccggtgtggtggtatacgccatcttcgcccaccaccgacgggtcgatcgccgtggccttgatcaccgaaccttccggcgcgatgttgcccgtcgggaagcagaccgtcgaggtcagccctttcgcttttgccttctccggcggcaggatcacgtcatccggctctacgccgtcctgctcgcgcaggcactggcggaacgcgcccggccgtcggacgcctgccaccattcaaggttctcgcccaccgtctggccggtcacggtcatggcgtccagatgcagcaggccgaggtcgcgcaggtggagcatcacctccggcacgccgcccgcgaggaaggcgcgcacggtcgggtgatagtccgggccgttgggcagcacgctcaccagacgcggcactttacggttgatgcgcgtccagtgctcaacgtccgggatcgtgcagcccgccgcgtggcgagtggccggaatgtgcagcagtaaattggtggag

SEQ ID NO: 9407 - DNA, 621 bp, Arabidopsis thaliana columbia
gccagttgtttacgtttggagatggaacttttggtgctctgggtcatggagaccggagaagcacaagtgttccacgtgaagttgaaagcctaattggactaatagtaacaaaggttgcttgtggcgtttggcatacagctgcagtggtagaagtgacaaatgaagcatctgaggcagaagttgactcttcacgcgggcaagtcttcacatggggggatggcgagaaaggccagcttggtcatggtgacaatgatacaaaactacttcccgagtgtgtaatttcattgacgaatgaaaatatctgccaagttgcctgcggacatagtctcactgtttctcgtacatccagaggacatgtgtatacaatgggtagcacggcttatggacagcttggtaatcctaccgccaagggaaattttcctgaacgtgttgaaggagacattgtagaggcttctgtggaggagattgcatgtggttcttatcatgttgcagttttgacatctaaatcagaaatttacacatggggaaagggattaaatggccagttaggccatggaaacgttgagacaaaagagaactgcggttgtgggtttctgagagaaacaagtgaagctatacatg

SEQ ID NO: 9408 - DNA, 540 bp, Arabidopsis thaliana columbia
agaggatcccccgtcatgactagcaatgtggcggagtcataacaaggattaggattttcattgcttggcagtagcagcaaaacatcggatcatatgcctacagagataagttcatggagcctcgaaggacacaaggatctgggaaaactcagctcagcctcaacctcacaggttcttgaaaaggagaagccaagttctcctccaacatttgatgatggtcctacaagtcctccagcttctctgcatgagcctgagccgtctgcaaagtttgatgattatgaccgagattctgaaagtgaagaagacaatctaggaagactttccggacgtgcagaaggaaagtcgaagctgacagctcagaagtctcacatgtctgaaggtcctgatgatttaggacgttactttttcccatcagacacagaagaccaaggagatgattcaaaacacaggaagaatctgacgcagagactcctacaggtcttaagtttggactctagccagtggacttgagaatgaaacgactctcccatcttatggatc

SEQ ID NO: 9409 - DNA, 334 bp, Arabidopsis thaliana columbia
gtgcttgggatagaacattgccatagatgtggtgtgtagcaacgtgacatcaagtgctcaaatcttctgcatgatcgtaacaataatctcaagattggtgaaaaaggaccttcaaaatacgaccggggcctgcgagagcagcatctgactagccgggttatgacataggggtaccgcccacctgaacttctgcttgggtctactgactatggagtgacggttgatctctggagcacaggatgcatacttgcagaactcgttactggcaaggctctgctacccggaagaaccgaggtatagctttctgcgtgaaacgcaattgcctatttaagat

SEQ ID NO: 9410 - DNA, 913 bp, Arabidopsis thaliana
gtaacgctcgccagttgttcaggtagtcgcacctcaagctgtacaggttaatgcgggtgactgacctgctgttgctcaagtcaccgcgcctgagaatacacaggtcgacgttttccagaccatctcttatccaaccagagatgaaactcctgcgaaacacgagaatacaaggaagtcccgtgaagagaaaggaaaaggaatggctaatcaggccaagaagagatcaacctctgatgccgttttgaccgacgaagctccgccacccaagaccttctgcttatctaggggtgaatctatcaaccctgatcaattttcattcaagtatgttggagatcggttcctcatgagggaccaggaagcggccagtcacctatggcgcaacttgatgctccctggggcgaatgcgcttcccaatcctgacgacttggtactaagagaagagtaccatcagtttgccagatcatccttagaggtttatttctaacatgaccatctgttatacattttgaccacgcttgccaacaacctgatcgccacctacgattgtaagctaaaactaaagcttgcggacatagacgccttcttcaatttaaagaaaagcgtcgaccagacgaggatcaggtatgacgtagacatgaaggagatggccactctgaaggtggctgctgagacaaataaggcgaaggtcgattcattgaatgattagatcgcctggctcaacaattgtgaggccgagctctcataggaggtcgagaagctgcagatcgcacttgttgctgccaaggagtacatggaaaaggaatgcaacagacttcagggtgactgagctgccaaggtcgcgcgtattacttggaaggctcaagctcgactcgacaaaatgaaggctacctcaccgagcaagaagaggttgtta

SEQ ID NO: 9411 - DNA, 1277 bp, Arabidopsis thaliana columbia
tgatgtctcttaaattctgcttcaagttctgttttttgggggctctgtttcaatacaaaacctctgttctgcagattgctcaaatgaacaattatgaagttaatggtcataatttggaactcaaagtagataaaaacttaagttacgtgatagaatttaaaaacaatgtgatgtgaatttaaaaactgccaaaaaggacttccataaaagctaagtcaaagatctcggaaaagtcttaaaaaacaatgttgattgagccgctagtgagattattttttctagtgatttgagtcttgtcttgtaggattcttgttgcttctctaccacaactatattttgtaacttttgctctctcttatctcaatttcttaaaggtttgagatggtagagttacttgacttgtgaattttttggtttgagggtgccttagaaattgattgcgttagaatggttggagcgttgaatacttgactgatgcaaaaggtgtggacagaatcttcatgatgcatgcagagtagtgtcatgatacagagaggcaaagactttgtttaaactattttatagatacttgatgagaggtgacaatagggtaggccaagatctttatggagatccagtcaagtttcttacaacgagccatccaaaaaagtcaagtcaccttgtgttctgaaaacttgttgagtctataaaatatgatccaagtttttctcctagtctagatataaacgatcactcgatttggtttactcttacaaaaatcagtggaaatgtatgttacgaggtgtttgtcagagtaccagagaaatccagcagagctaagacagcctcctcctgagggtccaaactctggaattttggtaatacaagaccaacactcacagacacgtccatgttgcttcggcttgtgtttggttgtggactcgtatctaagtggtttgcccttgccgcaaaatcttaagctagcagccagattcaatgctggagaagatgacgctacttgtgacccagttgtcttcattcctgttctcaataagcctctatcttcaaactgttactacgctatcaaacgagtggggaagcattcagggtatgactttgaatcttgaagatctgaaatcttgcatctttcatcttatataacctaaaaagtttctaaatttgttttggttgcagagaagcgcctgctagtgggaaagaggaagacagagtcccgtgctgcttttgctctagttatgttcctgaagccaaaccaaaacagctagatccttatgacatgt

SEQ ID NO: 9412 - DNA, 539 bp, Arabidopsis thaliana columbia
taaaagtgttaaaccaagtcattagcacatttacatacaaaacacaaatgaccaacctttacaatgttttggcaagcgttgagactcggattctcttcctcctcctccaggttactaccactactactactactactctcttcaccttcagcagttacctcgaatccgaatctaacttccatgtattctttcgaatagcaatgtcgccaaaccgcttcttgaatatctttcctctctgatacgtctgagttcccgctttccggaaaaacccagaaagtcacattccctttgatctttcgattcattagaaccccaagcatatgcaaaatcgcttgaaagacctttctatcatcacctacgacgtagtcaggcaatgctctataaacttcagctgagaaaccaaaaccatttgccatgcataaacacctcgccacgcaagctgactctttcacaaccgaatgcaaactgaaataatgagtctctgcagcgcggattgtcccattgtttatatctccggcattgtttcaagctgtacaagt

SEQ ID NO: 9413 - DNA, 847 bp, Arabidopsis thaliana
cgtgccatggtggagaaaggcatccgcggctccatcgtttgcaccactagcgtcgcggctgagatcgctggcacggcaccacacgggtaaaaactaatattcacaacaaagactttttaattctttagacaaaccaaaagtgcactaactaatttcgttttcaaaaccatgtaataataaatagtggatcgctgcaacggagtattataattaaaagaataacaaagtgatcatgttgtcacgatttattgacaataattttttatcgttaaaattcaaaatagaatgaattgcttactaataatataggtacacgacgtcgaagcatgggctgttgggtttgatcaaatcggcttctggtggattaggaaaatatggtataagagtaaacggcgttgctccatttggtgtcgcaacaccgttagtttgtaatggtttcaagatggaaccaaacgtggtggagcagaacacgtcagcttcggcgaatctaaagggcattgtattgaaagctcgtcacgtggcagaagctgctctgtttttagcgtccgatgagtcggcttacgttagcggacagaacctggctgttgacggtggttactcggtggtgaagccgtagctataacaacttggccacaaagatcccatgatggaatattggaattttgtttttttggtcaaaagttgacttgacttaattgttgtagaggcatggggattgagaagtttctgaggttgcaaatttccttgaaatgtggatgttgtatttttatatggtaacattcattatccaacatattgcacatctcgaggataatttatttaaacaaatactacaagcttatttgat

SEQ ID NO: 9414 - DNA, 787 bp, Arabidopsis thaliana
  unsure (1)..(787): unsure at all n locations
ctattcgagcattattgtgatttactttgcagactccggttattaaaaacttttagattgagatccataatacaatatattaaaagccattaattgatttaacattacattaaaaccggaaacacacaaaccaatgacttattcgagaaaacactcatgtacggtacgacatggtaccgtacggaagatttagataagaaagaagtaacacactgacgatggatcgaagatttgagtcatgagaatggatggatcagcagtgtcttgtgcagtagcaacgacgacggaatccacggcatttacctccgccgaagccttcgttgtggcacacgtttgcacagttgtgtgtgctcacacatggacccttgaacctatggctttttgactcacacgtgcgtgcctccacggtgactggacccatccctagagaatattaacacacacacacacacaaaaagctttgtttagaccatagcttagtttcaaaaagatttgcatagatattaagatacgagtaatgaagtacctgtggcaatgaataccatgaacaagagaagagcagcggagataaaacgcacagagagcttcatttttgagagggatagagagagatttcgaaagaagtgataagtgtgcagactgtagaatgctaatgaggaagtgggcactatataaagagactggaaaggtataagaacgctcgagataattgaacttttactanaagaaaacgaatatctttttatccattatacagtattcctttttatttctgccactgaggtgt

SEQ ID NO: 9415 - DNA, 600 bp, Arabidopsis thaliana
tatcaaatatcccgtacctctcaccgtagcgcatcttcatccttagtaatgacacacacacacataacacttatttccaactctgtctctctcaattttctttctctttctccaaacatgaagttctctatgcgtttgatctcagccgttcttttcttggtgatgatattcgtcgccacaggttcgtttactcgttaccatatatctaactttgcacaccacccatgtcttcttctattttcatcatttggtcatatatatatatatgcacatatttaagtggttcttatcgactggcctttccatttatacgattttagttatatagttagccataaatggatgcctttattaagtagcaataatatcaaattctaacattaactttcaagattagttaatatgtatcatgcatgagaacatgaaacaaagctatatatagtcttaaaccaagtttcttttgtactctagggatgggtccagtcacggtcgaggcacgcacgtgtgcgtcgcagagccaaagattcaagggtaaatgcgtgagcgatacaaactgcgaaaacgtgtgccacaacgaaggcttccccggaggtgattgcc

SEQ ID NO: 9416 - DNA, 1245 bp, Arabidopsis thaliana
  unsure (1)..(1245): unsure at all n locations
attcacataattctcgaaaatatttgaaagcgtaagaactagacaaatagtgagcccaacaaatatttactatgcttacagggcctataaagcccactaataggcttttgaaatcgaattgcacgtgaggcgcatgtgccatttaaaattgaagacgcgaatagatcaaatatcctactcgcacctgtagcgcgttaacgccacggagcccaaacggctggactagtacagggatttcgtcgtttttcagcaaaataaaaataataggcgcgtggagatatttctttttgttttaaactcatcgcctgaatcatttaccgtcaaacaaagcgaggtgaagaagataactatttctttgaagaagataactgggtgatgtgagcacaatctgatttgagttactgatttaacttttacaacgtcatttccatctcgaatccaaatttgatcaaagtttgagtaactgagatatttttgaattttgagtatgtatatttttcttttgtatcttgtaaccaaagtattattattatcgctacaatcttcaacgaaatatttagatatatttctcagatttatttaaagtagtttagtttgagctccgtcagacaattaatttaaagcaataagacaagtacaaaacctctccttaaccaaaaaaggagaaacaataggaatcaaaatctctacttaaacctccaaaccaacatcagagatttttgtgccccttggcaaaagtgtgaacatgataccatttgactcacttttggtatataaactcatcattttgaatcgactccagccaatttccttctctgttgatgctctgcaactttgtaatcaacaacctctctgaaaagcatagagtccaacacacagtcctcacttccatacacagctgcttgaacacttgccatcagtttcgcaatttctctacctgaaaanccttcggtttttgcagccgcttcctttaagagctcctccgtgacaccctttatctcgatcttctgctgttctttcttgaagaggcggtcgaacaaacccggcttgcttggaccagcctcagctatgtacttttctagatagaggtttaaaagcttgaaccgctcttcttctccaggtaaggggaattcgagaacttcatcgacacggtcagccacagctgagtctaagtcaccaggtcggtttgtagctagtgctaagactatgtctttggattgatcacccgtgcggaagagaagagca

SEQ ID NO: 9417 - DNA, 1333 bp, Arabidopsis thaliana
aacaagactcattcagatcttctctgatgtccacttcttgtaatataacaaaaacaaacagagtgtttctctatgaaatcaacgtttctgttgttgttgttgttacttagtctcaatcttctctttgtctttgtttcatgtgcttcttccatagagtttgttaccctaatttcacagcttctaacctcagattcgtcgatagctccaaaggagctttcctcttgtctcgtaattccatcttcaaagccggtttattcagtcccggcggcgatgattcctctaccggtttctacttctccgtcgtccatgtcgattccggttcaacaatctggtcatcaaatcgagattcccctgtttcaagctctggtacaatgactcttactcctcaaggaatctctgttattgaagatggtaaaagtcaaataccagtttggtcaacgccggttttagcttctccggttaagtcccttcggttaaccgacgccggtaatctccttcttcttgatcacttgaacgtttctctatgggaaagctttgattttcctactgactcgatcgttcttggacaaagacttaagcttgggatgttcttgtccggatccgtctcgcggtctgatttctctaccggagattataagttcttggtcggtgaatccgacggtttgatgcagtggagaggacagaattattggaagctaaggatgcatatacgagctaatgttgattctaacttccctgttgagtatctaacggtcactacttcaggattagctcttatggcacggaacgggacggtggttgtagtccgcgtggctttacaccgtcctctgatttccgagtggcgaagatggattcatcaggtaagttcatcgttagtagattctccgggaagaatcttgtgacggaattctctggtcctatggattcttgtcagattccgtttgtctgcggtaagctcgggctttgtaatcttgataacgcttcggaaaatcagagctgttcatgtccagatgagatgcgaatggatgctggtaagggtgtgtgtgttccggttagccaatcattgagtttacctgtttcttgtgaagcaagaaacatttcgtatctcgaactaggtcttggtgtgtcttacttctctactcatttcaccgatcctgtggaacacggtctcccgttattggcttgtcatgatatttgcagtaagaattgctcttgcctcggtgttttctatgagaacacgtctcggtcttgttatctcgtaaaggactcgtttggttctttgtctttagtaaagaactcacgagagaatcatgatcttattggatacgttaag

SEQ ID NO: 9418 - DNA, 553 bp, Arabidopsis thaliana columbia
taaactgtctattaacccaaaagaagagccgtcattagtcaaaattgagcaaacgaattcaattcccaaaccacagtccctaaactcgtaattatacaccaaaacaaatggcaaacaaatcacaacacagaagctgtcatcctcccaacttacttaaacagcctgtcattgtccccacttgtcgttcaaacttcaaaataaatattaaaaacacataatcacaaaaagacaaaacaaatccaatgtggcatattctttttatatatataaacacacaaaaacacatctcacttctcatctcctttctactattcccttttggccggaaaccgagtcgactcattgagtcaaaccaaaccaatgggtatatgcagctcgtacgagtcgacacaagtcgcaacggcgaacgtgatcttacacgacggaaggatgatggagttccaagtccggtcaaagttggttacgtgttacaaaagaatccgatgtgtttcatatgtaactccgatgatatggactttgacaacgttgtatccgcattagcgcgacgaggagt

SEQ ID NO: 9419 - DNA, 531 bp, Arabidopsis thaliana columbia
cggatatttggtcttgtggtgttgttttgtttgttcttttggctggttatcttcctttccatgacactaatcttatggagatgtataggaagataggtaaagcagacttcaagtgtcccagctggtttgctcctgaggtaaagagactattgtgtaagatgttggaccctaaccatgagactagaatcactattgcaaaaatcaaggagagttcttggttcagaaagggtttgcatttgaagcaaaaaaagatggaaaagatggagaaacaacaagtcagagaggctactaatcccatggaagctggaggttcaggccaaaatgaaaacggagaaaaccacgagccgcctcgacttgctaccttgaatgctttcgatatcatcgccttgtctacggggtttggtctggcaggactttttggggatgtatatgacaagcgagaatctaggttcgcgtcgcaaaaacctgcttcagagatcatttctaagctagtagaggttgccaagtgcctgaagctgaagataagaaagc

SEQ ID NO: 9420 - DNA, 542 bp, Arabidopsis thaliana columbia
ttttagtttcacttagattcttaaagcatagttttgagatctatgagcattacaacattcatgaaaaataatacctgaagactcagtgctttgctggtactttttgagctcttctattgtttccttaatagacttatttgagctaaaggctgactctatgtgaggcaaaagtgatttgagatgggcctcagattcaggattgctgctgtattttgataaagttgcttggatgtcttgattaggatcctcagaactgcatcaccaacatgtatgagtttacgagagatatgcacatgaaattgtcaggattgagaaaaggagattgaaaattgcgtacaggttagctgacaaaatggcttcctttaatgaagctagcttttcagatggtacataatgcgtcccaagaccaacgaacagtgcgtctgatggcgcggagatccttttaccagtcaaaccaagataagcacctgcagatatttataccacagtagtagttacatatcgttgaaggtctccagtaatctttactttcgcttctaaaa

SEQ ID NO: 9421 - DNA, 554 bp, Arabidopsis thaliana columbia
gaatatgtccccgaagttaacttattcttcacagttcctaaatccataggatgctcaataacattaaaatagtccagtatattcagcttgacaacatccactggagtattgaacacccaaccatactgatgtgacatcaatcgtttcaaaagcgcctcgcattgcttcatcagaagcataaccgcagtagtgacaggagtcggtttagaagcagcacttatagggttcaccgtctttcctggacccgtggaacatcgcgacattccaaaactcttgactcgagtcaaaccactagcagaagagctagtgagagccactgttctagaaagctcaaaattcttctggaaaactcgtatttgttccagctcttgtcttagcctacgaatcaactccttcctatctgatgatgataggccagataagggtaataccattttcgagacaccgaagtttcaccgacctttctttttgaacaattggaacctctgagacctcggactatcagatcctcatcataatctccacgggtgctcaaaacaatatcccagggaaac

SEQ ID NO: 9422 - DNA, 748 bp, Arabidopsis thaliana
cgtccctattgtacttacgatcgcagccaacgtacccgcacaattcgaaatacctgtctcgcacaccagatatacaaaccctaactttgtcagcaagaaacaagatcgatgctcgagatgaagaagactagatccaccatctgataacattattaccgtgcaggaaacgagcacattgcggtgcgatgtcgtgtttccgtaacgagaaaccaagagatgtagtgagattcaagattatcccgaagtggttaggttagtgatcaatcaagtttagaatgaatggttggttatataagggtgagagttaacgtacttgcatattgaggagaaatccagcttggctaaagggactcaagctcaatgcaatggtcatgaaaaccgctgcacaagaaggcgactttgcgaagttgaggcagagcagagacagcccgggacccataaatccaatagactgacaaacaaaagcagggactttccgttagaatgttatgggtcggctatttagttaaccaagtatggcacttctaatactcacttgcatgatctttcgtactgaggttacagagtgaccagttcttatcaagaagtccgatgctgctcctgcatagtaacctgagatcgccattgtcgcccatggaagagcgctaaaccaagctgcttgcttcaaattcacattaaacacctatgatcaaacaagacaaagatataaaacatcatatattttcttgaagttcatatatatctgaat

SEQ ID NO: 9423 - DNA, 1455 bp, Arabidopsis thaliana
catgtaagaataataatcaataacctttttctgcttttgttttcttgattcttcatggacatctagggttttttcctggacctccatagtaaaaatagttaccccacacacgattcgtcccacctcttatatcataacaattgggatggtctgcgagaatctttagattcgaagcgggtataagagtgttgtcccagtcaacaatttggagattccggaaataagatgctttaccaaaaccttcaccggcaaaatgtccactacccatttgagtcgtagtgtgtgaaccgccgggtcggttgttcacaatctcgcccccgaattggaccatgcttccatgttgctttagatgcgtgaataaaaacgctggccaataaccgactaatgcacctgacccgaattgtagccaccagtgaccgtgcttcggatcctatacgtagattatacaagcatgtgtaatgttattgttatgactaaaaaaagtcaaattatttaagactttctaaagtaggagctggttgacccacgaaacattgatgtgaaccatgtgaaattcttcttaaaagattataaattatataagaaatgtgactggtaatttttttgcagaatacagctgaattattataggtatagtatgttgtaaaatattgttagtatttttcattgatgatatgcataaatatgtatatgagagaagaagaaaaattaccttccaaattaataagcttatatcgaattgtccacctttatacgaagatctaggagaaatcgcagctcctatcgcgattcgacggttggtttgaacgaaaccggaacatagcaaattgtagcaacccgttgttcgatatgcatcggactgaaaatcactatcactaccattgttaacaaaatgttaattcaataaaactaaaaactttaccgtaaactaaggatactaaagttgaaggtaacatttaccgtccaataggtaaagaatcttgggtaagtatcgccgtacaactccgggctaatttgccaaccggcttcaatggtattaagatcgtgtggaacgaaccggcaataacccaaatctgagaaagactaaattcgtattggctcgtaacacgtggcgaccacacgttaatacttgcttttgccccgtaatattgtctcccggttacatatcccaccgcatgctacaaaataagtcatttttacaaaaataatcaatcaaataaattctcaaacgctaaaattggagtatcattttcgtaaacacagaaaaagagaaaaaggaacagagaataatcttttttacgatgtgaacagagaataatctttagttatgtcacgcttcactcctttggatgatacaacttagtaatggtcgtgcaaagaattacgaaaaagctgaattttggtatcattctctatctttttctttatagaggataaaaaaggtaagaaacctct

SEQ ID NO: 9424 - DNA, 753 bp, Arabidopsis thaliana columbia
cagagcttaaatgatcagcctttcatgcttactaaccgagttttggtataatgtgtccacctgaatgatggatcaccactggctctacgaatgattctacaagcacttcaccttctatcttcaggaaatccctctcacctgcagcaaaaccgatacagaattacaaacaagttgtctcttatgtcatatcaaatgttgtaggagagaatctctaacgttaacatgtagtgctgcagattagattctagtctaaacactcccatgccaatcttggctacactaaaggcacactactaacgtaagcttcaaacaacagaaacttggcattacaacataaccgagaaatcaagtcaagaacatgcgcaacgtagtaacagtttacctatgaagtggagtgatgggcaacgaactggagatgagaatgcattaacagcagctttaggctccccaaacatcaaccctggaattttcgctccagaaatgataactaaaaacttgacttttggcaccttagttagagccgatccctacaaaacagtttacaacatcacagacttactcaaactattaaaacaacatgtttcattcttcaattcagattcaacctctctgttgcatataaatggtttcaacatcacacacttgctcaaaacagaacaatagaaaactactctaacaataggtttcattcttcaaaatatcataagcagattcaatctcagaaccaggattatgatcagttatgcagttatg

SEQ ID NO: 9425 - DNA, 602 bp, Arabidopsis thaliana columbia
tattgtttttagcaacatgttggtttcttcgtcataaattcatattattgtttgttagcgacatgtttttgttttctagtcatatattcacattatagatgtttactaagatagcttaaaatattgtaaaccagagggaatattaaagggacccgaatattaaacatcggactactttcttttctagtccaaaaacaagagcactgatacatttttattccgtaaaaatgagaacatagtactcattaaaacaaaaagggatattgcaatgaaaaataaccattggtcacgccatatctaccagcagaaacgtcctaatgatatatatagcatcagatgtgtttcgttggtgcaagaacgaggtgttctttcttgtgcatagcgagtccagtcatgacgtccatctttatatcctctggtttaatccctttaggtagactccagtcaaatttgtagagaaggttagcgaaaggtatctctaccattgcaatcccaagatgcatggccgggcacattctccggcccgacccgaaaggtaggagctcaaaatcttggcccttgaagtccctcctttgtgctcgttcatgacctctctggaatga

SEQ ID NO: 9426 - DNA, 505 bp, Arabidopsis thaliana columbia
agttagctaattaacctctggctttaagctcggcaagtctcctggttaaatcatcctcctcaactttctcttcagtcttggtaggaatggcatgaccagcaggctgaggtagtccaacagaaacttcaagaccgtaatcatctgctacttgctgcatcaagctgttgacttctccttctggagtcgacaatgaagtagagccagccattgcattatccatgaactcagcttggacttccatgttcacaaactgtttctcaaacgaatccatcgtctcagacatcttctgtaagttgcctgttgcaaagaacaaaccagaaaatgataacacgagttgctacagcacaacgtataagagtattataagccctatctgcttctccctctatactacacttaccaaaaggagagttatgcaacagaaattcatcacagatcacagaacatccatgacggtgagagagagctattctaatatttcatcaaaccaaaccctaatgcatga

SEQ ID NO: 9427 - DNA, 533 bp, Arabidopsis thaliana
agtaacgcccgccagtgtgctctaaagggttcatcgagaataagcaacgtcggatgtttcaccagtgcgcggacaatcagcgccagacgctgctgtccccaggaaagactatggaacggagcgtcaccgtgcgtttatcaatgccgagaatatccagccactgctgcaccagtttttgctggcgatccgaaacggcctgataaatgccaatcgaatcaaaatagccagaaagaatcacattacgcacggtagtctgacccggtaatccagatgcaaactactgctgacgtaaccgatatgctttttgatatcccagatggtttcgccgctgccgcgacgtcgtccgaaaagcgtcaaatcgttgctgtaaccttgcggatgatcgccagtaaccaggcttaataacgtcgattttcctgcaccatttggcccgacaatttgccagtgttcgcctggattcacctgccagctaaggttattaagaatggggcgatcgttataagaaaccacgccattgttagcacaatgcgcgg

SEQ ID NO: 9428 - DNA, 531 bp, Arabidopsis thaliana
tgtctcctctaggctttctatggactccgctgtggactctaacatcagcagcaagatgcttgtgtgtcccaatctcgcagccaaatggagaggtgtgtcacttttggtgttagtggaactgactagggaagggtgaatctcgactatcttcttcacgagttcctcatttcccagtttcacagctaggtgcaaaaacgttcccccaaagctctcgtcttgttcctctagctttttaagaaaccaattggtaaagtcgatactgccgaacattggtaaggccatcaagtagtttccaagggctggagaaaactttcttctttgtttatcttcctcaacagagaaattttatgattacatttagtcgctgagggttctctataaatagtattctcaggtcaaccactgctctcttcgacgtcttcgtagaagtttaatctaacccactggctagaataattagttttttttttctgctaactttacttgttttatagcaagtaacacttattaacgtttccctagttgccttga

SEQ ID NO: 9429 - DNA, 576 bp, Arabidopsis thaliana
aattgtagctatatgttcatagacgccttgccataggagaacgatcctgtctctgttgtttagagtgattgcaataagcaattccagacagaaaaccgcagtatcctcatcctctggagaactggttcctttctgtggcctacctgcagcccaaatgagagcacgcgcaagtgcaacaaagattcagcttgtagacacttgctttcggtaaatatgctgtcaatgtgacatttctgaattgtttgaagtgttcgttgatgagctgcaagctgttgctcagtaggctgtgatcttggctcttctgtatcaagtgaaagaagctgactaaatcttcccatcaatccggaagatctcctcggagttcccattgactgtagatgagctgaagatagggaattcgcgaggggctttccttgcccttgctcagatgaatgttctgattcatcagctgcatcactggctacacgagctggcagaagtccaagtttatgtagccgtaagatacagtccaatatgttcctccaaccgtacgtatatcacctccatatttgtctgcaatggtaaaattgtgatagt

SEQ ID NO: 9430 - DNA, 527 bp, Arabidopsis thaliana
gaacactggtaacggtgttagtcaaagcggaaagattcacacttgctcaatctgtttcaagtcgtttgcgtctggtcaagccttaggtggacacaaacggtgtcactatgacggtggcaacaacggtaacggtaacggaagtagcagcaacagcgtagaactcgtcgctggtagtgacgtcagcgatgttgataatgagagatggtccgaagaaagtgcgatcggtggccaccgtggatttgacctaaacttaccggctgatcaagtctcagtgacgacttcttaacgttgactgagtttgaggaaaaagtcaactatcaagcgaagaaagggttagtggacggtgaagattaacggtcgtttctttccagttgcttctggtttgagcttgactgggtctgtaatgaaaatgattggagtggacttggcattattattattatttttaaaaagaaatgttaatttgttgttggatctgtttatagatagaggagacaattgggatacacgaatattgttttttttta

SEQ ID NO: 9431 - DNA, 629 bp, Arabidopsis thaliana
ccggatagaccaaggaagaggcaaggaccctttaaacatgaaagcaccagtatcataagaaaaacgattaaacatggaaacaactttaaaatggtttgatttatacatacttctgaaaaggtgattctccagacttcctctaggcataaactcatacacaagcaacctttgatcatcttcaatgcaataaccaacaagcttaactagatttggatggagaaggttaccaaggaaattaatctcagcctgcaattgcaacaagcaggaacacattcagaaaacaacaagtgatcaaatcaaaagaaacagaagaagaagtgtctcttacaagccattctttgtgaccttgaagtccatcaggatttaaggttttgactgcaaccgtaagaccagtaccaggtttaacaggagcagtaccgttttcttcgatccatcctttaaagacacaaccaaaaccaccttctccaagaagactctcgggtctgaaatttctagtagatagcttaagatcattgaaagtaaacttccggaggtgagaagaaatgttaagttcttcactgatgactggagtagatgaagagctttctgcattgctagttgttgttgtggaggaacttgaccactggttg

SEQ ID NO: 9432 - DNA, 522 bp, Arabidopsis thaliana
tgagatacatagaggtggtggtagcggtaatggaggagacagcaatggacgtagtagtagtagtaatggacagaacaatgctcagaacggcggtgagactgcggctagacaaccgacttttggagagatgacacttgaggatttcttggtgaaggctggtgtggttagagaacatcccactaatcctaaacctaatccaaacccgaaccaaaaccaaaacccgtctagtgtaatacccgcagctgcacagcaacagctttatggtgtgtttcaaggaaccggtgatccttcattcccgggtcaagctatgggtgtgggtgacccatcaggttatgctaaaaggacaggaggaggagggtatcagcaggcgccaccagttcaggcaggtgtttgctatggaggtggcgttgggtttggagcgggtggacagcaaatgggaatggttggaccgttaagcccggtgtcttcagatggattaggacatggacaagtggataacataggaggtcagtatggagtaga

SEQ ID NO: 9433 - DNA, 715 bp, Arabidopsis thaliana
ctccgatcacttcagctacggctacaaaaactttggatttgctccttatggcgatctctggcggactctccgtcgtctctccactctcgaagtcttctcctccgtcagcttacagaagaactcttccatacgaactgaagaagtctccaatctctgttcgagtctcttcagattctccggtggtaattcttgtaaagtggatctcaggtatcaattcactcttctcaccgctcacgtcatgcttagattagtatctggaaatcgcggggtcaatgagagtgattcagaatcagagacgaagttcttagatgaattcaaatcaaggtttttctcgagcctatcgtcgatgaatgtctgtgactatttcccagtgttgagatggattgggtacaaaggtcttgagaacagagtgattgagatacagaggatgagagatgagtatcttcagcgactcattgatgatattcgaatgaagaagtttgattccactggttcagtagtggagaaattcttgaagcttcaagaatcagaacctgaattttactctgatgatgttatcaaaggaattgtagtgttaatgttcaacgccggatcggatacttcaccggtgacaatggaatgggcaatggcgcttttactgaaccatccagataagcttgacaaggtcagagaagaaatcaaatctaatgttaaacacaaagggattatacaagac

SEQ ID NO: 9434 - DNA, 574 bp, Arabidopsis thaliana
tccccaacaacattatccaattcaaaaagctccttcggaacattaggctcatcttcaaaaacatccaaaccagcaccaccaatctcaccttctctcaaacatctcaccatttcttcctcatcgattatagccccacgagccacgttaacgatcactcctcgctttcccagagcagaaagaacatctttattaatcaaacgcaatgtcttctcattcaattcacaacagattatgagtgcatcactattagctgccatctcctctatatccatgtaatagtgatatggaacatcatatggttttctgtttcttgagctatatgaaatttggcaaccaaaggcgtcgagccttgtcgctactttcgagccaatgcttcctagtcccacgattccgattcgctttctccccaactgcaaattagagggaacattaacaatcattcttgttgctaatttgattttttcacaagttatgttgcaaacttggaaccgagaggataatcgcctttgagtgccaaaaccgttgcttaacgaaccgattggcggcggagatgcggcggaagacgtcgatgagt

SEQ ID NO: 9435 - DNA, 525 bp, Arabidopsis thaliana
tatgcaagattttgatggttaccaatacatttttctatgttgttgttagacaattagttacatggcggacggagttgttggtacaggctcgttcgggatcgttttccaagcaaaatgtttggagactggagaaaccgtggcgataaagaaggttttgcaagatagaagatacaagaaccgagaacttcagttgatgcgtgtgatggatcatccgaatgtggtttgtttgaagcattgcttcttttcgactacaagtaaagacgagcttttcttgaacttggttatggagtatgtccctgagagcttgtatcgagttctgaaacattatagtagtgcaaaccaaagaatgcctcttgtctatgttaaactttacatgtatcaggtaataacaacacacattcatatcttccatttccaaagttgatgtacataagattgttcttaggctgatattacttccttttgttatgttagatcttctggggacttgcttacattcacaatgttgctggagtttgcacagag

SEQ ID NO: 9436 - DNA, 631 bp, Arabidopsis thaliana
tcacttctgttgttaattgtatacgccaattacaaacgaaaggagaaactctgtttggtgtttgcgtttacactttacaaaagaattctatgaaaaattgaaaaaaatgttgctagtgtttgaaaatgtaaagttttattcatatataaacgcatgaaacaattgcatctaataggtggttgaatattaagtagcttttcactatttttggtctcaaaatgttcatattgttgttagtcacctttgtctctaatgtgttgatgtgatcttttcatctgaagggtatatttgatggaagttgtggaacacaactagaccacggagttgtggcggttggatacggaactgagaacggcaaagattactggattgtgagaaactcatggggtaaaagctggggagagagtggatacctaaggatggcgcgtaacattgcgtcttcatcaggaaaatgtggaatcgcgattgaaccttcatacccgataaagaatggcgaaaacccgccaaacccgggaccttcacctccatctcccatcaagcctccaacccaatgtgacagttactcacttgtcctgagagcacacttgttgttgtctgtttgagtatggaagtattgctttgcttgggatgt

SEQ ID NO: 9437 - DNA, 955 bp, Arabidopsis thaliana
taagcaaaaatgttctctctccttacatatgaaggtgctgtcgacgtagaaaacatggaagatcaactgcaaatatcagcaattgaagatcagatcgctaattttggtcaaactccaatccaaatattccggaagaaacatccgagaagggggccacctattccaattgcacatccgttgtactttgcgcctgcttccattaatttgtcttctattcttcccgctacaactcattccccatcagcagttctatatgttggtgtagtggattcaaatatagtactcgtaaaccagggtctaactttgtcagtcaaaatttggttgacaactcaactacattctggcggaaattttacattttctagcgctcaggtatgttcagtatcatcttcttggattcttcagttcgatattctattatccgacttcagtgaaggcctctgtcactgcaggatccattctttggagttggttcggatgttctttctccccgtaacattggaagtcccctagcagacaacgttgaacttggatcacagtgctttgctgcaatgcaaatgccactggaaaactttctggtttcatgtgggaactgggagaacagttttcatgtcatatccttgactgatggtcgggtagtccaaagcatccgacatcataaagatgttgtaagctgtgttgcaggtatgctctttgttttctgcttcagttgcctggttgaagatgatgttgctttcttagacgagcatcaattgtatgattctagaaaaacatctggaaaatattagattactaggataggtattcgtcaatgtttgagtaaatattccaatctggagcctaggtgttacatttgtttatttaggcttctctttaacctggtctacgtatttcatggttttctaatccccaagctactgatgcattactgaatatatcgttgatgctgcagtga

SEQ ID NO: 9438 - DNA, 434 bp, Arabidopsis thaliana
tcaatctccacgaccataccatgcagctcattttctttgttaagaagatcctcttgcacctttgacaactcctcaatcttcttaagataagcagtctccctttctttgagctcctctttttcatgattagaaatctggagtttggtttcttgatcagataagatttcatgcaactttgacaactcctcaatctttttaagataagcagtctctctttctctcaattcctcattttcctgaacaactgtttgcaatttgctcgctttatcgactaagctttcattcaattctgacaactcctctgccttcttaagtaatgtagtctctctttctctgagctccttattttcttcagatatgttctgcagattggttacgttatcagccaaggtcccatttgccgttgacaattcgtcaatcttcttaagataagc

SEQ ID NO: 9439 - DNA, 800 bp, Arabidopsis thaliana
gaaacatcagaacgagggtgcatgatgatgactctgtttccgttcttggtttacttggacgccaagaaaatactgaaatttctcgagaacaaagccgaaatgtgtcgataacccgaatcgctgctctaaacaagccggagactaccattcttatacttggaaccttattaggtgcagtgaacggcactatattcccgatttttggtatcctctttgcaaaagtaatcgaagctttcttcaaaccgcctcacgatatgaagagagattcaagattctggtcaatgatattcgtgcttcttggtgtagcttctttgatagtgtatccaatgcatacctacttgtttgctgtagctggagggagattaattcagaggataagagtaatgtgttttgagaaagttgttcacatggaggttgggtggttcgatgatcctgagaactcgagtggcaccataggatcaaggctctctgctgatgcagccttgatcaagactcttgtgggcgactcgctgtctttatctgttaagaacgctgcagccgcagtctccggtctgattatagctttcacagcgagttggaaattggcggttattatcttagtaatgattcctttaattggaatcaatggttatcttcaaattaagttcattaaaggcttcactgcagacgcaaaggttggtcgcacattcctgttttcatttttttattgtggaatgagttttcaagggtttaaggcttacttgttgaagaagaaacttaaaatagttttgaaagaaaaaaatgtttgcaggcaaagtacg

SEQ ID NO: 9440 - DNA, 1031 bp, Arabidopsis thaliana
  unsure (1)..(1031): unsure at all n locations
taattaacgacgagatctattatcatttttggcatgtcctcgaaaatttatagtaggtgaaaattacattcttcaatctcacccaacctttcaatctttgcataagcatagatgagctcactatccaccttgggttccttcaccttctgtctaaccatcagaaggtatctgaccaagtcatcatagacattagtatcttcagaggctcggatgacctccaagaactgagtggtgtcatcagctcggataaaggactcaatagcatcactgactagtccttccctgagctgtgccttagcgacttgactccaaacagcatcttcttcgacccggaaagcaaactcaacagcacgttcaatgcttctgacgttatccaacaatacgttgacagcctgaacatttaagttaaacttcttgaaaatcgcaaatgcttcctcatacaattgagcatccactgccacttctccaacagctggaccatcgaaattatccagcctgttaatgtaatccataactctggacggatctgccttaatagctgtcagtataagtagattttgcagattgaaatttccactgaaggcagaattttgaagcacaattttttccagaagctcaattagctcatgtggcaaatcagcagtcatgaatgctttaacagctgcagaaacttgctctgggctcttgctttctggtaaagcagtagacacaacttggtctataagttgcctcctatattcattttcttccgtaagaaccttctcccagaggtcaccatccatcctctccactacgtacctgcagttggaaaatcgtgtgtaagtagtctacaaagtaactagtgtggaatataagtaagaagtctagtaagcaataatcaaatacctggcttgtaacttgaacaaagagttcttgttggtgacattgatgagttctcgtcacattgtcctcttctgtatgccacaacagccagagtgggatacgtntctcgcagtacttaccacaaccttagagtcgtagtaaggattggt

SEQ ID NO: 9441 - DNA, 559 bp, Arabidopsis thaliana
gtaacgttaacggccgccagtgtgctctaaagtgcgccgtagcgttagtgtctttatcatcacaggccgcaagccccataaccagcaggccaattccgacatatttaaccagattgcgcattgacttcttcctttcgataaacggccataacggctcattcatccatcttatcacaactctgataacgaacctttaactcgcctgcaaagcgttgatttcggatttatctgccagtcttttcaacagcatattgagtaatacgccatacattggcaggaagaaaacgatactgattaacactttgaaacagtaatcgaccagcgcgatttccatccagtgttcagccataaaggcatccgggctacgccagaaggcaatgaagaaaaaggccagcgtgtcgctgacgttaccgaacagtgtggacgctgtcggtgccagccaccagcggcgactctgacgcaggcggttaaaaacgtgcacgtcgaggatttgcccagcgcgtaggccatgaaactggcggtggcgatacgggcagacaacaggttgaagtgggcgagt

SEQ ID NO: 9442 - DNA, 610 bp, Arabidopsis thaliana
ttcttccaaggaagtttgataggtccgatggtctgattaaaggaagtaacaagattgttctgatgaatgaagaagcaaggacatggacgcttattctgaagtttaggaattcaagtagaacgttttacatgaggggtggctggacaagtttctccatgagcatgggcttaaacctggagattccgtcacgtttaaactagagaggaataacaccaaaacgcctcttcttcgtttctccactgcagaattaaagagtgtttccactaaagatttcaacaaaataaagagaaaggaatctggtgacagtagccaaaaagttccatcatcgtcatcttcagtaagtgaataccgatttttgacactaaccgtcacaccagccgctctcaaagatggtagacttgtaagttaaaacaactctctaggaggagttttgttcccttggttttggttatcatcaatgctttatgaaagttcacttagttagtgtaagcttatattctcctttgtttgcagcgtgttcaatcaaattcattaagggtaacgaatggaaaacctaggaatgaagaagatactctgttggcaagcatggagtagagtggcagtgaattta

SEQ ID NO: 9443 - DNA, 971 bp, Arabidopsis thaliana
gtgtacattatacatatttcgcatttcctcagttgactccggttacaagattcgttttttaaagcaaagatctaggactatcagattacaaatcatcttgtagctgtgttagaagcgcatcggtctcatgggcatcgatttcactgttgtttactgttctgttttcgtccacatcaataagagctaggtaagatttgtcttcaagatcccccgactgccttaacaattccaaaacggcctctttactggtaacatccgattcctcttcacagagcttgaagaaaccagacagcatcaacaccttgggcctccaattgctggacccttcagccgaaaaagcatttctaagacaagtcaaagcctctgaaatacacctctttctggtatgaccaacagctagaatctccacgtacttgaacttggtttcctcccatttcaaccatgtggtcgaacaacccctcagctgtctctagttggtcgtttttgacatacgcattcatcagaagatttggtatcctggggtcataagaagacttgactggaagccattcctcatataccttctcggccccttcaatgtctcccatcctcaccagcgacgagaccaaggcatggtaacccaaattgggaatgctcgggacaacagatttgtagacgtgccagactcggtacagctctttcttgttaccaaggctgccatacaaactcaagaggtagtgatacggaatgcgattacgaccagtaatccttgcttcaaccttcctcagtgcatcttcggctttctcagtttcacccatctttatgtacattgtggcccattgtgctaaacgtggtccagttgggataaatggaaacatccgatttcatctgctgatacactagttccattttctcaactgatcctaaggagccgcaagaggagagccagatgttgtaggagtaaatgtcgagacgtatatctttctgcttca

SEQ ID NO: 9444 - DNA, 590 bp, Arabidopsis thaliana
atcaacctggtgatagaaggtaaccggcagatttgaaactctcacccatatcggtgtagtgacaatttcatctctcaacggattgaactccggcgtccacgcttggaccattaggatactcccaaacaatctccatggaccacgtcactgccgccatatagtcctcatctctgtcaaaacgcaccataaaaaactgtcacggggatcaacaacatacatcccatccgccagtttccacaactcacgtaactttctactcagcgctgctataggaacatgtcgacctaagacttttacgatcatacagtgtttccataacgcattcatagcatccacaacctcttgatcaatggtaatgaccggctcccctctagcaccatttgggaactccactctcatcctcgacttaacaaactcatcatcaatagccctttctggaaccggtagaccaccaccaacactgcccttcactttctccaaccacagtgaagagctcgccgataactcccccggtggccgcccaacctcatccatagtcgcatcttgatccccaatcgccaaaaccctaccgccgctcatctcttatcctc

SEQ ID NO: 9445 - DNA, 884 bp, Arabidopsis thaliana
ctgtttctgttctttccaagaaactaacaataccaccaagatgattgtatccaattgaattcaaataaatttcttttataaccaaaattaataagaaaaaaaagactgcaactttcgacatctccaacggcaggagaatcataaaaatcatctgaaagttattgttgaaacccttttatcagcaacccatcaccgcgcaattgtaaacaaaattcgatgaatgtttcctaccgagcaatgtccatagaggcggacttcgatcactagatggtatccatgaattcagttcaatgtaccctccacctgaactcctaggaccaccaatcacaatcaacctctcaccgcaagctctaaacgctaatccccaaccgttaaccgagtcagctctttcgggcaatctccctaaagtaaaccatttcttactctccttatcatacttcctcacttccatatcagcatgatcagcagcatacaattcgttattcacaaccgcaacatagaggcggcgcctctgctgctgccggcatttcccggctccttggaggcgacatttccggtatctcagtccatttcttcgtctctaaatcaaactcctcaccacaagtaagcactttcgaatcatttccaccaattcctccaatcacatagaacttcccatccatgaaaacacctgaacacatcttccttggtttattcatcttcggaagtgtagtccaagtctgaagctcggagttatacatctcagcggaatcactgattttgccaaaagaatcaaaaccaccagcaaagatcgcaatctctcctagactcgctgagccaaacaaacacctcggagaattcatcctcataccggaagaccaagagttagtcaaaagactatatct

SEQ ID NO: 9446 - DNA, 703 bp, Arabidopsis thaliana
tgaattgatacaacttagaaaataacttacccttggagaaaacaggagtctgaccactcaattgttccaacacctaccaagttatcgaagaactaattccattaaaatcgagcatacacacagggttgatatgaaaaccagacaaaacagataaaaaaaagtgaaaccttggaggctctggtgagacgatctccactctcaccaacggagatgttgagaaccagcttctgcactttaatgtccctcattgggttcgatagcttcttctccgacgcctgaattcaaccaaaatatatatcatcaaatctctatttgaaacatcaaaaaacgtgaaaccaaagaagaggagttaactgcgacggaccatttcggattagggttgcgatatatctccggccgacgggaaaacacgaatcggaaagaagaaacggagatgaagcggcaaactatataaaccctagttctaattagccttctagggttctaagcaaattttacgagtactcaaaatgacgattgtaccctcctttctccatcaagcccacgttccctcacgtgaccttttttctcatgaactaatatcattctcgtctctgtagaatatagtaatgggtcaggattggcccaataactagtagcccatagagattcgaaaaagtttatttgatgattatctctatgactccatgtttgatcactcaag

SEQ ID NO: 9447 - DNA, 730 bp, Arabidopsis thaliana columbia
attaagcttcagtgagatggaaaagccttcctacaaatcagtagatcataaagtcaaaagctaattctaactcattgtccagaatgttgatggttcctgatcctgcttgaacgtctcacaggtgttatcatctctttctcttcgtgaccacttctcttttgtatcttctcatatgttgtgaaacttccatatgaaacagaacctatggagtactctgatgcagaggaagccatggattcaccgctatcattactcttcttgcctcctcctccgctttgatgttctataagatcatctttcttgttgctgcagctgtgtaatggtttgttcttactgaagctgaaactcatctcagaagggaatgatgatacctctctttttctgtcatcaccaacttcttcttcttcttccttgaaattcaatgaagaaagcctttctctgatcagattctctactggcacatgctcgacaactttagttgcagagattgctgttggttcgccatcttcatgttgcagcatcacaggttttgtcttcttcttggctaataggaaaccagctgctactgctgcaagtataaccatcatagtcgaaaacaagactaacactttcttctggccactcaacaaaatgtcctccgaacctgcatcattaacaacttcaccaaacccactctcttcttcttctacttcattaccgtcatattacaattatcctctatcctctagag

SEQ ID NO: 9448 - DNA, 1323 bp, Arabidopsis thaliana
aaagtcagatatcaatctctttcttcctttattattttgtatataaccgaatggataccttgtataataaagtcaatatttcaggtacgggccattgtttcggacaaatattttcggatcgaacaccgtggttttgacagaacctgatatcatcttcgaagtttttcggcaagagaacaagtcttttgtgtttagctatccagaagcttttgtcaagccatttggaaaagaaaacgtgttcctcaaacatggaaacatccacaagcacgtcaagcaaatcagtcttcaacatcttggctctgaggctttaaaaaaaaagatgataggagaaatagacagagtaacctatgagcatcttagatcgaaggctaaccagggtagcttcgatgctaaggaggcagttgaaagtgtacttacataatttcttaatatcttttttgatattattggttgatactagttgctaattctcaatactcacaaccattaacgtttctgtgcaggttataatggcgcacttgaccccaaagataataagtaacctcaaaccagaaacacaagcaactcttgtggacaatataatggccctaggatctgaatggtttcagtcacccttgaagcttacgactttgatttctatctacaaagtctttattgtgagttctttaaatagtttctatgggtttatattatttagatttactgtatgctacacatgataatgttctctcaatggcttccatctaggcacgtagatacgccctccaggtgataaaggacgttttcacgaggaggaaagcgtccagagaaatgtgcggagacttcctcgacacaatggtagaagagggggagaaagaagacgtcatttttaatgaagaaagtgctataaatctcatattcgctattttggtcgtcgctaaagaatctacctcttccgttactagcttggccatcaaatttcttgccgaaaaccataaagctctcgcagagttgaaggtattaataataatatataatccagaaagctaaaaagttattgatataaagaagaacaacaaaagaagcaaatggatcggggctgatatgtttattttaattttggcagagggagcatgcggccatccttcaaaatagaaatggtaaaggagctggagttagctgggaagaatacagacaccaaatgactttcactaacatggtaattatttatttatatacattgaaaacaacagtaaattttgtaaacaattactaaccatctcattgacattaaactagtaactcactaccattttgattttctattccaaaaatctctagata

SEQ ID NO: 9449 - DNA, 921 bp, Arabidopsis thaliana
tatgggatgagagtttcaaatctgccggttaccttctatcaccagttgattctgatgggaatagcaggagggctaggacggccagtcagagttgatatgactactttgaatcgggagagaggaaggttcgcgagggtttgtgtggaggtggatttgaaggagccgttaaaaggaacagtgttggtgaacggggagaggtattttgtttcatatgaaggcttaggtcatatctgtccgacctgtggaatctttggtcatctagtgagtgcgtgtcctcagaagttgtcggaggcaatggctcagatgagtacaccagatggtagaggggtgtcgggtcaaggggagcagagtaatgatgggttcacggccgtaaggagatcgggaagaagaatggagtctccggtgacgccggttattttcgcggcggggggacaggagaaaattacggaacgtactaacggagtaaatgcgcgaatctcgagatcaggggatattgccatatcgaatagcttcagtggcttaatggaggattcggtggaggagataagggaagtgaggggatcgcaggggattgataaggagaatgctaatattaacgtcccgcaggttttggaaagtttggaaaagaacaaggaaggttctaattctaagcgggaatttcgagttcagaaggagaataaagttgcggatttgggcaagaggaatgttgggccgagaagtgggaagagtagtgggccaaggaaaggacccagaacgaatatgcatgtcagggattagtttttggccattacagggggagagagacatgatttctcgcggaaagaggttgagaacagagtcggactgtgttggcagagctggaggggccttcatgggtagtggtacgaatctgagtctggataagagaccaatgcaagaaaa

SEQ ID NO: 9450 - DNA, 825 bp, Arabidopsis thaliana
tacaacataagagtagcataagaaaaaaagtatctatgcaagtgatctcatcatacagacaaagagagcttgaacaacgaacaaaagcagtggtgacatgaggaaagttccatctagtaatcttcaggggccaagggctggtgtacaccatgtgcgtggtgggtatgtggttcggtgggtatgaccatgtactcatatataagggcggctaaagcactaccgatgaatggtccgacccaatagatccagtggtcatgccatctccatcccaccaacgctggaccaaaagctctagctggattcatcgaagcaccagaaaatggtccacctactaagatgtttgccccaactatgagtccgattgcaagcggtgctatgatcccgaggcttccacgttttggatcaatcaaagtggaatacactacgtagactaagccaaatgttaaaatgatctctaatacaagtccattaaccgctccaacacctgatgctagacggaaaccaactggtctctgcatgaacacaaactctttttaagtcatataccctatattaatatggtaggttccatcttaaaaagcattgcaacactaagtactagctagatatatatgaagttgactagtgttaccatgccgtttgttgtgagccttaacaagagacaagcgaggatggctccaagaagctgagcgatccagtagtagatggcgcggatcgctgtaactctgcctccaacaagagcaccaaaagtgactgccgggttaacgtgtccgccggagacattaatggctgctgaaacagcagcaaacagagcaaacgcatgag

SEQ ID NO: 9451 - DNA, 492 bp, Arabidopsis thaliana
tttgattgcattagacaaccttaggaaacaacctgcactcacatttgtaacgtaacgttagttttttgttctttctaacatataacattacaataattctaatcgattgagatgatgtcccaccggttcagaagtagtcctgcggcaataggtgtaatcaccacttgaagaatgctagagatcatcccaaacacatcaacgggaagctttttaccaatgagtaagagtgaaagcataggtgtaacgaggaccgcagtggccgttgagatagatgtcatgacgatgctaagcgccgcgagtgaaggatcggtcaagaaagttgtgtaatttgatagctgagctccactaacacatgagaccaacatgattccagcacctatagaagtaggtagattgaaaagagagacagcaattacgccgaaaatgtaacctaagagaggtttaatcaagtattgtccgatgtaaccggcaaaaatagcatctggtctttta

SEQ ID NO: 9452 - DNA, 904 bp, Arabidopsis thaliana
taccttggcatcaaagtggaatctatcgatgcctttccagttatcaagatcataagctgtgtaatgcttgcaacagcttgaaacctttagccgccgtgatttaccggcgtcgtgaacgtcttgtaagcccttaacgtagttcacagcgtacttcgaaacaacgagaggatcctctcctggtgtctcttggcctcgaccccatctcggatctctgaagacgttaacgttgggactccaataggtgagtccagctagtcctacgttgtgcatcgctcgagcctccgtcgataccacttctcccatttttagccacaacgatgtgttaaagctagccgccgttaatattgtcgccgggaaactcgtcgctccaggcaccgtcccgttgaaatgcaccttaagaacaactcaaaacgttagcgttttcattacataacaactcatgtatgttcgtattcatctatatacagtaatgatgtttttacccctggtccaacgtcggagacgccatggagagcttccgaccaccactcgtacggcggaacaccgagccttggaactcctgtggctttgtttacgagttgctggactttttccttaagggagagacgtgagaccaaatctttggcacgtgcttcatacgacaatgagacgttgcagaaaccatacttagccgtcgctggggcacttatgtcacacgcaaagttcttttgagactcgcaaagtgatgaaactagagctatgattagcagagagagacgcacaaatcttctaatactcatctctctgttttttttactcttatggaatagaagacagagtgaggagctagttttataggcgggaagagaagctaattagctactatttacttcattaaaattaaagtttaacatttacttccaac

SEQ ID NO: 9453 - DNA, 460 bp, Arabidopsis thaliana
agcaggagtgatagcatcggtgtgacaagaaccgcagtagcgttgatagagatgtcatgacgatgctaagaggtgccaatgctggatcagttaggaatgtcgcatagtttgacaactgagctccactaacacatgataccaacatgattccagcacctgagagattgagaaagattggttaatgtgagagataggttaagagtcttgaatgatgagagacagggagcttttaccaattggagttgggagttggaaaagagaaacagcagctaggccaaagatgaaacctaggacaggctttacgagatattgtccaacataaccgaggaggatagcttttggtcttttgaaagcttcaagaaagtctttctcgtttgaattgataccaaccgcaaacatcaaaaaacctaaagcgggcacaaagtacctaaaataacaggagagtaaagaagagcttttt

SEQ ID NO: 9454 - DNA, 563 bp, Arabidopsis thaliana
ttagcctccagtttggaaaggctactcatgttagatgggagcatagctttgaactggttagaactaaggtcgacattggtgagtgagctcaagttgagtagcataagttgaaaatctgttagtcggtttaggctgctcatcgaatctggtccttcactggtgaactcatttttagaaatatcaagatcagtgagattagaaagacttccgagtgaagtaggaatctttccaaagaaattgcaacgatgaagattcaaaaccctcaaagatttgagattgcccatcgaatctggtaactcaccggtgaaataattccaagaaagatcaagatcagtgagataagtaagatttccgagtgaagaaggaatctttccggtgaatttgcaactagtaagactcaaaaccctcaaatgtttgagattgccatcgaatccagtatctcaccggtgagatcatcattataagaaagatcaagatcagtgaggtaagaaagacttctaagtgatgtaggaacgctccaaagagattgcaccaaggaggttcaaactctcaaatatttgaag

SEQ ID NO: 9455 - DNA, 1229 bp, Arabidopsis thaliana
caaagctctggttctcactaatactaaaaagaggcaaagttatgtaagaacctcacgtaaagtcttctggtgaaacttaggattgatttaaagtcttgtccattttattttttctattctttctgttatggaataatgtattattagcatttcaactttactgtgtcagctctagctagttagatgaatctgtcggtctcttatttctttttcaaatcatagccaaaattatcaaagcttacatggctgtaaacagaggatgaacaaaaattagacctatatctatgactaagttaagagatatcatgaacatttaaatgtgatagtgatggatttctctgctttttgtgcacagaacgtccatgtttaaattacaatatacttttgttgggagtgaaagggccatcagaagaacgaatggaggcggcttttttcaaacctccactttcaaaacaacgtgttgaatatgcactgaaacatataagagaatcatccgcttctactttggtaagctctatatatcttaatgtcttcctgcttactaggattatgaattcaagactttgttaaaactcaattgtctcagtctctttttgtccttattggtaaatctttgacaagcataagatggcacctctattcttgttacaggttgactttggatgcggatctggaagtttagtagactctctacttgactatccaacttcacttcaaaccatcatcggtgttgacatttcgccaaagggtcttgcccgtgctgctaaggtctgcaaaatcacacatcactgttttttattcccgctcgtagacataacttgatgagactaatgcatcaaaataattgataaatgtttgatgaagaatgtatttgcaccactcatgattctctgcattttgtgtaattgaaaagaaatggtagatttacttatgcttttgtgtatcttgtgtttcaactttagatgctacatgtaaaactaaacaaggaagcttgcaacgtcaaatctgctacactttatgatggttccatccttgagtttgactcaagctgcatgacgttgacatggcacttgcttagaggtccactctcatctgctctctaatccgtcaaattttgtacacgtttatcaaaagcaatctgtctggtttcggcgttaaatctataatctgttcctaatctgtaggttattgaacacatggtagaagatcaagcctggtgaatttgggga

SEQ ID NO: 9456 - DNA, 1299 bp, Arabidopsis thaliana
tgcattactgtatcattttaaagttgactatgagttggccattggttcacaactatctttcattctttgtgtaattgtgtgtatcttaacggtgtgtgatacttcaggtaccaaagcggatgaatcaaaggcaacaggagatggcttgtctcagctgggtaaaggtggtgcagttctcatggtgtgcaggatatgccacaagaaaggagatcactggacatcaaaatgtccatacaaggatctagctgcaccaaccgatgtcttcattgacaagccacccacaggggaatcatctaccatgtctgctgcacctggaactggcaaggccgcgtatgtcccgcctagcatgagagcaggtgcagacagaagcgctgtgggttcagacatgaggaggaggaacgatgagaactctgtgcgtgtaaccaatctgtccgaggatacccgtgaacctgacttgatggagctgttccacccgtttggagctgtcacacgtgtctatgtggccattgatcagaaaactggagtgagcagaggatttggtttcgtcaatttcgtgagcagagaagacgctcaaagagcaatcaacaaattgaatggttatggttatgataacctcatcctcagggttgaatgggcaactccaagaccaacctagaaagaaatgtctgatgttgagaccttaaaactcttctcattctcgtctttcttgttatggatttttgtttatcgaccagtttgtttgttggtttggtttctgtatgaatagatgagaatttgttcaatttctctttaatacataaggcatgctttttaaaaaatggatttgtgtgatacgtaagagttttccaacacttttttcattgatgtctaaaattatttgtgatgtttgtttaacattccccgtttcacaaaaatattgtttgacttttactttttcgttctaagatatcaatcaaaataataatctttattaatgaagaatataactaattaacaaatgttagtacgtatattcttttaattgtaattataacattttcgtatcattatgtaaaaataagaaaatttcctttgttaaatttagtcgaaaaagtaaaatttccatttatttttaactgcatatatatcagcttaagtaatttcttcttagtagaaggtcaaattttagaatttcattgaaacaatggaaaaggtttcaaaactcagtattatcttccgtgacgaactacaaaacttcaacaatgactatgtcgaaaatatagatgtcgtcggcaaaaaaacatctaattcatcagggga

SEQ ID NO: 9457 - DNA, 616 bp, Arabidopsis thaliana
caaagaaaaaaagtttattgcattgttgaggtcagatgaagatgacaatatggagcttgtgtttaatcttgtccctttctaattcaaaactggttttggcttctcatgttaagcacttatgtcgtcaagaccagaagaatgctcttttggagtttaagaacgagttttatgtccatgagttcaactccaatgggattgttggtgttaagaagacagagaagtggaggaacaacaccgattgctgttcttgggatggtatctcttgtgatcctaaaacgggtaaggtggtagagttagacctcatgaacagttttcttaatggtcctttgagatatgatagtagcttgtttagactacaacatcttcataatctggatcttggctcgaataatttttcgggtattctaccggattccataggcagcctcaaatatttgagggttttgagtcttggtgattgtaatctctttggaaagattccttcttcacttggaaatcttacttatctcactaatcatgatctgtcagctaatgatttcaccggggagctaccggattcgatgggacatttaaacaagctaacagagttgcatcttggatcggccaagctcagtgg

SEQ ID NO: 9458 - DNA, 1293 bp, Arabidopsis thaliana
cctcagtaatggtcagattagtggctccaagacgaggtgatgtttcctcgtaattagaacactcggcttctgatttccatttcccggtgatttcttcatccgtaacaagaagaggatccgaagtttcgggtatatcttgggacattgcttcagaagtatctaactgatgttccgagattgactgagtagcagaggctctgcgccggggtcccatacatgaccaagaagatatgcttagtgcaggacgggtcagcatgctttgagctcttctcatcacaacctgcaaaagttttgttttattcacaaaattttagagtctcaagttctatattaagtttataaggatatttcttatattttattcttacctgtgtgccactagaaaccgggcgtaacattgcaccagcgccagcaacttttgctttggcagtggccatcgatggaagtcgtgatcctaaagccgtcgctgagcgataaacagtgctgaggattcgggtgtgttcgatttgatttctcagatcatttagccaagcagatgctgttacctgatgaaaaggtggaagggaagaataaatagtttatctcaagaaaacacaacagacgttttcccaagtatataaatgaagcatagaatttgggtctaggaagctaacctcagcacgtaagtcatctacagctgcagcagaaaatgtaggcaccagatcagctccgtttatgacagatacgatgaagtcattcccagagtcggctaattcccaagtcatacaagcagctgaagaaaataggtaggaacaagcactaagtcttgtatcttaagaagatataaacatatataattgaaaactagattgtatgaaaaacctggcgcaaatgtaacacatgtagctgtagagagcattttctgtcccgcataatatatgttaaaagtgcagccgttccaccacccaaagagtgccctacgatctgccaacaaaatgcaggagaattacaatgtatagggctagagacaatctttggtttctcacacaatgggttttaggaaaagttgaaataaagattagagaacgggctacaaaagtaccttgattttgtaatctggatattgctcaagacccttgagaagacaaggggtggcaagtttagctatacaccgggcagcagcaaccataccacaatgagcataacctaagaccaaattgctgacccctctttcatttacaacagtatgatggaacggtacgattgctccagttgcagcagtcaaggtatctttgatgctatgcgggggatcct

SEQ ID NO: 9459 - DNA, 532 bp, Arabidopsis thaliana
gctatgctctgacttcttttgtctctggttatgtgagcggtggaatgtactcaagaagcgggggtatgacttactcgacttggcggacccctccagtgttactttcctctctaactattcaagtaatttaaatgctggtttattcaggtaaacattggatcaagtgcatggtcctcacggcttctctcttcccctttttgtgcttcggaattggctttctcctaaacacaattgccatattctatggatctcttgcggctattccttttgggacaatggtggttgtgtttgtaatttgggggttcatttccttccccttagccctcctcggaacggttgttggaagaaattggagcggtgctcctaacaatccatgccgtgtgaagactattccacgtccaatccctgagaaaaaatggtacttgactccatcagtcgtctccctgatggggggtttgctaccctttggaagcatcttcattgagatgtactttgtcttcacatccttctggaattacaaggtaaatatagt

SEQ ID NO: 9460 - DNA, 991 bp, Arabidopsis thaliana
ttaagacttttttagtggtatgtcttagaatcatggaattgaaatgggcaggttcgatttttgaaggtggatattgattttgaatccatatatgcgttgatggatgtggattagtttcttgttgtctttatctgtgcattggtgatagttccaaagtttatctgttggtatacacttcgttgctttgctcagttgtatttgattatgtagatgcagtaacaactttagtaacccactctcctttttctggctttgaattttattatagtaactgatggggaagaaagcgaagaagaaggcccgagctccaacaaaggagattcagaccatggaaatttccaagaaggtctcagaagagccgcctagtcaagccggggaaattgctgagggtgacgttaaagcagttaaggagacacaagcttgtgtgcatttcgataaggctcttaatttggagaaggtgttggataagattaagtcatcccggcagattaagtgtgcagaatgcaatgaaggagtgtatggaaagagaggaactaaagcaaagggcagtaaagggaagaaggatttttcttcttctgatccaaaatctaataacaaagccatttggctatgtttggaatgtggctgttatgtttgtggaggtgttggtttaccaaatggacctcagagccatgttttgcgacacagcagagtgacacgtcaccgattggtgattcaatggaaaatcctcagttaagatggtgtttcccgtgccagttgcttctccctgttgaaaaagaagataatggcgagaagaaagatgtactgtcagaggttgttaaattgattaaaggacgatctttgaacaatttagcttcatccgatatcgaagatcagtgctcaggaagtggcagtatcactagtgatatcaaactagaaggtgctgtgaccagtgatatagaagcaagagatggttatgttgtgcgaggtttagttaaccttgggaacacat

SEQ ID NO: 9461 - DNA, 1462 bp, Arabidopsis thaliana columbia
tgtagtagtcaacaacaacgaacggtagccaatagtaattggatgcggagaaagcatactatggttgtggatgttgttacatctatctctccttcgtgtagcatctacaaaaagaagtttgaaaagaagtaaataaatgtatgaccacattatatttgtacttaacattgctactagtggaatattgttttttgtagagcagaaagaaagactttgaagaatgttttaatccttaaattttcctatccgaatagtctcctagggtgaataattataagaacgaaaaatagtttatttactagaataattgaaaatttcttattagttactagaaatagtttcatacttagtttactttttgaagctttcttacgaaaattagagttcgtaatcaaaaggatctagtggttgagggctcgctttgttagtcaaccttacagtttttggctatttttgatcacttttttgtccaaattccatttgcgaattgcgaccactgattttttttttttacactttcatataaggcaagtaacacgtctagtatgttaaataagcttttaaaactttttttaattgtttttttactaagaaaaacatcaatctcaaacatctaaaccctatgacggatccgaaagactgatcttggacacaagaaatgaaattacacacattcctatatattatatattgatcatcaattagaaatgattctctatttcttaatctatcttaacctaaatctgaatctcgatcattaaacaattaccgtacaattataaccaaaccgttatggtttactgatcaccaactgaaattacatcgccttgtatagatttgagtgtataaaaggagtttcactaattttaggataaacatcgaaatctatctgtcctaacccctatttaatcagttcaccaagaacacaagaaccgaaacacctgcaaagttgtttttatatagtcatgtattaaaggttaaatataggatatctttgttgtaccaaaactcttaaaacaccttttaaaatctaatattttttaactctcacaccatacaacattgttactatacatcctatggatcccttcaatgcgagttggtggaccaatatggcctggcacggctattcgctcagcgaggacgggactaagttctgtgagatgcttccgactaagatcaactctttcggtttgtcggagaaaattcttcacaaatcagtagggttgtatttttgggaatatcctctacccaatctagagctcattattctctcggtatttttcttctggcagttctttgagatcttgttcaaaatgtccaatattcccattcctaaaatgccttccatgatgcttgtaagtagagtgattgtctcttaactttcaaatgattaaggatatttccaaagaaaattcaaaagttattttctgattttgtgtttaattatttgtgataaaag

SEQ ID NO: 9462 - DNA, 1187 bp, Arabidopsis thaliana
tgattggcagagatgtctaaagaatacaacttggtttggttacgtagaaatttgggaaactcggaaatattacacgacgataaaaccaagtattctatgggtgagggaagactgacggttgaactgatcttcaaattaatccctgaaacatccaaataaccaagtgacaagagaggtgagaaaatactcaaatcaacaatgtccggattgaaattatttcctccaagaattaatacttgaagtttagattgtgaagagatattcccaatctcaagagcgctgaagtggtttctttgcaggtcaagttcaaccaacgaagggatcatgaagagagaagagggaatggatccagaaaatgaatttccaccaatataaaaatactccagtttggagaggctactcatgttagatgggagcatacctttcaactggttagaaccaaggtcgatatcggtgagcgagttcaacttgagaagcatatcggttagtcggttaaggttccccattgaatctggtccttcacgggtgaaatcattataggaaagatcaagttgagcgagataagaaagatttccgagtgaagaaggaacctttccatagaaattgcatttaccaagattcaaaaccctcaaatagttgagattgcccatcgaatctggtatcacaccggtgaaatcattaaaagaaagatcaagatgagtgagataagaaagatttccgagtgaagaaggaatctttccaaagagattgcaattaacaagaaccaaaaccttcaaacgtttgagattgcctatggaatccggtagatacccgaaagatgattgctgccaagaactagcttctgaagatgttgtagtctaaacaggctactattagatctcaaaggaccattgagatgactatactggaggtctaactcaaccaccactcccgtcttgggatcacaagagacaccatcccaggaacagcaatcagtgttgttcctccacttctcagtcatcgcatatgaatgggggcttgggacattgaactcgttcttgaacccccaaagagaatccttctggtctggaagacacaagtgtttagcactaacaagtattgagtttgtaaggcagaagattaaacacaagctaagccgaccatcgccgctttgaaagccatcgatgacggacgtgagctatcctcta

SEQ ID NO: 9463 - DNA, 699 bp, Arabidopsis thaliana columbia
tcaaatggtatcattcatcagagcagttcttctgagacctaaaatacgagtctattgtcgtcttgatctcgaacattgaaattttttcttaaattttgttttgtaatcttcgctatgagagtcatagtatttgccagtgccagcgacgatgatataacaccaccgacagcgagaagcagaccatcgtagtttctgaagatgtaatagaccgtgggatacatacattgtagacgccagagctacattgcctggtgcgcctaatgttttacaatatgtcttttacattgaatggcagtattggcatttacaaattcggtaaatttactttcatgtataaaatgttttgtttatgagtacaaagagaaatcttgataagcttcagaaactaagtgatgatcatcccattcgtctctatacgtctcaggatgggcttccttcctaacaccattcgccaaacacatctctttcctccattcctctgtttctgagcatccgcattgtgaagccaaccaattatcatactcaaactgcaaacaacaaaaaatgtcattgatgtgtttctgtttagctttggtttattttattttatttttatgtgcggaaacttgggattttaaacctgagtattgcccatacgatgagtatatcgctttggaatcccttggacttcaagtgtggagtaaaagggggatcctctag

SEQ ID NO: 9464 - DNA, 925 bp, Arabidopsis thaliana
gatcttggcttcgtgtgaattaatcttttagataagcaaagttctgaattttgtggttctgatttggcactgcactctgtagttgaccaaccattgcagtttgtttaaatagcttagtaagggaaatgaatgttctattaaatggcgctgttccttaaatgccaacgttactctatgggtgtctcattaactataggcttaatttaatgttttgttctcttttgagctctatctgtggagtccttttaccttgtctgaagcagggaaacacttctacgctcttagattctgatgtttgctcttagaatgtaagatgcccatgactttatattaaggaattccgctgaagtttttctaaaagttacgaattgaaattaaattctacaagctccttgtcacatgtaacctcctctttggctttattctcattagttataataaaccatgtgtttttatctgttgtagaattatgttgctttgaagattcagaagagcgccttacaatttgctcaagctgcacttcatgaaatcgaacttcttcaagctgctgctgatggggatcctgaaaataccaagtgtgttattcgtcttattgatgacttcaagcacgcaggtcccaacggggagcatttatgcatggtgctcgagtttcttggcgatagttgctgcgtttgattaaatataaccgttataaagggatggagttaagtaaagtgcgggagatatgcaaatgtatactgactggtctagattatttgcaccgtgaactcggtatgattcctccgacttaaaacccgaaaacattcttctttgttccacattgaccctgcaaggatcctacagatcggactaacacgatctagaaaagccgagggaacaaaacggtcatcacaatgatctgatgagaagagtgagagagacaaaa

SEQ ID NO: 9465 - DNA, 1215 bp, Arabidopsis thaliana
tggtaaagaagtagctgcatgatcctccatgaactgctcgttatgcgcagtactctgaactttgtttaacatgataccaactccttctatcatagccaacaacacacctccgactaaagccgatctagcagacgcgcctaagccttgacgcaacgagaggaatcctccagtggctgcaccagataagatcgagttccatggatcttccttttgtcttgcgtacaccaacgcacaatcgaaggttgagtaaagaccaccccacacggagaagcttcctccgcttctcggcccgctcattctcaaagcttgaacgccgccggagagacgagctccgccgggagagttgtagattcctcttatgaggtgatacgctgatccaccaacagcacccatcgcaaacgcacctccgacatcatctaggatccgatccggacatggctctctcgatgattctggagttcccattgattttcgattttgatctacaagtaactttttagggtataagaaaagagcccttgaaaacgaaactaagaatgaggaaaaattacaaaaatggaaaaatatcgtgttgttcacgttacttgaccatggtcaaagcccattaaggcccatttgtaaacacgctttatcacaaaatactaatataaaaacgccacgtcattcaagaaccttatctttatttaaaacgtggacaaacatcctccacctcataatgccatgtcacgacacagtatctaaaatcaaccaatcacaacgcgtctttatagataacttgtttttttatggagtttgcttttagagccatccattgtcctatctcactttctctctttcaccacataaaaactcataaactcgatcgaaccaaagctaaacgaaaaacttaaaacccaaatcttatcactactctaaaagaatcttcatcatggcctcagtaacctcagccaccgttgcaatcccatctttcaccggccttaaagcctcaaccatcaaatcatccgccaccgtcagaatccaaactgctgctgttgcatcaccgaagcttacagtgaagtcatctctaaagaacttcggagtcgcggccgtagcggctgcagcttcaattgctttggccggaaacgcatggcaatagaagttctcttgggaggaggggatgggtcgttaggttttattccaacgacttctctatagctaaaggagagaagatttgtg

SEQ ID NO: 9466 - DNA, 944 bp, Arabidopsis thaliana
agcaaaaagaaagagatgcgtaagtatactccatttgcatctgaaacccagagaatcaacaataattcgaattaagatggctttaaaattaaaaaacctcttccaattcatcaagaactcggtctgtttcagcaagattccagaagagtaagagctcgtcgatgactgctagattttccctagtcttagagaatccggagaaaactttctccacgtcgcttttggccttctccttaatcaaccgacccagccgcgtgaagaatccgctcggtccggccgagcaccggaaccgggtcattcgtggacgaaattctcctctgagaggaaataatccgatccgttcggaggagaacggcgatatacgtccggcgagaaacgagaggtgagcagaagaagttgccatggcagttgtgctagagaatctgtgtaagttactgacttactggataataatcttttttatacgctgcgttttacgtttctattgtttcccaataatgaaccaatctgcagaaaaatgaataatgaaaaacgcagcgttaatgcttaatttgtggagaactgtcaatcataattataaataaaaaaaatcctcaaatacaaatttgtcttgtatataatagattacgtctttttatattctatctatctagattacaagttttatcaaggatatgttagtaaattagtgagagaaaatagttaatcatctacagttatcattttgaaaactataattagttttatttgtttatatactaatttctctttcaaaggtatgcttaatatctttactttgaacgattttcaaagatattggaaatttgaaatcataagatttatcctcaaacgagcacaacaagtaactagcaatcattcagctacaatcacatcaactatttcattcattgatggcgccattaagctttggtacaaagtatgta

SEQ ID NO: 9467 - DNA, 633 bp, Arabidopsis thaliana columbia
tgctacatggatgaggtggggaggttacgggtgagcactcttgagcttatgacattacacactggggaaagtaatttgccttggtatgctgatttcgcgaactacctttcttgtgaagtcccacctcccgatttcaccggttacttcaagaagaaattattgaaggaagttcttgaagaacgtgcagcgctactaatgggatgagccttatttatataagaggtgtgttgataacctttttcaggagatgtattccagagagtgaagtcgaaggtatcctttacagttgccatgcttcagattatgaaagacactttgcctcattcaaaactgcttcaaaggtcctccaagctggacaacctacaagactccagttggaacaacgccattcaacctcatctatggcaaatcttgtcatctaccggtagagctagagtacaaagccttatgggctacaaagttgatgaactacgacattaaacccgctggggaacgccgccgtttacttcagctcaatgagttggatgagattcgtttgaatgcctatgagagttttagaatttacaaggagaggaccaaagcccttcatgacaaaaaagatcattttaaggaagttccagaaggtgataaggt

SEQ ID NO: 9468 - DNA, 1047 bp, Arabidopsis thaliana
attcacacacatgacataacggagataacaagaatatgaataaaaggcgtcatacaatcctaaccactgtttctgagttttgtcaatcattctcttcaagcttcctcccatctcaattcatactcagaattaaccaaaaactaaactattaaaaaaaacaccaaatagacttacaatgataatgaaactaaaattgtattctctcataacaaacaaaaacaaagtaggtgaagatgatatcagatatcaccaccactaaataagaaactagttttaccagcaaattctctatctgcaagcaacaactagacgattcctgacttgcgtagctctgcttccccatgagcaaagtgacatctatcaccaaatgtacagtttccttttgagaatctctcacatatcttagtcttgaagttgctccctggatgtggtttcccttcagaacccatgccaccaccaccaccaagaccaccaccaggtggtttcttagctgctgaattaagcctcccaatcaaatcttttaccattgcactcgcttcgcttatctgctcaagtgttccttcaagcacaatgttcttcaagtttgggtctctctcgtgatcttgaattgataattttactcccgtctgacgacatatctgctttgaactgactccgcctttcccaatgattgcaccggctaaagaggcatcaacactgaatctggcagtggctgagtcaccaaagttagagacatggccaggcccagactctcccctccctgagaatcggcctccattaccagaaccttgcatgtttctggaaacttgaggaatgggtggtccatatttgtcatctgcgatacagcattgtatcctccgggaacataatgcaagaaatggcaattctctccgaaaggacagccagaagtactgcaatagaagcataatacatcagagatttaaacacaatgggaatagaatagcacaagaacaaaccgaatagagacagaagaaatagcatattgatacagcaatgatcattgtgctataagagaataaaaatagt

SEQ ID NO: 9469 - DNA, 687 bp, Arabidopsis thaliana
actctacatagaggatcccctcaagcaccatatctgcaacacaagtccaaatcaaagactattatgacttgtattatctatctagctttactttaaaagccaggctagtgtaagagatgaaatgtttgtgctgagaagaacctacgtttcttcttctttgtgaaggtccctccaacgtgtttacttttcattttcagcacagcttggcctgctttgttgatgtagacagagacaatcttccagtggagttcacctgctttcaaaattcaaggtcagcgacccttgctttttacttggcttacaaatcatttatacgggtgtagctttggagtacctccacgagttcgtttgaggagctcagtgcctttagctagtaattcctggttacagacgccaaggaagtcttccccagccacaggtaattctccactaaagctgctatcactatgctttgtgtcaacctgtccacacaacgctgaacttgcccctttctcggctggcaatactgcagctatgttccatacttccttaagcgctcttgccttgagtgtagctgctcctcgcagagctgcaaaagaaaagggggtgaattcaggtatggaatctctacagaagtaagggtgactacgttttaatgcagtacctgttgcagcagctgcagtaagggtgacaatatcgtcatgggac

SEQ ID NO: 9470 - DNA, 564 bp, Arabidopsis thaliana
tacagagagttcgtcaaagaaactccggtaagtgggttctgaagtgagagagccaaacaataaaaccaggatttggctcgggactttccaaaccgctgagatggcagctcgtgctcacgacgtcgctgcattagccctccgtggccgatcagcatgtctcaacttcgctgactcggcttggcggctacgaatcccggagtcaacatgcgccaaggatatccaaaaagcggctgctgaagcggcgttggcttttcaagatgagacgtgtgatacgacgaccacgaatcatggcctggacatggaggagacgatggtggaagctatttatacaccggaacagagcgaaggtgcgttttatatggatgaggagacaatgtttgggatgccgactttgttggataatatggctgaaggcatgcttttaccgccgccgtctgttcaatggaatcataattatgacggcgaaggagatggtgacgtgtcgctttggagttactaatattcgatagtcgtttccatttttgtactatagtttgaaaatattctagttccttttttggggat

SEQ ID NO: 9471 - DNA, 992 bp, Arabidopsis thaliana
ccatctccataaaattgtttaactgttaatataacatgatatctacggggatacactatcataaattcataattaatcaagtagactaaaataaaataaaaagtatttgaaagaaggaaaaaaaactagtctctctttttttttttttaagaactagctagagagagatactaaaagaatggaactagaggcgtagatccaaactcacgtggtccggtacattcttcttggactcgtaaaacagaccatggctgctgctaccaccaccgacatacgttggtctagtctggtgatcaccgatgaaccaaggaatatatctattataataagatgaacggtcacgattaaaactcgcagatgagttatacatacgacataaccctaatctcgcgtcgttgatttgaacagcttcaaggctatagcgatcctcgtagagcctagaagcagcaatgtggttttgttggcggtggaagaaagcggctgcgtttgaatggaggttgaagcgtttagtttgttgacgttctctcttgtgagcgttttgatggccgcctagggcttgtgaagtagggaagttccggaaacaatagtggcacttgaatcttttttctttgttatcgtctttgatgctttcattgttctcgttgtaattgtctttggactcagattcttcatgagaagctccaaactcgaagccaaagaggcgaatgggtctttccttaggagagaaagagttgacgttcatgaaatcataagtcttcattttaatatagtggtggttatgactctggatggctaagtacagagaaaagattgaaattgtagagttgaagtaaaggaagattttggctttctatttctagattcttcaacttagtgttaaatttgcaacttcgaagtacggtctcctctatgtttcttgcatttaattcccgatggggtatgtacatagataatttacactgaataactattaactataatagacctattca

SEQ ID NO: 9472 - DNA, 903 bp, Arabidopsis thaliana
  unsure (1)..(903): unsure at all n locations
tgtgaaggaaaagaaaagaaaaaccagcagctctatagtgttttgaccaacctaccaattagtaacataccatagcatgacttttaacatctgatacgccaagttgaccacaatcattaagacccgttgcaaagactctcctcgtttctgtcacatgtgtaagcttattatcagatactcttcaaaaccaatcactgattcaaaagatgataactttacaaaaacgcaactcaacaaccacatgcccaattaaacaaagccaagaaatgctatccaacgaagaccactctaatactgattatatgcagctatgatctgcaaatggcatataccaaaatgaatgaaatctcagcaactcattgagatgccaattctccggatttctcagctcaatagtcaacacaattcttctccctctacttttattactcacattgcaacctcttaagatttcaaagttcctggataatccactaaataaaaaaaaaaaaatatatatatatacatctatataagacaagtcgggagctgaagaaatcaccggtgagaaacagagtgtgagctccgccgcaagcgacacgtgtgatactgtgatcactcaaggcagagcaaacggcaggtgtccactgagaatccaagtttccgagccctaatctgccgtaatctccacttccccacatcgccgcaaatcgtttcccgatctcacacatcncgctntgctactagaaacaccaatcggacccaatttcgaatcttttaaaagcccactcgtacaattcgatccctgaatcctcgacacaggaattcgaactcgtccgatggctctagtcaacattttcacttgtagaaatcagaagaaaatgtgattaaaggagatcaatttagatagttaaaatggatgga

SEQ ID NO: 9473 - DNA, 940 bp, Arabidopsis thaliana
gcacctctacaacattcttggcctcacttccaagcttgaaacaaccaatctcctgctgtaaaagagctgcgtccctttgtcactctgtgtccaaatagaatattcataatgcccaacaccaattgatgaaacggagtgtatgaacttagttctccatgtatgctttatttggaacctctcatcactaagcagaaacggttttattagcaatgcatcatgtcgcagccataagagaagttgtttagaaaatgactgaaagagtctaaatctcccctttttcttcaagttaaacatcacgtccctatacccaagcaaaatatgaacaagttctgcctccttgccgatcaagaacaaacatggatactctgtagaaaccttttgcttcattttgacttcaaaaccatattgtaaagctcttggtacaactctatgtttgaacttgaatctcctagacttgtaaaacgttttctttctctttgtcaccatcatcttggcttgtacaatactgttttggaacagcatcatcactcttcttaaaacctctatgataccaatttcagagtcttgagtatccatttctagtggacccacatgaaacctgtgtgtaaccaaatgttgactcctttctgctgcttccatttttctgaaaacaaccattctcacattcctagacatagtagggctgtgtagtatcttatggtcccttctatacttaaacatccaagactttggagctagtctttgcttcggtttatgagactcgtcacatgttaactgctcacacaactcagccacgtccgagtggaaatcattagagattagacgcaaagcttctgtcacgataggttgttgatctcaatgaccatatgcatatcaaaatcctctaacacttgatgatgatggctagtttccatgcaataattgagacctgatgttgtgt

SEQ ID NO: 9474 - DNA, 638 bp, Arabidopsis thaliana
caaaaagaagtccagtttgctcacaatggctcgtaatcaataaaacggttcgggttttaaagaatgactcagttattctacgattcggcatcatataaggaaaaaattggacttataataaagagtcagaaacttgatcttcataaaaatgtggataaagtcgtccaggcataagttctacaaaaaatggataaagccttccaggcacaaacactaaaacaagataaaaaataacggagtcccgcctcgggcttctaatcaagctcttcagatgggcgtactccttctgcaggcaagagcgagccagattaatcacctttgcctgcaagccagattaatcagcgattccggcttcatcagcgagagtctcaaccggcttaagcccaccaggactccgaggagtaggctcgagagcaggggctttaagctcgtctttcagctcgatcattaggtgagtgagatttgcctcggcgtcggcaaaatcttacaaccacttctcaaccaggtctttctcggtcgccaaagctccgccatcctcgagtgatttgatcagttgcccattggcccgtgcatgggacaagtacataaactgatcgttacctcctcggtgactttgagcctcgctgcgaaagctccga

SEQ ID NO: 9475 - DNA, 738 bp, Arabidopsis thaliana
ccctcctcctgactcggacattacaatgtcttccagtgtaattgatcaagatttgaccatgccgggtatgaaaggctaccagatctctcacgtttttcgcggcttgatgtgcttggtaaaaaaatcaagtgcccaaatatacaataccacgactagacaacttgttgtcttacctgacatagaagaatccaccatcttagctgaagaacacaagagtaagaagatcatgtaccatatcggacacgatcccgtttatgatcaatataaagtggtttgcatagtttctagagctagtgacgaagttgaagagtacacgttcctgtcagagcattgggtcttgctactagaaggagagggatcacgtagatggagaaaaatatcatgcaaatatccaccacatgttcctttaggacaaggattgactctcagtggtcgtatgcattacctcgcttgggtgcgtgtgtcggataaccgtgtgcttgtgattttcgatactcattctgaagaatttagtatgctccaagtacctggagatatcttttggaaatataatggtcttctagaatacggtgggaaaatagctattttaaactataccaaagttgatatcgaaggtgtgatggaactatgggttgtggaagatgaagagaagaatctttggagcagtaagatattggtggtcaatcctttgcaactgcagatggtcaatagcattattagtttgacggtactaggaac

SEQ ID NO: 9476 - DNA, 925 bp, Arabidopsis thaliana
ttttattatttcgtatataaccaaagccaaatatcataataagacatcagaacaaagtaaaaaaaacaaagttgtttctcattttgtgcttgtaatttcatcaacatattcgcgtattactttcactgttgctatgtgttcgatcacacttcataacagactagtaacttgttggcataattttctgttttatattcctttctactggattagatgatgggtaatttgactattaaactatgtaatgaaatgtatatatattcttagttcgtactcagacaaaaataggattgagaagatagcattcatacttaggaaaaacatacaattcaacacaaactcttcatcagacaattaacctcatataatctgatatctgaagtagaaacagaggcacggacttgatagaagctacagttgtcatggttatagagaaagactgaaaatttgctctgatgttgactcaatggtgacgtcgataggtcttgctctgtgtttgacacaccgatattcaccaatggttctgtccattgttgatgacggggatctgacctaactcggtctggtttttctcgggttgtagtaacagaagcttatcttgtagtacccgtagaccactttctaatgaatccttcatctctaagactttctccgagagcttactgttgtcgaggatcttcttacgtagaaacagagaaaggttggttcttttcttgcgtcgctctctctcgtgtagtttgctaaacctctctgccatgtctcgaaccttggattgatcctccggccatgtcttgatgagttctccgtcacgactataaagtatgacacagacttcgatatcgcacagagttgaaagctcgagggctttcttaaacattgtatcttctctcatagacaagtttggtttctcgcacagaaaatttgg

SEQ ID NO: 9477 - DNA, 942 bp, Arabidopsis thaliana
gaatgatttttactacaattattgaaaaaccccaacggttagattaatatcagaaccgtgttacacaattatcagattttattttctctctgataagctacttctttcttttttttttttctttttttttgtgtaaacaacaattaagggtttttgcttaccttaattaattatttaattattaccttacaacggttagaaatcggatctgattttagattacatcattaaatgaagaaacgatatggaaatcgatcgaatttaacaaattctatataaccctctcaactttcactgaattatatcgttcagagtttattttctctttgagaaataactgaaagcttctttttctttctttctctgtgtaaacaaacatcacaatggattcttcaacgtctacgaagaagaataccaaattgtttgtaagaaaccaaacttgtttcaagaaatcgtctctgtcttcttccaatgcaaaaaagaccacgaatttgtcgatgagagaacagaccatgtttaagaaagccttggagctttcgactctgtgcgacatcgaagtctgtgtcatatactatggtcgtgacggaaaactcatcaagacatggccggaagatcaatctaaggttcgagacatggcagagaggtttagcagattacacgagagagaacgatgcaaaaaaagaaccaacctttctctgtttctacgtaagcagatcctccacgacaagaaattgtcggagaaagtcttagagatggaggattcgttagaaagtggtctacgggtactacaagataagcttctgttactccaacccgagaaaaaccagaccgagttaggtcagagctgtgcggtttatccacaacgtatccattgtcttctccttcgctgattgaggatcatcaacatcaacaacaatggacagaaccattgtcaacacagag

SEQ ID NO: 9478 - DNA, 376 bp, Arabidopsis thaliana columbia
cattctattttgttactgaaataagaatctaaccaaattctttttttgtttatatgaccagggtttgatggacgactatatcatggttatttgtggagagtggttttgttcttcgaatggagagtggaaattggagatatgtaatcaacttttctccaggattgtaccaattcatgagggaataacattggttgcgttgaacgaagcaattctgccagagttcggcgtcaagggtgttgatcctttattaagttactctgtaccgaataagaatatgtttgcaacaaaggataagactccaccggttctggttacaagcgaggttggacttcaatactatctaaagacccttagagaaaacatggggcttaacttg

SEQ ID NO: 9479 - DNA, 970 bp, Arabidopsis thaliana
taaaaacgcaccttactgctgcctgttattcccttgtcttctttggctcaatagcccgtagccatgggctaacttctcggaacatttgtcagccagtgaaagactcgaaccggccttgagaacagcggctacttcttgcaaatacttctcgttgcagaggtggcatctagagagcgtctgattcactgtgctactcaatggaactctgaaatttgatgttgatgagaagaaccctccaaagggaacaaaggatcccatcaagctgtaaccaacagattcatccaattacgaacttgatcagttgcaaagtcgaatcatagttttgagaaaagacagaacattaatgtctactctcagaaaaatgggaagcataaagctgagaaggaaagtggatatgtcaaaatatttaagttttatgttatcgacgttgacgcaagcaataaactattcccacaagtttactgattgttttgataggcataaataacacttataatgttaatggaaatagcaaaagcattacctcgatttgggataaaccccttgagtcgaaggtttagtagaggctgtgattggaagaacatgaaggtcccaatccttctctatagtaggaaaccgatcaataagcttcgtgtaagtctcattactcgatacacatccgatgaacgaaagttgtttactttcatgtttcagcaaatccgaaagcttcgacaccaaaatctcaagagccgcattggcttcactggtcaaaaccttgagctctcccagattaagcactatccccgatttcgagccactttgctctacagttcttcctaggtcatccactttcattcgaatctcttcttcgtttttcgatccatcggctaaaatctcactaatctccttctcgatactaatcaagcttaatccgctaatatccatctgaagaaccctaacttccactgttgatcgaaccgtgaacgtttta

SEQ ID NO: 9480 - DNA, 545 bp, Arabidopsis thaliana
gtctccgaaactgcagcaaactcaaggaattgccagagctaactcaggtgcagtcactcactctttctaactgtaagaacctcagatctttggtgaaaatctctgatgcaagtcaagatccaagcttatacagtttgcttgagctttgccttgacaactgcaagaatgtgaagtcattgtcagaccagcttagtcatttccccaagttggcatatttagatctcagcagccatgactttaagaaactgccatcaagcatcagagatcttacctcattggtaactctctgcctgaataactgcaagaaactcaaatcactggaagaactcccactgagcctccagtttctcgacgcaaagggttgtgattctcttgaagctgatgatttagaacatttcaaagggagagtaaacagagaggtgaaatattctgcacttgacccttctctctactctggtctatgtagtctcttcatcatcttcattcttttctaggtatcagcacaaccacatagtgctcgcttccaagaaacggagatgccaagt

SEQ ID NO: 9481 - DNA, 515 bp, Arabidopsis thaliana
aacctctacaatcagcatcctcaagtcaaaaggcttggcaaggtaagagtagttaaatgcgtgtgaagcagtaaagcattttcagatcttggcgaagggagcagccaacctgatctgcaacatgcttcattgacctttgcagaaatagggatgcgaagagatctaggaccgtcaagacccaaaaatttgattaagggaccgaaaggagtccagttatcataccagaaagaggccttatgtccgttgcgaacgtgagtcaataagaatttttctcccaaaggccgcagacggagaagcgccctccatgtccaagagtccctggtattctcctctaattcccaaaaagacttgtttttgatgtgctgggacttatgccaagaggcccaaagactcccattattagcaaataacagccacataaaacggaggcataaagttctattccacatagaaaatctgcgcagtccaacacctccttctttttttgataagcacacacccgaccaggcaatctt

SEQ ID NO: 9482 - DNA, 784 bp, Arabidopsis thaliana
caaaatcctagactcttagtcctagcgagttctcctaacaaaaagattagctctttacaacatatatgagcttccaatagacagaagtctctctagctgcctacgttaattttgacacctagcggagctaagtcatcaaacaacatcatccaacgttagaggaggagctctggcagcggccaacgactttgccttctctttctccagcaaagcttctatgtctgagcacttttgcttctctttctccagttgagcttctatgtcagagcacttctgcttgaagatcttcagctcttcctctagttcttgcatccgagacttaccaatctgctcttccatcttcttttccttcacttcctccaatttacgctctaaccaatccaccttaaagtccgaatctttcaggtatcttagtgctttctctgcctggcccaggtcatcaatggaaaaatcttgcagtgactggcacagtgtatcgattaggctgaggaggacattcatacatgatgtcctcacatattggttctttgctcggaactccagtgccatgtctgagtgtctttcgaatataagtttcgcagattccacctgaagttataagaaatgatgaataaagtataaaactcatatctataaaagagtttgaatctctgagaacttgttacttgtgaaggaagaactagaaacccattgacatcgactgatgaagtttccttgtgcaaatgactagacactctcagaaacatctaagttgccaataacttgaagaacatcaacctccaca

SEQ ID NO: 9483 - DNA, 1021 bp, Arabidopsis thaliana
catggattactggttccatttggatcctctgtctctttctacgtgcagatcaattgcttatcagtcctcacaacttgggggaggaagtttgactctccgtgggggttggtccggagctgttaatgactactgcagcctgtgttgattcttcagcaagtactcttaatctgttgagctctggcaatataactttggaaagatcaggtctgtcttttcgccttatctctgcgcacttgagagccaacttggcaaactctgtggtgtcttcaacaggccaatcagacacagctggatcgagcaaatctttcaaattacccttctcgagagctctttcgacataatgggttagacccataggtggttttcctgttattaactgcagaaacataataccaagcgaataaatgtcagatttcacacccagcatacccgtctgctgatactctgggtcgatgtagcaaaacgtgccagcagttgatgtcatgtggtattgcgtcacggtgtttgcaacggatggagggaccagcctagccaagccaacatcagcaagcttgctgacaaagttgcggtctagtaagatgtttgctggtttgagatcacggtgaaccagtggttctggtttagtctggtggaggaacaacagtacagtgccgatctctgcagcaattctgaatcttgtttgccaagagagagccgggctgtctccttgtctgaaaagacggtcttctaagctcccattagccatgaactcatacactaagcatccacattctgggcatgctccaagcagaagaaccatgttagggtgccttatactgcataacacttcaacctgtgtttggttgataaatagtagaaagcttaattaaagtctgttagccaagaaagagtccgaggtgtatttcatagacattgttacgagacttcacctctttctgaaactgtgacctgccttgagctgcatctgggcgcaaagctttgacagccacaggtgtgtgatccagataacacttgtagacag

SEQ ID NO: 9484 - DNA, 882 bp, Arabidopsis thaliana
aaaaaggaaataacgtagaagagtagaaagattatataagtaatcgtggataaaacttcagtcattgtaaacagtaatttacagacaaaacaaaaatatatataccaaaccagaaagaagaaaacctacttaggtgaagcaaacactcaacattgagagtgacctcatgaagctctgttacgttgccacgtcatcaccccgccgggaaccatttgaaggagtcgaatgttcgaggagtgattgtcagcaagtggggcaagaggaatgtgacagcaaccaagtgtcgatgcacttgacgtggaagccatggttacatttgagctaaaccctaacaggtatcaccgtcggcggaatctcctaaacagatcaaacactccgtggctttcatcttaagctcaggactgtatgaatcaaccggaataaccttcaacgcccgtttcttgatcccctttgctacgtttgcattggtgtcaactggatcttcgttgggagtgaaccttctcgtgcagcgtaagacacagcgcaagaccgaattgatgccaagagcacagatcaaggcgcatagaagagcggctagtatgatcaccatgtgtgtatccatgctagctatattcttgttgttgctgacagagtctcctaaggttctaggatttgcatcagtagctgaaatagtcggggtagcttgcgtcgcaagtaaaaatctagccatctgtaaacgtttcagaaacagatgcacaaatcttcttttttttttaactcaccttcaaggttcttcttcttctttttcttattgctccagtttctgttcgaatcggactacgaaagagactgagatgaaagagtcaaggttcttcatgctatgataacacaagagtgcttttg

SEQ ID NO: 9485 - DNA, 326 bp, Arabidopsis thaliana
catactcgatgtggtttccctggagttggagctaatgctgctttcaaagctttcttggaactacacgcatggcaatgcactaaaccgcagttataacaattatgcctctttctcgtaaaaccaaatgcttgacgacaaccagaacaaacagattgatcagctcctgagacccacttatggatgcatatacttgatgtaaagttggaaccacatgatatactcttcacatgcctctcccttagagcttcaactaatgttggcgtttttcgatcatccttgtccccatgtcctagtcttccatttgaactttttccccaagtaaagac

SEQ ID NO: 9486 - DNA, 561 bp, Arabidopsis thaliana
gctaatgataggtatcgaatttgacctggtataagtgctcttgacggtcacccaacgaagtaggactcacaatttgatgtatatatcatcgacggcagtttttatttatttattggcatttctaaaatgctgtgatcaacgaagaatcattacgagagtaaaactaaatcaacgaagtcatccatgtactagaaatgtaagattctcttgttcttccaatcacgcttaatacatgccaaattattacataataacgcacacttccaaaatggagaaaatgaatacaatatcatataatctataaactcacaacatacttattcattagcaaccataggatcactcattatcttcatcacttggccttgacatctttgccatcgctctgcttcttcttaacctggcgggttaagctcctcccacgcctcaatccaaaccaccattgcatcagccaacttctcacagtaaggatccactttagtgagcttttctcgtgtcatatttgaaatttccatataacatttagctgcagtgtcagattctttcgagagacgaaggttt

SEQ ID NO: 9487 - DNA, 575 bp, Arabidopsis thaliana
  unsure (1)..(575): unsure at all n locations
ttcacttaccggacacagctcatgacttatctcgtccaaggtttttttaggtttttggtgtatgacctgcatattattacaacattaaattactgcattttgataaaccctgacagagactgactcttgaggtttacaagcaaatcatgaaaatgtaccagaaacccgatggcctgtctgatatgcttcagctcatcccaagaagaacccgcatattcatctgttgcattgtaacaccagtgctccagttcagctaatcctgcttttacgtattccccattgctaaatgaacagcactcccgtcttaacagaagactgtaaggatgatatgagaacgcattattaattgatacaacaaggcaacttttgagaatgagactggtaatcaacagacctattacacagttgaacattgatgaatgagaagatctgcgtaaacaccttccggaccaagaatggaggaacctaagactaagagtcaatgacatgatttgcagtcttggaatctctcaagcaccgttttttantacatgactagattaggactcacgtggttcgtttcagattgttgagga

SEQ ID NO: 9488 - DNA, 1139 bp, Arabidopsis thaliana
tctacaaggagcaacatattgattgggttcccagacgcaaaagtgaaatggtgcacttataaacatatcgattggggagacattacttttgagtttcgttcaaaatttagaggatatgctgaatacgtctcttttaattctgagcaacagatacccattatatcggcgatgagtctgcaacaagcaccttgggtcatctcagagtgcaacagattcaattccctccgcatcatgaggttcagccacaaagaaaacggtgaatctttctcctttgacgtctttccagattttcccgacctgaaagagctaaaactagtgaacttaaacatcaggaaaatcccatctgggatttgtcacctggatttactagagaagctggacctcagcggaaatgattttgagaacttaccagaagctatgagtagcctttcccggttaaaaactctctggcttcaaaactgctttaagctccaggagttgccaaagctaactcaggtgcagacacttacacttaccaactgtaggaaccttagatcattggcgaaactatctaacacaagtcaagatgagggaagatactgtttgcttgagctttgccttgaaaattgcaagagtgttgaatcattgtcagatcagcttagtcatttcaccaagttgacatgtttagatctcagcaaccatgattttgagacattgccatcaagcatcagagatcttacctcattggtaacactttgcctcaataactgcaagaaactcaaatcggtggaaaaacttcccttgtctctccaatttctcgatgcacacggctgtgattctctcgaagctggttctgcagaacattttgaggacataccaaacaaggaggtgaatacttggctcttgatccgtctctactatgattgatgtagttaccctttatcatctcccttcttttataggcacatacacgaaatgactacttccaagaaactgagatgtcgagttatgtactgaaaactcaagccacaagaaatcgccaaaccatccgccattccaagatcacacatgcggttatgtatgtaggcaccctatctgcatacgctagtgcgggtacgagctcgaatcgtaacatggcatagctgttctgtgtgaaatgt

SEQ ID NO: 9489 - DNA, 779 bp, Arabidopsis thaliana
tattgatgttagtttggcttatcatttgtcttgcatctgtgcgcagagaactataatcatatgcaagtttctgctagttttgtttgagaaattcactagcttatagtcaaattatctcgttggggttcatagcgaagtattctcaaattctacgcatgtacgaaaccaaatcgtaagcggtctgtttaaggtaaaatggttttagcaatttctgttgttgcaaactcgggacaactatctcgatgatgttaaccttgtgtattatgatgaaaaaaaatcctatttatgcttttttccgacaatttacatttgcatcttctctgactttcaatagcatatactgaccagtcttatgactgtttatctcatgagtttgaattctctgtgtttactatcataattttagtttaagtactcagttttctcggcagcctacttccatgctaaattgatactttgatttatgactttgctgtgatcagggaaatgacgtgggaacccaatacagatctggaatatacttctacacacccgagcaggagaaactagcccgtgagtcacttgaacgtcaccagcaacaaatggagagaaagatcatgactgaaatcttgccagctaagaaattctacagagctgaagagcatcatcaacagtatctgtcaaaaggtgggcggtttggcaaggcaatccactgccaaaggtgcaacgaccaatcgctgttacggctaataactgcttcctctgtcctctcgaaacagaggcttacacaaaggcttgtg

SEQ ID NO: 9490 - DNA, 530 bp, Arabidopsis thaliana
tacgttttatgttattaaaacaatacaatctaatcaattaattttccatacatgcgggcctaatataacattggtgacaaggtgatgttagcagataaaaaggttgtagtagtaatgaagtaatgactatgcaagtcacaggcttattgatatatcttatatcaataaatagtgatggtatcgttttgatactgtttgattgctgcagtgatacaaattactatgcgatttacttcttcctttttaagaacagcagaagagaaaaaacatgatgtgttgtattcacaagtctttccaacattcattttcttcaagatgttgagaaacaagtgccaacatcctatagacttcatccttaagttcgttgttcttgtcagcattcacaaagacacgaatttggtctctaacttcaatccaactacatcccgtaaaacgctttaaaccagtctccttcattttcctccgtatcagcgacacattctgccagttttcatagcagaataagcatttgaaagcattacgtatgatga

SEQ ID NO: 9491 - DNA, 828 bp, Arabidopsis thaliana columbia
tgatatttacaagtcagcaaaaacatatatatattatcatatgggtggtatcaaaatcagatgttcagtcctaaaacaataaaaccagctcacaaatctactaatcatatttttagtttaattctcaccacgaagaattaagctaaagacaacaacaatggagaacaatctcatacacgagcgaccaaaaacccaagaagcaatcagattaaggttatgtccaattataaaagtcaaaacaacaattaaagactatgtaactaagaaattaaatctaaataatatcgttatctagatagagcaagcgaaaccaccagttggagtaagccaccaccaactccattgacacaacaattcacaacccaaaagacctctaacgagtgacacgattcggtgcatcgactcagctgttatttgaccaaaatacccctgttaattaacacacatcccgaagatggatctgagtctgcagctgcagattcacggcgcgttaatcaacaaaggcccgtcgtgtacttcttattgggcttcttcttcttcactttctcttcctcgcgatttcatttcttcttctacgtttcttcttcatcgaagactcagaagaagaagctgctctcgttctcgtggaatccgattaagacggagtggtttctcggcgatgccttgttcttcttctgatactcttacggcttctcgcgtcggttgtggcggaggaggtggtggtggagccgttggcggtggagctgagaatgcttctgtcgctaatttcaagctgaacgaatctacctttattgcttctctcatgcctaagaaagaaatccgtgcgga

SEQ ID NO: 9492 - DNA, 879 bp, Arabidopsis thaliana
aaacttcaaaacggtgcaaatatgtggtaagtccacactctctactcaagaagaggtctgaggatgttgaagcctaacaatttcatgagctttcacaacttctgatgtgaattttctcagtgccccgaaaatgggaactaaaccagcttttaagctgctcgaagacgcgttgttcacaagcttaatggtttctttacccttacctctctcctcgactagcctcttcctcattgaatctaaatccactttcaaatcatccaaagctgatatcccgctctctgaccgacctttcgaaaccacacttctctctgactctgcatctcgctgctcagattgcgcttttaccctttgctcttcttcttgcttctcccatagctcgtgtaggcttgaagcaaaaccttgcattgcattggtcacattctctccagatattctacacattgcttcttgccaatctttgcaaatgataaagatgggcggtgcaccgatctggctaggagagaaaggagcgattccgtcatcggttgcctcgggttcatagtgaaggcatttcgtgagccatccgcttaggaactggacgtatgatttctgggtgttgacccagttgttgaagctgatgcaccattctctaagctctatctcaagatcaagaattgctgtagagccagagtcattttgtaaggttgtgttcgcctttagagatcgaaccttgctctccctgatcgcctgaaactgtttctggtggcacctcagcattgacctccacattcttatcaaccttcaaaacacaaaatatcagttttttcagcttaatctgtaaaaagatgtcaaaatatagagagatgatttacccgtgaattaactgtatcaactgtggct

SEQ ID NO: 9493 - DNA, 760 bp, Arabidopsis thaliana
gcttgtcttccacttttgaagacgaagaagctaacccatctgacgctaagtggagccttggtgaaaatggaagcatcacttgtgcaccagaaaagctaggtggttgtggtgaacggatgctagagcttaggcggatcctaccactcacgtggatgtcagatttagagcacaaagcagagactttcttatcatcatacaatataagccctagaatgttgaactgtaggtgttcttctttggagacagagctgacaaggaaatcagcttcgaggacaacatcaagtgacaactaccttttctgtcctgaatctctcggtgtcttgaaggaagaagagcttcttcattttcaagagcattgggcaaaaggcgaaccagtaatcgttaggaacgctcttgacaacacacctggtttaagctgggagccgatggttatgtggcgggctttatgcgaaaatgtgaattcaacatcaagctctgagatgtcccaagtcaaagcaattgattgcttagctaattgtgaggtggagatcaatactcgtcagttctttgaaggttatagcaaaggaagaacatatgaaaatttctggcctgagatgttgaagcttaaggactggcctccttctgataagtttgaagatcttctacctcgtcactgtgatgagttcatatccgcgttacctttccaggaatatagtgatcctagaactggaattcttaacattgcaacaaagcttcctgaaggatttatcaaccagattta

SEQ ID NO: 9494 - DNA, 1061 bp, Arabidopsis thaliana
tacttttcgtgatgctactctcaaagctcctctttgggaacatgtttccaggtctctcttcctctcttctcttccattttcatcaatggtgtttcttgatagagatccatttgcatgtgttttttttttgttaactttttttttttagtgttaggtatatataaatagtaatatattcgagatcaaagcatcttcaccatccccaagaaaaattaaaagaactgtttgtttattacagaagttggttcatgagtttctgggacgttttcgattttgaaaatcccaagactctctttacttccaaaaaaaaaaaaaaaaaatccgatcgaacagtaaccataaaaattttccagctaataacgacaaccaataataaaataaaactagagaatctgaattattttcatgtttttggaaacaggaagctattggagttaggttacaaacgaagttcaaagaaatgcaaagagaaattcgaaaacgttcagaaatattacaaacgtactaaagaaactcgcggtggtcgtcatgatggtaaagcttacaagttcttctctcagcttgaagctctcaacactactcctccttcatcttccctcgacgttactcctctctccgtcgctaatcccattctcatgccttcttcttcttcttctccatttcccgtattctctcaaccgcaaccgcaaacgcaaacgcaaccgcctcaaacgcataatgtctcttttactcctactccaccacctcttccacttccttcaatgggtccgatatttaccggtgttactttctcgtctcatagctcatcgacggcttcaggaatggggtctgatgatgatgacgacgatatggacgttgatcaggctaacattgcgggttctagtagccgaaaacgcaaacgtggaaaccgcggtggaggcggtaaaatgatggaattgtttgaaggtttggtgagacaagtaatgcaaaagcaagcggctatgcaaaggagtttcttggaagctcttgagaagagagagcaagaacgtcttgatcgtgaagaagcttggaaacgtcaagaa

SEQ ID NO: 9495 - DNA, 747 bp, Arabidopsis thaliana
ctaaagcaccattccggtagaaatcacccgcgtacgtctgcaactggcccgtaatgaaaaccatgctgcacgccacggcgtggataagctgctggaagttacgccacgccatccggaagtattacgtctggcggaacaggcgtatatccgcacaggtgcatggagttcgctgctggatattatcccatcaatggcgaaagccatgttggtgatgaagaacatcgtgcaatgctggaacaacaggcatggattggcctgatggatcaggcgcgtgccgataacggtagcgaaggtttgcgtaactggtggaaaaaccaaagccggaaaacgcgtcatcaggtagcgttgcaggtggcaatggcggaacatcttattgaatgtgacgatcatgatactgcccagcaaattatcatcgatggcctgaaacgccagtacgacgatcgcctactgctgccgattcctcgactgaaaacaaacaatccggaacagctggaaaaagtgctgcgccacacaatcaaaaacgtcggcgatcgccgctgttgtggagcacactgggccagtcactgatgaagcacggagaatggcaggaagcatcgctcgccttccgcgcagcctgaaaacaacgtccggacgcctacgattacgcatggcttgccgacgcgctggacagactgcacaagccggaagaagctgcagctatgcgtcgcgacggtttgatgttaacgttgcagaataaccgccacagta

SEQ ID NO: 9496 - DNA, 783 bp, Arabidopsis thaliana
  unsure (1)..(783): unsure at all n locations
tcgactctatcccagtgtgctctaaaagatcaattcaaatactccatgcgaaattaatttattaatgctagtgaaagtgctgcaacacggtgcacccatgggaaacaatcataacacaaataattggtatacatattttgtaataaacatggtaacaattagaatggttatgatgtctaaacagtgaattgagataagttttaactcgtgatcagaactatcagtatgctcttttgtttaaaatggtcgtattcatgtgttcttatacgtataaagtcacaaaaagacgaccattttttaaaagtgcgttcacctatttgtacaacttgcggtaacgattttgtgttttaataaacggtaaccttaaaacgcagaccacattttccgcggcacaaacgcgcttaacgccatctctataaattaaaacccacccaatgcccaatattttctcatatgttcattgcaatggcagatttcaaaattcttttgcttatactcatccttatatctctctttgaacttgatctacttcattttcaccatgacttcttctctccttttccggtcaagatcggtttactcctgatatccatcttcttctatgcctactcaaccacccggtctaaaccggtttacctagtggatttctcatgtcaccaacccacggattcttgcaaaatctcatccgaaacgttcttcaacatggccaaagggctcaactctacacggatgaaacaatccaattcatgacgaggatattaaacggtccnggttaggagacga

SEQ ID NO: 9497 - DNA, 498 bp, Arabidopsis thaliana
tagggaaatgcatcaaacaggttacttctcttagagtaaatgtcacagttttaatcacttttacaagcctcagtagcagataagatcaggtatacaaagacctaaaactgatagtagtagacacaccagaagcacctgattggaaaaggtcgagtaaacggtaaagagagattgatatgattacctagttggcttttgtgatggagaccagaaaaagcagatgagtacgaaagatatctatatgcactgcccttagtctgttatggaattataaatcatcaaaggactgaaagtattgttggtttctttattcttaccttaagcttgttaatggttgtcaacaaggacctgaagatccactgaacacagcaagtttccagtatagcccaagagagcattttaagagtcattttctcaaagtgtttagccaacgagagtgattcgcttataacaaatcatagcacaccaagaagcatcctgaatgttatgccattagtg

SEQ ID NO: 9498 - DNA, 910 bp, Arabidopsis thaliana
taaaacatcccgtacacttgattttgtaagctattatgaaattttgagaaggtgattgccttcaagaagtcttcttaagtgtggtatttcagaaaacaaaactagttgtattttactattttaagtctcgtagtgtaacatttgtatcggttttaaactcgagtattctttttacgaaaacaattagaagaataaagtactcgaacctacacaaaagtgttttggtttcctagaaaatcataaccagtttcttagaattgtgctcatgtaacgttttaaaagtcttcttgcaaccgctttctaattttcgtcagagactttttcaacgactttctaaaattcgagaggagtactactgatatattattgaatactccttaccacatcataaaactgatgtatatgtttaacattgaagtacgtacgtcattatttggtttagacacatatctaatcgtgtcacacacataatacatcttacttttcccgttacatgctcttaatccacactctttagtcttaatccacatttatcattctgattgaatcttgctttcgtgtggaggcaacaaagcaacgaacttaacgagaatatcgacggagttttctgcggcgaggctgctgaatatgctggcctcgttggagacgtcggagccgccgccagcgagatcggagagggcacggatgacgatgaaagggaggttttgctggtgggaaatgagagccacggcggcgctctccatttcaacggcggtggcgttaaacttggagttgaggaaagtccggtaagctgcgttgtcgatgaaaacacttgcactcataccacgtttaacgatggtgaccttcggtggtcgaggaaggcatgtggtgttacacactgccggtacttcgtgtctgttttggttggatg

SEQ ID NO: 9499 - DNA, 576 bp, Arabidopsis thaliana
gtgctctaaagagcccaacaatcgccttcagcaattcactgcgccctgcccccagcagaccagcaatgccgagcacttcgccacgacgtagcgtaaaactgatatcctccagcttgggcttatggcgtaacgcacggacttccagcacggcctgatccacaatttcctgaggggctaccggcgcaatatcaacgtgatcgcgcccgagcatcagcgacacaatatgatgcgtggaggtgttttcgagcatcacatcgcccgccacctgaccatcgcgcataacggtggcacaggaggcaatgcggcgaatttcttccatccggtggctgacataaatcaccgccacgcccagtgccgacatctttttcaccgcgctgatcaccagttcaacttccgcactcgcaagcgaactggtaggttcatcaagaatgaccacgcgcggctcgcccttcatcacccgcgcaatttccaccagctgcttttgcgccgggcttagcgttgaaacaagttgttcaggactaacgtcaacgcccagcgcctgtaagcaacgttgggcatcctgcgccatttgcaggt

SEQ ID NO: 9500 - DNA, 927 bp, Arabidopsis thaliana
  unsure (1)..(927): unsure at all n locations
accactcatcaagaagtttttgttactttgtggatggctcagacggtttagctgatctagtttacgataaacttgaacgtcattgcaagagatgcaataaattggatcacgacgaaaaggattgcccggattctcaaggtctgggagatagaaaagaacgtctcccctctcccccctcttctccttctaaggatcgtcaggatcaaccttctcggcatcttcaaaggaactacgatgatagaaaccagaagcgaccttatcaaggaagatatcaaagacaacgaagccctaagaggcctagaagatcggatcatggacgctactcaaattaaagagaatactctagatttgaccctagaggtagatatgatctttccaagacctcgaatcctagagaaccagttcaggagacctctaggcatcaccagggcagtcgagcttcggcgagtccctctcactctctagacaacaaaagaacctctctcccacagagagcgattaaggaagtctgagatagctctcaaggcctgagtgggtgtaaagaaagatcttcgagagacttatcctccacttccaggattcagaatcctttggctactttgctacctcaaaaagcgttaaatatcgctatgggagagcttagagacgttatgatccaatacgtcaattgtgcagacccgacagagagtgctgcaaggaaagagcgttatagacaagctaaagatcatggacaatttgaagaaaccgctggtcaaataattagggccaatctcagtatcccacctctggctttacaagatctatcccctcagcaaactgcctatcaagagcgaattcctatatctcaaagattaggtcctgttaatgcacccgctttggcaccaaaaccanagccaaagaagagagttctctcaaaaggaaagtggg

SEQ ID NO: 9501 - DNA, 568 bp, Arabidopsis thaliana
caatctgataaaaacataagggaaaaaagagagagtgatgaatggatcttttgagaatataagaggaaagctaccaaagatagtatgtactgacatggcttgcgagcatgtagagtagcaagtaataagctgcaccagcccaagcagtttcagcaaaaacaccagctgttctctttaactctgagctcaaaggatacaaccgaatgaatcttggaatatattgaactaaaatgatagatcgcaatgcccgctttgttgctagcacacttgcacctttagagatgtaaagaaatctccaaactacaatctgaaaaatccaaagaataacataaactagtcataaaaatttagagaacaaagaaacaatggaagataagagaacactgggagaggcatttctgttattacctgtggaagtggaagcacagagagaaagtcaatgatgaaatactgctgcaaataacgttttgctatctgtgcagggtcaatcacaagttcgcctcgaccaaaaacccgagaagaaggggcgacaaaagctgttctaaaccgaagagccatgtgaaaaaga

SEQ ID NO: 9502 - DNA, 870 bp, Arabidopsis thaliana columbia
atgttagtccagaggtaaggaaatacacttgaaaatgttaaaaccaatagcgaaacacggtagaagaaacagagagtcgaataacatccaattgccaagagatctcttaaggactctaaacaagtttaatgtaataagtatatataacaaaagaaatgtccaaaggtacattatacatttgcctttagccagaaatttaagagaactgatggcagatgatgctaccatacataagaccattgcagcaaaagaaaggaactcacctgtacagaagaacctccttatgcgcctcaactaatatctcacaagtttgcacctcgatgacttggttgtgtcttggcctggtaaattactttctttaccgattttccatttgtttcactgtacccaactccatccctatagtatccaccgacaaaattaccacctggctgtgtaccgatccattgggtggggggtgatggcaacgggttcaaatttgcattagcagcttctgtataacttgaatacaattgtttgcttctgccgttatcttctatcgataaaccagacattccagctccaagtccaccacggttgtgctgttctgctactatcttggagttgtagttccggttatagtcttgtgacccatttgatggataaggatatcttggaccattgttaaacgttccctgtgtgctattgttatactttccatagtaatagctcgagtcatcgtcataagctttccggtaaggagacggacccggtgctcttggtctattgactccaccataagaataattacccggtacatttcggtagtaccagtttgggtcaattaacccgaagccgcacgagtagaggattcatgctaagggtgttttg

SEQ ID NO: 9503 - DNA, 1527 bp, Arabidopsis thaliana
atgcctcctggtccaaagagccgtcttggtcctatcaacccccaattaactgaagcatcgaacgtcactctatacttgggcaagtcaaggggctattagggtggctccttcgatgtcgcatatgtcttgaatgctctccaacatccaccaggccactcccagattcaccacaccagctaccacagtgcccaccagctgagccgtgtacatgcagcgcggtgggattttcatgtaatggccaagcttaaggtctgccaaaaatgagagagcatggactgtgctgattctcccgtaaatcttgaaaatcaggtttgcaatgggttttccaggcaggatataaccgataatgaactgccctattatatcatatcctggttgctgcattttaaaaaacaacacacaaaaagatatgagcatgtgttattggaagaggcattgtcttatatataaactagtatgtaacctgatttgtagttgcttgaatgacaccgatagggagtgtgacaatgaaggccaatgcaaaagcaaagagcattccccaccatggaagctgcactgactccttccacacaaaagacattaggagagacatggctacacttcctgccagcaatatataaaaccaccactcaggcacttttttgtagctttgcatcaattttccatggatgtccagcttcgtggtgttcactgcagaccaagtctgcttccatatgtccctgcacaaacacaccaagtgatgattctcttctcacagtgcccttgctactcaacaaaactgaatgacaaaactaactaacctgccgttgaacaatgccacatgagttagtgttgcagtgaatctcgcaaacccggatccgatagagagtgcgaaaagagggctgaggtaaagtttcccgtagttgttataagcaccaatatccagatcaaactgcggtgtcaagatcttggttgtgtcatacttctggccactagtagtgaatagctggttggagaaaatggggaactttctggcatcgaaagtgttgaacttccagtaacaaacagggacgatgatgtatataaacatgatgaaaccaacaccaacgttgaggatagaggaccatggagccaccaatggactaccatggtaagcagagatgccagcccagtcaagagtgaaggctccaaccccaaggccatggtaccctgaaccaacctgctgagccgtgatgctgtttggccaagcccaacaaacccatgagaagaaagtcaagattgggaatagatagcctggaagtgcatagtaaataaagctagcaccaagagctactagaaagaacttcatcctcgtcaagcctttagacttgttttccttctcgtgcaacgctctgaaacaaaacacaaaaacaaaacaattcaacttcaaaggaatcaacttttctcgcattgcagctaatttacgaatcaagattggattaagaacctgaagagagaaacttgagcgagatttgaaggccacacatgtcaacaggatcaacaaggtac

SEQ ID NO: 9504 - DNA, 1676 bp, Arabidopsis thaliana
taataagtttcttttgtcttttttggaattgcagtctgtgtagtatattagtctggaaagctacagactcggagtctgatccattcaaatacttgacatctctcgagggacatcatagtggtgaagtcacttgttttgttgttggaggtgaagtgctatactctggttctgtcgataaaacaataaaggtaagatatggctgctactaaatacaaaatgatttcatctttaatcttattttgaatgcattctaataacttctgtttgctgtggttctaggtgtgggatctcaacaccttgcaatgtagaatgaccctgaagcaacatatcggcactgtcacttcactcttatgttgggacaagtgtctgatatcgtcttccttggatgggaccataaaagtttgggcttattctgaaaacggaatcttgaaagttgttcaaactcgcagacaagaacagagtagtgttcatgctctttctggtatgcatgatgcagaagccaaaccgataatattctgctcttaccaaaacggaaccgttggcattttcgacctaccatcttttcaagaaagaggaaggatgttctctacgcacacgatcgccacactcacaattggtcctcaaggattgttattcagtggagacgagagtggtaacttgcgtgtatggaccttagctgctggcaacaaagtttagtcttttcgactaaagaattctgatttaattttgtggtttatatgttgagttaactgttaagagagttttattttgtaataggtgtatcagtcaataaacaatctttgtatcaaccaaatgtaatttttctcgttaattcgatttcagagtttttactttaagataaacaaactctttcacacatcatttaatgaaagtggagaagcttaaaaaacaaacaaagaaactgatccatttttggcgggtcttcttctactcttattcatatgtgttaacgaactatagcgtaaaattcagagcaagcgatctccgatttgaacgtggctatcaccggagcccaccactacgggcgatacgctctaagtgaggattaaagtgctctggtggtgacgttgaagaaactcgcccatggtttttgttatctctgcagccaagtgtcgttctttcttcgccacttctcatcaagctacagtgaatttaaaaatggcgtctttctttgatctcgtatacataagctggattggtttcttaaacaaattcctctccttttgggtcttctgggtttgccttgtaagtgtttgtgtttttgcctctgagaaaaaatcatgccgactggtaggttcgagactatgcgtgaatgggtttatgacgctatctctgctcaacgcaatgagctcctctctcttttctccaggtttcttcttaaccctctcgctctctctccctgagccttgcttataaatgcatgtgtgttgtgattggtctcaagtcatgggtaatggttttggttgttatatttattagatatgtagcccagggaaaggggatattgcagtcccaccagctgattgatgagttccttaagactgtgaaagttgatggaacattagaagatcttaacaaaagtccattcatgaaagttctgcagtctgcagaggtgaacatataggatccgagtatcattttatggctacgttgtg

SEQ ID NO: 9505 - DNA, 1310 bp, Arabidopsis thaliana
gttcatagaatcttcatgctgttgctcgtatttcattcaggaactatctacagctcctcactctttccaaatcgcgcaccgcccggaagaattttgctgttgaactacattggcgggtctacaaacaccggaattctgtccaaggtaaaaaacagcaaacacttgtaacacatctttattcaaccaagtaaacctaagaactgatagttttcttctctctctctcttttgttttgattccgcagtctgaaggtgagttagtggaagcagttgacagagatttgaggaaaatgctaattaagcctaattcgaccgatccacttaaattaggagttagggtatggcctcaagccattcctcagtttctagttggtcactttgatatccttgacacggctaaatcatctctaacgtcttcgggctacgaagggctatttttgggtggcaattacgtcgctggtgtagccttaggccggtgtgtagaaggcgcatatgaaaccgcgattgaggtcaacaacttcatgtcacggtacgcttacaagtaaatgtaaaacattaaatctcccagcttgcgtgagttttattaaatattttgagatatcaaacttcaatttcattttgatacatagatttgagttatagttatatttaggagaagggtctttggttctcgcagtctaaattaggtcctgtggtgactttaaacaactgagcgtatctttggaaatacccgacccggtcagtgacccgtccatctcctggaatcccacattctaaaccgccgtttatgatgttggtgactaaaccataaccgacagtccggtttgctgctctatctgctttcgtcggtctgtatcggttgaccataacgttatggcaggacggtttaggagtctgttcggtcatccaaaaccaaagagctgtcttgaaagctaaaacggagttgttggctacaagttctgggttctgtaaaccgtcgaaacccaatgctcgacccgcctgtccgtaattgtaattcctatatatcccaaaaaagaaagtaacgttaaccaaaaggtaagactgatatatggatatgaaacttgtagcaaagatgatacaaccattcaaaagaagtttcgttggtaattcgcaaaatggtagaagtatataatgttttcatggggcattgaactattgtagacctagttgttcgagcaaataaatagatataaatggttattggttaataattaattttgtagacttaccaagatagttgaatgggacctcttcctttgtaagacttgccagaaacacaaggccaatcct

SEQ ID NO: 9506 - DNA, 1329 bp, Arabidopsis thaliana
ctccgtcttctttgctgcttctgcaaccctctttccccatctaccaagcactcctttcacagtctccatcgtatctgaatccaattcacagacacagagagagatccacaaaaaggtaaataaggctacaatacacaatctcaattctcaccgctacgatcacaacactcttacctttcaacgaagcatctgaagtctcagctggagaacgagcaatatacggattagatccagccgaagaagacgatgcagctttctgatccggttcctgagatccagacaccaattcggggctccaatgtacagatttcttcgatccagacgatgttcgactcggagctttcaccggtgtcgaatcgcttcccttcgtctcgatttcaacctcatcggacaaggctatctcagtgttcgcatcctcgactcccttcgttttcgaatcgacgacgcttagcgatggatccttcaccgggacctcagtcttcactacggtatctccttcggcggctccataaattggtctccaaagacggatcgtggcgagtacggcggcgcgtgagataaacggtttgtttgagtttgaattttgcaaggattggtattgggactaatggtatcgttccctttgctctttttttttctttggtaattttttttgtgttatatatatataccagtaaatacagatttgttccctacattacatatgatgataattatgatacctttgattttctttgttagacaattatgaggtatgactaagatcaatagggacatgaacataagagtctatggttagatgattgtaagatccctacggagcgaagagttatgaattggcattttgctcacacagaatatggttgtgctgctgtcctcaaggaagtttcgcttcctcactggaatcaagatgagttttatggcgggtttggagggcctcatgctatgattaagggtggttatagccgagttgttgagtcgcttgcagaaggactggacattcacttaaacaaaatagtttcagatgtatcttatgtctctgatgtatctgccatggataacagcaagcataaagtcagagttagtacatcaaatggctgtgagtatcttggagatgctgttctggtaactgttccacttggatgcttgaaagcagaaactattaagttttcacacccttgccggactggaaatatgcgtcaatcaaacaacttggttttggagttctaaataaagttgttttggagtcccaacggtattttgggatgatagtgttgattactttggggcactgctgaggaaacagatctaagaggtgagtggtttatg

SEQ ID NO: 9507 - DNA, 1152 bp, Arabidopsis thaliana
ctgcaatctgcaaggcagtctttaggaatgtgaatattaggaaataacttttactttgtgggttgatttgtttagttatgtagcaccagaatacgcttgcaccggaatgttaaacgagaagagtgatatctatagcttcggaatactaatcatggagataatcactggaagaaacccggttgattatagtcggcctcaaggagaggtatttgataagcatattcaatcctctctatgtttttgtaaatggtcttactatgtgtcgtggctgtagacaaatctagtggattggcttaaatcaatggtgggaaaccgaagatcagaagaagttgttgatccgaaaatacccgaaccaccatcctcaaaggctcttaaacgagtgttgcttgtagctttgcgttgtgtggatcctgatgcgaacaagagacctaaaatgggtcatatcatacatatgcttgaagccgaagatctactctatcgcgatgtatacaaaacaatttgcctttacgtttttacatttctttaagagtttgaaacatgtctaaagctgggataatatttttgcaggaacgccgaacaacaagggaccatggaagccgcgagagacaagagacagctgtggttgctgccggtagtgaaagtggtgagagcggttcacggcatcatcagcaaaagcaaagatgaaaaaagagagtcacttgggttaagtgatttccacacgaccattatatttcatttttttttccggtatattattgtctcacttacataatattttcattctttggctcttcgagtcttggccttacgaaattaacattcttcttctttgtaaccttttgtcaacgatcacattcacatgtcacttattagatattgtaatatgtaatgtttggaccgacgtcgaagcataagcaggtgattgggcgatggggcaaacttatcgctttgggggaggtggggcacaatgattcttttttagctcacgtgatcgtgtttccaaacaattttttatcataaatcatctcgattatggatggacctagttgttggggatcatcttgaaaatttccaagttgcaagaatttaataaaccagtcgagtattaaaattataatcaaacatgggtaacttgcttgtctcgttaacaca

SEQ ID NO: 9508 - DNA, 790 bp, Arabidopsis thaliana
tctttaaagaaacagctatcaaataattcatactagaactaaaatacagttagaagaagaaaaagtaagtcgtaaaataaactgtactcctgccaaagaagaggccaagagaacatggggaaacaactaatttgaaatagccaaacaccaggatatgcaaaactgatgcaccttgcttcctaataagataattctgcactgaatgaggtaatacctgcaatttgcttttagcgatcgaaagagttgttccgcctactagcaaagacctcacttctgtactaagattctcctctttctttttaacatcctgctcagtaactttgcaagcaactgatgtcttgtccaccaacaattttcttgcttcaagcctctgacgcatttcttcaagttcattagtgcgtctcaatgattcagtactaacctgcccgaaattttgcagcccgctaatccgcgggctaatcaattaaagctcatcgagtagataaagtaagagataagcaagaataataagactaaacaacacattcctaaccaacacaataagaaagcataaattttctttgaatagagtttcttcttctagctatcttcatccacccttaagacaatgccactaataaaaatctatgctttacactcagaaatgaatcaaattcagacatgcccaaaagaaaacacatgagtaagagaaaaacctgaataagagactcaagtttcggttgcaggatttgttcctctctgtggctaatttcatagcagaagaaagactccataacctcgtaagctcatg

SEQ ID NO: 9509 - DNA, 488 bp, Arabidopsis thaliana
ttactttggggcaactgctgaggaaacagatctaagaggtgagtgctttatgttttggaatgtcaaaaaaactgttggtgctcctgtcctgatagctttggtggttgggaaggctgcttttgaatatacaaacaagagtaagtctgagcacgtgaaccatgcaatgatggttcttcggaagctttttggtggggatctggttcctgatcctgtcgcctcggtagttactgactggggcactgatccttacagttatggtgcctactcgtatgttgctattggtgcttctggtgaagattatgatgtattgggaaggcctgttcagaattgtttgttttttgctggtgaggcaacatgcaaagagcatcctgacactgttggtggtgcaatgatgactggagtccgggaagctgtgcgtataattgatatacctagaagtggaaatgattacacagccgaaatagagacactagaaaaagcgcagagga

SEQ ID NO: 9510 - DNA, 587 bp, Arabidopsis thaliana
gatggtcaagatgtcgccggtacaatttctctttctctctcccatcattcataactttttgtttttattctaagaaatatgttttagatatgtatacgtaccctcttttggtcaaattatttagagaagaatcgaaactttctttccgaaaaaagtaaataaataatcgaattacatggaaaatattattcttaaatttaggtttcttaatgatcaagggtaggacaaacatgcattagttagtgtaatgattttttcttttctttttttactctaggtttggtaatatgtttaacatgtacacattaattttttgctaatccgctaaataccggctgatatttatattccgtaatttagtgatagataaagaaactaacaatttttttttttctttacacttatcagtgtaattaacaaaatttggatgtattcaattgaacctttttctttggtaactcttgatttatgtgtgaaaatattgttaaaaataacagtaaaactactagactggggagaagaggggcacaggtcagacgcagagatagcttcgcttagagctgctttcactcaagaagttgctgtgt

SEQ ID NO: 9511 - DNA, 524 bp, Arabidopsis thaliana
attcacattcaacttagacaaagaatcagaggcttcttcagcagccaattcctcgtcagaatcaacctccacccattcatcttcactatcatcatcaatggaacccctgtgttgaacacggcgaggaagttgcctgataatcgctatatcctcctctccgttgattgatgtcccttgtgaaacccgcaaaacatggctacgcgactgaagatgctgctcatgagccttggaactcctgtaacctttagcacagattgcacaagtataaagcataggtgcttcatttgatttattcttctcctgagcaagagcagattgtctagcctcaaacaaggcttctgtaactccaggaactccagccacctaacataaaaaattacagaaatacaaagattcaaatgcctagaagtaaccaaatctatgattattgaaatccttgttccttagtagaataagcttcaaaacaaattttcatataaactctacgattccataaccttaactaaacaatttcgatagcaaaa

SEQ ID NO: 9512 - DNA, 843 bp, Arabidopsis thaliana
tgagaagaatgatgcagcttaaaggatgaatataactatgcttttagaaagaaataatatgcctcactaacaattaatcaattaagacagccaaaagttgtaccaaaaaaaagtaacatatccatcattttagagattgtatgtataagcaaaaaacgtaagtattatctcattaacaacacaaacatgagattgtttctcgcctttcgctaacctgcaacactggacgagtcttctaccatgcgtccaccaccaagtgccccaccagagacatggagtcttgcatttacaaagacctaaaataatccaccaaatgttggtttttctgatggaactagctaaaagaagtaaaaaaagaagaagaatctcatactgcagcatgctggtatctggcagaaggggagacaccaggggctatggccattcccaacgtccatctctgtgcttcgcaagtccatatgcactggccagaggtatcatttcaaacgtagaaaaaaattaagctcctcaatcaaccattcaagattaaagcagtccattaagtgtcatatttcactttacgcagaattgacaacttctcatgatcatgtataaacacataattgataataagctcattccttgttgacaaaagaaattatagttccttttctcgtagaagcttcacgaggtcttgcacacaatttatgtttgttacttcttcagagtctgtgttgaaacacacacaaactcttgattaatttacctagcagagaagagttacatcgtccatggctctggaacatagaatgaagatcgttcattggaccagtaataaatttgtagctggggaaataaaatact

SEQ ID NO: 9513 - DNA, 783 bp, Arabidopsis thaliana
ggtagaatagtaccctgccacggtacagacccgggttcgattcccggctggtgcatctagtagcatgtgagcagtgatgaaaatatcttgagctgtggtgatgaatcttcggatatgatattaacctcgctataatctgagctcactcatttcttttacttttttttttgattgagcagcaaaacccaaaaactagtaacacaaatttgagattttgtcacttcacttcaactgaaactaaaaagatatctcaatacatatatcctgtaaagtgtcacataaatattccatacaaaactttgaattccaaactattgaagcactagagagatccacagacatacgttgtaaatttacttattatcaatgattctcaactcaaatacatgtgaacaaaaagctagcaatactctcaagcactgatgttttcgaaacttgcgcttttatctactctcttgaatatccctgcaattacctggtgtttgaatgccacaaaacacacaacttagaagaagaagaagaaacctccatctataatgagtttacgaagatagaaaaatacctttccaggtcccaattcgtagctgcttttaagtcctttggataagagagtctttactgttgtctcccattggactggagatgtcacctgtagtcaacatttgcatcttttttttatatagcgtcgccaaaagagaaataattcacatagttctctgagtattgatttattacctggcgtgcaagtatcttcttgatcgtgtctggatctgcatgaggctg

SEQ ID NO: 9514 - DNA, 686 bp, Arabidopsis thaliana
tcatctaaacatatgggctaatgggctttaaagagtacaaatggggtttattattgaactgcttcataaatccacaaaaccacacaaccccgttacgatcacaaacagtgaaacacaatacatggctaaaaaaactccgacaagttcgcaaatcagggattctaagcaagaaccttaaaaatcgacaaggtccaaacgatacgtattctacaacatcgacagacagaaaccaaacttagccgtcggtggtagccaacgacggagacattgagtttcgtgactcatcaaaatcctcaccgaccggagattgctcaactctaatctcctcaaccatcttaacaacttccgccatcgtcggcctcttctccggctgaggcacaacgcaagctaaaccgatatgaagcattgccaccatctcctcctctatgttcttatacctcaaaagctccggatcaaaaacctctgccgtccattcctccttcaccaccgatctaacccacttcggtaaatcaaccaccgcttcttcctcttcctccacagccaccgacgccgctgatctaggtctagacggagacgggaatatcgagggtgcttttcctgttaaaacctcgagaagcaacacaccaaaactgtacacgtcagctttctgagagagacgtttgatctcgactgttcggcgcacggta

SEQ ID NO: 9515 - DNA, 688 bp, Arabidopsis thaliana
gcattctgtattgaacagtcaataacaaagtcggacagcctgctagctgaaacctttcaaagagacttctactatataaaagagttccagcagccttgctaatcactgtcgcaggaagctgctgaggatcaccgacaagtacacatcgcgcagaccaagagcaaggggaggaagaactccaacctcactagcttgggcagcctcgtcaatgacaaccatatcgaagccatgggtaagacgagaaaacagtttacgaccactgcttgatacagtggtaaaaacaatttcagcctcatttgcaaaacttgcctcaagactcgctcgtgcttcctcaagattaaaattgttaccagcacgaaactttccctccacaataagaaggcgagatatttcaacaagtactttatctctggcttcaaccaccgcagcaaggtgctgtaacaatgcatctcttttctggtctcttgaaataaggacttcaggatcaactccaacagatccctgagaacgtgtagcaaaagctgcagcattaagttcccttttaagtccagctatattttgagaaatctgtgtttcttgtagtctgaggttacgcatgtgtcgtagaatctcgtcgcgggatatagctaatagctgatcacttcttcgctccacagaaactgcttgagcagctcgcgattgagaatca

SEQ ID NO: 9516 - DNA, 871 bp, Arabidopsis thaliana columbia
ctcaaaccaaatcactctcaggtttgataaatggccctcttcttcttctttctttacttttgcattgttcgtactctaaataacacatttttatcccctcttcttttatagcaatggaaacagagggtaatgttttttggtgcttcaaaacccgaaaagacgctatcttgccaacttttgatagatggcgtcctgcaatccgtgaacgcttcctacttcatgtttatcactcgtctcgggttagtattgcttctttcatgctttttaattttgctattccttcatgagctgacttgcttaaagtcaggcaaacatcgaactcaacgacatggttgagcattacgatgggttgctgcttagtagagaacaggacatcaacgcatggaagggcaagttttctacccttgaagccgaaatccactcccctctagttctaagcaaaagttagaggatcaagtcaaccatctctcttccaaactcatgaagtcaaactgcaaactgcaagataaatacagcagacacgagaaacttcaaaaggaactctcggttgcccaaggcaggctttccgaatctgaatcagccgcttatgctttgaacaaccaattcactgaacttgaggcaaagtataaagcaattgtcaagcttcgagatgccaagttggctaagtcagagtcaaaagccataaaggaggtgaaatgtcgcggaacggagttgattcagggggctatccttttcattcagaccgagaagacaagatcggagctggaatcggacatcaaggatcacgaaagcaacttgctcttactggaccaacccacgaggaggattctctgaggagcaggaaggtcgaactgaaagctgttttactgag

SEQ ID NO: 9517 - DNA, 602 bp, Arabidopsis thaliana
cagtttctgcctctcgcgtcagagatcaacgctgcccaatcctcagacttcatcagagcagatgcatttcccatcacctattcaagtaaaaagttgttgaaaaaacccatcaacatataatatcaaacaaaatgtgtgcgagcagagagatagagagaaaccatacccacagagctcttctcgcacgggtaagagcaacattcatccgccggatatctgaaacaaagccaaccccatgacccgaagcacgcacacatgacatgattataacatcacgttcttgaccctgaaacgcgtctactgtattaatataaatctctttcagttcatcttggcccaaagcattgccaaactcgtgcttaaggcatttcagctgcagtttgtacggggttattactccacagagactttacccgcacccaacgacttcagagttttctgaagatgcatgtacaccccaacacagaatcgagcttcatcaacattctcgtaagatacagatccacctctatgagactcccgcccatggctgatattgaagaaaaggtaaggcctaagaacaggatctttatagtaaatctcatcaggagcgctggatatac

SEQ ID NO: 9518 - DNA, 1417 bp, Arabidopsis thaliana
tcctcgcacttcatcagagcagatgcatttcccatcacctgttgaagaaaaacgagacatagaaactttaacaatgaaaccagacctatttaaccaaaacaatatgtatgtgcatcgagagacatcatacccataaagcccttttcgcacgggtgagagcaacattcatccgccggatatcagcaacgaagccaaccccgtgattagaagcacgcacacatgacatgattatgacatcacgttcttgaccctgaaacgcgtctacagtattgatataaatctcttgcagttcatcttggctcaaagcatttccaaactcaattttcaggcatttcaactgcagtttgtatggggtaattaccccaacagagactttacccccacccaaagacttcagagttctctgtagatgtaagtacaccccaacacagaagcgagcttcatcaatgttctcataagatactgatccacctcgatgggattcccgtccatggctgatatcaaagaaaaggtaaggcttaaggacagaatctttgtagtaaatctcatcaggagcagtggaaacactttcactgtccgtaaggcgtccttggtagaaatatcttgaagggaagtcgcgtatttgaggatgcatcctatattgaacagttaacaacaaagttggacaacctgctagctgaaacctttcaaagagacttctactgtataaaagggttccagcagctttgctaataactgtagcaggaagctgctgaggatcaccgacaagtacacatcgcgcagaccaagcgcaaggggaggaagaactccaacctcagaagcttgggcagcctcgtcgatgaccaccatatcgaagccatgagtaagacgagaaaacagtttacggccactgcttgatacggttgtaaaaacaatttcagcctcatttgcaaaacttgcctcaagacttgcgcgacttcttcaagattaaaagaagtaccagctcgaaactttccctcaacaataagaaggcgagacatttcaacaagatctttatctctggcttcaacaacagcagaaagacgctgtaacattgcatctcttgtctggtctctaaccataagaacatcagggtcaacgccaacagatccctgagaacggttagcaaacgctgcagcagtaagttcccttttaagtccagcaatatcttgagatagctgagcatctcgtactctaaggttgtgtatgtgtcctagaatttcctcacgggacttggctagtagcagatcacttcttcgctccacagaaactgcttgagcagctttcgtttgggtatcaacacctactcgagctacatcagggcgataaaccctcatttccccatcaataaaccgacaaactatctcgcttgtactttaaagcacactggagcaagagg

SEQ ID NO: 9519 - DNA, 930 bp, Arabidopsis thaliana
ccattaaagatagagtggtcgacctttcaaccaggacggttgggtgcgtaaagcaaaggctctttttgcttctctcttaactaccattacattacatacctcttctttctaggttgtccctttctcggaattgctcttcttcatcgtttctttaactatttacttctctatttgtcatcattccgttggatcggattctaaacagtttgacaaacctggatctgtaattctaactcagattcttctgttgtagcaggtggtaacaatcttgatactggcattaaccagtgttattcccatttacgcaaacgttcacggcgccgggaaaatatgcgacgaacttggccggcgatcattgagtacaagaccacacagtgtctccattacagattttggagctgttggagatggcaaaacgctcaacactcttgcgtttcaaaacgccgttttctatcttatgtctttcgccgacaaaggtggggcccagctctatgttccgccgggacattggctcaccgggagttttagcctcaccagccacctcactctctttctcgaaaacggcgccgttatagtcgcttctcaggtatattacaatgcttctttctcattctcacatttatcccaaacttttaaatttatccaaaaaccccaaatttttacttcaaaaggatccatcgcattgggaagtggttgatcctttaccttcatacggaaggggaattgatttgcctgggaagcgatacaagagtttgatcaacggtaacaagctacatgatgttgttgtaacaggtaacaaactatgctttatacatttttatttcattttcacttgttacaatatccttcaaattataatatggttactccatccttttccttggttaggtgataatggaactatagatggtcaaggcttggtttggtggg

SEQ ID NO: 9520 - DNA, 1776 bp, Arabidopsis thaliana
cccaaagacatatgaaaaaatgaacatattcaaattgatattcataatgtgaagtaaacgcagaaaattcaatgtacgataacctaaccacaaaaatttctgaaattactttttgtatattattgtgaaaaaaaatatcgatcgtgaatacaacgaacacattatatttccaaatccaagactttaaagaaccaacattatatacaaacaaatccctcaatacttatttagaatctatcataacactaggctttttgacgacttaacgttttgactttgaaatatcttggctttagactagaatatcaagaaatcctccttgatgttatattgcatcttctccaaattcggctgaaccgcaaactgaatcatcggtggtggtccgcaagccatggcaagggctgagccatctaatccatcagggatatgttctcgcataatcgcctcggaaataaacccggtactgtatgccaaccttccttagctgattccactacgtccaaacctttaaccggtccgggtattcgtctgcccaaccatccagttcctcccttaggagaatatcttcctcggtccggttagcataaatgacgtacatttcagtctcatcctctggatccttgagaatggcttggataatttggtaaaccggagttattccgttccacctgccaacattgccaatttatcagcaaactttggtttaccgtgaaccgtgaaactacccttgccgagatactcaacgtgacccaatggtcctttaatctccaaagttgaccctataggcaaagagtctaggtactgagacatgagcccgccgttagggagatcttgggtggacaccgccaaagtaaatcttgaccacgagctcgaagtagccaaccacatcaacggtgctgcttggtgtgtaagctctgaggcagagcttgtcattgatggtggcgcaaaggaaaatgtgcttaccaaccggtaagcctagaaccatatcctcaaccggtaaagcaaaccggaatttacgaacatcatgagaaatggaagtcttttcgacgagttgaaccgggactttagcccggggattaaccaaagcgaggttcctaaccggagtcgcctctccaatgggagccaacagcgagaacacggcggatgaaccgtgaaccgagttgttaggcgaggaagagtcagaggaataaccagtggtgatgagctcaccgatacggtaatcctcaagcatcttcttggctttatccgagtgaatggcttcaaactcctccgtacaatccgtaccagcattgatcaagattgaatccgaaccacccgggtgatccataaggaatcgtgtacaatcatagatatgtccatggacaatgatccagcaagagtcagccgaattatgcttcttgacctcggacatcgagtacatcttcgcagttgtgttcataaacggcgtcgagacagacttctttagactaggaggcgcgtcacgcgatttttcgaggtgacgttccttcgccatccatccaccagattcattaccaggaagcgttggatgctcgaacacaatcccaatctctcccttgtgtggcttgcacacgttagtcttcactctaaaccagcagttattcatcatccccatgagattccatatcattttctcgggctgcgtgttgagagtctcgtcccatgcacgaacagcaatctctttggcactaagcaagtccaaaacctcaacctcaagtgaccaaaaacaccaacaccagaacttcccatacttgtttg

SEQ ID NO: 9521 - DNA, 982 bp, Arabidopsis thaliana
tcttctgccactcgaatcccgagggattgaaaaagaatggggcgaacaaccaggaacccaccaggaaccatgttgagcccatgacaagcgcataacccaccgagtcctctgctgctttcccataaatcctgtaacatatcagcagcaccatcagctccattcctttcacaaagtggcttctcgaatacattctgtagttctctgcaaacttctcgtgcttcaccacaaacccacgccctgttgctctgtactttgatcccccatgtaggatggtccgaccatagtaatgaacctttgttccaagtgagaaggtgaagaagacaggcgctaactgaagctgcattatgattagatcagacaacgccgttctgaatcctctctctagcccaatctccatcaccattggtagtgtcatcagcagacccaattgcactacggactgtgacgccatcgctgccttaagagaactatctcctttcgctgctgcaaactttactatcgcctcttccactccactcaatgacaagtaaagtcttccatacaagaatgcataaactgtgaggacaacaatctgtagtacacataattagtccgttatgttttgttttaagcaaattatgtgttaacgataaacttagtttgacattggaagatcagaagttaccatcgagctgatgtagaagcctacagttgtgaaataacaagacatcatgcggaaaaagtcaaaacgatgcccaagtcggtagagatccctactcaatgtttgctctccgtttccacaagcaaccttggcttcaaagagtgatatctggttcaaaccaacatctcttcctttccctacttggatgtactcatgatgggtgacattaccacgcctcagagttgagttgaaacctatatacaaacatgaatcaatcataagtaaatgatgaaggaaccaacatcaaattttccttgaagaagtatggttcacaatctaacc

SEQ ID NO: 9522 - DNA, 569 bp, Arabidopsis thaliana
aatccaaatgagactaggtttagtgaactaaccctaacaacggcagaaatatcacggaggggcgttcttggataccaagaaggtaagacagaatttgaagcacgagcccttccacgccttgtaacacccaagctcatgttctctcgtccctgtggcgatctaaattgaatttgacctcttctaccaccaccagtccgccgaataccgaaattacccctcacaagcccacctcttcccgtcatagatccttgaccaattgacccaagtcctcctgtagcttccgatggcactctctgaaccggagacccaaacaaattgtgctgtgttgctggttcgtcaagtaaaataccatgcgagcgtctattgagaaatgcggctgggtaatcaacttgcctctctattcgatctcgtgcttctggcatttgtgattgagcgctgaagaaatcaaacaactatgccattagaacacacccaaaatcgaaatcgcaacattaaaacccaagaactcagtcttgttctccattgttaatcagattttctcgaaacgtcataaacaacaagaaaaagag

SEQ ID NO: 9523 - DNA, 497 bp, Arabidopsis thaliana
tggtgtcgcagtgtgctctaaagccgttatagcaatgcaccaggccgtcggaccagcatcaaatgcggcgcgggtttgttgccaggtcgcagcgagacatcacgccggacatcaccgagaacaggaaggtaatccccatctgtactgcgacaggaataggtacggcgacacctactgcgacatcgggtttcacgccagtagtaatggcaaacgccgtgccgacgatagtaccgataatcacgttaggcggctgtgcgcccgccagcggggccagccccatccacaccagttccagcgtaccgccggttaaaattccggtatgcagatcgccaagtaccagcccgaccaacgggccgaggaccaccgggcggtgcatatgggttaggccgttaaacatatccaggccagcgataaaggcgataatgcccaacgcaaatgcctgcaacaggctgatttccatgatgaatcctcaaagtaatttaaagagggtcacagca

SEQ ID NO: 9524 - DNA, 680 bp, Arabidopsis thaliana columbia
tgttgtgtcaaaactcaagagaggcttttgatcagaatctttgttatttctgatgttatatgagatttgttgagaatctagtttgaaattactcatcttaactgtttcactttctttttgtcacaacagaaagtattggcagcgcatggagctgtgaaggtgagtgcttatgtaactcatggtgtcttcccaaagagctcgtgggagcgtttcacccacaagaagaacggtaattatctgtgaaaatgaaagaaaaagtaactaactttgttcattgttctataaatatcttgcttgttgcatctttaaactgaagtcaatgttattgtttcttcgaattaggattagaagaagcgtttgcttacttctggatcacggattcttgtccacagacggttaaggccatcggaaacaaggctcctttcgaagtcttgagcctcgctggatccattgctgatgctctgcagatttgaagcagtagagataaagcctggttctttgctcgttttggacttttggtggttttatactcttaagagatgtgctttggatgatcatttatgaaataatcatatcacttttgctgaaataactagacagattgttgaaccttgtactctgttcttgttgattgatcttcttttgcaatgaattgaatcgttaagttcagaaagaagaaa

SEQ ID NO: 9525 - DNA, 547 bp, Arabidopsis thaliana columbia
taaagtcagaaacttttgatagcattacaaaaaaaagatgaagactttaatgacagagatacttacaggaagttcatcaacatctaatttgacgaaatcaacatcattgaacttatcagccatggcatgaatcgcaggctcaatcatcctacatggtccgcaccatgaggccgagaaatcaaccaccagctttattattcacagaaaccaaatcagttaaattccattgaaacacgaaatcgattgaatcgaatcgagagtctgagagacgttaccagtttgtttgattctttgatctcgttgaaatgaagttgccaccgagcggaagagctaaactttaggacgcgacttggctcagattcggtccctgcagctgttgcatcttctccacttccaaacacagttgataaagctcctcccattatcgtctctcgtctcgcttctctctctgattgcgtttaagaacgaccctgctttctttggtcaacgatcgtgtcgtttaatattcaaacatcgtgccgtttctaccactagagctggcaactat

SEQ ID NO: 9526 - DNA, 637 bp, Arabidopsis thaliana columbia
agatttctttactgcatcaacctgagtaagaaagtaattaaagatacaagtccaggatacaaagagcaatttgttagaaaaccccttacatcctgctgtacagctgcatttgtcacccttggcgatgatcttctagaagcttgacgcatggaattagaagaaaacaatgcctacaaaaggaccaagacaatacaaagcctaaggttaactacttctgatatcaaataaaagcaaagtccagcaatgatccatgagatcaggtaaaggtacagtatatgagatataaattcattgggcatcgatgtagttgcagtcattgggacatatgtttaaagccgatcacttcaaccgtgggaaaagttataagtcaaagagtcaaagacaactagaaacgcaaagcctttccaatattaaaaaacctcagaagtactacataatgtaataagcaaaagatgtacctcatccttagctccagagaatgatttggcaagtgcattcacttcaacgaccttttgtgcagcaaatgcaagccaagattttagttctttatcaagtttcatttcattcactaagtccacagcagtatggagtagagagcaagaagtagaaccacaacattttctgcgaagagaagaga

SEQ ID NO: 9527 - DNA, 881 bp, Arabidopsis thaliana
taaaggctctctgtatgcaaagtagttgtagactgtgttatcagccacggaactccaatccccacatagatgttcaccgagttactgcataatttatcaccaaaaagatcatgaaaagatcttcaatgtttgtaaagggttatgagatttttacctgcaggtgatgtttgcaatagctgaatctgcggttagttgtcgctctgcagcgattttacttgctactaagtctggccatgaagttccacttgcgagtgctgtgaatgctatcacatatgggtttattcctgcaagatgaaaagagtttctaatgttttagagctcaaatgtttaatcttataacttcagtttttgaaagcggtgagggtgtgtaccagtgacacagcttataaggtcagtaaatcttgtgacaacaaaggctactccactgatgaagaggagagagcagatgaaagcgatccaaccgtgagcaatgttgcaggggggcacaaatgcaaaaagcagtttccaaggggcgaggagtaaatgccagaaagatttcgcgattcgaagataaatgctatccactttctttgattctgatgtttccaactgtttgattacgaataggaagagaaacaagttaagaaagatgtgttgataatgatcaaaagcccaaaataggatatagaagaatctagaaaacacttggtaagttgaagatttttaccgttattgcatccacgaattgatgtttccaaatgtcaaaaacagtagaattcttcgccttacccttcttagtcgcagaatcgggtggagtatctgcacagtatgataagtgatcctgcaaaagtgtttgttcagggaaagtttgatttatacaatatactacagagataatatgg

SEQ ID NO: 9528 - DNA, 782 bp, Arabidopsis thaliana
aggtcgattctatcccgcttacagatagctatttagattatagaaaaactataaactggacaaactcatttaatccattagtcgaagatgatgacttgttattttttttattttactttttactaatcataaattcagaattaaattcataaattaattaaatttaaattaaatttaaaaattcatattaaaaaacttaaattaattgttttatcatttttcgtggcggtgcaaacatgaaaactagtttggagatttaaagtgttagcaaaattattttggtggttcataatattaatgaaattctttctgggtttaaagcgctaccaataacactttgaaggtaaaaatatgattttcccgaaaaacaattgctaaattaacacaattaatatgtcaaaactatagcccaaatttcaaaattttccattttacttttctttcaaccacaagagagcaaacgaacaataatgaagatctattgcactgttttaagtcatcacaaagcttcttcctttaagtcatccatggcaacatcatctgcatcctcatcttcaaccatctcatctctgaaaagagttttgaaatacggcaaaaccttaggaagcacatgcaaatccgccatgtttatactcatcagatcaaaggcaatgcaggtattatgcatatgcgactcatcaatcactggaatcttcggatatctctggctaaaatgtgtgagaacaatccgatacacattcgccgcagatcccacatcgattgcttctttagtcgtgctgtga

SEQ ID NO: 9529 - DNA, 293 bp, Arabidopsis thaliana columbia
gagaaacaacagccatagttgaagttgttgagttattacgagctaaacgacgcataaaacaacttggcccgcagtccaccagcaggtgcttctttaggaaccacctccgacaacaaatacgactctgactaatacagccgccgctgaagcagcaggtccacccttcattagcacatgagcttacgacttagaaaaaatgttcgtaggagtagcaactcgtcgtctcccacatctttatgaggccaaaaaagcagcaccagcaaccatcatcatcgacgaaaaagatgctgctg

SEQ ID NO: 9530 - DNA, 482 bp, Arabidopsis thaliana columbia
agtgtgctctaaagcatgatgaggaagctttgttgcaagtttcgtgctgggacttgtccgtatataacgaattgtaactttgctcatacggtggaggagcttcgtcgtccaccgccgaattggcaggagattgtggcggctcatgaggaggagagatctggtggtatgggaactcctacagtttctgtggttgagattccacgggaggagtttcagatcccgtctttggtgtcatcgacggctgagagtgggagatcttttaaaggaagacattgtaagaagttttatactgaagaaggatgtccttatggagaaagttgtacgtttctgcatgatgaggcttcgaggaatagagagagtgttgctattagcttaggacctggtggttatggaagtggtggtggtggtggaagtggcggtggttctgttggtggtggtggtagtagtagcaatgtagtagtgcttggtggtggtggtggaag

SEQ ID NO: 9531 - DNA, 588 bp, Arabidopsis thaliana
gtgttatgtaccacaaactctgcatatatggtcacactgcacctgctcatcatcttttctctctctaacgaattcattaatttattatcttcttcttcttcttcgaccttccaaaactctctctctctctctgtcgtcaacaatggatagtccgacgagcatacgtagtaaaccactaccggagactctttctccatgcggtagtcaacgacggagaagcagctgcgactctaacccacctgagttcgagttctggcgtttaactaactcttcatttcctcaagctgattcagatctcctctccgccgacgagctttttcacgacggtgttcttctccctcttgacctcctctccgttaaatcagagcttcagtccgacccgaatatcgcagaatgcgacccggatccatctccttcgactggtagtttgattacagagcaaaaaagtgatcttgaacccggtttaggatccgagttgacccgagaaacaacggtttcgaagcggtggagagatattttcaggaagagcgaaaccaaaccgccggggaagaaagagaaggtgaaagagaataagaaggagaagaagaa

SEQ ID NO: 9532 - DNA, 793 bp, Arabidopsis thaliana columbia
taataaacttcttgttgtcatcgttttgttaaaaaaaaaattgtacctatgctacttgaacgaagaatttagtttctattgtatttgttctcgtggttctccatctacttagaaaactattacagtctagtttcaacaattacgtgagcatatataaaacaatcaaatcatgatgtcaactgtcaagcaaggtagtgccttctcatgttgtttgtaagacatccatatgaggagcagttggataaaaaatcgaacctgtggaatgagttggcgctttggttccctgactgatttcagaggagactgtagagaagggcttgtcttttgcctcgagaaacggggagacccaggtgagcctcgtggggatagtgggggagtgccgctgttcagaaaaacagatggcaatgcactcccgcaagcaacattgagactagtacaatttttggatacactgactggggtactagatttagtatcatcaattaaagacttgacctgcacaaacatcacacagatgaactgttaaaagaggaccacgtaaaaccttaaacgaaaaacaaccaccaaaagtttcttcaccaacatgagtcggcaatcggcatacaacactggaccatattctcaggagctttaagttaaatctggtactacacaaatacaaacacttctcaagtttagcagagccttgtaatatcccagtactattatcacctaagtcattataacccctaaatgtgctattcaagcactctttatctaacgctaagtaaaatctataagaagataacaaaac

SEQ ID NO: 9533 - DNA, 573 bp, Arabidopsis thaliana
ggcttagagctacagtatatggtccgcttattgtatatcctaaagcatctgttccttacccattcaagaaacccttcaacgagcatacaattctcctaggtaatctttattcttaataaagttagtctcattcactatttggtatcactgaacttgtttgtctcctaataaatctaggagagtattggcttaagaacgtggtagagcttgaacaacatgtactggaaagtggaggacctcctcctccagcagatgcattcacaattaatggtcaaccaggacctaactacaattgctcctctaaaggtataaatatcagatgaaaaatgatatgattaatttacaacgagaaaacagattcctgattcttgtgtattatgtctttgtttttcagatgtttatgagattcagatagtaccaaggaagatatacctgctaagactgataaatgctggtattaacatggagaccttcttcaccatagctaatcacaggttgaccatagtggaagtagatggcgaatacaccaagccgttatacacagagcgtgtgatgcttgtacctggacagaca

SEQ ID NO: 9534 - DNA, 534 bp, Arabidopsis thaliana columbia
gatcatcaagcaatgtacttctctaggttgcttcccaaaagtcaaaatcgtacacacttcgtcgagaatgcatggtcagatatatatccctgagatcaactggactctcatgctcttgtgcttagccgtcaccgttggattccgcgacaccaaacacataagcaatgcatcaggtacagtatctgtaaccatagccataaccactaaactaacaaatgtatgaaaatcaagaaactctccggttctgattttattcttctctgtaatctgtatgcaggtttggcggttattaccgttatgctagtaacgacttgcttgatgtctttggtaatagtcttatgctggcgcaaaagctccctctacgcactagccttcattttcttcttcggaacaattgaagttctgtatttctcagcttcactcatcaaattcctcgaaggggcttgggttccagtcgcactctccttcatcttcctcctcatcatgtacgtttggcactacggaacccttaagcgttacgaatttgacgttcaa

SEQ ID NO: 9535 - DNA, 609 bp, Arabidopsis thaliana columbia
gtatacatcgattgtgccggttccggatcttgtgataagaaccggagaggagatcggctgagtaacttcatgacgtggcaaacttcgaggtctcttcttcacagaacggaggctctttggccggagttagggctctggcatttggtttgggcaattcttaaattccaaagaatgcaagattacttgacgaagaagaaaaagctcgattagatagtttctaaagttaaaccctgcaggaaagaacttttaactctttattacgtttaatttacgtgtttctatgactggaaacgagaaagctcacaagcaaatcttttttattatgtattggatccgtataacaaacacgaatatacaaaacatcgatactcgttggattgaacgatgctaaaacactataattagaggctcaatttaaacacaatttggtaaacatatgtaaacaatctttaaagatttagtacttcgccactccaggaccaggttttgtttggacctgcagacataacagagaaggagtttggtacttgtcttctccaccatcattggtgtacttgagtactacaatcagagacattttttcagcacaagcttggtgaacagtgatgt

SEQ ID NO: 9536 - DNA, 470 bp, Arabidopsis thaliana
gtgtgctaaacagtggtctgttgttgtgtcactgatttttctaacaggtacaaacaataagactcaccaggctatgcaaacaaacgagattgtaacagtcaacaagaaattccctggcccggcgatatctgctcaagaagatgacagaattgtcattaaagtcatcaacatgactccctataataccacaattcattggtatgccgatgtacatatacacatatacataaaatataaatgctttttaaacgaattctagactaacaaaacttgtttctattatgcgcaggcatggtattaagcaaaaacgatcatgttggtatgatggtccatcttatatcacacaatgtccaattcagagtggacaaagtttcacatacaacttcaaagtggcacaacaaaagggcacatttttatggcatgcacacttttcttggcttagagctacagtatatggtccgcttattgta

SEQ ID NO: 9537 - DNA, 572 bp, Arabidopsis thaliana columbia
gaggttctaatagctccgaactacgaaaggccttatcaccaatcataatggaaacaatgtcagattgagaggaagtgttgtgttcattttccaatttcaggtctgttgattcttcttgatagtcttcagatttgccccagagaacaatgtagagaccaaggatgatagccaaagcgcctaacaagctgcagaaacgagcaaaacagatttaaaaatgtgaattgagctacagaacgaagagaggatagtaagaaaatggcatacctcccgaggtaagtctgttcttttagatacagagcgccgaagaaagtgacgatgactgcagaaagagggttgaagagggcagagaaaacaggtcctttctgtgatacgatccaagcttgtagaaagaaagatatcgccaactggaatccagagtatatgcagcaagagagcttcaagaaggaatcaagcttccagggcggtaaatgagtgttgcctaaggcgagacgaacgaggaaagaagctatggtagcgatgaaacatgtgcaggcagaagtgtacaagtggtcaggacagtgagaggcaatagg

SEQ ID NO: 9538 - DNA, 558 bp, Arabidopsis thaliana columbia
cactaaagaaacttcatatctaggcataaaggtatgattcagatacatttttctccgtctatgagtgattatatatatatccatcaaaccaaaccacctcgcagttcctattgctaagacaactagataagcctctacaacacgtagatctcagtttcttaaaccagaaccaaaagatgaaacatgacaaatttgaggaaactttaacaataaagatgtaccttggaagccaattccagtgatctcgcatagtgagcattctccggttgctgcgtaaatatacatctcaaattacaaaacaccacgcacaaaaaacaaataacaatcactttgattaggtgaggattacaaaagacagagactaattacctcctccaaagcttgttgaaaaagcagagtagctttctcaaagtgatctctagcctcagtttgatcaggagtcaaaaccccatatgaagtatgagcatcccaatgcccaaagagcatcgtgcttctttggatagattacaaggcctctccagaggagtatatataagacaagaaactgaactttttttg

SEQ ID NO: 9539 - DNA, 490 bp, Arabidopsis thaliana columbia
cttgatgagctagagcttgtccttgaagcgagtgaccatggcctctagctgctactgtaagatttgaggtggagcccagatgtactatatgcttcatcatcgatgaaatatcaaaaactgaccttggatgtagaattgccaaaggtggtaactggtatctgttgccaaagtccttggccacattgtggacatcgtcgaagcttatataaccctccaaatctagtgaaactaatgaggaacgaatatctgaaggatttgaagaaggtaattcttttggggtactaacagaatgattggaacaaagattggttctacctggtatacagcttagaactaagatcatgaagattccgaggaaagtcttgttgttttgtctatggaaccgtaagactgaggtcaatcccatttctactttgttgagagaaattgcaaagaataagaggcggaatggtataagagaagtagaggtaaacttgaggtttagagtact

SEQ ID NO: 9540 - DNA, 578 bp, Arabidopsis thaliana columbia
gaccgagcttgttttcggatggacaataaaaccaaagattacctagttgtaatgttggagtacgactttcgtgtgtttaccaagaaaggagataacaagtggcacgactttcccttggagtgttttgaagactttgtctacactcatcaaaagctctaccttcgttatgcccattctcttgtcactatttggacccttgattggtattctgtctcttgattggtattcgttcaatcatcacgattttgacccttttcttcagcaaaaagatcaaaaactctattggaaattgatacgccgctccaggacacgcattgcagtcacagtatccggagagtttttggtggtatcaagtatagtacaagacagcaaaacattatattttcacatctagaagaaaaaccaagtgggtggcaaattggtgaaagtcgattctttgggcgatgaagcattgatctatgacatgggtatcactgttgtcccagtggcgtccagggataaaaggactctatctactcagtggcgccaaatatttgtgtatgattcacacccaaaagatggacctatgctcaatgtgt

SEQ ID NO: 9541 - DNA, 547 bp, Arabidopsis thaliana columbia
agcatcaaaacgacagagatgatcgtcgtatcacagcttgtgtcatcctcagcacttttgtcgctgtttgtagtgccttcagctacggatgtgccgtcagtttctaaaacttcttactttagtcttaatctcttaatttcttcttaattattcgaacaataatcattataatttcttggatttgataggctggttatacttcaggcgctgagactgctatcatgaaggagttagacctttctatggcacaagtatgtaatttgtttttttttcatttcttagcttttatcactataaatactcaattaatccctaattaattatgcttaaaatgcgtaattacacctgtttatgaactaaaacatcagctgcttgtaaatcttcttgtatggattactaaactatcagacctaaccaggtcggttatgaagaaaatcaaatggataatcatacgcaattacgtgtaaagacgtcattgataaattatagcttcgctactgaaagtgaattattattatttattactattattctataataaatatta

SEQ ID NO: 9542 - DNA, 1195 bp, Arabidopsis thaliana
tgttatctttgtgattagtgttctaattgatgcgaggaatttctatttttggttattggctcactttaccaaattttggctacttggtggagtttgattaaggtccgtttagtttgaggataggtgaggaatgtttgtgatgatggtaatctgaaggacactctattgatcactagatttagtatggatggatactttggtggagagaaaacaaagatatgtctattgttagataatcattagagtctctgccaaatggcagagaagactcagtggagtctctgtgtgtgcctaagtattctctgccttcagatgtttattcagtgattgtagttttcatattaatcgagctctcatggctgtttttgagctgtttcagctgctccgcatgttaaggaaacttgaaagtgtatatagatgccgagataaagcgagctatccctgtgtagtttctcggggtcgtagcgaacacaataaattctttacaatgttgatgtgcagtgaaccagtgaaaaggctaagtccaatgcgtttagttgtgtgttagttttccatgagagaagtgctagtagcttcctttattaataagctttgatcttacaggaggagctgatcagttcaaatagtggtaattcttgaacagaatgaaaatctggttaggttataattatgcttgtttggtgtatttgttttttttttcagtctctacatgcacggccaaatattttgtctattgcttttccgcatcagtaagttggagataaattttgtttttggtcttatattgtttcttaattaatttctcggattctgcagccgcttcttgcaatgtagaggaccgtttgctaaaagaaggcatccattagttgactctatggttgtttccgagataagaaaatgtattgatgagggcattgaatttcaaggcgagttgttgaactttaggaaagatggatctccgttgatgaatagattgcggttgactcctatttatggagacgatgatactattacccatataattggaatccagttctttatcgagacagacattgaccttggacctgttcttggatcttcaacaaaagaaaagtcaattgatgggatatactcagctttagctgctggggagcggaatgttcccgaggaatgtgtgggttatccagctgagtgacgaggttgtgctatgaagata

SEQ ID NO: 9543 - DNA, 526 bp, Arabidopsis thaliana columbia
cagaggagaaaacaaaggctcttaccgctttagcaaactcagatgtcaggtataggaagtactccattgaagatattgagcttgcaacagagtttttcgctgagaaatataagattggagaaggtggttatggacctgtctacaaatgttatcttgatcatacaccagtggctgttaaagttcttcgtcccgatgcagctcaaggaagatcgcaatttcaacaagaggtaatgacatcttgtaataaagtcacatcagtttctccttattcatttgtttctttctcattttagagttttgaaaacacaggtcgaggtattgagctgcattaggcatccgaacatggttctacttcttggggcttgtccggaatgcggatgtttagtctacgagttcatggctaatgggagcttagaagatcgtcttttcagactaggaaacagtccacctctctcgtggcagatgagatttagaatcgctgcagagataggcactggattgttgttcttgcccaagctaaacctga

SEQ ID NO: 9544 - DNA, 579 bp, Arabidopsis thaliana columbia
tcataaccaatcccctcgatccatcccattgtggttgatcaccattccagcagctcgcgattcagggtttccgacaaactgtttctccagaacttgagcaagctctttcaccagagctttgtacagttcaacgttcatactgagagagccaaagtagacatatttaaattcctcatcgaggggaataacgtatgatgggtaggagaaatttgagaatcacttaccttgggtaatccgtggccgtagtagtaaacatgggccatatccagaagaaaccttcaactggatccagtggcatttcaataggggcagcagcaatagatcctggtattgtaatcgagccttggccaacatcaaggtctacaaatgtaggtctccatccctgtttagctgcccaactaaggagcatctttgtcaatgtgctcttcccggaatccgtaggcctactacaataacccgaggtccctgcattaagtgaattcttaagaaccaagtgttttaactatgctgatattgcaatacaataatattgaatatcgaagaaaagtacctgagaagattctgggtcattagatgtgg

SEQ ID NO: 9545 - DNA, 535 bp, Arabidopsis thaliana columbia
ccaatctcaggaagtttcttaggtccaaaaagcaacgcagcgacgccagcaatcacagcaagctcaggcacaccgagaccaaacaaagcattacaagtcagtggctttctcgttggttcttgtcggattctgcgtccaatcgctaccagagaacgagtgtttggtcgggtcgtgactgtgaagcaattggagaagaaggaagagcgagatgatgagaggagaggtagagatactggtggtggagaagatagagtcgcaacagatgtcgccattgctgctacttttttttttttttctggttctaaatgttatctgtgttttctttttcttggttttacccaatataatccattaaataaaataatatttgttttaggcttttagctgggtttcaaatgaaaaattgatattctgtcacatttatctaatatagttttcatttaattttatataaaaactcataataaattattaaaaaatcttatgcctttaaaaaatttacaagatccaaccgcaaatctgcggataggactgg

SEQ ID NO: 9546 - DNA, 441 bp, Arabidopsis thaliana columbia
gtactgagtcaatattgattgaacaaaacaatataaacagagaaaaaaaaaacattcactgctacagatgtcaactgttgttacatagtttattagaaaatcagaacatttaaaaacttaaaagaaaaaggtagtagtgtatatatatacctaagcccttttttcttgagccacaagaaaagctgtgaaagccagaaacagaagagacttgtttcaattatcctcagtgaagaccttgaagatgaaatcacggaaacgtctcgagtacagcctcggatctacggctgagattgaagtaggatcgtactggctgcactagtaagcgtgttctagtttcttgctgatatcatagtcttgaagaatgtctatgattccaaagatcatgacaacctcatagtactctcctgtcggttcgccaactagctggaactcacagtcgct

SEQ ID NO: 9547 - DNA, 443 bp, Arabidopsis thaliana columbia
caagcatccaaatatcatgctaataaagcggattcagtgtacactaaagacagagacaaatgcgttatactttatcccgatattcttttgtcccctcaagaaaatctgacatcaagatccattacggtattggtctgtctctctgctttagcatctgtcatttatcttaattagtaccgcagaaacatgagtctgatcaacaagaataactttccactcttggatggctctatttatcaagaagagtattgctcaaataatcacaagaaattttccttcatctctcctgcagatgcttccccaaaaatcccgtacaccactagacaaacaatcgaaggagccattacagctgcctgtcgaatgccatagctttactccatctgagatcgaatgcatgaaagcgttaaagatttacgaaacaggagaggaaatgaagtcaatga

SEQ ID NO: 9548 - DNA, 578 bp, Arabidopsis thaliana columbia
aatgtcttcttggttattcaatttaggttcttgaactctatcgatcgtaatttgtttacctagatctggtctgaaatcgttgaatcttcttaattcaagcttagttcggttcttgatttgtgtgtcattgtgtgttctgttctgtttcgaatctttttgaatcggatcttgatttttgtgtgtgttctgttttctttttgatatacacagatgaagaagatgttcttcttacaggcatcaacagttacagagcatcactaaacctaacaaccttaatacacaaccacaacgcagaatgtctagcagacgaaatcgcagaccaattcaagaaccaaccttgcacaaacaccactggctcagcctctgtccctggaaccacacctggattcccaaacttgcctaacctcctctcaaaatgccgcctcaaccctaccgtaactagagacggtgcgattttgccagcttgtgttccaaccttgatcctagccttgtcttgaccaattcacaatgtccagtactcaaggcctgaatgatctaagtcactggtattggattggtctgatgatattggatgttgt

SEQ ID NO: 9549 - DNA, 830 bp, Arabidopsis thaliana
agaacttgtgacgtctctgcggagtgacaatccgttgccaaattcccgacatcgccggacaatcccgaagcacatgaatgatggtctctatcccacctttgcaaaccgtacaaatatctgaatcacagatgtgtcttcgtgctctctccgaattagtcataattatctgcttgctcaccatccacaagaaagtcctaacccgttccggagcgaccactttccacacccggcgatagaaactctccatgtcctgccgcgggcataagtcttgcgtcacaaacgaatacgcagaagagactgtgaacttgccatctggactctcaccccatgaaagtctatcacgtgcccctgtgaagttatcaactacgattgctgccagttccatccttttttcctctgaaacccacagagctattcttgtcagatcccagcctgcctcttcccgccacagatcccgtacaaagagttgctcaaaacccaacggtaatgcacccacaacgtcatcaatcaaagatttactcgacaaccacttatctgtccagaatcttatagatctcccatcaccaacttaattgtactcatagaatgaacggaaattgaatttagcaccgccttagtaagagtaagtcttcctgcgaacttaaactcccacctttccaacctgccaacttcgacgatactctctcaagcacctctttgaacgtgtctttatttatccgtttctgaaggaccggcatcccaagatatttacctagatcccgtgtcgattttatccactctctgtagatacaaaccttctagatccgagacacgtcctagaaaagaagatt

SEQ ID NO: 9550 - DNA, 785 bp, Arabidopsis thaliana columbia
ttcattaaacttgtattgtttaacacagtagttgtttcaacacgcgagaccatacaatggtctattagaaaactcgataatagtattgtcggttattttgttatctgttagcaatggtgacatcttcatagtgaaccactaagcgtgctcaccattaatcaagttatctgactgattttgttatcgggattcactattgcaggttcgtgttgctactattatttgccctgaccttgatctggaccctgaggaagatttgtcgtggtctgaagacgatgaagatgagagagtcgataatattttaatattggctgagcagggtcttattttcaagaatgatatgtttggtggtggatgtttcccatcacagatgcaattggcttccaaaaaacaaaaaaggtgtgttaagtcaaatggtggtcggaacaggaaaggcaaaccatcaaagaacactagtagggtcaggaccaaacatcaaagacccgttccagaggaaggtagtagttcagggaccgtttctatggattctatttcccgtttgttggacaaaaagcttgaagcgcaggggaaattaatcattgttgcgcttatggattggttcattataaacattgtcattgaaggtggactttccaaagatccggctagtgggggtgttctaatcctgaagaggtgggtcggaatgagccgaatgatgattttgggtttgatgctctcagcggccatcttctaatgttggtctaatggcagtcaaagaatcgaatgtcagctagtgtgatgagatt

SEQ ID NO: 9551 - DNA, 504 bp, Arabidopsis thaliana columbia
gcttgtttgattcattattcaaagtgaagaaactgaaaattgattggttttattccgtgttctagttctatggtacaaagtacaaacattaaacatattacaggcgtgtgaaaaaacaaatgaaaaaatttctctatggactatagaagtctgacttactatcctgcaggataactagtaagtagtaaaatcctttggtggcagaaatgtacaaaaggaacataaaacaggaacaactggttccttttttcttcagggcataaacgaatcgaaaaatgaggtctcctcgtttggttcttcctttgctctagagaatccaccaccaacaaagttttgttgcgtttgaaggttgctgttgttgttattgttgttcatggcgtaaccaaaaggcccggtattagtgttgttgttgtgcagcatctgaagtgtatatggtgcttgagaagaagtagtgtagttggagtgaccagcaatagcagctggtctaatcgggactgaagacga

SEQ ID NO: 9552 - DNA, 567 bp, Arabidopsis thaliana columbia
catataagttgtttcatatttgattgttcttctgatgcagtgcaaaggaggaggaagaaggagaagtaagagatgcttctttgatcagcgtggaggaagttgtgaagaaaatgaaacccatggaaagagctgttttaggattcaaatgcaaacagatcatcgatgcagggaggatgaagtgggttaagaaacatggattaaattcaaagctagtgaagtatatcccggcaagcatctcgccggaaaatactttactgatcgccggaaaacccaatccttctattgcttgatgttgtattcttgttggttatttaatacttggttggtgaaaactagaagagatattacacatggtgtatacgacagcgattttgcttgttaagtcacaacttcattagctcattctctgtctttggtcaaatccactgtttagtattcaaaaccaattttctcacattctattacacatacatgaatctcttctgcgtcgatttccacgtaattaacgataaaagatcctatgaagactgcaacgtcattacacacgcacgtacggatcagttttgt

SEQ ID NO: 9553 - DNA, 1194 bp, Arabidopsis thaliana
caactctaagactgcaagtcttacgtaaataacgcaacatctttataggtaatttacgtaaataatttatgaaagagtaatttatagtataatatccgaagactgttaaggctcacgttgaaatggccaaagatgttgattcatttcttgcttatccatgaggccgttacaccttcgagatgatgatgaagtagataaaggagagggaaaatgaacaattagctacaacgtgttttgtcgttcaggggttgttgtacgttttgcaattggttgtcttacaagcagctccgtcaattcaagaaggctcagtaatagacgagactatcgagtctgattctgaagaagcggaagacgatgttgaagagggtcctcgagagtccgtcgctttcaagcttgggaatgctaaggacttggatgcaaattgttcggtaaaacatttatcaattatctttgatatctgttaatacaataatagtggataagtatcttgttaattgctaacatttttgccatgtagttatccgtggctgatttgattatcttcgttttctgggacatgttcgtgttgctacgattatttgtcctgatatgttgatggatccgttggaagatttgtcatagtctgatgatgaggaagatgagggtgtcgataatattcttatgctggctggtcagggtctaattttcaagaatgatatgtttggtggtggatgcttcccttcttagatgcaattgccatcttaaaaacaaaagcggggtggtaagtctaatattagtcggaataggaaatctggcaaacctataaagaacaccggtgggatcaggagcaaacctcaaagacccatacctgaggaaggcagtacttcagagtttttgtcgatcgacgctatttcccgtttgttggacgagaagcttgatgctcagaaaaattaatcatcgctggtttgattgattggtttcgcaaaaacactgttattgaaagtgatcgagcgaaagctcctgctagtgggattagtcggcccgagaagtctaccccggttggtaatgttcgagtatccaattctgaagatattggttgtaatgatggcaatgatgagtttggttttgattctctccgccgtccttgtcccaatgttcggtttaacagtcgtgatgcgaatgctaatgtcgattatcttgttgggggattatcga

SEQ ID NO: 9554 - DNA, 540 bp, Arabidopsis thaliana columbia
ccaatcctccatagcttgatcgctgaaaatcaatctgcctttgttccataaagagcaattgccgacaatgtactcattacgcatgaggctctccattatctccattcctcagattcaaaggtctgatgctatatggtagtgatgaccgatatgagtacggcctatgacagaatagaatggggttttattagctcagttcttgaaagactcagtttccatcagttcttgtgaccatagttagctactcttaccttttaaatgatactgctcaaggctccattgtcccacaacgaggcatacggcagggagatcctctatctccatatctcttcatcctctgtagtgaagtcttgtctggcctctgttacaaagcgcagttagaaaataaactcacatgaatcaaggtgggaaacaaaagtccccgaatcagtcaccttgtatttgtagatgacaccatgtttttctgcacatcagatgaccaaaactgtgtagctttattggagatattgaagaaatatgaattggcattagggcagatga

SEQ ID NO: 9555 - DNA, 590 bp, Arabidopsis thaliana columbia
taaataaaaacatcacatagtggcaaaaaagaataatcacatttgaatagcagacagcaagctgagagatgtgtaagcatacaaaggtgggactccaatgccttacaataccaatagtcggaccaaagacacagtcagacaacagcaagtgatcatcaatttggtttgctaagacagctaaagaagtagattcgtttgacgacatatgacaaatttgtttcactacaagtaaaaagaaaactacttactcacatattgtactttcttatctcaaggaaaaacacaccaatagacaaagtaatccttgaagcacattataaggagagacagctaagatgaaaaatgtcaccttgagctcgaaagatttaagatcacgagctagttgctctgcattgattccctcccgtgcgagtagtctgcaaaatgtccaacgacaaaaaagaaagacaagagaattaacgcttgcttttgggtagtagctacgtcccatttgaaagctgagcaatgaattcaagacatttcaaattcttgttcgcatacaaaacacaataacaagtgaatgagacggtaaaaatgagattacctagtgg

SEQ ID NO: 9556 - DNA, 520 bp, Arabidopsis thaliana columbia
taaccactgctaaaggagctgcagagactcttaagctcaacatggctctggttttattacctgtctgtagaaacacattgacttggctaagatctacacgcgctcgagcttgtgttccttttgatgacaacatcaatttccataaggtaccttccttcagtctttcgatttttcagttttagtcagagcacaacatttgagataaactctttctctctctcttgtcctgtttgtgtgccagattattgcttgtgccatagcgattgggatacttgttcatgctggtactcatttggcgtgtgatttcccccggattataaactcgagtccagaacaatttgtcttgatcgcttctgccttcaatggtactaagcctacattcaaagacctgatgacaggtgcagaaggaatcaccgggatctcgatggtgatcttgacaaccattgcattcacattagcatcaactcatttcaggagaacctgtgtgaggcttccggcagcacttgatcggttgactggc

SEQ ID NO: 9557 - DNA, 1539 bp, Arabidopsis thaliana
aaatatttatacacaactctctcaagcaaaaaaaaaaaacaaagaggagaaagaaaaaagcttcttctatcgattcaacattgaattataattttacagacacaatattcttcatctaccacccacaggattttcatttcatcccaatcgtattcccccacgcgaccccaaactctaaatacgtacattgacatacacttacgtgtacaagaatacgtatagaagtagcttctattggttaacctctcgagctgcaaatcaaaggtgatctgaagtgacgcccgttcttctcctgtcactgctgctgggcttaggtcgttgggaaggacacgggcttgggatagcctccagagtggaacgaggagacagacggttcacggttcctgttagatcgggagaccggtactgttgttgctgctgctgttgcccactttcactggagaaaaagaagtacgtgtgaagaagctgtagaaagccaagcacacacaaacaaacaacagagaggcaaaaacaagaacacaggtttcacaaacatgtttcaggttcaaaaaacaaaactttatgccaatgtaactgtgatgaatgattgattacctctctgaggatgtcatgtttctagctcgcgggacctggtctagtttgaaatttggcttctcccttctactgcttggttcctgtcaatttgcaggggggggatattttgttatttatgacatagggcggtccatgagagagattcacgcttgtattgaggttttgcttaccgttatgttcatcccattaaataattgagagacatcactgttgcttggtgaggttggttgcaaagagttctttaggaaccggtgttctagcaacatagatgcggttggtcgctcagctgggtttctctggaagcataatctcaggaagtctttaccctcaggtgacattgattcaggtatcggtgggctatctctcatgaccttgaacatagctgcagcctatgataaggcaaagttgatacaaagaactttttagatatcagaagaaacaaaaaactctctttagtagaaggaatatgtgtatgcttaccccttcaaactcactccaaggaggcttcccagtgaacatctcaatgattgtacatcctaaactccatatatcaacagcaaaagccagatctgggttgctatctttttgcatcacagcttgcatgagctgtgtgagtaaacgtatatattagtatatatatatatatataccgtttatagagtctagtttatttcaaagatcattgtaccaatgaccacctctggtgtcatcgagtacgggcttccctttaacgagagatcagctctttgtccagtaagctgaagaatataaatagcaactttattattataaaacggaaactaaacaaagagcatgatattcagattcgactcatcacactcccagacaataagcagcaataatactagacaggatatagaactcacgtgtttagccatgccgaaatcagcaagcttgacaaccccagaagcatcaacaaggaga

SEQ ID NO: 9558 - DNA, 707 bp, Arabidopsis thaliana
ttatcatgcagcaacaagctaactgtgtgaggtgttcctccttctggaatctcatcaggtgtttcctgaagcctcacaatctgcttatcagcaaacctgatacacaaaataaagaaggtaagttacagaaattataagaatcagacatatactatgtctagaacttacctgcatcggttgtgcactagtgtcatggagttcttggtcatgcactcttgtttcaagcaagtaggaggctcacttattttccctatcaatcaaacaacattatgagaaactatgcagatacataaaatctggataaatccaaatgaccaaattacctctatcaacgatgatggggtcagagaagtaaccacaaacaaggcatctaaacacagcttcccttatttcaggaatgatagagctactccgaattatcatacctttcaaagagatcatcttctcgatatctaaccaaccaaacaaaacacatccaaacataagctaagctattaccactagagagaactaagaaaccaagaagaacaaaaactgaatcatactaaccagatggattgagatttctcatggaagtagatgtcctgaggttaaaaatcctaacttgaacatgtttctcgaacaaacgattaatcgtggaaacaatatccatcagcacaatatcgaagatagcgagaacttccaaaggataacgaaccatcttgtta

SEQ ID NO: 9559 - DNA, 547 bp, Arabidopsis thaliana columbia
cagatagaaacagtcccgtcaccggcgacgatgaaatggttgctcgtcgccgtattgacctctcttacgatcttctccgccttaacacagtcccatctcctccatggatctccggtcaattctctctgcgctgatctcattcatcccgctaattactcctgcactgaacacagtgtacaaatctcatcttttattatcactctttcttataatcaagatttcattgaatcagtcgtagaaaaatctcaactttatttggttttgtagattcaaacaaaggatggttacatattagctcttcaacgtgtagcttctcttggtccaagacttcaatctggtccacctgttttgcttcagcacggtctctttatggtatatcttgtttaaaggctttaacttttcttggtgaaattggtttaaaattgttaaaaatcgtatcttttttggtgggtctgtttagattattaggctggagatgtgtggtcttgaattcccaaaagagcactaggttcattcttgctgacatgggtttatgttgggtggaatg

SEQ ID NO: 9560 - DNA, 536 bp, Arabidopsis thaliana columbia
catatatacaatcatgttcttgatctccaaagccgtcttcaacggtggaatgaacactttcgtctttgttttctatcgtcaagctttcgctaccatcttcttggatcctctggctttcttctatgagcggtacatatatgcacatatattaatattgtaaacgttaattcatatatatgttaattgtattctctccttatttctataggaaaagtgctccacctctttcatttgtgaccttcatcaagatcttcatgctctctttatttgggtatgtatgctatacttatactagtagactataatcagttaaatataatctatgttgaactaataataatcaataaagctttatctatatatatagggatttcagtgtgacattgagcttggacttaaacggtatcgcattatcatacacgtcggcaactttagcctgccgcacaacagcttcccttccggccatcacattcttcttggctctgatatttgggtatacttactaatatgacaagtttatatatctgtatgacaag

SEQ ID NO: 9561 - DNA, 655 bp, Arabidopsis thaliana columbia
agaggatctgttcaactttttccgttaatcaatgaaatcaagctaaaacattggttcatgcttttattaatcattcaaaataaaaacacaattgtcactagacttgattaattatttggtatatcagagataatgcttggttttgctggaatcttcacttgcaactaggaagaggtgcaccacataaacacttgttgtggaaaaaggaataagaatcaaatctttgaatatactctcctttggggatgcgtccacacagtctgttatagctaacattcagtaactgaaaataagctttgctccactcagccggaatactccctgtgatgccattgtgattcatgtccaagttattaagtgtcttagcgagcttaaccttggagagatcgaactggaacatgtttcttgatatatcaacgatccatgttgtttttttagctccaaacaagattgaagcatcgccttgaagcttgttccgagataaatcgatgcggtaaaagtcgggattgctagtgactttggtatagtccagagagctggttgtgtgataggaaaagactagggcctttcctgaaaacgtccaaatgactctggtatcggcgtatatggagtttaactttagtttagccatgagataatggaatgctaatagagc

SEQ ID NO: 9562 - DNA, 865 bp, Arabidopsis thaliana
ctaacgatagtttccaatttccaaacttacaataattgtatgttatatatattacacatctacataaatattaatacgtctccccacccctcctcggcacactagccctagtatagtagcatatgctacgtatccgtacaaaaagaaaagaaatacaaatgttatctatgatgcaatattgcaatataatgcactttcctaacttaattagtgattaaagctccacaattccacgaaattaacctccgatatttcttcataaaaatccataaccggaggatacacccaacaatcgaacggctcagaataagccagatcagcacgtgatgtcagactctcgtcataacttccttcttcaatgttaggcagctccacaattttctccaacctctcctcatcctctgacatccgccgccacgtaagaagattccgacgaaggtggggcctccggagcctcatccttctctaacagtttttcttcgaccaccatggcggcggcttctgcggcggctgtctggatatcatgcggcgatgatgacgccggacgagggaagagagaagcaagctcagggaaatttaagacggcggaggagcctttgatggtgagagcagcgacgtcgtgagcacgagcagccatatcagcggtgacaaaagtgccgagccaaatacgagttttcttacgaggttgtcggatctcggagacccatttgccccaacttctcatccgcacacctctgtaaacaggatgttgcattgaagaagatgaagaagcagaagaagaatctctccttctctttcttgtgttgttgtttctgggtggagcttcttcttcagacaagtgggtgcttgttgtagtagttgcatc

SEQ ID NO: 9563 - DNA, 573 bp, Arabidopsis thaliana
tgaagaagagcctaggcttatgcttcttagagagtggacgttgtttgactccatgctttgttcttcatacattgcgactaagttgaagacatggagtgataacggtatcaagaaacttaagcttcttctagcgcgtatgggatttgcacttatcgagtgtcagcaaaagtttccgtacatgagccttgaggtgaagaggaagatgaagcaagagtttgatcggtttttgccagaatatgggcttaatgatttctactaccggagtttcttgcggcttcatggttatagctcaagggtctctgctgcagatgttgtctatggtattacagcacttcttgaatcatttcttgggtcaggtggctcctctgcttcaaaacagtttggtgaagcttatgatgctctgtctttgaacaatttggataaacttcgatctgggatgcaacaagcaatccaaggttcacgagcaattcttagacaaggaagtgcagcaatcactaaaagtggatgcattcgaagtggtaggaattcagatgggtaaagatgaagattcattggatgcgaagtatttgggat

SEQ ID NO: 9564 - DNA, 543 bp, Arabidopsis thaliana columbia
gatgcctctatctctcgtcatcctatccaatggcggattccaatgagcttggctcggcgagcgacgactctccgtcgtcaccaatcatctcatccctatcggattcagtccagctcgtgctgactcagtggaactctgtagtgcttcgtagatggatgatagattccataaggttcacggtgaagttccgacccacgaagtcgtttggaaaaaaactgatttctttggtgaaggagataacaaggagtttgttgatattatttatgagaaagcccttgatgaaggcattgcaaaggtttgtgcttgtaaagtgtttgatgatattcctgagagagttatgtatttggtgaagtgggttttgaattgcatagtttttggtttctggggtttatgtagattactataaaccggccagagagaagaaatgcgttccggcctcagactgtgaaggagcttatgcgtgcgtttaatgatgctagagatgatagctctgtaggagtcacatactcacggcaaggtatagctcttggtatttgaattgat

SEQ ID NO: 9565 - DNA, 369 bp, Arabidopsis thaliana columbia
  unsure (1)..(369): unsure at all n locations
taaaaagaagaaaattaaaaaagaaattaaataaaaacaaacataaaaataaaaataaataaataatctaaatataataaactcgaagatatccactccaggaccaacatcctctatgactataataaactcatcctcagtccaattctttggtatgttccaatgaacaacctattcttcgtttcggnangagngcaccttntggttttaccctgtgcaagcatttggtgtcggttcagccgcattgttctccgtcaantgccnactagccatgaccgatacgcttaagcatccgttngccgttgcgcttgccttnggctcatttctgtgcaactcctcaatggccttttgtgccacgtctttggtttt

SEQ ID NO: 9566 - DNA, 297 bp, Arabidopsis thaliana columbia
agcatccactgagtaaacctctgtagtctcctttctctaacagaaaagaagtaaccattacacaaagaacaatgtatcactatatctcaaacacaaaagaactggaaattaaccagagatatcagatgatcacactcttcctccgacaagaacccgcggtatagaaagaccctatacatacccaattgcctcagacccctaaaccttgaagcacgcaaacatacattcctatgtgctgacatgatccatgatggtagagccagatatccctccgcagtacctgaccttggtagccat

SEQ ID NO: 9567 - DNA, 431 bp, Arabidopsis thaliana columbia
gtacatcaatgtaacttaaaaacacaatatttatggttatatataccgattataaggtggattatataagtcagggattggtttggataaaccacaaaatgaacacccccaattccaagaaacaagcaataatgtaatgcaaccggactaataacctacattgatgactttggtcgtgtaggttgttagactaatgtttccaaaatatacacgtgaccacggatgtgtgtgtatgttatagatatgcttaggtcaatttcgatatctactttaacgttgtcatatatatgctaaaacacattagtaaatgtatgggacgcaattggataaaattacaagaacctgggatgagcattgatcttgacagatttctgaccgtactttcgccaacgataaccatcatcaggaacatcatcatcactccttgtatg

SEQ ID NO: 9568 - DNA, 588 bp, Arabidopsis thaliana
tctgtaatcaattaagcttgtgtaaattggttaccatcaactaatcactatctgttttgtagaaaaaaagagttccaaccctaaattggtgacaagaagtaaggtttggataacaggtcatacacactcagatgggagacctgtcaaccctgaatttgcagagacgattgtaagacaatcattaacttgctttctttttttgttttgctagtacttattgtcattacattctgtttcaggaaaaaatcaaatctatggatagtgaaatggactcatcatcattcacctatcttaaagaagatgttgtgagtcaagtattaggtaaagacaagcctggaagacttagaggtatgagcagaggagtcactgcaactaagttagcattcatgttagctagagattcagatgtggagaagcttgaagctacacaagctgatttgctgacaaagcttgaggacttgcaaaatgtagttagtggcttagctaccaaaaaggtaaattatctaactgaatacacgtgctattaagcaaaattgaatgttatatgttactaattccattgtttttgtcaggaacatgttgaagagg

SEQ ID NO: 9569 - DNA, 597 bp, Arabidopsis thaliana columbia
gcaaagaaatttatattgaccctttagttgacgccattgacgtctttgagtgaagaagcttcaactataacggaatggcgttcacagaagctctttaatctttcaaatgcatcctccaatcttggagtctccatgtcgatagaatgcctcaaccagttattctgaccaaatgcaattcctaccaatccaacaacatgcgtttaatcgtgttaaagttaggttgtaactcaatgacgaaccactagattacatgtcttagtctacatttctttatattacaagttaaaaaaaaaaacaatcgaatatatttttccttaaatcatagttccctaaaacttaaatctcaatcttctgaaaactctagagagggataatgattatattacctggtaaaacaacgagattttcttccttagcaagcttcctgcagaagtcgtgatcgtcttcaatgtctacaaaatgcaatgggtccagcttggtctgcgctatgcggattaccacaatgagaagtttgttcaaactaatacattaaaagaaagttatagtagactagacatgtaatgattataggatagaatcccataagaaggtgcatga

SEQ ID NO: 9570 - DNA, 585 bp, Arabidopsis thaliana columbia
ttcagaaccaaacttctcctccttcagtttgaaattttgatttattaacgctatatagaactttaacatttaccaagttttaactacaaaaaccacaaaactcaataacttgaaacttgataagtggacacaacaaaatttgtagcagttagtacaaagttatccgacggctataaactcgccggaaggttccaacatttattagttaaatagtggaatacaatgaaagctacgagcttgttgctttccagtacagaaacctcgccggaaagtatccaactttatttttttcaactgcgaaaataatctgacaataggaacaaattttcattactcagaagatcattcaatcctcaactctatcaagtaaaatcacaaaattttgtaattcttgttttaccttagtaagttactacgctgcagcaactcctgattgattctgttggaaccattcagctggccaccatgttggtttgattgcctcgactttcacctcctctgagtcctttactgctaattcagctgatggtttaaaggcttcctctaccctcattacacccattccacggctacccagagctgttg

SEQ ID NO: 9571 - DNA, 549 bp, Arabidopsis thaliana
tagtacttattgtcattacattctgtttcaggaaaaaatcaaatctattgatagtgaaatggactcatcatcattcaccgatcttaaagaagatgctgtgagtcaagtattaggtaaagacaagcctggaagacttaaaggtatgggcagaggagtcactgcaactaagttagcattcatgttagctagagattcacgtgtggagaagcttgaagctacacaagctgatttcctcacaaagcttgaggacttgcaaaatgtagttagtggcttagatgccaaaaaggtaaattatctaactgaatacacttgtgctattaagcaaaattgaatgttatatgttactaattccattgtttttgtcaggaacatgtggaagaggtttctaagtctgaggctagtaatgttagtgcagaagttcgatgtcggttacttgattggtgatcagatgatgatgttgttgtaggtgaaggagaattctgttctactgaacaaatgaacaagattggacggatccacttggacgtaatgctgcggctgttgttgtga

SEQ ID NO: 9572 - DNA, 450 bp, Arabidopsis thaliana columbia
gctactgtctatttatacactatacttgcaaaaaccttttcttaaaaggaaatgaaaaagacactgcaaaggaaatttttacaaagtgtacaatgcaacaactaatcgcatttgataaaagcaccctattcaattccagagtgtgatgaaagtctaacacacaacttgcaaagattgtagcctccatttgttccagccttagactggattgtgaaggtattaaaaggtgcaccagagaagccttttcctaatgctttcacatatgcttcctggaaacagaaccatcacaacagtttttaactttcgagaagaaacgatttacagaatcttaaatatagtattatctgtcgttagtagaaactaccttaagagtccataacttaatacactcctttcgctgaacttccgggtctggtatagctgacaaaaacttcacttcatcagcagagt

SEQ ID NO: 9573 - DNA, 578 bp, Arabidopsis thaliana columbia
cttttaaaattcgctttcaattgcatcttattgtcccctagaggctgaatctttaattgttccttttgaaaggattatggcgatggaaagggtacagccaagcatttactggacaaaatcgcagatttggagagtgaggcccagaagtctttcatgcatcggtcagttttatgctcaatcatcctggttcttagttcatgtttcagacttcgagaagcttaatccatatatgatgatcacttatacaaattagagtcattcatccatatttaatacattgattgatccatgttctgtgatcaccaaatttatattcccagtgatacatctcttttgtgcatgagttgatttacaacttccggaactctgatatctgaaggggtggatcttgccattttttttcttttctagattcaacattgcagcagatcttgtggacgaggcaaaaagtgctggtcaactgggctttgcagggatcctagtctggatgaggtttatggctacaagacagcttgtgtggacaaaaactataatgttaaccaaggtacagtcaaataatgtgcattaattggaagtta

SEQ ID NO: 9574 - DNA, 710 bp, Arabidopsis thaliana
caacaacccttcgatagcaaacatcttccctaactcttctcgcagctcgtggtagctgctgaatcgggagatgtctaatgaacgcccaaccgaaccagatttataaacctgcagttttggatttgtaagcatatcagtattttcttagagacagtagagccacagagaagtcggtgagcctagaacaaaccagcacctttacaaagttcttggtttggttggacgagttaatctgtccagctccatgcaataactcatgagttgtgtcttgcatgcagctatataaggaattctgaaatcctgaatctgttagtgacataggggaagcttcagcatctcctgatgaagaagcaaagcggggaaccgtactggggaggaagagtccagagtcgggatcaacaccgaaaagagagggattctgcggatttccgggttctagagcaagactcttcccaggataggcttgtggaagtgacaacggttcagaaaaagtgttggatgcttttggagaccagccctctgttgttaactgctcagggagtacagactgaccggttatagaaaaattcaaaagattgccatctccagaagccggactagcagttgttgcaaatttgttgcttgagtcagtaaaatctgacttcatgaacgagggagatggcatctctgattgctgctgcactgttgaagatggccattttgcattttga

SEQ ID NO: 9575 - DNA, 535 bp, Arabidopsis thaliana
gttggttgctcaggggtttggagctgcgcttcttttcattcacgggcttgagctaccgcctgagagagggcgtcgggaatggagatctgcttttgttcaaagatccttttgtttcgacaagtccagatggtccacaagatccatggtgaaagaggggtcaaccccaatccagttgggggtaggttaattagcctccttgagctttcaattctcactcttagacttgtgactcttgaggaatccacaggggatttgaagggagcggcttcccagaggttcttagcaaaaggacaatggaaaaataagtgcagagaggtctcaggtacctggcaatgggggcagagagcatcgaaactgattcccggagattgcaagagatctcctacaggtaaagctcctgccaacgatttccataagaagaatttgattttctgtccacattgtaaattccagatttctttgaaccagttgaagttctcaatttccccgagtggactcatagtccccttagacatcatagcggcttgataacgga

SEQ ID NO: 9576 - DNA, 448 bp, Arabidopsis thaliana columbia
tgcacgtatgtttctgctcatacacacgttaacaagttcatttataatcatgaatctaattatggatcaccagtctgtttgatttatacattatctttagattgatgaactttttcctggtcaaagattgaagcaattctatatgcttcattctctaggttatcttcatctttccaataatactttctacgtacataacactattcgtgttatagctagtaataatggggcgatcaccatgttgcgatgagaatggtctaaagacagggccatggacacaagaggaggatgataaactgatagatcacattcaaaaacatggccatggcagctggagagctcttccaaagccaagcggtttacaacgatgcggaaagagttgtagattaagatggacgaactacttgagacctgacatcaagagaggaaatttcactgaagaggaaga

SEQ ID NO: 9577 - DNA, 1225 bp, Arabidopsis thaliana
  unsure (1)..(1225): unsure at all n locations
cctagtcctcttgtgagagagcatgtacctgttctgcttcatgactggaggcacctacctgatgagactagggacacactcatgggaagaaattcaagtatatcatactcatttgctgagtttaatcaatgcatgcttgtgtgtaactatgtattttcaatgtgtaggggaagttcaatttgaaagaagattggcaaaaggatgctgtttttaagcagatgggttgtgtgtggaggtcttctaagtcgaagctcacaacgaaagtgcgtgcagtgaagaacaaaacggatttgctttcgctaaaaccaagtaacatacaatatgtgacggcttggaatgcatgggtgaagaacaggaagacctctctgccttcaaggttgtataactatttttaaattgacatttggatattttagaagatgatttgttttaatggaagttacttttgtaggaaataaatgacaagtacaggatgttgaggaaggcacagattccacacaccaccagccgcaaaggaatgattcgcctagcccatgagatggtatatgtctactctttaatcaattaagcttgtgtaaattggttaccatcaactaatcactatcatacttgtagaaaaaaagagttccaaccctatattggtgacaagaagcaaggtttggatagcaggtcatatacacttagatgggagacctgtcaagcctgaatttgcagagaccattgtaagacactcatttcacttgctttcttttttttgttttgctagtacttattttcattacattctggtttcaggaaaaaataaatctattgatagtgaaatggactcatcatcattcaccgatcttaaagaagatgctgtgagtcaagtattaggtaaagacaagcctggaagacttagaggtatgggcagcggagtcactgcaactaagttagcattcatgttagctagagactcacatgtggagaagcttgaagctactcaagctgatttgctgacaaagcttgaggacttgcaaaatgtagttagtggcttagctgccaaaaaggtaaattatctaattgaatacacttgtgctattaagcaaaattgaatgtttaaatgtcacaaattccattgttttttgtcaggaacatgttgaagaggtttctagtctgaggctagtaatgttagtgcatgaagtcgatgtcagctacttgattgngtgtcagatgatgatgttgt

SEQ ID NO: 9578 - DNA, 582 bp, Arabidopsis thaliana columbia
cgccagtgtgctctaaagtcaaacgcttgttcggaggataagttatggcattactcgatttctttctctcgcggaagaaaaacacagccaacattgcaaaagaacggctgcagattattgttgctgaacgccgtcgcagcgatgcagaaccgcattatctgccgcagttgcgtaaagatattcttgaggtcatttgtaaatacgtacaaattgatcctgagatggtaaccgtacagcttgagcaaaaagatggcgatatttctattcttgagctgaacgtgaccttaccggaagcagaagagctgaaataagcccgctgtaaaagcgcatttatcttcaaggcagagttatctctgccttgagtttttcatccctctcatccacgttgtggtaaagcggcgagtattcttgctgatactcctcattgctatttccacctccccctttacaccttaaggctgttccacgcacaaaacaaaatgtttatgcctggttgagtaaataaccttattgttagtatggatatactgggagatgataacccgcaatttcattattcattgttctcccataggatgaggt

SEQ ID NO: 9579 - DNA, 551 bp, Arabidopsis thaliana columbia
gttccaggtcaaaaaaatcaccattataaaataaaataaatgatttagagacataaaaatctttttaatctcataaatttctgaatttcgtccagatgtattttactagacctgcttgtaattcatgatgtaaatttgaatcacgtaactcggatctagcacgcacatgacttgcaaattctggtaacacctcaattgagaatggttgtggtgtactagaaccacttgcctcagattgattataatcggaccaatgttgagcatatgtctctcgttcatcattaacaatcatattatgcaatatgcaatgttgagcattaggtgaacgatctaaaacatttaattatatcattcaatgtgcctggacacctaaaaaaggcatgccagatcttttgatcatgagatgcaactccttcaaaaataacaatggtggtcccttatctccctgagtaaattggtctcccacgctgtatgaaatttttcgactcctagtgcatgcaatcaatactcccaatcatccttgaaaaccccacaactcgctaacacgcaga

SEQ ID NO: 9580 - DNA, 171 bp, Arabidopsis thaliana columbia
tgtacacaacaaacaaactagtgaaaaaatatgccaaacaaagaattgcatttaaactggttaacaagatgatgagtagatatatacctggaacagaaacatagaatccaatccggtaatcactctggaggacatggtgcttagatagatacgcggattgacccgtgtatg

SEQ ID NO: 9581 - DNA, 587 bp, Arabidopsis thaliana columbia
atacagagattctcagacctaaggctacttaataccacagtaaattctggaactttaaattttgtccctcaaaacaaaatcacctctttcttcatactactcttcctcgccgatataacggaggagagaagcctcggtaaccgatcaaactcagaagcttcgatcctcgcaggccaaacggatggttttttgtagcacaagaagacatgcctctcgtagaactgtacagtcccagcgagtttatcaagtgcgaaatcgacgtcgctaaagcaatcaccatcgcctcctcgtaagctcccactctcgaagctaccagagcgagagatcgattctgcgagaaagctagattcggtgattggagacgacgaggaaggtgggtttctagtaaatgttaaagggtcgtctagatatcttccgcttcccatttgattcgacggaaagttcaaactttttaggagagatcgaaactgaaagtttttgagaagaggaagaagaagaagagagagtcataaaattatactatattctgctgtttattaattaagtgcagtaatgaatataaagtgtgtgttatgggactaatgatg

SEQ ID NO: 9582 - DNA, 823 bp, Arabidopsis thaliana
gtctttaacggtgaccaacgatgagccattaccgttagcaactattgtagtggataggttaggagacaaaggaacgccggtatctttaacgaaggggctacgagaaggacacgtggcggtggagatggtggtggctaacgagatgggcatgaggcaaagacctttgccttgtagatattgcatggctgatcccatgtcctcttccattagctttgcaacttggtgctccgtcatcttcgcctcgccggaggaggaggtgttttcgtgggatccaccggcatcctgaaaatgttcaataaaattaaaaagaaaacaagaaaagcaaaaccctaaagctatgatgatgttgaaatgggaggttttggtatttgttggagagaaagtaggcacgcgtgcctgtccttgttttgttttttttactattttttggaaaactttttcatttgtttttagaaagtcgaaaacaaaactactttttaattagtattattccctaactaaaaccttttcaataatttacatctctttttaattagtttaaaaaataaaatctcattctatatagtgatcacgtcatcctatcatcccttttaagagagaaggaattgaaattattacctcagagatttgagaagaagcagaagcagcaccgcccagtctactcatgcttagtacctgcatacataaatttgccaaatattataattaagcaaaagaagaggtagatatacactaacactatgttttaacaaacgcaaaagataaataatttacaagatcaaagggaaagggagcatatggaattttagttgcagaggccata

SEQ ID NO: 9583 - DNA, 821 bp, Arabidopsis thaliana
taattagatgactaattagaaagataaaatattgtaaaataacgcattcaataaacctaataaataagataccaagtattttaacagagaaataagtctatttacatttacgcaaattgggagagacgtaatattgaggtgtatataaactacttataacgtggcacatagttggatagctgatttcccacacggcaggcaaaggaatcacatgtaacgttgctgtctgatccaaagtttactcattaaatatccacttactttttgttaacacaatctcacaattatccacttttggttagtactattttaatttctcttcaagataattcgctcgttttcctcgttacaaagcttataggtcggtacataatttattggtcgagccacagctatatttagttatttaccaacattaccataagggacatatatgtctttttcacatttcccgtatctcctcctatatataaagcttagtgatgtcgtggaaaccaaccatatgaatctcacgatcaaagataatatctcagcatctatatagtattggtctcgatattagagacgtacacactttgtttatactcaaatcaatatgggatctttcgtgaaagaagaaacgtcgtcgttgatgacagattttttggagaagtgcggtggttatgcggtggtggatggagggtttgcgacggagctacagcgccacggagctgatatcaatgatccactttggagtgctaagtgccttattacttctcctcaccttgttacaatggtcgtcaatctcgtcgtgaccacctcctttcgatcctcttcctcta

SEQ ID NO: 9584 - DNA, 478 bp, Arabidopsis thaliana columbia
agcaatctcttcactaccagcagcggcttcagtagcagcctgattcctctcttgcttcctctcatagtactgtgtccccatgaaatcaacaagcagagtagctaaagcagcaaccattgcaaagaacccgggaaagggaaacttagaccacggaaaatccggtaaacacggattactcagagcttctgtgccacctgcaagcatatggacaaagccggtgggatgtatgacaccagctgcaaaggctttagcagctacaaagagatttccctcggtttgaagaaaccggcggttcctgccaatgagaggtatggctacaccagcagctccagctagtagaatggaggcaatggctacaaacttaaggagaaatgcagcagaatcgtctctacagaggtctgattcgccagcatcacagaggattttagtggtagaagaagccattgtctcgggaatgatctgcaaaatggactctttt

SEQ ID NO: 9585 - DNA, 558 bp, Arabidopsis thaliana columbia
ccaagacctcttcttctcccattcctgctcttgttaatgccttttgtttcatgtctttcaaaagctcaccgtagcttagagtcgtgagcaaaccaagcacatcaagaacttccctcactgccttctcaacctcgaccagtgacactaccagcgacatccgctgcttcttctgcattttcttgagcttggagattgaaacgttgatgaatttcaatgcgtcttgaaaagcaccagtgagtatatgggcagtgttcaagtcgttttgacatttttgtttcaaactcacttttcaccttctttatcatctctttggcttctgcagactgttgagtctttccaacatctccactcatttcttctcgatatggcgatagagctttaaagttaagaaacattcataccgttttcccttaagagatgctaaaaaatattgtgaaggcaccacctgataacacagtataaagcatccgatgaactctcaagctgcgaaaccgaatagttgagaggagaacggtactgtgcactcatcaagaaatgtctcaaagccagtggatgata

SEQ ID NO: 9586 - DNA, 986 bp, Arabidopsis thaliana
ttcggtatgacacccgagaaccgattcttggagagatccaatgtgtcgagcgccttgaagtttgataaaaagtttggaatcgtcccggagagtttgttatggcctaactcgaggaacctaagaatcggtgcgagtgatgcaatggacggaggaagattcccggagaatccgttgcgggagagagttaaagatcggagctctggcatggatttgaaaatatctggaatggttccagtgagacggttacctccaaggttgagatacgacatgagcttgagattagcgacccctaacggtatagttccggttaggagattattgccgagtttgagttgagttaacagagtcaaattagatatcgagctcgggatcggaccggtgaaccggtttccctcgaggctgaacgcttcaagctggcttagcgcaccgatgttagccggaagagtaccagagagacggttattctcaatgtatacgtacttaagatttggtaattggaaaaggaattgaggaaaagaaccagtgatgttcttgagatcggtgaagtaaatcccatcaaggtgcttgagtttagccaacgacggcgagagagtgccggagaggaagcttccagcaacatcggcttgtccagcgacagagagtgcagagacacggtcagtggtgagacaagtgacaccgttccaagaacaacaagcggtacctttcttccaagaactgagaatacccgaaggatctcgggttatacccgctttgaaagctagaagacccgcttcatcatcaggatgacacgtggcagctccggtgggatttagacattggaggaagatgacgaaggtaaagatgaagagagtaaaggaagagttcatggtggtgaattgtgttgtgttgattgagagaagagagctattagtagtggggaaaagattacttgagagctgcgaagtcaaagttgacgtttttgaccatccatttgcatctgcatgtga

SEQ ID NO: 9587 - DNA, 397 bp, Arabidopsis thaliana columbia
cctaggaccactgttaagaggagtgttcaagaaaaacgtggaagatccaggaactttcactctaccaaattccacccgccaaacgatcttgaaggattctctttccgcggtagaatgttaagcacgcatttggacacacccagtggcaaggaagctggaagtcagacagtaaaaacgttgagatgtcaaagcaagcctcgctaagaggtcttcaagatcatcagacggccttctgagatatcggaaatcagggatagaggcagtgcaaggtctaacgaatgaaatcgaaggctgaagttgagccctgacctatgcttctacagctgtacgttgcgaggtcttattgatagtaaactggagcatgaagggctgcccaaggttgagacgtattcaccca

SEQ ID NO: 9588 - DNA, 480 bp, Arabidopsis thaliana columbia
tttatttttgtgtaagacactgtcattacgagacacaaatctcacttctcactacagtctgtctaacggtagaggcccactagttagtagcatcatctgtcgtcacctgtctttaactccagcagagtaagcatcatcccatacctctacaacttctttgttagatgtgacgcagatgagacttccacaaaacaggcatcttcagacttgtttcagcttcgtttgcacttgcaccacctttcgtctttcttaccttcgcattctagtccacaatcccgagactctagactggtgatgccgatttgtgcttcccaaaccgctgtcgctcacactccctccatcatagaggttttcatgaacatctgagacttctttcgcacattgattcagtggtatcacatatgactcatcctttgttgtcttcttctgctggtcaaatcttttcacattttcagatatctgatggaatgttctgtttat

SEQ ID NO: 9589 - DNA, 959 bp, Arabidopsis thaliana
tggtcgtggagatgaacccactgctgtgttgaagaggcagtgtctaaaaccatcttatggttttcactcaaattccaagtaaagagattccaaattgtgctacatttttataaatttggcaaaacatacatgtggttgtgtggtggggattgaaatgtaacgggggccacaaatgaagaatattgctgtgagtctgtgactattaatgtgtttacgtgggagtttagtgatctgatgatatatgaggtgtccaattttgtttacttaattactagtgtgtatttgctaatacgagattttctttgtacatctcagagatcaactaaagtcaataatattcgcagccatataaatttgtattttttggtagacaaaaaatcatagattatttcctaaatagaaaaatggaaatctttctaaaatcaaggttatttagcaatttcctttatttcctttgttttagagtcaaatatatttttttgggggtcagaaaatcatatataaatatactatttagaaaaatggaaatcttagaaaaatctagggctatttaagcaatttcaattttcctaaacaaaattcgacgctgccgccggtaaaaattgagctcgtgaaagctttacccgggagaagtgaaaaatcatcagagtttttgagaaattcttccaagcgacggagagatgtcggagatggaggtggagaaaccggatttgacattgtacaacacaatgactcaactgaaggaagtttataagccgatgaatcccggcaaaatcggaatctatgtatgcggtatcaccgcttacgattatagccacattggccacgctcgtgccgccgtgtccttcgacctcctttacaggtcagttgcatagttttcgccgtaggattgatgtccaatttgaatttctttaggtcacggatttggggaaaaatcccaacaatctaaaactaatttt

SEQ ID NO: 9590 - DNA, 710 bp, Arabidopsis thaliana
ttttgtgtccataaagtgaatataggagctgataatttccacttgtaaacttgacctccagaaaagagctaaaccaccagcagcaggagaaaggggtgcaaccaaatgatttgagttattgtctagccactgaagcgtttgcaggacattttcagaggtattcttggtttccatgaggaatagaatgtcgggaaatatcgatttacgaattttttttaaccgctggactgtcatgggattccccaacccacaacagttccagcttactatccttaaggaagcggggctaatggattatgaaaatccactttatttttctgggctgcaggaattaagaaaatctttggatttgcaggtttcttcgattttggacaggcagccttagaggaggggttacctccttgtagagctgcaaaagatgaaggtagattagatccagttcctttctttggtgagttccttacaagatttctcttttggcttttggctccaattaactttgaggaggaatttgcaggattctttgaattggttttagccagtggtggtcgacctcttcctcttttcacctggactacatgagaactagtaggtagggaaggatctccctaacagatacacgaggctcaggggaagcaggaagggcaagtccaatggggtcagcactggaaatggaagcagcggcggcttcaattatttggtcagttgta

SEQ ID NO: 9591 - DNA, 755 bp, Arabidopsis thaliana
gatctatcaggttcacatataggaaagtggtaaaaaatcctttttcttctgcttttattagagtatcaatgaaattttggcaggagaaaacgatttctacttcaatttcttgtttccatagcagggcaagtcctccacctccagggctgtgaggagtaactaggtgaattgctacttaacccaatccaatgagagcagtgaggacgacagcatctggatttttcgtctccatgaggaataggatttctggtgagatattcttctttatctcatccagtctatgagctgttatgggattccccaacccacaacagttccaacttgccacttttaaggaagaggattggatggatgttgaaaatccatcctaccttttgcaatagctggtatgatttttgtcttaggaggtacctaacttgttgatgggatatttgcaggattctgtcttcttctagagggggagccattactgtgagaaggtacagaatctgcctgtgcagttgttagtctggttagagcggacttcctcttgggtgagccttgtgtaatacagagttgtttcttactcaactttgatcccactaatctcatagggcttttattaactggtttaggagtaggcggtctgcctcttttttcttcaccataggagcttggagtgcttggttatcctctaagattggggcctgaatcgcttccaccaatgatggttggtgagcttgagctgctgcagagataatattagctgctgtggt

SEQ ID NO: 9592 - DNA, 576 bp, Arabidopsis thaliana
taaaaagcttttggactcaaaatcatagaagagaaacttcgctcaaggttctcctaagaagcaccatgaaccaaaaaccaaccaaaagtcaggccactccaagtcaaagtagagcacctctaccagaacttcttcatctgaccctctatagactactaatggaccttcctcctcctctaacccaaaaatcaaattaatccctgcaagtaggaaaaagaagacggattttctgagtctgccaacctcgcttctttaaaaatggtgagctggaactgttgtgggttggggaaccccatgacagtccacataatattgggaatccgtaaatcggttttccctgacgtgttctttctcatggagatgaaaaacacctctcataatgtactccaactgctccatgaccttgattactctactcaccatcttgaaccacctcattcccaaggagctggtgggttagccctgttctggaaaaatagtgtgaaagttgaaattatctcatcatgtcaacactacatagacacaaagatcaaagctaagggtcaatcatttttctcaacctttctatcttataca

SEQ ID NO: 9593 - DNA, 580 bp, Arabidopsis thaliana columbia
tgcctttccttgggaaactctgacatttctttgtggtttgttttgtgtcttggtcagaagttggtctgagccttcatcaacgttgttctttcgggaatgggcactgaaacagtttcaaaacctgtgatggataatgggtctggagacagtgatgatgacaagcctttagcgttcaagaggaataatacagtggcttctaattcgaatcaatctaaatccaattcccagagaagcaaggcagttcctaccaccaaggtatcacctatgagatcacctgtgactagcccaaatggaaccactccttcgaataaaacttctatagtgaaatcctctatgccatcatcttcttctaaggcttcaccagcaaagtcaccattgcggaatgatatgccctctactgttaaggataggagccagttacagaaagatcagtctgaatgtaaaattgagcatgaggattctgaggatgatagacctttaagttccatactatctggaaataaagggccaacctcttcgcggcaggtttcttcacgcagccagagaacaagaataatggtgatcgacatcttgatagagc

SEQ ID NO: 9594 - DNA, 1198 bp, Arabidopsis thaliana
agaggatcccgaagataatctttacacccccgtaaaagccagcaaggagtgtcctttaattcggattcttcacagacaaaacattctccattgaaaaggaagttccctgatagagagagaagatcacactctcactctgaggctagatctttcagccgcaaccacctcccctcaagagctcctccagatagatcaaatggctatcaagagagaagacctagtaaggaaccctcctaccattctacctccagaggtcactacaggtcttctcagcagaatactctccaatggaaggagaaatcccctcaaatacaagcttcccacctggaaatttcagattcctctcgcactagaaggccccctcttgcgagaaatctatctagtatggcttccctctctcctcccttacacagactgaactctcttgaagttatctcccctccaattctaatacctacaaaagaataaattatgggtgagataagagaagtcactgtccaatatactacttgtgatgatcccactgaaagtgcagcaaggaaacaaagagtattacaaggtgaggccagaaatatgatgaacaatactgctgaccaaattattgaagctgcagtagcatcttctagagaacctgtttgattatcatatgctcccatgctcagcccaatccaaaacgaggacttaccaatcctacttcaagaagtagataaactagttaaaagaggtagagggagacctccgcttgccaaatcaactggtaaaaacactctgaaacttactggagttacaagtcaaaagcgcaatcttgttcacagctctccaaaaaagactactaatccaaaatcaacccaaacacaaggaaagtctacagctggcccgagtagaccaaccccaacttccggggtatcctcttagttatctggaggtcttgcgggaaaagctctaaagtctatccctcccagtggtgtaggaccaaaagctagaattatccctgcgataaagaaaaaaacgttggattttcagaatccatcaacccaactttcttaagggctatgagcaggaactgttgtgggttggggaaccccatgacagtacaacgaataaaggagatccggaaaaagatctctccagacttactttttcttattgagacgaaaaaccccacagccacaatgcttagttcagtacaagggattga

SEQ ID NO: 9595 - DNA, 682 bp, Arabidopsis thaliana columbia
tggagaattctctatctactctgtaccaaatgacttcccaaactgaatcaaagaacctatctctgatttcccatttttccggatagaatcaattaatggcaatgattaagaagccaacagagacatacatgaggaagaccgggtagagtgcgagacttttcttctcgggttcactgcggcgctcatgaaaggataagcagcccaagagctccaggcaagagtcacagacacaacgaccatcttcagtatcacattgtctttcaacatgcagatcactgctccaacgtctagcggaaatagacagtagcctagaaggcttaggctttggaaaaagattatatgtcctccctgaaatttgcattgttcacgatataatgggatgtttaaagtcaaaacttataacagaaaagtgtaaagtatgtggctagtaaccaatacatgaatcaaatgctagcttaccagaagcagcacatttagtgtgaggatcactgccccagctgcaagtagtgcaaatgccacggcaaatacttcagactgtaaacacagagaaaacgaatgagccaaaggataattggtaccggcaaagacagttctttaactagcagatatgaagaactagtgctttctaatcagggatcaacgtagatactcgggatatatatgctggaagtatatttagttg

SEQ ID NO: 9596 - DNA, 540 bp, Arabidopsis thaliana columbia
aacttctgtttgtttcatagtctctgtcgaagttgttgtaaatgttgcttaaacaagtctctgtggtttttgtagtgctgcacctgctgcaagaatggctatgaccagaagggttcatcctcttgtgtccttgaacccttatcaaggaagttggactattaaaattcggtgtcactaacaaaggagtcatgagaacttacaaaaatgccagaggagaaggatgtgtgtttaatgtggaactaactgatgaggaagtaagactaatctgatgatttttctatggttctggattattgtcttagactttatgtggttattgatttttatttacttatggaaatccagggaacacagattcaggcaacaatgtttaacgcagctgcaaggaagttttatgacagattcgagatgggaaaggtgtactatatatccaggggatcacttaagcttgctaataagcagttcaagacggttcagaacgattatgagatgacctaaatgagaattctgaggttgaagaagctagtaatgaagaaatgt

SEQ ID NO: 9597 - DNA, 427 bp, Arabidopsis thaliana columbia
cttcaaaggtctgaacttcttcatgcaattcacggaaccaagagacacaagataccaatataaccagaaccttgatacgtatcctatctatgtcctagagacaaccaacttcatcaaaatgtactaaaccctaaagacaagtctgattattttaccctcttcaataaagacagacaatccgaaatcagtagccttgatcaaagccttctcatctttgctagagagcaagacattctcaggcttcaagtctctatgcaacacacccatgacatgacaaatcttgacaacattcacaatctgtctacaaacaggagcagcagctctctcagtgtaatgtcccttagcaatgattctatcacacaattcaccaccagcacaaagctccatcatcaaattcacaagctttctcatcctcataagctccttt

SEQ ID NO: 9598 - DNA, 551 bp, Arabidopsis thaliana columbia
tagtagcgtacgcccgtgtgctttaaagtcctcgccgcgatggttgtgcttttaagcgggccgttaatcctggagcaagggttatggtttcttgccgaccggtctttggctttacttttctgggggttaaagagtttgccggaagggtggatcaacattgctgaatgttggcaatggctatcattttccccatggttcttactggtggtatggcgattaaacgcctggcgaacgttgccagcaatgtgtgtggctggaggcttgctgatgtgctggccgctgtggcaaaaacctcgacctgacgagtggcagctgtacatgcttgatgtcgggcaagggctggcaatggtgatagccagaaacggcaaagcgattctctatgacacaggactggcctggcctgaaggggatagtgggcaacaactgattatcccctggctccactggcataatcttgaaccggaaggcgttattctgagccatgaacatctggatcaccggggagggctggattcaatattgcatatatggccgatgttatggatcagaag

SEQ ID NO: 9599 - DNA, 1302 bp, Arabidopsis thaliana
ctctttcagtcttctgtcatatctaaagatacccttttctttttacttttcaggtcaaaagaagtgatgagaggtctgtcgtctgagccttcaaagttgagtactcacatctccctgatgggaaacttctgtccatgccccattagagacagctctatctaatcgacaatggattaggttctcatgtcttttgcctcgccatgacaggggttatccgaatgttggagatcataaagatcacactctaacatgaaggagcgcaggtcaatcgcaggtccaagcttcaggtctagttgggccaccagtcttttcagtggagtcaatgatatcattgaagtcaccactgagaaaccatggaacctctcttgctgttcctatagctgtcagttgtgcccagataagttttcttttagttctgtctcgttctccataaagaaaagtagcaaaaaccattttttcttcagatttaatagatgtatcaagatagttttgacaagagtttaaaatttccaattctacatgttgtttccagtagagagcgagtcctccaccaccaggactgtgaggagagatgaatctgtggttagtgtagtccatccactgaagcttcttagtgacaatatcatccggatttttcgtcttcatgaggaataaaacataaggtgagatacttttttgtatcacacgcagtctttggactgtcatgggattccccagcccacaacagttccaacttgcaacttttaaggaagaggagggggtggtttatgaaaatccaccctctctttcactattgctggtatgatcttttgtttaggaagagctctgcttgtcgatgccccattagtcggccttggagtatttttctttttatgaccaaaagttttgttgacaccgttatttaactcttcttcaccaagatttgatgagctctggagaattcttcttcttggtgaattttgaatggtaataagttgcctttttgatgattttgtccctgcaagccttatcggtcttttatttcctggcttggtcgaaggtctgataagtggaggtctcctcttttcttctttactagtgcagcagccgcatttggatctagtattggtaagtaaggtgatagagattgtcttgaagactgaagcagagccgccccagattcagcttggagttgggcttgtgttgcagagttaataatagatgcagcagtagctgctattaaggctttagcttcccttgcagaactcgtcatctccttgttgcactctctagtggggtctgcacaactaagtggactatagg

SEQ ID NO: 9600 - DNA, 911 bp, Arabidopsis thaliana
tcagttctatattggtgcccactttgtaagaaatttcctcttcaatttggagcaaagtgaaagctattttgtattttgcttgattgacttgtttccactaatccaaaagtcttgcttctcttgtttcttcttctataaaagagaaaattagctgatgtgttgttactttaactctctctatctctatagtacctttgatttttcaatatatgattatgatttatggactcgaactcacgaccaatcatgtaattagcaaggaaaagctcaaagccaacacaaatgatgaataggcccatgccttgtcccatttgtttccttctctctattactttcaaaaacactcttcttcacaaaaagttaaaagactcttatcaatatataaaggaagcacgagataaaacttagaaaaaacgagagcctaacatttaccaccaaaaaatcaaaacaaacaaacaaaaagtttgagatgagagggcatgagccacgatcaagctcatcttgtgcagcctgcaagctcttgaagagacgatgcacacccacttgcattttcgctccttatttccgctcaagtgacttgataactttcgccaaagtccataaagtctttggagccagcaacgtcagtaagcttctcggtgaagttcctgaagaacagagacaagaaaccgttaactccttggcttatgaagctgaggttcgtctcaaggatcctgtttacggttgcattggagccatagcgtctctgcagaagaagatgctcgagcttcaacacgatctagctgttgctcgcactcgactacttgcccattctggggtcaacaacagccaagtgtcccctttggatgattctcctgagcttgctgcttttcttgatcttgtaccttatagtgacctgatgttgcttgatg

SEQ ID NO: 9601 - DNA, 229 bp, Arabidopsis thaliana columbia
aaagctgattcccccggtcaggttcaccgcatcgctaagtttgtcgtaacgccattcaccgccaaccgtgagaaactgattagtcgccgtcagcggcaacgtgtatatgccgtcaaccgtaatgatttcggaaattatcgggatgctgttaccagggattttgttcacgacttactcaccgtagtattacagttcgcaggtgccgaattcccaacacacatatatggct

SEQ ID NO: 9602 - DNA, 600 bp, Arabidopsis thaliana columbia
gcattgtgatgaacatttatttgatggcaggatgtgggcaccgatgttaacctgtatgctttggtctttggagaatcagttctgaatgatgctgtgagtttttattatctgctgcgatattgggctcttccttttaagtatatatgcaaacgaaaaaccacaacactcactaactccatcaaatgggttttcgtgtatgtggtgcgcctcgtagatggcaatatcattgtacaggtctgtatatcacatgattcttttccttttagataccttttaagcaaagtattaaagtacaatataaaaactttcgatgcagaacaatgtccttagtaaaccgccagtcctcgtctggggaacattttttcatggtggtgatcaggttttttgagacttttgctggctcaatgtctgcaggtctgtttgctcttattccttcttgatccttcatcacagtttttataacaatattagtctcatcaaagtccctcctaccaaactagacgcactattatctaaacaatgaacaaaagactagtcgactaggtttctttgtgaagattcatagaaccaaaataagcaataattaacttgaactgaaac

SEQ ID NO: 9603 - DNA, 2188 bp, Arabidopsis thaliana
atctatggcgctcccgatcaacctatccggacagtgcaatccctcattctatccactgggcttaagtggcaggtaagatccaacggtataacgctttctccatatgaatgttcatcaatgttcatcaaagttcttctccgaactcctttctctcttgcgcaatctgcattaaagtctcagaaacttctttaccaaggttgttttaccgtctaatctcccatttattggaggtagaaggatatttaagctctctcaaccgtttcaaacttttaaaccctacctcagctgtgttactttcctgcgaagctgttaacccaacctgcaagtgcctcctttcactcatcatcatgacaaaccgtatcccgtataaccagaaaggaaaaggaattgaaagagggtactcccctccaccccgtaagcgaatccgcggtcctgaccttgatacctcagatctcattgaagaaaatgccctaaccctcattggccgtctcaccaatccctctggacaacgactgtgggctctcttcttattcttgtctaacagatggactctcaggggtaaagccactggttcagacctaggacagggagtttttcaactcaagtttgatgtctcggaggaccttcaacaagttcttgataataggccatatcattttgaccaatggatggttatcttgcaaaaatgggaaccagttatctcaccatctttcccttgcctgattcctttttggatcgaactccaaggtcttcccaagcactactggaagcctgaaatgcttaagtccataggtgaagagcttggtacagtcatggaccaggagattacctcatcgacagtcaaaataaaggttctgctagatgggttacaacctatcaccaaagagacgattgttgacttccccgatggaagagaagctgtggtttatctagactacaagaaccttaaaaatcattgtcgacattgccaccgccttacccatgaggaaaagcactgccctggtgttgcaaagaagtctgaaacacaaaggaacccctctcctgtacaatctgcttccctccatgcctcaaaatcaagctcaaggaactactacattcctcaggacaacttcatcgcccccaggagttcctctcagcgctctgagagaagtgctatccctcaccaggcagtaaactctgcaaaaagaagattgaatcaggatggggttcgatccaagtctccttctactctcagatactcccctcagagaagattttttaatagagaaaacttccatagatatggagataatcaacgcagacatcattctcaggattcctctaagtcttaccatcaggatggagggtttgctccttttccacctcagcaactccaatggcgagagaaatctaattcatcagcaggactccatgctacgtcatcaagtgggtccaaggcttgtcgcccccctcttgagagagatgttgcctcctctgatcctcttactcctccaaccttaaaaggcagtgatcccagaagtcttgggatggaagtttcttcccctccacctacaaaagaccaagtcatgagtgagttgagggatttaacagtccaatacctctcttgtcctgatccagtagaaaatgcagcaaggaaaatcagggtttttcaaggggaaaccagaaacctgatggatacaacagctcttggtatcctctcagccgcttctggctcagatcttctagcttatgagagtactgaaattcccccagggtctttggctacaagctcaaacctagagtgtgttcctgctgcccaactaaaagaggtagaggtcgtcctcctctaccaagacaagccaacaaacctgccattaaacttctaggcacaaagtctcataagagaaattttacccagggttctccgagtaagacttctaactccaaatctaggaaaaagacgggatctcctattattccccctaggcctcaaactatccctggttcatcaagttctaaatctcaggccaagaacactaacctctctgcaggaggcaccctaggagcttcctcctctactactccaaaaattgatctgattcctgtatccaggaaaaagaaggtagattttcagaatctgccaacccctcttccttaagaatggtgagctggaactgttgtgggttggggaacccatgacagtccagag

SEQ ID NO: 9604 - DNA, 594 bp, Arabidopsis thaliana columbia
cttccaccagagatcattacagaaattcttctccgattaccagccaaatcgatcgggcgattcaggtgcgtatcaaagctcttttgcactttatcgtcagatccagggttcgcgaagattcacctcgatctgatccttcgaaacgaatccgtaagatcgctccaccgtaagctcattgtgtcttcacataatctgtactcgttagatttcaattcgatcggtgacggaattagggatttagcggctgtggaacacaattatcctcttaaagacgatccaagcattttctctgagatgattaggaattacgtgggggaccatctgtacgatgatcgtcgcgtgatgcttaagctgaatgcgaaatcgtatcgaagaaactgggttgagatcgttggatcttccaatggtttagtgtgtatctctcctggtgaaggagctgttttcttgtataatccaactaccggagattccaagagattacctgaaaattttcgtcccaaatctgtagaatacgaaagagataatttcaaacttatggatttggtttcgatggtctcctgatgatacaaattggtgagcttgtgctacagtgaa

SEQ ID NO: 9605 - DNA, 393 bp, Arabidopsis thaliana columbia
  unsure (1)..(393): unsure at all n locations
nnnnnnnnnnnnnnnnnnnnnnnntaaagagattacaaagatctgatcgagctgaccgaatcgctgttccgtactctggcacaggatattctcggtaagacggaagtgacctacggcgacgtgacgctggacttcggtaaaccgttcgaaaaactgaccatgcgtgaagcgatcaagaaatatcgcccggaaaccgacatggcggatctggacaacttcgactctgcgaaacaagttgctgaatctatcggcatccacgttgagaagagctggggtctgggccgtatcgttaccgagatcttcgaagaagtggcagaagcacatctgattcagccgaccttcattactgaatatccggcagaagtttctccgctggcgcgtcgtaacgacgtt

SEQ ID NO: 9606 - DNA, 558 bp, Arabidopsis thaliana columbia
cagtttctatataaagcaactctgccaagtgcattcctcatatacaaaaggaagaaacacttaaaagaaaatatcaaatctaaagtcgatcacatggctaataagagtttagagattcggtttttatttccacttgttttgtttttggttgtgaaattactttgtgttgatggtaaaggattcaataataatggccataagataagaaaaggaagatgggaaggtaagctgaagatgaacttctatcacaatagctgccctggagccgaggatatcgtgaggcagatagtgtggaagaaagtcgaagcaaaccgtagcctggctcccaagttactgagggttcattaccatgactgctttgttagggtatgatgtgcatgtagggttttttctttatgtgaacatctttcttataaagataagtctgatgtggatgatttttaggggtgcgaccatcgctgcttttagattcggttgctggaaaagcagtgtccgagaaggaagcgagacctaatctctcgctttccgggtttgaaatcatcgatgagatcaagtata

SEQ ID NO: 9607 - DNA, 630 bp, Arabidopsis thaliana columbia
  unsure (1)..(630): unsure at all n locations
taaaactacaaaagcgaaagataagagaagagaaagcaatgcaataaatgaaaccaaccaccaactaacctcacaccttctactttcatgcatttgcactcataagctctctctatataaacccaaccttcattaccattcttcattatccaatccaatccattacttactaagtaaaaagagaaaaaaaaaaaattaagatatggagggactcttgaagttgtcaactttggtgattgtgtgcatgttagtgaccgctccaatggcgtccgaggcagcaatctcgtgcggcgcagtcaccggcagcttaggtcaatgctataactacttgacccgaggcggtttcattcctagagggtgttgctctggcgttcagaggctcaacagcttggctcgtaccacccgtgaccgccaacaagcttgtcgttgtatccagggagcagcgagagncttgggttctcgacttaacgctggtcgtgctgctcgtctccctggtgcttgcagtgttaggatctctaccccatcagtgccagaaccaactgtaacacgtacgttatcttctatctcactctatatttattacatttttacttgaggtcctaatatttaatggagtggtagtaccatatg

SEQ ID NO: 9608 - DNA, 512 bp, Arabidopsis thaliana columbia
cagcggtgaggctaagaaacctggagagacgatatctaaagggcataagaaatatgatttgatgctcaacctgcagcatggaattaggtaacttcttagaagcttgaggatcccaatgtttggagagtttctggatctgtgtttttctaaccaagttgtgaatttttaggtactctgtcggcaaacacgcttccgttgttcgagatctcaaacagagtgattttgacccaagtgaaaagttctggacaaggttcccaccggagggttctaagaccacaccaccgcatctatctgtggatttccgctggaaggactattgccctttggtgtttaggtattcaatcttttcatttatatgctgtttatttgattctgcatagtttggtgatgtctgcacactatctgggtttgggattaatatgtctcctttggtttattcttttgttagacggcttagggagctattcacggtggatcttgctgattacatgctagctatctgtggaacgatg

SEQ ID NO: 9609 - DNA, 546 bp, Arabidopsis thaliana
actaacctgttattgttgactgctaagttaaatagagccatagctccggtttcctgtgcggctgcattgttatcatgaacagctgattctagaaactgcaaaaacgcttccacgaacccattggctcccatgaggatcctggcctcttcattatcctttagcaatatcctgacattttctactactttgcactttttagctaagtcctcctctttgtccacgattgccaatatatcctgatacccctctagaacattgatttcagaatccacctcatcaggagcattgtttttttctttttgttgtcgttcagattcaatagtactactctcctccaaaggaacgactctgatatccttcggtgtgcacaatcctacactatcaactgactttgaattgggggatcagagtcagacatggctaatctccagtaattgaggtcaagagattctggtggtccagtagggactgtgatccattctgttcacaccagctcgcaatcaaacctttaacacagtaattgggagtcagggaaagatgtgggag

SEQ ID NO: 9610 - DNA, 554 bp, Arabidopsis thaliana columbia
caaccaccaccaggtcaacttgaaatgaagaaggcaatctggaaactacacacagcacctaaacttaaacacttcctttggagaatgcttacgaagacactggcgataggttcaactcttgtgacaaggcgaataatagatgatccgacgtgcaagcgatgttgtatggcagaggagacaccggatcacctcttttttggctgtcaccatgctcaagctatttggagaggtacacagatattccattctgctttctttgactccaacattactttagaagataaaatcaaggtgatcctgcaaagctgcaacaacaaaagataagatcctttaacaagacaaattcccttgtggactctatggagaatatggaaaagccgtaatctccttgtctatcaacaaagaagttgcgaatggagaaaagaggcccagcaagctgtaacggatgcatatgaatgggcggccaaggaactactgcaaacctaacaaccaaccgctcaacttacgaccccaactgcggctggacaaaaccggatgcgggctacatcaaatgc

SEQ ID NO: 9611 - DNA, 524 bp, Arabidopsis thaliana columbia
caaggaacttcaagacggaaacatgtccagcgctttagttgcacttactgctgaaactgcttctcttccaatgcctaagctcaagaatatcagccagttaaggacagaacaccgagtgtaagaatccatttttctctgtttttcttcgttcttaggttaaaaatgaaatcagaaacacatttttcaaaattattaaagcttgaacagagtagaatatttaagtgattgaccaagcatgaactcgtaagttggaaagcagacaaacttcccaataattacaggctatgccataacttgtttcttttcccgtatcttgcagttacgaacttccagacgagcatcctcttctagctcaggtatgtgagctaactggataaggacacatgccgtatagagtgctgtctatattgtaaaatctgactagctgtttgtgatttcttgtggcagttggaaaagagagaacctgatgatccatgttcttatttgcttgctatatggacgccaggtaatttaatgatttgcat

SEQ ID NO: 9612 - DNA, 633 bp, Arabidopsis thaliana columbia
tgaataatatgctgctgccttagccatataaacagaactggcaaggaaattatagccaaacagtagagaaacttttgttattactactggctttctttccttgtaccctatatgaggatgtgatgatataaattttatatatgtaccagaagcatacctcggtcatgtgcaatgtccatggtgttccaataaccagcttcccaccagaagaattttgtgacatacaccagcatcaggatggtgttcaccagcattgaatcagatactttgccatttatttcatactggttaaagaaagtacaggaatcacaaatcagaaagaggtgaagctctctaatgaaataaggacttaaagaaaccaccagactatgtcgtcagagtgtagtatttacataagaattatccagaaaatacctgttttatgcagtacgtgactgcaagaactgcccaagacatcattccgaatctgcaattagtaacaccttgatgtcaaagctcttaccaattcgagggtcaactccatgccctgcaaagcacgacgcgaaaacacagtgagaacagattgcccaaattggattgtgtaatgataagttggagcaaagagtcatggtgagagaagacctcacttgatat

SEQ ID NO: 9613 - DNA, 507 bp, Arabidopsis thaliana columbia
gaccaaggcagctccgttgcatggattttcatgtccagagatttctcacttgagctcgagtcatcgcagtttcctagagcaagacaatcccttttgcgtttattgctaccagcgagttgaacttccactgtatcaactgcatggtctggggaatgtgtagacaggtttagacaggtaccattcagctttttcaggtgggtgtgcccgttagctttagtcagaggaagaggtctctcagcctcaaattcggtgtttgggagattcctccatgaaccgtaatcactagcttcagctggaatagcaaagttcacatctcgacctgtgagttctgtccacttcttcttttcatcctcgctgagtacagaaaggttgggtgaataaacaacttcgattccatggaggcactgtgggttagagagaccacggtaatgtttcctctgcatcctatgagagcggacaaaacctttgtccacactaaaagggaaaggacgctcaccctcgcgtgag

SEQ ID NO: 9614 - DNA, 411 bp, Arabidopsis thaliana columbia
tctagtagcgtccgccagtgtgctctaaagaaccgcattctgtgccggaatatgtcgtggaaacgcccctaaataaacaccagcagtcattttgctcaccggctccaggcgacgacaaaaccaacgcatagacagccacatcccgatgcggcagggcaatgtcagccagtaaacggcgggcggtagtttcccctgactatctttccctgttgttatcgcgccaagcggaacgtacccacggccaattatgagtagcgataatactggtcaacataaccagactgaccagcataactgaatcatcatcattagctccatcagatatatgcacgagcccgcgcctacgacatagggcagtgctatcttgattcgacgttgatcaggtttctgataattccaacgacggtcgac

SEQ ID NO: 9615 - DNA, 518 bp, Arabidopsis thaliana columbia
gtattgttctctttcttgtggtataagtaatcatggttagggttttatcgcagattgggattttctgtttgccaccttctggtgttattcctcttcataaccatccagggatgacagtttttagtaagcttctctttggtacaatgcacatcaagtcatatgattgggtggttgatgctccaagtaagtttactttcgtcccaagaaaacttttgtgagctctgaaacttgtttgtcgttgttaccttgcagtgatttctggttggcttattagggttcattagatattcgactgtgcattgtgatagaagtaacaaaaggaaatcactttattaactttttatcttgaagatcaaatatcccaatttagctaaacattataggctcttgattggtaatacccgaaagtggtgaatgaagtgacatagtgtgatgaacttttttacgtgttgaattttcatgatttagaacattcatttatatactacccccgcagtgttaccaaacaaagcagtaat

SEQ ID NO: 9616 - DNA, 570 bp, Arabidopsis thaliana columbia
tgttatcacagcactttgtacatttgcagtgttttaggttccatcatcaccatgttcgttgaggaaccagcggttcaacgtctaacttgggcgataaatcaaagagggaagctggagcagtcatgtcgacgctccaagaatcatccatgttgatttccatggcgcattcttcttcgtcctcctcttcaatatgtaactccaaatcttcgggtgatgaacggatcctctcaagctcaactgaaacctctctcatatttggtcgtttcttcccttttagacttaaacaccttctggcaagtttcgccacagccaacacttgttccaacgtgcaaccttctttgatccgagaatcaacaatatcaagaactctgttctgtttcatagcctcattgaaatgagacacaagtcctctgttttcttcgggccgcattacagaaaacggcttttctccagttatgagctcaaccaagacgaccccaaaactataaacatcacttttatccgtaaactggctagtttgaaagtctctggatcaagtatcaaaagtactgcactagagtagtaagtgag

SEQ ID NO: 9617 - DNA, 367 bp, Arabidopsis thaliana columbia
  unsure (1)..(367): unsure at all n locations
nnnnnnnnnnnnnnnnnnnnnnctaaaggccggatgcctcgaaagataagctgaaaggttcgctgggtgagttgaagcaactttctggcttaagtggcgtggtaatgggctatacgccgaattaatacggtcttgcctgattgcgacgctggcgcgtcttatcaggcctacgcaggggtagaaccgtaggtcggataaggcgttttacgcgcatccgacacgcattgcccgatgccgcaaagcataaaaagtcgatgccgttgataatttttccagggcaattttaattgatgcccgggaaggaattccctaggcaaacgtttccttttccggtaagaatggccccgaacaggatgacagggcgtaa

SEQ ID NO: 9618 - DNA, 489 bp, Arabidopsis thaliana
tggtcatggtattgtattaaaaaggtacacggctgataaggggatgcaagtaacaattgcattcaaccatttcggagaagggcttgttcagaggatgccgcggtgtaggcacggttatatccacgtggtgaacaacgacttcacggcatgggaaatgtatgcaatcggcggaagtgctagccctacaattaatagtcagggtaaccgttacaccgcacctattgatcccaatgccaaagaggtataaattctacttacccgtctattatgtatcaaatcgatttcacaaaaaacttacataaccaagcattttacacataatgtttttgaatgtttactacttcaaagaaaacaagttcttgaattcaaatttttctcaaatttggtagaacttttaatgggaaagtttaaagctctcttaaaaacaggataagtatttgtgggatcggtgtgctctttctgacgtgtcatgcaatattggccacttgc

SEQ ID NO: 9619 - DNA, 742 bp, Arabidopsis thaliana
aagaatttgtaatagagattaaccaaattgaaaaggatatttaggcctaacataagataaaaaaaagaaggttaattggggctttaaattagtagaaatgatcagacagtactccccaagattccgattcagagtatgctcctatccaccgacaaatgtaatgactatcagaaacgaaataatcctttattttttataagtctaccaacttttttctaaaaaagaaagaagaataggaacgaaacaaggctcttttttttttcatatatttcgaaaataaaatcgaatttctgtcatgaataataaaaaaataggatgtctaattatttttcgtaatcgaaaaccacgatgggcttaaatactttttttttttaggagttttttattaaagggttaagttattactcaacaaatagaaattcaaatttgtaaaggggtgagatgaattccgaagcgcgttttttattcttagaatttgagcagacagaattccattggtataattcgggaccccagatatatttaatccattttagaacacatcatatccatctaaattataatctggtccttagatttatttatggcccccgaggagccgtatgaggccaagacctcatgtacggttctgaaatagcggtgaaaatagtaatgttctcgccgactaggattactaacagtttaagtacagttgatatagttgaggcacaatcaaaatatggtttttggggatggaatttgt

SEQ ID NO: 9620 - DNA, 225 bp, Arabidopsis thaliana columbia
tgctatgattgttttttctgtaatagtggttaaaactgaatcttaaagttaggtgtttttgtgaatctgcagagagtccatcagggatatctaagggagaatttgggtcgttttctgaaagcacgagactggaacgtatgcaaagctcacacaatggtatatgtctccaaaactcttatggtgtttgagtgactttaaaatgtctatcttgtctgattacaccgt

SEQ ID NO: 9621 - DNA, 587 bp, Arabidopsis thaliana columbia
tccccaagctctctatatttggagcattatttccatttctgatttgaaaatggacctcatgttgaccatttgttctaaatgatcgtttttgcgtagatgttgttgtgtcacctccatttgtctacatcgaccaggtcaaatcctcgttgacagaccgtattgacatatcaggtcagaactcttgggttgggaaaggtggagccttcactggtgaaatcaggttacgacttctctttttcacttatactatatctctttttatttgattgaaattttttgacgaaaatattagagcgttgcaactaatccctccttatgactttccggtgtaatatatgaaccttgtctgaatttcaaagttgcccgttttaccatacagcgtggaacagctcaaagaccttggctgcaagtgggtcattcttgggcattccgaacggagacatgtcatcggagaaaaagatgaggtcagtaaaataaaacactttataagcactggtgagctactaagaaagggttgtgaaacatatttgctctgttctcacaaaaccatagtttatcgggaagaaactgcatatgcattgagtgag

SEQ ID NO: 9622 - DNA, 401 bp, Arabidopsis thaliana columbia
  unsure (1)..(401): unsure at all n locations
atcgttagtggcaataatttccccctggaattcttagatttaacattgaagacgttaaatactataacaatgatacgtcgttacaaacataaacaaaagtctagatgtctgattctatgtcgatanagaagaaatcaaccgtgaatagatcaacagtgtagtgtataggttagattgatggataccaactttcaaactttgagccgaagttttacatagttgctctaacttttcaggagagcttgtagcctcattgccgtctgggacagattcagcacaaacaagcttcgtcctagaaaaacatacccagccaagtcgacaaggactaagtgaacgacgatctaaagggaactttacacatccagattcttgtcacttccttcacattgttccactgtcat

SEQ ID NO: 9623 - DNA, 413 bp, Arabidopsis thaliana columbia
  unsure (1)..(413): unsure at all n locations
attactgatacaaccataggagaaagttatcagagtagcgaggctactagatgcatccatatcgcactattatgtgttcaagaagatcctgcagatcgtccattgttaccagcgatcatcatgatgcttactagtagcacaaccactttacatgtgcctcgagcgcccggatttagcctaaacgggcgtgaactggaacaggatggtgtagagtataccgaatccacaagcaggtctattcctggttctatcaatgatgcatcgattacagagttctatcctcgttgaagaattgttatgaatctgtggaagtatatatcaacatctgttcattgttcttgtccctgctctataaaatgagatatataaagttataaataatntatatatagatgtgcttgtaatacatttac

SEQ ID NO: 9624 - DNA, 615 bp, Arabidopsis thaliana columbia
ggtgtaacagtccatggcactttacattttcctccactcctcgaacagatgtcattaacaaaaatatcctaagccaaagaaatgcttcaattaatgatcaaagaaatagttatttcagactattcaatttcgtaccttgggtctattatttccttcttttcttgctttgctgaattcctgaatgtctgaaagtgtaagtataccgagaaagatattgtcaggatcaacaatcaaggcgcaggattgtttctctatcagcatacgagttaatgcctcttccaaagaagtgctcatcataactgtcgcaaatcttgttcgcatggcttctgaaacaaaaatactcttcggcagctcctcagattggttgagagaatcatcaaggcaaagagaactttcaacttcacaaaggttattcgttgatgattcatcatcagatgacgtcagagactgtacagcttcttggctctttcttttcctagtttcttttgtttctctagtttcttgtccgcttgattgtccagatgctatccatgaagacatgcctacagctcccagtagaggtacactatacgataatcgtgtgtaagtcaaatagcagtagtcctcctgtaagag

SEQ ID NO: 9625 - DNA, 680 bp, Arabidopsis thaliana
cgagcgtcagattgtaaatcactcgatttcttgtggaacttcatgaagcctattaagggtactaacaatttcactcagacaaccgatgagctcgtctccttgctgtctcacagacttcaacttgtcgtccatactaacaccatcctttgtttcattatcctttgctagatttctcccgactatcgcatgtatcaagtcaattttataacttagcttcgcttccatcacttctacatcctcttctatgttcattgtttcatcttcttcttcatctgtggacatatcttccaccggcttcttctctcccatggttttgttctgatgggttgcttttgtagttataggtttctctcgagtgtttacttgaactcggctagtccgtggctcttctttctttgtctccttcatgaccattgttcgctgtcttgatctttttgatcctacaaaagctgaatttaaaaccagagtgattcaaatggttagcataagaagagtgtcagtgtgtcagagattctggactgatccgagtaactccaaatatagcagttcagagtttacctgaagatggtgactacaaaaagagcaatataatcatagtgtactcacggtagcaaagtgtctacatatatttcactataactacaccgacaattttcgtcatctgtacttgaagagtgaat

SEQ ID NO: 9626 - DNA, 769 bp, Arabidopsis thaliana
ctcatctgtctctcttcacctatcacagagatggcaaaactcttgtattacttctctatgacgatgatatattgctaacaggaagtgatcaaactctcttggatcaactgctcatatctctcaactcatgattttctattcaagatcttggtccacctaaatattttttgggagtggagattgaagctcacttagtaggtctatttctacatcaaacagcttatgccaaagatattttacatcaagcagccatgtctaattgcaactcgattacgactcctctgccacaacaaattggcaacctcgattcaaaacttttctctgagcctacttattttcaaggccttgccgggaagttacagtatttaaccataacaagacctgactcaatacgctgtcaattttgtgtatcaaagaatgcaggctcaaacaatatcttacttcggtctcctaaaaagaattcttaggtatttgaacgaaacaattcatatggggcttcatatctgaaaagattagaaccttgctctttcagcccatagcgatagtgactgacaagttacaaggagactcgacgctgcacgatagtttttgtagtttacttggtcccaatcttatatcctggtctgcaaaaagacaacaaaccggtgtcaaaatcaagtacaaaagcggagtatagagcacttaccgttgtcagtcaagaacttacatggctatctcccttctctgagatctttggttcgatgtgacaacttcagctgtgtcttgatgg

SEQ ID NO: 9627 - DNA, 529 bp, Arabidopsis thaliana columbia
  unsure (1)..(529): unsure at all n locations
tgagcacaaaaggcttcaccggttccctgagccaacttgtgtttctttcaggctgagagtcttctatcctctcaggagacgagttgaggttgattctgccactttgactcgaagaaccttcttgatcaaagctaaagaccacacctttttcctttgacagatcatggtgaacaattggaagagattccaatcgcagaactgttttttgagtaaaagggtccttttctgcttcactaactgattgaataactctatccactcttacagatcgttcttcagcatttgcgacccgaaggtattgacgcataccttctaacacttccggagcaattctcggccttcccgtgtttggatccactcccacctggctttctttcaacacaccaaataaagggtctgattccttcagaatcggaggagtagtagcttttggaatgataatgcctttccttctggctgtagctaggtcctgtctagcttttactaggatagggcnacatctttttcgtgcgtacgcgttgacactcat

SEQ ID NO: 9628 - DNA, 515 bp, Arabidopsis thaliana columbia
gtcaatataggaggcaagagatgtgatgatgaagaacctgtatataaaacaggaatattgagaaggtatttaagaatctcaaattcattaaatagaagattaattctttaaataaaagattataagagtctctttttataccgatttcattaacttctcgtaaaccgcttgttcttgagcaacgatggtcgcggaacatttaacgcaggcattaaatgttcgatctcccagggtgacactttattaggtctcgaaaatgatgcaaattcatcccactgcacctgcaagattaaatttattgcattcaaaaacgtattcctacgatgatgttttaaagtgtgaatgaaattttacttctaagttgcgccactctgaacacttccaatgaggagagaaatcactaactccaataattgtcccaaaatatcttaatcaatagaacaaaatgtgttatcatagataatattaaacattacaaatatatttcagtagaaaagagttttcatctaatgttc

SEQ ID NO: 9629 - DNA, 539 bp, Arabidopsis thaliana columbia
gttcgagagagacaagagaccaacgaaacgaactagagacagtttgattcgaaaatcttgtcggaaaatggaggatatcgtcgaccaagaattaagcaattactgggaacctagctccttcctccaaaacgaagacttcgaatacgacaggttctttctttcgtcctttttttttccttactttgctttccatcttgagattttgatatttgtttctttaaaaaaaaagaagctggcctttggaagaagccatttctgggtcgtatgattcgagttcgccggatggagctgcttcgtcgccggcttctaagaatattgtgtcggagagaaacagaagacagaaacttaaccagagactcttcgctcttcgatcagttgttcccaatatcactaaggtttctctttttccccttgttttttgtcttctaattccaggattcaaacttattatagactgtgtttttgttttctgatagatggataaagcctcaataatcaaagatgctattaggttacatgaaggattcaatatgaagaaa

SEQ ID NO: 9630 - DNA, 586 bp, Arabidopsis thaliana columbia
ttttaagccttacagaatcaaatacacgaaaccagaaactgaaacaacacacaacaaaagcttgaaggtaaaaatgcaacattgcatcaagttcttattcataaaacaaagaagataaaaggaaagaccttttttttagcccacactattcattcattaacaggtgatgatgatcgagagtgttccttagatcccaaaagatgtttacttggtttcagagaagaaacaagataatatctttaagaacgataatctggaacaatcccaaagacatcacaatcaaattccttgtcatttcttggtgaacataatccgccaaaatctcttccattccttcatgtatgtgaaagactacagggattttgcgtaagacagagccattagtgtaacctcgagaagacgattgacgcgagaatttggctgccttgttgagttcagattgcccaattgaagacgaaatcgagcgatcggtgacgagattggttgaatctggtttcagtttctgggcttgtgcgaaggggattgaagagaggtctcttcccagtgggtttctcacggcggcggtggcggatgcggaggagatgtg

SEQ ID NO: 9631 - DNA, 426 bp, Arabidopsis thaliana columbia
ggcatggttacagtttttttacctaagtgctttccactgattgtgtgtcgaattcagaacattcggcgacctcaaagagatttacttagtgagcccctctacgagaaagatatcgagtcaatagcaggggaatatgattatgcttctgatctaccacataactctagatcggtgattaagaatgttggttcaaggattactgatgacggatgtgagaaacaatggtacggagctacgaacagggatcctgatctgatttctgaccaaagggatgggttacattccaaaagcagaacttccaactatgctacggctagagtagaaaatttggaatcaagtggtcccagtagaaatataggtgtgccttatgatagttggaaaaactctgaggaagaagagtttatgtgggatatgcactcaaggtta

SEQ ID NO: 9632 - DNA, 452 bp, Arabidopsis thaliana columbia
tcacttatctttctccacacgtatcatcaactccgctcttcatgtggctaactacacagtgccaagattctatccaggacacgagaagaaggccaagaagtcggggacaggccttgcccattaacaaccagacggttattcaagcggtcttacctaatggctcggcgatttttcatcgtggacttgaagatgcaggtgaaatacaaagtcacgtcctggacaacaaagaggtccaaatcacaggctagtgtgaatcttgaagtcaacgaggatggagcctctaaagtcaaggacggagcggatgggactaggatgctgatctcagattcgtctctctacaacgactaacatttttccaagtttgcttatcgattatttgtgctttgatcgattggctcatcttcttggctatccgttacatgacgatgagagtgcatttcattttccatagg

SEQ ID NO: 9633 - DNA, 452 bp, Arabidopsis thaliana columbia
  unsure (1)..(452): unsure at all n locations
aaaaatcaaaaaaaatataaaaagcaaaaaaaacatcatgataaaaaaaatccccctctagaatcacactatccttagtgtttaaagtcggaacatgttgaatatgcagctgtcaatcatgtctgaaagtgatggcatgagcagtggcatactcctttggattctcgtttgcttttcctagaagctgtcatgggtttttgttancagatggtgaagcgaggatgccttccacgtatctcatcctagtgcctagtgattcacacttgctgttacgttcgacgccttgtcggtcgactttgttgtttgccttagctcgctaacacgcgaatttcatagcctcaagtgacttgtccttgaatgagctgctagagaatcgtccgtatgtctgacttctgaggcgcagttgcttattattgttgtggtgtgacctcggtggtggctgctgttgttga

SEQ ID NO: 9634 - DNA, 915 bp, Arabidopsis thaliana
gatatgattcaaagttgtgtaaatgaagacaccattatcgtcccaagctccacttttcacacgtatcgtctcatgaagcgtgcactggagaacaagttttttgctcgcgataatgatagtatgtttgctgagcaaagcaacactctccatatcactggaccaaacaacgtacctaacaaatggtgtctgaagctcaccaagaacaagcctttgctggaggtcaaagataactactttatcctcagatctacaaagcaaattcccagtcccagcataaaagatagcatctgtgggaataggcagaggactctttttaaccacctcattctttagattcttgactagcacttggctggtgcttttctcgagaacagcaaatcggttacgggcaatgaatactgcagagccacctgtccctctctttgcatcttgcacaacgtcactcctgccaacactatctttcggtatgatgtacaactcatacgaaccaccatccagatctgagcagatcaaaactgcattttcagtgggactgtatgatagagtcctaggactttgattcaagcttggagtacccggacgccgtatagggataacttgggaatccctttgagttgaatattcatagtaccgcaagaatctatccttggcatagaacaaagaatccccactcaaagcaaatgcaggacgttctctctcaagcttgaacacaatcatgccactgtcatgtcctgctgctagtagattcatctcagggtgaactgcaagaatccagaatctatcatgttcacgacggaaagtctgaagtccagttcgcttggtagcatccagacacggatgctcttatcttcagagtttgatacaattatgtcctgttttgcatggaacataacagatgaaacgttattcatatgg

SEQ ID NO: 9635 - DNA, 311 bp, Arabidopsis thaliana columbia
agtggcagagaccttgctaatataatctcaatgcatcatgtactttaacttttgacctggatgtataaaccaggtacagttgagaccattgaatctgaggaagaagggactcgtcacttcatggtgaatgtcattgagccacagtttaatcttcactcagaagaagctaatgtaagtaattattgccgcgtaagaatgcacgtttaacacctattacttatattagagcgtggtaacactatcagtcttggctgaataagtttaccttacttgcattcaaactttagactagtcatatattcaagcagtgt

SEQ ID NO: 9636 - DNA, 542 bp, Arabidopsis thaliana
caagcctttgttgaaggtcaaatataaccactttatcctcagatctacaaagcaaatttccagtcccagcataaaagatagcatctgtgggaataggtaaagaactctttttaaccacctcattctttagattcttcactaacacctggctggtgcttttctccagaacagcaaaccgatttcgagcaatgaacaccgcagaaccccctgtccccctctttgcatcttgtacaacatcactcctgccaacgctatctttcggtatgatgtacaactcgtaagaaccaccatccagatctgagcagattaagactgcattttctgtcggactgtaggataaagtcctcggactttgattcaagcttggggtaccaggacgccgtataggaataacttgggaatctttttgagttgaatattcatagtaccgcagaaatctatctttggcatagaataacgaatcaccactcaaagcaaatgcaggacgttctctctcaagtttgaaaacaatcataccattgtcatgtcctgctgcaagtaga

SEQ ID NO: 9637 - DNA, 551 bp, Arabidopsis thaliana
taccctaaacctttcttgacacacaagtgataataaatctatgcttctaaatctaccgacaacaacactgttgttctgccttaaagccttttatcttctatttttaatttttaaaaattagtttcacatcaacataattttttttttttttttttcacattaacataacaaattttgcttaaattgcctaaaaagatatcaattttgattctgacattaatctaatcgaaattttctctgagtcaaagaaaatgaggagattgagacaaaacctcaggtgtgaaaatctcaggtaaagaatgagaacggagttcgtcggcaacgacggtccaatcaccggttccatgacggagaacagcgccgccgagaagaagctcctcccatgttccccaatcactctccattgtcgtcgtcatcatcaccataaccatcaaaaataataatcacgcgtgtgccttacgcgctcctcgattttgaaaaagaaaaagaaacccaaaacttaacttacgcccccaagcgcatgttagcgctttcccctaatttcccttttt

SEQ ID NO: 9638 - DNA, 514 bp, Arabidopsis thaliana columbia
ggtgtcagtgaaagtggcctcgggaaccttatcagggcaacatacagcctgctaggtttgcagacatatttcacttctggtgaaaaggtgaagaagatatagaaacacaaaaacttgttgtagaacatatacataaactctaacatgttcattctttatggcaggaaacaagagcatggacaatacacgctggttagtttccagtcagtagggttctcaaaatgcgttatattttttggaaatgtgtagtaattcggtggaaatttatgtggatacaggcatgactgcaccacaagctgctggcgtcattcattctgactttgagaaaggttttattagagctgagactgtaagcatttttttgtctcttaatgaatcaccctattctgaacatgagccatggtcatgataattggaaattgaaagcttcaaacttatggtttaagtctttctttcatatgaatccagacatgatttcaatcggtttaattgttcaggttgcatatgaaggttt

SEQ ID NO: 9639 - DNA, 529 bp, Arabidopsis thaliana columbia
gtctatcggaaccaattattgtcaacggtaagaacaatcttaccagcctgactgttcttgaaactgttccttattggtccttcatttgctcccatcttcttcaccttttggactattaccgtgtaagctccttcttctgttggcacaaactcttccttgtaattcacttcccatcccaaaaccggtaggtcccataccattgtaccttcagtctatgaaaccacccccaaaccaaaaacccttatttggaaggttggggttaacaacttcagggataaggtagggtttggttttctaattatacctcaggagctgggatttcgatggtttcagatgatccaggcttaacaacaacttcagagacagtttcgttggagaattcggtatcgtctactgttttgaacccaccgtactgaactgggagctcatcagctggaatgtatctgagaagagtctctctgaccttatcgggacgagccacaacaaagttgctcttggttcgttgagttatgaatggcgagaggacagc

SEQ ID NO: 9640 - DNA, 589 bp, Arabidopsis thaliana columbia
tacggtttatttagcgggtgtgccaagttcattgtctcaggagataaaggacagataccattttgatgttggtcatctaccagtcagatacctaggtctaccattggttaccaaaagacttacatcaacggattacaggtcattactagaacaaataaagaagaaaattggatcctggaccgctcgctacctctcttatgctggtcgtttgagcttaataacttcagtattgtggagtacctgcaacttctggctctctgctttccgtcttcctcgaggttgtatcaaagagattgagaaactatgttctgcatttttatggtcaggtcctgatttgaatccgcataaagctaagctcagttgggttgatgtctgtaaaccgaagcaggaaggaggacttggtcttcggcccttgaaagaaataaatgatgtctgctgcctaaaactaatctggagacttgtgtctcatgcaaactctctatgggttcaatggatagaaaaatatctactcaaagctgataccttctggtccgttaaagcccaactaataggggctcttggatgtggcaaagcttataaatacagagat

SEQ ID NO: 9641 - DNA, 486 bp, Arabidopsis thaliana columbia
cgaaactgattcattctttcaggttttggaacttttgggatgagaacaactaatgcatcattcgtttgtggcggtagaattccagaggaaaagaaatctaacgcgaaccgaatcactgagttaccaacaacctcccaacaactctgataaaaaattggttgatacccatcgggaccaggtgctttatacttccccatacttctaatcgctacctcaacttcagtggctaaaaacggtttattcagagacaacacttcctctcttgtgagccgctccaacccgtcttgtggtagaggattcacgacttgaagaacgtcatccatagaatacagccgctgataatactgcaccgccagcgcttccaactctttagcatcaaaaatcaatgtaccctcttcattatgtaacctctcaacacggttctgtctgcgacgaataatagttgtggtatggaaataatttgtatttcgatcccaagcgcaatca

SEQ ID NO: 9642 - DNA, 947 bp, Arabidopsis thaliana
aatctaccttgacgaggttttgatgggactctagcatggataagaaaaacatgtgttgggtttcttggcaaaacctgactaaatctaaaggagaaggtggattaggattcagggacttacaacaattcaatgaggcgctgttggcgaaactgagttggagaatcctcaccaaaccaacctgccttctagctagacttctactgggcaagtactgccatacctcaacttttttagaaagtacaccaccggcgtcgtcgtctcacgggtggagaggtatttgtattggaaaagagctgcttaagaagaaactgggtaaagttattggcagtggcaaacagactttgttgtggcatgaaccatggctctctctagagtctcctagtaccccaatgggaccacccacggagatatcccacaactggactgtgtcaaacctcatctcaacatcgaccggtgattgggacagaacaaaaatacagcaaaccctcccagagtttgagaatgaaattctggagatccgtcttagtagacttggagctaaggacacctttgcgtggctccctgcgaaaaatggttcctactcagccagctccggctactatgaaagcatagcaaacgtagcggcactttccatcactaatctgcccgttgttgatttcaaatggacaacaaagatttggaaagtcaatacctcaccaaagactaagttcttcatgtggaaagcaatgagaggtgccttaccagtgggtgaaaacttgcgagctcgacagatcctcgaagaagccagttgtcctttcggcggagaggaggaaacaacctttcatctcttcttcacctgtcgatttgcaacggaagtctggctcgcagcaccttttaaacagaacatcaattctagtctcttctcatccctcaaagacctgttcgagaaagctaaacggggatcctct

SEQ ID NO: 9643 - DNA, 519 bp, Arabidopsis thaliana columbia
atcctttgccagtccaaagtcagagagtttagcattgtaaccctgcacaagcattacatacacctttcaggggaaacataggcggacaaatagaaaaaccaagtcatttcactacctttgtagacactatctattgaagaagaagaattaaaaacatatgtaatctcaaaacagaagaggcaatagctgacctcatcaagcaatatatttgctgtcttcagatcccggtatatgatggagcgttcagcaccatgaagaaatgcaagacccttggctgcgtctagcgaatcttcattctttttgtccatgtcaaagtgcatccaactcctgtcaagtgaattcgaaaagacgacacatttcgtcactactccttctttataatatgggaacatatgcttgatcaattcctcttcaagatacttataatgacactaagaactaatctgtataaaccatccatacgttccacctttagtcacgtatatgcgatgaatatgaaataaacttacttcggaaaag

SEQ ID NO: 9644 - DNA, 519 bp, Arabidopsis thaliana columbia
gttcaatgatgtaagcactttaggattcatcaacttcacagcccatacagtttcatcagcctcagcaatttgtaatgcttcttgcagaaaattaaccaactctggagtcacttttagaagggggggcctcagagccaaacagaaattcagagctgcaactgttccaacctgtatgtagatataataaggtaaacattaaagacaaagaggaagacaagatcggagagagatacacaaaagaaaaatagcactgcgacgcacctgttgatcaactgtctttgatcggagtggacgcattataagtggctgtagtaatagttggtataaaggctcaagcaactcagttacctcacttccagttcggctagccaaaagtgcaaggcagttctgcacatttttcctcacgggatggatgcgttaggattgaataactctgtggcaagatattctacaacatcttgaaagctttttctacgcgcttcactgtttgcttcgtcaacatgtataaccacacgtaga

SEQ ID NO: 9645 - DNA, 518 bp, Arabidopsis thaliana columbia
gtttccatttaatatcttttgattttgttgtttgttaggaacgacaagggcgatctattgaatgcatcttactatcacattgtgaacccgctgttcaacactgcggttggagccgaagtgagccacaagttatctagcaaggacagcaccataactgttggaacacagcactcgcttgaccccttgacctctgtgaaggctcgtgtcaatagtgcgggtattgcaagtgctctcattcaacacgagtggaaacccaagtcattcttcacaatctctggagaagtcgacacaaagtcaattgacaagagtgctaaagttggattggctctcgcactcaagccttgaaactgagatggaagaagaagttgcaatagtttttttaaactagtttctttctacgtactctgttttttctctgcttggttcatggtttgagtgggaactactgatctttcccattttcctgccggatttgtagacgactaaaaaggttgaaaatgatcatcttgagatggtga

SEQ ID NO: 9646 - DNA, 476 bp, Arabidopsis thaliana columbia
tcttcttcttaactggctgagacgacgctgaaggtttattagctggctgagactccggaaccttggttgcgatagatgtgtgaccattttccgtagtagcagcagtcttgctttcattgcctccacaaagagtcgtcttctccacaattggaagcttttccatgatattcagtagaggcatgcatgcgacacccccatcgctcatggaaacccaatccaatttctctctagcccaaacttccctaactctcccctttcccagggaaatcaatactcatactttgccaccgccaatttggtcacccgccggagtaaattaaacaacctgaaacaccgaaaacacaatcagtgacaaaacaaaatgtagggttttcttcacccgacgcaggagaaaatctcaaaaccctacaagacccaaattgatgaaattagaagagacgaagagacgcgaaaacaaacgaattgacagagaaatt

SEQ ID NO: 9647 - DNA, 1507 bp, Arabidopsis thaliana
accaaacagtaaagctcgaaaatgtcagacccattgacattcaatctaaagatcatactaatacaaaagcatatcggcactaaaggaaggaatacatgtagacatgcaataggtttaatctcccctttctaacttgtttccattgcctctttgtggtacttgtccaattcagcatcaagatcctctgcagatacgttttcatcacgtcctcttccaccactgccacgaccaccacgtcctctagctcccctgccacctctgaaattaccaccgccaaaaccaccaccacgaggacgccccataaaaccgcctcttcctctgcctctgtggcataacaggttatccaaaatatttaataggagtacaaggttcgtgtaatctacctatcaggatatacttggcctaaccaaaaaagcatttcgtcaatatactaactcaagaacaaaacataggccatcttaacagaagaacaaaacataagtatttcatcaagatactaactgacttagcaatagattgatagaccctagcaaatgatactatgaagtttccatattgaacaaagtgtggaaacaagacaaacctgaagtttccattgaagttgccattgaaattgccattaaagttctcattaaagttgccaagtatcccattagtaggaaaaggaatctgagctgtagcaagaatgggaagagctggagcagaaagattagtcccaacaatctctatcttcatcagttttccatccaactgaacattgttgtaacgcttgacagctgccaatgcatccccacgcctcgagaaaacaacttcagcagtcccctgaaagcatcattaagtttaatcatgacaagacgattcaataaacaaatctctgaagcacaataaagcttatcaagtaagtacctttgatcttccactcctatcatagtgaatcccatatcgcttaagatcaccaacctcagagaaaagctcctacaagcaaaaccatctcaagatcagaaacaaaaccacaatttttctcataagtaagactggaactataataaacttctaaagcacaaaccttgatatcttcgttggagacaccatagtctaagtttgaaatgtaaagcttagttccagtctcgatagacgagccaccaccaacaacagcagtctgatgatgcccaaaagccgccgccacagacgcatcagtcgcgaagacgtcgttttgccacatcgcatcatgagcttgttgttgttgaatcggctgttttattcgtcaaagaagaaacgaaaacagatctcagctttttttgatttcacaaaaaccctaaaaggaattctctgattcttgaaggaagagaaggtaaagggagagatataaaatcaatgggctgacccttgaatacggcgccgttctggctcctacgcggttagcaaaccgacgagacggaccggaattagaaccggaaccaccgcgaccaccggtgttattgccaccgtccagatgcctcctcggccg

SEQ ID NO: 9648 - DNA, 485 bp, Arabidopsis thaliana columbia
tattacgctcatgtaatagtaacattttcatcaatgtgatatatagtaaacgtttttttgtttcttggggttttaggtcgaatggaagaaggtaactcgattgtgccacaccaaacaacttctaacggtgaacggacaatatccaggaccgaccgtggcagtacacgaaggtgacatcgtagaaatcaaagtgactaaccggattgctcacaatacaactattcattggtaacactcgtgcatgcataattcaaccacttttaacatcttgttttagttctttctgtgagtttatttatcgtttttatatttttgggggtttgtgagcaggcatgggttaaggcaataccggaccggttgggctgatggaccggcttacataacgcaatgtccgataagatcgaaacaatcatatacatatagattcaaagtggaggatcaaagaggcacactcctttggcatgctcatcactcatggcaacgag

SEQ ID NO: 9649 - DNA, 522 bp, Arabidopsis thaliana columbia
tctaattaattacataataattaatgagcggatttattggccggacccaaattacggcttctcaaccagaaaggtcgccggcaaatcacacgtagcactttttaacgtaaatttgaaacaaagatattgacaattattacttttaaatatcattagaaagtgacagtaaattatacataagaaaagccacactgcattatccgttacacttacggaatgagtgaactttctccctaaaaaaaactataccaaaatatcaaattctgatattaaaaaaaatatacatttgcccaacaatcacttgtaaataatgaccaaaaaaacatacttattacactttaacttttttttaaaaacagactatcgttcctcgggttcacggtcgtgaaacgatagccggaaaacccaattagagactttcatcttccttagattctttagtctttgatgtcactttgacttcttctagtaggcgacggtccatcaacgaacctcttcaatctatccaacgctacctttaat

SEQ ID NO: 9650 - DNA, 746 bp, Arabidopsis thaliana
cggtgttaaagccatgctccgataacccaatcgccgccctaagaccagcaccaccagctcccaccacaaccgcatcataagtgtgatccactatcgtataagaggatctcgtatcggtctactcaacagataaccaaaataaacaccacaaaacaaatcgatcaaaattttccccgattttcaacaatttgctcgactactaacgcatttgaatggcggataaaactatgattcgtgaattacataagatcgaattagaaaataaacaaaacggaaggagaaggaagagagatcatacagaaccagtggagaagaatctggaaaagcgagatccagagacgccatcaaagagtgaagaggtctttgaagcaggagctcgaaagccacgagagacgcagcgccacatcgtcttgttgttgattccacaagcgagtcagtttcttcgatgcaaatctccgtagaagaaatgagagaatacgaatttcgcgtagaggaggtttcctttaagaggaagacgcgaacggagtgagagatagccaccgaggcgcttaaaataagaaaaatggaaaacgatgatgacttctcttaaattcccttaattacccctattctcactccatatttactcctaaaccgggtttgctttactaactaaaaccccctaagattagctcttgtaatggtcaaattgtcaataataccccactgcatacttttacccaaatgtttggtgcctgccccattca

SEQ ID NO: 9651 - DNA, 630 bp, Arabidopsis thaliana columbia
cataggcatagcttttcttccacagcttaagctaaaacgtaacctgcttcattacgcacatgtagcttgtgatctcggatggattgcgaattttgtttacttctacagcattctgcggtcctgtggacatttacataaacacgtcgacatgcatattcaaaatatctgaaaggcaacgaaaatttgctcagctttattgctacagtcattgaattatgtgcttttttccatcgtcaatgtaggctaacctactagaagaagtcctctgtttctcacctagtctggagaaaaacgaacgagcaactatgagaaaatgccttgcaacgattagagactcaaaggtgcgcactataattgtgatctggatgtttcgtagccagcaaattctcatctagtgatatgacttaacagacttatgcttgaatctaaaactatttttggctggcataggaatgggatgttgtagtatctgcttcactacgtattgaggttctatcgtctataaggcaggtggcttcaaagttgtcatcactaccaggccgatgtggtattgaagaagaaacttattactggactgctatctacatttgaacattagactctatgagaaactatatctggtgtatttga

SEQ ID NO: 9652 - DNA, 422 bp, Arabidopsis thaliana columbia
gatcccagtggttggtcacattcggttgtgttaaaattttattagttttttaaggcagccatatttgtctaataggacctatgataaacaatataacaataaaatacttcccactttcatatatcttataaattccgtgtctcttatatatataggattaggttttgaaataaacttattgccacaactaagaagagataacaaaaagaatagataaagagaaatcgtaaaaaaaaatataaaacaaaacttttggagtattcccaatcttccatgtattcatctccaagttcttggagctcatcacaagaatccctcttatggaacgcgatagggctcttggactcaatcatctgaacctcaagccttcttttgccctaattatgattacctccgatgactttttctcatttgagtcaccg

SEQ ID NO: 9653 - DNA, 574 bp, Arabidopsis thaliana columbia
gatcagaaacaagccagttttgagtatcttcagtaggaggtcccattggagcctgaggtgagattagtgatagctagggggaacgccagataggtgtagagaggccagagcaatgagacgtccctggttaggtttaagcaagtccctgccaagacaaatgctgcgccatccatgggatgctgagtttggaacctaacaatccgtaaagctggagaagttgcagtactttccaaggagcactttggctagcaggcatgtgggattaaggggaagtctccaactgatttttgctaataaagcagtattaaaggtttgtatatccatgaaccctaatcctccctctttaaaagattttgtcattttgctccatgctacccaacacatattcttcttctcagcttttgtatccaccaaaatcttgtaagcgcagattggattctcttacacagattatttgggatcttgaaacaggacatggtatatgaaggcatagcagaaaggacggatttgagcatggtgagcttccagcagtagagcttccagcagtagaaaggacctagtagacgactgagag

SEQ ID NO: 9654 - DNA, 524 bp, Arabidopsis thaliana columbia
ccggtttctatcgaacatccaaagtctcatcatcatccagttatcttcttgaaagaacccgcaaagccgggtagctgcagatgcggaatttgcaagggctataatggtggatgttcttatgcatgtcttgaatgtgaagtccactttcatgtcgagtgtgtcaatctttcccaagaggtgaatcatccttctcatcctcaacattctctcaagttacttgaatatgaatcactaacaagtgatgctgaagagacatgtcttttatgtggagaacgaccagacaaagtgctttatcgctgctcgatatgcaacttcagcgtatgtcgattctgtacaaaagatccaccaccacttgctatcgagcatcataagacgcacgagcatcgacttgtcctcttatcaagactcatctcatttgaatgtaatgcttgtgggatgcaaggtgatcgaagtccttacatgtgtgttcaatgcgggtttgttgtccatagaacttgtattgacttaccacgtgtcataacatc

SEQ ID NO: 9655 - DNA, 432 bp, Arabidopsis thaliana columbia
tcccgacggtacaatccaccgtccgacacttcccacgcgattcctcacagtgacggagaagcaatcctctaaaaacattcacaatcccggcgcgtggagctccagcgaaacagaacaacgtctcacgacgtcgattccgaacaaaatcttgccaattcacgacgtcggaatccgatctagggtggaatccggtagggtacggtacaccgacgtcaaaatgatcccaagagttacgctcaataaggaggcgcgtaatgttacgcataccagggatataaatacagttagatccccaatcatcgtctttagacctgcgcaaatcccatgtgatgcgtcccatagtaatgacatgatcccaaccgttggatctattccaattaggttgatttttgacccactgtgtcatcatcttacaatgacggtcacgatcag

SEQ ID NO: 9656 - DNA, 943 bp, Arabidopsis thaliana
gttcttgcataagatactttatacttctgacgagccagttgaagaaatttgagaactgaaacaaaaagtttataattctattgaaatgaccattgcgtgggaaacatgggacagccaacatactaaataactatgattttcagtgtcaaaagaactgcacgcctctgtacctgttggacaacagaagatagtaccatcataaaccgttgcacttgtacaagtagcagaccagtattttcagtggcttcattaaggagcatctcatccaaaccaatgccttggtaccgtgcacgccacctccgatagacctcttaattcacctatcctgaatccgataatttctgctgcaggctgaaaaagaaagcttaattcgtgacaaaactctatctaaaaagtattagctgtataaataaacgctacttagtctaaaaactataactccattttcaggaatgtaaagaatactgtacctgaagatggtcaaggacaacctgctgaagctcttttcctgtaccacatactgactttaaaacacgcttcacaccctactgaacaagagaactacttagtggaatatgataaaactagtaccctgaagaagatcaaacaagtaaagcttaccacttcgccaagagagttaactaaaaactgattaagcgctgggcttattcgtgcaccacccaaaaggctaagaaattcttcttgaagagatgattccagtcctagtagaaaagcaacaaagccctgtaaatctataagcaattaagcataagagaaaaacctcaaccaacaaactgatagtgacaaataccattatcaatgatcaaggtggaaagagaatgaaacttttcatgaaaagttttcattgcatccgcccattgtttgttcataactgacagggatgctcgaataacctcggtcaaatcttcaatgttagaagctt

SEQ ID NO: 9657 - DNA, 524 bp, Arabidopsis thaliana columbia
ctgacacgaaaactgagctaagtggaatgttaaaggcggatgagcaacttgagcgacctttgtatgcaatccttgacccatctccacaccaccatgagtcactaaaacagtcccgtcagtgtaaacatgaacaagagctccggcctgtaacatccccataatgtggagggaaaaataaaagataagtattttaaaatttagattctagctttgcaagcaatggtagtgcattggcgaaatttccatggcagattttctcttattgttccagtttctcgacagataactaacttgaaagaaaaaggatccatgtcaaccaaagataacctgattcatgaactttgtggtaaatgatatgccaaattttgtgggaaccatagctacaccacgctttttccaccgattatgactattaaattcgtcagcttctctgcgggcctttaagaagttgcacgatactttcagctctttccagagctgatgcaatgtgcagctctgaagagtctgacagtaatgggtgactg

SEQ ID NO: 9658 - DNA, 604 bp, Arabidopsis thaliana
ttcgccctttagagctgtcttctactttactttcttttctaattctaccgctaagttagagatatgtcacgaaattgatttgttaaccgaatcaaaccgttacgcggttcttgattttcttcccggtttagtgtttctttgcacaaaattaaattagttacgaatgtcggatcaatgaatcttcatctatggagaactctccgagctgtttctctgaatggacacgtggagctcacaaacccgtctaccaaatgtaaatacgttttcagctcatgacacgtggccacattgatgctgctcaagtgcggcgagtcacggctactcagccgaagctccttaccgatttcagcgtaaacccacggcgtctcctccacgcgtctctgtatccagctcggcattatcgacgctgtcatcttaacgttatcttgctctctgttttctaaaacaactccaggaactttggtgatgacgtcgtcggagttcacgattcttagaaccttcgtgccttgcttctcaaggagtttccgaaagcatctgtttccgacacgtggacctccgaaagatattacggtaaccataggcgcacgtttaaacgtcgttttga

SEQ ID NO: 9659 - DNA, 839 bp, Arabidopsis thaliana
aggataacatcagaaattaattaaacattcgtcagaaaccatcatttagacaagatgattgaaccccaagctgaaacaaatgacacgattggttttagtcttttagagccgagtcatcgtacgatcaagcacatcatcgcaagctaataatttacaaagttaaatttaatcataaatatttgcttctatgtttttatcttttttgctatggaaccagttttatttttgtaaaacctaaccatttcacttgtgatgatttttacattttagcaaaaaaaaaacatgaaaactaaattcacgtaacaaacgatatatttatttcacacaagacatacattgatacattgatctcctaatgaataaaaggtgggcgaatctacttcgctaggatacattttttttttttccttttttcttgaaggtttatttaacattttttaattgccaacaatatttaaaacatccatgcactgacagtttacattatcttacgccttgagcttacgttaacgatgagtggacaagccatctcacacgagagcctcaaaacctccgagagatctggagggttagcttcgacgctaggaagccactcaaactcatgcaagagcgttgcaacccaaaacgacaccgttgtaagtcccaaattctttccagggcaaaccctcttacccgacccgaacggtgccaacctcagatccgacccgaaaacagagaactcagcttcaccctctttagccacgaacctctcaggcttaaactctaaaggatcctcccacacgtgtgggtcacgtgctatagcccacatgttgaccatcgcggtggtcccagccggcacg

SEQ ID NO: 9660 - DNA, 573 bp, Arabidopsis thaliana columbia
tgaagtcttttatcattgctccgcttgtaactttagcttagatctccaatgtgtttttcatccaccaaaacaaaatcctcacgacctaaacatccatgaccatccactcactcttatgccaaaatccatctcttttacctgtaccacttgcgggctaaatggagatcggagcccatacgtatgtcttccttgcgattttacaagccacaatgattgctctggatatccatgggtcataaacatcaaccgccatgatcatcgtgtttctcgcacttcccttattggtgtggtgaattcagtatgtggaatttgtcgcaagaaaatggattggagttgtgggggttattcttgtcagaagtgttcgagctatgtgtttcataccaaatgcgctactagagaagatgtttgggacggcaaagaaatgaaagacgaacctgaagaagaggaagctattcaaccattcacgataatcgatgaaaacacaataaaacatgtcagccataaagagcataacctaagacttgacaagtctggtatttttattgaggagaggatttgtgaggcatgtgttta

SEQ ID NO: 9661 - DNA, 894 bp, Arabidopsis thaliana
gtcgacctagactctagacgatcaagcagcaatcagagacttctcagaggccgaatcaggcacattttctgcgtaaagtcttctcatacgtctggtggattctgtcagttgaacagaatcgaatgaagtggtctgccttgccggtgggtcctaaaaggcgcatccataaccataagtggcttcaaaagcgtcaaggaagcctcactgatggtaggatatgctgtctgagttgctgcttggagaccagaaaatactgagtccgaaaacatgccagcagttacagtagctgcaagaccccatttagcactttttttctcggaagaaagattaggtggagatgcagccttggtagatgcttgctcccttcttttccgtggtgaatatccaccaagttcacttttggaagcactataccgtctagacttgttacttacagtgcttgtcactttgtcttcattatcattacaatgatgttttcccgactatctttgacaacattttccgatcgctcctcatggtttctcttatgacgcgatgtagccttttcagcccttggtaagggggatgaccttttctgtctgtcctgcccatgatctcgacttcttgatctccttcttttctctctcaagtcgcgttgacgtgattttggttgttcccttctctcccatcgctctgaaacttcaacactgtgcacttttcctggatcatgcctctttgacatatttatctccctattcttcttatgatttccattttgattctttctcttgtctccattgtcaggttttatactactttcatctcgaggtacgtctgccacaactagacttctaagacgctttttactacaaagcccatctctagctgtcattgtatttgtttcagttgtaggga

SEQ ID NO: 9662 - DNA, 578 bp, Arabidopsis thaliana columbia
ttcaaaaaaaggatgggtaaaattacaacattgttctacaacttaatgcataattttttccataagctaatcaatccacacattagattaggttctgtcttgaagcaaaccaaaactgaagtccatcttcatatgtgagtcttcctccacaccggattgtactcagtttgttgcgcatatttttgtctatcatcttaaccagcttccccaccggagatggttgttcaccatgtcttcttgcattcctttcaccccacaccgaatggatagtgttttggaacacatgtttgatgatgaagtttcttgttttatctgaatccctttcgcaaacgtaatttagaatgtccttccagtccaatgagaacctgtgctgaagaattggctttgctatatcctcccatacctttcttgagtaagtgcaaacgaaaaagagatggtctctagtttccattggctcgtcacagagactacaacttgtgttcacgtgttgattcccaaaaccattctgtctcctgttgccattctgttttttgaaactagcgatgtgatgacagagtatttgggtgtggaatgagaga

SEQ ID NO: 9663 - DNA, 597 bp, Arabidopsis thaliana columbia
ccaaaacctctagttgctctagactcgtcacgtcatcaagaatgataagaaccctctggtcgtgtagcctttcttgtatcgcacctaaatggcgtatcctaatgtccttttcgttcaaaacttgtgagagaagttgctcttgtaaactcaatttcgaactatactctagagaactatgggggttgctttggctaataaggttttccataaaacaactaagatgaaaactgctagagagtaggttatgtaaggctctggcaatggtactcttaccaatgcctgcaggaccggagatcccaacgatcttaactttatcataatctaaagatagcaaagactcaattttcgtcaaatgagctttaattcccaccatttcatcaaaatcctttgactctgtagcattcagtttttctgagacatcagttgcaattttctcgatcatgtttgcctcatcgtccctaaaagacagtgattaataatagtatcattacaaaattctattggacttataattattgacttattagtaatctaaaactaggtaagactctgtgccatgtcccatgtacgtcaagtttttatattgcatcccgatat

SEQ ID NO: 9664 - DNA, 676 bp, Arabidopsis thaliana
aacctcggtgatgatcaggagacgtatgagagtgtatggtctacggttttcacgatggcagtttggtgggcttggaagtggcgttgtgataatgaatttgacaagcggggtaagtgtcgagatagaatgcgtcttatcaaggaggcggctaaggaggtcactcttgctactaataggatgaacggaaggtcggggtcagtcggcagcattgatatattggttggttggagtgtgccttcggaggggtagctgaagcttaatacggatggggcttcaagaggtaacccggcgttgtctacggcgggaggagtgttacgggatagagatggagagtggcttgggggcttctcgcttaacattggacggcgtacggctccggtggcggagttatggggtgtctaccatggcctttttttgcttgggaagatgaagtgcaagagtggagttggagatagactcagctttggtggttggttttcttaagacaggtgttcgcgaacgacaccctttgccttccctggtacgattgtgtcatggctttttatcaaaggactggatagtccgtatttctcacgtgtatagtgaagctaaccgtcttgctgacgggttagcgaactatgcgtttttgttgcccattgggattcatgtttttgtttctgttcctgatgttgttgag

SEQ ID NO: 9665 - DNA, 624 bp, Arabidopsis thaliana
ctctagaatcaagtctcataatggtatgaaacataagcaggttcgcatacatttgcggcacatttctcgagcttttaccgtcgggatctcggttgggaattgctcacctcggatagaatctgagcagaaagaagacgacttcaatcccgcaccaatcttgccatctcgtcacccccctactgtccaagaatcctttgtatggctgaaatgactgctctgtcttactatgaagagaaaagacgtgaaagagaaagagccaaccaagagaaggccatgattatgtccgacaaggtagtgatgtcgggaaccctggaagacagaaaactccgagctgtggagaaagccaagcagccgtagaccgatgacgggacgaggtccgtcaaacatctggaaaggccccggtcctagccggaaaaaagactaaaactcttacttcggagatgaggactcccaacaagaatgcttccagcaaggacccttcgaggcgagatggtgacagaaaaagaaatcagccggaagatgacactcgttcttctgtgcgcacttctcgagctcgaaccgaagagaaatctgttggcgcacgaaatagaagggtaagaggaaaaaaggttccatgaccttgtg

SEQ ID NO: 9666 - DNA, 535 bp, Arabidopsis thaliana
ggatcccccgaagtacatgccgtaatagacaccccataactccgccaccggagccgtacaacgaccaatgttaagagcgaaacccccacaccactctcccgcactgtttcttagcactcctcccgctgtagccagacccggattaccccgtgatgccccaccagtattgagcttcagccacccatcgttaggcacaccccaaccaaccattacttccaccctaccgcctatccccgaacctcctttatgtttactagtagcggtagttacttccttagccgcatccttaataaacctcgttctatcccgacacttaccacgtttgtcaaacacgttatcacagcgccacttccaagcccaccaaatagccatcgtgaaaaccgtagaccatacactctcatatatttcccggtcatcacctaggttatcatgctaccattcgatcaacgactgtgcaaagaaggatctcctccgccgctggggaatgatacgatccaaagtctgccattgcgggacaatcccgaaggatgtgaat

SEQ ID NO: 9667 - DNA, 562 bp, Arabidopsis thaliana columbia
gactctatacgatggatttactcaaaacacaagtgctagctagctaacttatagtcacgaaactgaaattcttgaaatgcttttttaagctaaagagacaagtagacttacattgctctggacaatatctcgttgtgcccaccaaaaaaaggctcccaaacccaaaattggcacaatcaccacaatcagctgcaaaattgtcagaacttcagttcaccagcacaattagataaccagagacattaaatgattaagactttagagagatagagagagtaatacccagacagagacaatagcatccaaaatccaaccaagctgaccagtcatagagagataagtcaagccaatggccaaagcaaggtttccgagaatcctcccatttccgttgttatctccacattaaacttcaaacccctaaccctaaccacccgtcttttacggttaagagatttctcactagctagcatcccaatatctgccatgaccatcactcgctgtctctgtctatgctcaatcaagcaagctctcaaccccaactctggtttggagcatagaagga

SEQ ID NO: 9668 - DNA, 462 bp, Arabidopsis thaliana columbia
tgttaatataacgacaacttttgacagatttatctttgaagtgttaagtagtaaagaaaaaaattagttagcttatctattaatttgattaaaagttttgcatactagttgtatatggtcgacgccaagtaagctaaagttcttcctatgtgtaactaggcctgatgaggcttataattagtgagtaggtatgggtccaaaaagcccaatttatggaatgtggtttagttactttaactaaaagagccgcttacttaggtcacagatctagggtttttctagtccatcgccatgacaaaacggaagcagcaggtctccggcgataattcagtctttgatcagattcctgttgatctcatcgtcaatatcatgtcgaaattgcctgtgaagtctatagctcagtgtcgttgcgtatcgaagctctggtcatccattattcgcgtccgaattacaacatgttgt

SEQ ID NO: 9669 - DNA, 298 bp, Arabidopsis thaliana columbia
gcatctggggcacgggtttttcaaacgagagacggctcacgatactttggaagatcgagttcacgagctatatcagcgacggcatcgtccccaaccacgaaagggttcggctcttcacgtgcgttagatgatgatgttgcaccgtcctgacgcactccaaaccatctcttgtttatggatcgggggaagatcgtctcaatgcatagagtcggtagaatctgagagactcattgtctgctcgggaatatttgacgagatgaaggccgaaaaacagaaaattctaatcggaaaaatcaaa

SEQ ID NO: 9670 - DNA, 545 bp, Arabidopsis thaliana columbia
caaattatcgaagttttcaaggagatcatagaaacaagtgagaaattcgttagagaaagctacgccgagtcaacggactggatcaaacctcaagatttcgttgatatgatccttctcgactcggtgttcatactaggggtctttattcaggctgaaactactcaaaacatcaagaagaaagaagaaattcttttccatgaagaagatattattttccaggagccttgtctcataaccactattttagaagacctaatcttactcgagaaccaactcccttatgtccttttagagaaactctctaaaccttttttcgcaaatcttaaaaccaaggaaactttccgtgacattatccttcgagcttttaggttgaaaggagagatcaaagaaggaacgaatttccgtcattttacagatttgttcagacgtgtccgtgtggaaacactttgtttgacaaaagaacaaatcaaactgcaaaggataagcaccggagatcaaaagagtctgcaacgcagcaaactagacagtgctggagtggatttgtg

SEQ ID NO: 9671 - DNA, 459 bp, Arabidopsis thaliana columbia
  unsure (1)..(459): unsure at all n locations
nnnnnnnnnnnnnnnnnnnnnctaaagtaatgtactgtttcatcgtcaattgcatgacccgctggaatatccccattgcatagttggcgtgaagtttgacgtgctcagccacatcgttgatgatcagcgcctgatcatagttttcggcaataaagcccagcatctggctaacataaaattgcgcatggcgcagacgctgtctttgtgtgtgcgcgaggttttattgaccagaatcggttcccagccagagaggctaaatcgcttgagcatcatgccaatttcatcaatggcgagctggcgaatttgctcgtccggactgtttaattcctgcatccagcgcgcagcttcgaacgggctaagttgctgtgtggccaatgatttgatcaccatgccgtgagtgacgtggttactcaggtctgtatccagcggccaggagagaaacagatgcatcggcagatt

SEQ ID NO: 9672 - DNA, 545 bp, Arabidopsis thaliana columbia
cttcgctcgagcgccacagctatttctcttgcttgttcctcactgaaacctcccatgctcccaaaacagagaaacactacagatttcgtcggttgctcttttagccaatgtaaaatctcctttctcttctcttcatcgccgctagattctaagtccataatgggcccaaccgcgtacaccggagtgatattttgattcccagttccaccggaaaagaaactcaacgcctgaggttccatgtcagccaccgaatttaccaaaatacccttcgttgctctaaaacttctagctcgacccaaaacgtaaggaaaccatttcttgtttagcatcactgaaggcaaacattttgccggaaaaggctgagtcagagttggaacgtcaaacttcatctccgtatctttgaactcactgacgtcgagttctttctcgtcgtaaagagattgaacgtggaactgtagcccgagataagaagcgttggacgtgtagaagatgtaagccgagaggttaaactcatcggcgatgtctatcatggacgtgcagaacat

SEQ ID NO: 9673 - DNA, 534 bp, Arabidopsis thaliana columbia
gcaattaggtggaaaggcgaagaaaaagtacaggacgaagcaagatttggagaaagagactgagaccgaggctctgatagctctgtccgtaggtttcccaatcgacgaattgcttgaggaagagattcgagctggagttgtaagagaattaggcgggaaagagcagaacgattacattgttgttcggaatcatatagtagctaggtggaggggtaatgttggaatttggctactcaaagatcagattagagaaactgttagtagtgactttgagcatttgatttcagctgcttatgattttctcttgtttaatggatacatcaattttggggtttctccattgtttgctccttatattcctgaagagggtactgagggatcagtcattgttgttggtgctggacttgctggtttggctgctgctagacagcttttgtcatttgggttcaaggttcttgttttagaaggtaggagtcgcctggtggacgagtgtcactcagaagatgggaggtaaggatagatttgcagctgttg

SEQ ID NO: 9674 - DNA, 604 bp, Arabidopsis thaliana columbia
agcagtgtctctaaaataaagaaatgttcattggtttcaaggatattaatgaacagaaacataggaggtgaaagctgccaagataaacttgatactaacatgagaaaactaaaaatatttataaagactaatctataagggaataccttgaaaccagcatctttagccaagcagaagcagtcagctacagcagcaacagtatgacctctatttgtgtcacgggcaacatcttcatatgtgctctggacacctatctctagccgggtgcaaccgtaaatcagcatttgtcgtaaatgaggtccaaggcagtaatctggcctcctggtgaatttttaaaacagattagagaatgtattctgatatttgaatcttcagagattagagactagactccataatgaatgatcaatgaaaataacaaggactgattcacacaaacaattggtgttagatttttatatatattttcacaatttcactcagcttgaccattgtcacaaagtgccacaaagaatacaatgaaatcaatatatagatactatgaaggcttttagagaaacattgaggcaaaaaagacagatttcaaatttagatgttgtcatga

SEQ ID NO: 9675 - DNA, 507 bp, Arabidopsis thaliana columbia
ttagatatattacccaaattggaggagatttacataaaaagatataagaaaaaaaagtcatataaaaatggacaaaatcatagagacacttgcctgtcttggagcattgttattgagctcctgatttgagaccgcagtttcttgaatccatctgtagaaagaatcgtcaaaagtcgagttcccagcagccaagtgaatatcatgcatcaacttctccgtgaatccctgatctgccaaaaatgcttcctccaatgccatctgaaaattcccaggcttgcacccttgcagttcaggctgttcctggaacctgaataagtagctaattaagcactaatccacatttaagaccttttcttttgattatataaagagacccacctggcaacatagtccacaaaagggaagatcatccctctcctcacccatgcatagtcctgcttacattaaacaacagtcagaaatagaatacttaaaagaaggccagattccatatttggaaagccatta

SEQ ID NO: 9676 - DNA, 482 bp, Arabidopsis thaliana columbia
tcttccgcagagttgaagccaagaaagctgttcccagagatgaccaaaacatggtaaatagaagcaacagcagtagcatccaaggttctcccggtggtccaggtcgcacaaggaagatatttgttggaggattaccttcttcggttacagagagtgatttcaagacgtattttgagcagtttggtacaactacggatgtagttgtcatgtatgatcacaacacacaaaggcctagaggtttcgagtttataacctacgattccgaggaggcggttgaaaaggtattgctcaagacattccatgaactaaatggtacaatggttgaggttaagcgagctgttccaaaggagttatctccaggtctaagtcgcagtccgcttggtgtaggttacagctatggagttcatagggtcaataacctccttcatgggtatgctcaagggtttaatccgctgcagttggaggctcggacttaggatgga

SEQ ID NO: 9677 - DNA, 561 bp, Arabidopsis thaliana columbia
cgcatcctctctagtggctttctgcgtttcttttgcttcctctttgattgatgcgtcttgcggtttgacgctttttttactacttaatccaaaatctcctgagtcaggggacacttccttctccggtgattttcttttcttctctttccttgtctcttcttttctcagctcctcaagcctatctacctttctcagctccttgagcctccctgcctctctagcttcgatatctcgagctccaaatgccacattttttccaatgttgatgtagaattcactcaagtcgttcttctttgtaacctaattaacagaatatgaaaacaaagttagaaagtgctgacatgagtttataatccaccaaagctgtatctcctcacaatttctaaaacagagaaacaagaaaaatgatttctagacaacatgcaacaaggttgtaacaagaaaagattgtgatctaactacttaccttgacacagttcctaaacctgagctacttaagaggtaagacagaaatgaaaaggacaaaactcgtactatcctaacaagcactagtttagtagt

SEQ ID NO: 9678 - DNA, 1131 bp, Arabidopsis thaliana columbia
taaaactaaatttactttttttttttctttctctgccttatgtggatgataaattttcggataataacctacaaaatgtgaataaaatttatgagaattgaacaaattgattcatcttttttttttcctttccctggtacagagtttgttgtataagttatataattcggacggtacaaatgagagaacaaacaatcaaagattacctcaaagactgatgatgagaaactacattttctcggacatcatcatctctctgtattagtattaccttgtgacaccaacggtattgattcagcatctcctggagtttctgtggtaacaactttggatgcttccttcttcagcttatggttgttataagccgctacaccggcaatagctgtgtgtgacacagagcacactgtatgagaagcaaatttttttcttgttagccaatttgtatgtgagaagttttgtcttaccgatgcgtaaccgaaaagattgatgattgtgagtttcgtgtcggcaaagagaagagctgacaccaagacaaccacccaatccttgacaacgccagcaactcggatagtgagagcactcgtgtgagaaatcaccaagaaaaccgacaagttgagggcaaatgtacagagggaattaagggtcaacactacaaagtggaagttccatgggccattgccatctatcttcgatttctctagaaagatccacggcacaaacaagcagatagcactgcaaaggaggtacaaaaagataaaagtaacccttaggcttaaataatgagagaaatgagatggcttcctcttcttcgattttacttacctgcatgggctcacgtagtacataagagagattgggtttaacttgatgcccttcctcttgacaagaagttccatgaagattagcctcagggcttctccaacaacaccaccccatttggtaaaccactccaatccagttgatgtttaatccccataagaagctactaaaacaccaaaacttatgatagacattatcaaaagcatcctgcagctcatcatttcaagtccagcagctactccaagaataaacacagcaacaggcactgcaagtatggttgaagaatctgtacattgttagtcagatataaga

SEQ ID NO: 9679 - DNA, 326 bp, Arabidopsis thaliana columbia
  unsure (1)..(326): unsure at all n locations
tgtagataagatatccggaaataggtatcgggattacgggaacaatggtaactactcgtcctaagcatggagatcacaggtaatgcaattatatatcctgctctttatagtaataaaattatatgcatgaantgaaagctatcacaataagctagttctctagcatggccctttattctttctgtcgctcntagtttttgtttgttgcgcgagngtatnggttctttttgtctatgagagcatccgaccgggttttggaatcttcngtcgctctggctcaggtgattgcatgcgccttctctctcccgtattgctttgctcttttc

SEQ ID NO: 9680 - DNA, 985 bp, Arabidopsis thaliana
ttggtatccgcgaaggcaaatccatgtcgctcggattctcatctagtactaaattagacaatccaaaatattttgatttaacgtataccgaattttacatttaaatttatttatttttatgcatgtttgcgaactacgtaacttataaaaatcacaatatgtttacaaattaacggaataaaaattcaaataatcgtgcgaaaattaacctagttcatatttattttcttttaattttctcttctgtatatttataggttggtctaattattgaaaaaatcaaaaataaagagaaacaaagacgtaatccaaaatgtctactgcttcactatttagcttcccttcatttcatctcagatccctccttccttctctctcttcttcttcttcttcttcctcttcccgatttgcccctccccgtctttctccgatccgatctccggcgccgaggactcagctgtctgttcgcgctttctcagccgtcaccatgaccgattctaacgatgctggaatggatgctgttcagagacgactcatgtttgaagacgagtgagaaattcgattccttttcttcgattttgatttgggtttggttgatttgggtttactttatccgaaaaattcatcttccacgaatctcatttgatccaaaaccctggagaaagcttaagctgagactctctctatgtttctaagatatagtgatatgatttgagaaagatgttgtgctttaagaaaatgttgatttctttatctttgattatgatcaaatgtgagtggctgcttcatgttctgaagttagtattcatggatggcttttattcaattcaatctctctttttgttccgcagatgcattctcgttgatgaaaatgatcgtgtggtgggacatgacactaagtataactgtaagtgaatttgattctcattccatatataggagaagaatgatggcaaaatcggttttgatgtgacctagttgggat

SEQ ID NO: 9681 - DNA, 518 bp, Arabidopsis thaliana columbia
tacccagccgccaaagcagcagccggaatgaatagagcggccgccgccacgttccgatgcgaaaagacggcgcttttgcctgcagccgctcgccatgcagccaaacgaaggcgaaaaagccaagcgccacaaggcgaacgatcgcgtcgttcccgctatacggaaaaaacgtatcaagcacagcgatatacccaactgtcaatgcgtatgggacaaaccaccgttttttctggacaatcagccaatgaaacagaaacgagatggcccatagcagcagaaaaaaggcaaaggtgcgcacggcatcgctcggcatggacaagcgtcccccctgcagccaagccgcgccatcccgccataaggcatacggcagcgaggcggccgaatggaacgaaaacagccaagcgagcgaccaccatatatatcccgctttccccaaagcggacagccagatcggaaggcggacaatacatcccgaagcaaagggcgacaaaggccgcaaacactctaatatgcgctgt

SEQ ID NO: 9682 - DNA, 1054 bp, Arabidopsis thaliana
tgaatcttgtttctttcatagtccatgctatagatacattctcacaacattttcatatcatttccttgtagaaactcgttcactctttttgaaaatgccacaatcttaaaagatgccgagacaaaagatgcactgtgccgaatcatcggagcatctgctacaaaataccactacattgtgcagtcatgtgcctcaatcatgcacttgatacacaagtatgattttgctgttgtacacattgctgatgcagttgctagagctgaaagcaagtattcagatggtacgttggcagtgacaatcattagagatattgggaggactgacccaaaggcctacgttaaagatactgctggggctgataatgtgggacgtttcctggtcgagcttgctgatcgtttgccaaaattaatgtcgacaaatgttggagttctggtccctcattttggtggtgaatcatacaagataagaaacgcactagttggtgttcttgggaaattagttgcaaaagcatttaatgatgtcgagggagatatgagttccaagtcccttcgtctgcgaactaagcaagctatgttggaaattttgctcgaacgctgtagagatgtttcagcctatacaaggagccgtgttcttcaagtgtgggctgaactctgtgaagagcattctgtttcaattggcctatggaatgaagttgcatcactatctgctggaagactggaagataagagtgcaattgttagaaaatccgcattgaatttactgatcatgatgttgcaacataacccctttggtccacagctgcggatagcttcatttgaagcaaccctggagcagtataaaagaaaactgaacgaacttgaacctactgagcatgcatcaaaagagtcaacttcagatggtgaatcctgtaatggagatggtgaaatcgatgacttgcatcttgaaactacaactaggattcatcaagatagtctatctgatagctgtcagccagagaatggagaagagatcagtgagaaggatgtttctgttccagatattggtaacgttgagc

SEQ ID NO: 9683 - DNA, 543 bp, Arabidopsis thaliana columbia
caaatgcaaagattgctgttaaacgggtttctcatgactcaagtcaaggaatgagagaattattggccgagatttcgactattggtcggcttagacaccccaatctagtcaggcttcttggttattgcagatacaaagaagagctctacttggtttatgactttctgcccaatggaagccttgacaagtacctttacggaacatcagatcaaaaacaactctcttggagtcaacgtttcaagatcatcaaagatgtagcctctgcactctcctatctccatcatgggtggatacatgtcgtcattcatagagacatcaagccagcaaacgtgctaatcgatgacaagatgaatgcaagtcttggagatttcggattggctaaggtatatgatcaaggatatgatcctcaaacctctagagtagctggaacattcgggtacatggcgccagagatcatgagaaccggaagaccaactatgggaacggatgtttacgcttttggtatgtttatgcttgaagtttcttgcgatagaaaactgtttg

SEQ ID NO: 9684 - DNA, 507 bp, Arabidopsis thaliana columbia
tttttcatgtgagctaattgtttgttttcttgcctgatgttcgtttcgttgctactgttcaacaggatccagatgatacactaaagaggaagacttttgaattgttgtacaaaatgaccaagtcgtctaatgtagaagtgattgtcgaccgaatgattggttacatgattagtatcaacgacaatcattacaaaactgagatagcatctcgttgtgttgagttggccgaacaatttgctccaagcaatcaatggttcatccaggtagcaagccaacctccattgtaactgtggcctgacaataaacatatatactcttggtttctgacagaagtttaactgtttctgtactgcagatcatgaataaagtcttcgagcatgcaggagatctggtaaatattaaagtggcacataatctgatgcgtttgattgctgaaggatttggagaggatgatgatgatgcagacagcaagctcagattatcagctgtatgttgttcatccagtgt

SEQ ID NO: 9685 - DNA, 603 bp, Arabidopsis thaliana columbia
tgtacacatgcggccagaacgagagattaccgctaagaataatcgtccaagtgctcttctttgagcagctacagctcagaacctctgtagctggatgcttcctggtctcagacaacctcgatggcggatcaagacagttaagaagcggaggatatgtaggaggaccaaacgaaggaggcggaggaggaggaggatgggcaaccgcggtaagagagaatcaagtcctgaaagttggaatggacagtatgagaatgcgagtttgtgagttagagaaagaatgttccaacatgagacaagagattgagaaactcggtaagacgacaaaaggtggtggttctgcaagcaatggagtcggtagcaagacttgggaaaacgtttctaagaaactcgggttcggttttaagctgaagtcgcatcaaatgtgcagtgctcaggaaggttctgtgtctaagtctaacaacgagaatgtgaagatagagaagctaaaggatgttaaagagcgtcgtgggaagcataagaaagcttcgagcattagttctgagaggtgaaaatggtaaatttccacggttcaaatgtccagttactgtgtgtttggacattgtt

SEQ ID NO: 9686 - DNA, 483 bp, Arabidopsis thaliana columbia
  unsure (1)..(483): unsure at all n locations
nnnnnnnnnnnnnnnnnnnnnnntaaagcattactcgcacaggggtccggtggtcctgcattttcatgtgctgcacagctactggctaaatcttaagagcgtggtgcgcttttgcgaaaaagtgaaaaaccataaaccggacgtcactctggtctggacgctgcacgaccactggagtgttaccggacgctgcgcctttaccgacggttgcgaaggctggaaaacaggctgccagaaatgcccgaccttaaataactatccgccggtgaagattgatcgcgcacaccaactggtggcgggcaaacgccagttattccgtgagatgctggcgctgggctgtcagtttatttccccagccagcatgtggctgacgctttcaatagcctgtacggtccagggcgttgccggattatcaataatggcattgatatggcaactgaagcgattctggcggacttgcctccggtgcgcgaaacccagggc

SEQ ID NO: 9687 - DNA, 594 bp, Arabidopsis thaliana columbia
gtttcccagaggtaaatcctgcaagtgttttaaacacatatgttagaatctaactttacttggttctgatacaagaaaagatatcgaggtctatcttatataccggcttttacaaacgtttcacttgcgtagaatccgatcccattgattccaacaaactgttggaataccatcagggaaacaccaatctgaagaacattcgatcacacatgagtttaatgaatcaaatatatacaaaagattgataaattatgtttttgacttcttagttaaacttacgatgacagatcgaccatatttcttggacacaaggtcttggattcttgcttttggaagaatctctagagcttgaatcgagacttgaataccgtctgcttcatttgtgatatctgcatcttttcctcgcagcttttgcagggctacgcgaaactctttctcatggcctgcttttgcctgcaagagaatgaaatatttagatcatgttttggatacttatatttaaaaaagatcgataacaatcatggatcagataggaaattaccagccatcgaggagattcgggtatgaagccaagccaaagagcaaaacaatgca

SEQ ID NO: 9688 - DNA, 1053 bp, Arabidopsis thaliana
aaaatatattaaaaaagaaattagaaactatctttccaaaaaccagtactttcttcagttttgtaaagttgggttcaggagtcttaagctacatcctctcttgcttcatgtatcatggatagtctctccggaaataacggcctcagctccttgtactgatcaaacaaaacaaagaacataaccattattaatatttctgagttataatatgagagagagagagagagagactggggctgttatgtctatttacctgttccaaaaaggaatctatctcctcctctgtgagatattcttcaccattgttttcaacccagccgagtgatctaaggaactgtgcctcttcctcatctggagtgtcagttgcttcaaagccactagtatgagaagctacctggacactgtcagtcacttcgacgccacttgttgcctgtgaacttgaagggtcactagctataagatcctttgagctgttgagttttacctcaacagaagaagaggcactggttgaagagctaacaggatcggtggtgatgcttgttgatgcagtttgtttctgcttcagagcactgtaaaatgcactcctgctctgagcttgagcagcggaaggtttcttttcgattgtttggccagatatcatggagaaggcactggctcccttgagctcctttgggctgtttgtacttctcacaggagcagattgggttgattgagtattggacatcagctggctagaggcagctcgagtgtttgtattagcacttgggcttccagattctttaacagcactgacaccattttccctagccggtttgagaaccaacagcttcttctcaggtttgatttgaccactaggattagactggaaactcccaagtaggacagcgggctgttgtagggcatttcttgagggagcaaggcaagtttcaccagttcgaaccacttgctttgtcttggatttatcagaagaattcagactctgacaaatgaaatagaacagatattgattgtagccaaatgaatgaggaataataacattgaccaaggtaaata

SEQ ID NO: 9689 - DNA, 421 bp, Arabidopsis thaliana columbia
acacaagacactgctgtatcgccaagtaatgcgaatccaatctatgaagatcctgaaaatgccttaagtatcagatgatgcatatcagctatacctgagctagatccatcaaatccttaatggcttcaaactataaacattgttcgtttccagacaagaagatagagagagtgactcaccgtagccatcttcgacacggtaattgaaggtatggtgatcgcagttgtaagtgaacttgctgttgctggaggacggaagcttctggagacactgagcagcaatagacgggaaattgcctgtgacttcggtatactcggcgaggatcatagttcctctggcgacgaagctatagatcaacgattcttgacccattttgagtcgcaccgagtatggaccgagttggctcagacagagagagaga

SEQ ID NO: 9690 - DNA, 926 bp, Arabidopsis thaliana columbia
tcacatccacaaatttcgttcccttcctcgtctcgttcatgcttcgtcctctccacctatatacacaaaaaccgtattactcaaaccggagttgagatttcaaacactaaaccgggattaatttctagaactcaccgtaacgacgatagcgtcgtagaacttgacttcttcggtgacggaaggaaacgtggcgcagacctgggtgccttcatggaccttgggacattcgatgtcttgcatctgctcggaacaagctcgaaacctctcttcgaattcttgaatctcgtcggagtttttgaaatcgtcagctggataaaactcgtcgtgctcataagagaagccgttgaagctgatccacaaagcgtcacagatgtcagaaaattctacggcgtaccaagcttcgtcctccgctgaacggaactctagttccggccagttttcatcggaccagtcgacgtcatcggcgaactcgccggagaaaaccgtcggactagtagccccactctgattagaagttagagagttgtgcatcttctttgggttttgtttagaagtgataacgattgaagtgtagtgaagaagccatgcaagctctctttatagaccaaaaactctctgtaaaagtaattttctctgttagctctaccagtcaaaacatacaaaaattacagttttggcccttttctaattagatcatattgatattttcattaattgaaactttaactggcgtattaactatacttttagtataacatactgaaatgtggaaggaatttgaaaagtcatttcacattttctgtataaataaaaaaaggtgaaaacttctcttactatataaactttgatattgaaagttactaccaaataaaatgtcaatgagattaccatatttcaagtatacatattacatatggaagaatttg

SEQ ID NO: 9691 - DNA, 592 bp, Arabidopsis thaliana columbia
attttcaagctatgcgtttgaggcatccaccgtgaaggcaaagcgctgtaaattccgagacacgagttgagtaatctcgctgacatagcttccgagaagtaagcagctactctctgcgctgaggtcccgtaaggagttgataactgagagatctcaagaagaagcttgtttgcttcttcgagattatcagcagagacagcttcagcacactgtagcagcaatgtgagaaggtgtaatccttcttcgtcttgcttctgcctcttaatctcttccttcctctctcttaaagcctccgccgtatttgtttggacggcgggaacagtggccgtcactgtctctggttgcggtggtgcatcggtagaagaattttctctttcttgctgctgaatcggaggaggaggaggcttatgctgttgttgttgttgttggtgctgctgttgctgttgtggaggagaaggattgttggagatctgatagagaggttcgaaagtttgaggagaagggtcagaggaagaggaaggatcaaggagcatgagagatcggagcctgtattcaggaagacaccgagatttgggttacaagggaagataat

SEQ ID NO: 9692 - DNA, 544 bp, Arabidopsis thaliana columbia
agtgatgatttggtcattatattttgtctcgtttctattatgatcggcatccaacttaccaaatatccatatctacaggatgttgctgggcattttcggctgtagcagcagtggaaggtgtggctaagatcgccggcgggaaccttgtatctctgtccgaacaacagcttctagactgcgacagagagtacgaccgaggctgcgacggtgggataatgtcggacgctttcaactatgtagtccaaaatcgaggcatcgcatcagagaatgactactcttaccaaggatcagatgggggatgccggtccaatgcaagaccagctgcacgtatcagtggattccaaaccgtccctagcaacaacgagcgggccttgctcgaggctgtatcgaggcaaccagtctctgtgtcgatggacgcgactggggacgggttcatgcattactcgggaggagtatatgatgggccttgtgggaccagctcgaaccacgcttgttacgtttgttgggtatggaacgagccaggattggactaagtactggctgg

SEQ ID NO: 9693 - DNA, 483 bp, Arabidopsis thaliana columbia
tatccacaaattcagtaagagaaaatctaattggccatccatcaatcacagacataatctcatgaaagttgttgacgctcagctgatttgtaaggaagtagtgaacagtgtgagcagcccatatatatttcgcatcagcaaactttataaacacacaaagtgaagatttcaacaaaccttcccatacatcacaacctaatcataatctgatcttaacgatttgtgaaacaaagcagctatggttcatcctcctattttgcaaaggtgatttaccttctggataaagacgaggcgggtaagtgatgtttttactagaagacgccatacctaatcaaagagaaaaacaatgttcaaagaaattgtcaaacaaatgatcaacaaatctgtcactgaatatacatgaaaacttgaataaatctatcacaacaagacaataattcaattacaaaaaacaacaaaggcgggaatatatttccaaaaaac

SEQ ID NO: 9694 - DNA, 694 bp, Arabidopsis thaliana
cacaataatacatcattttgatttaattttgaaactttttttctcggagaatcagggagagaactccatttatcaaacattggagatgctcttagatgtggatgaataaaacggaagcttaacatgctttccaatttgacatgcattacaagtcaatgtgagagtctttttatttggatgaaaataagaataagaaattaacgtcttcaaaacatcgttgctagggtgtggtagtcttcgatgccatatgtcagacgattgagctagaaaggtagaggctggagctgaagttttattgaaagctggaaaaaccggatatagatccccactgctatcattgcgaagaagagtcctcttggtgcgaagatcctttatagaaaagccaaatgggtcaaattctattgagcatttgttatccttagtaaatcgacgaaccgaaacaagatttttgattatgtcaggtgtgacaagaacattatgaagagttaagggacgaggtttattagcaataaataaggatccagtggcagtaacaggaatgcaaccaccattcccaaaaatgacagattttccgatgctaggataaagagaaagttggagattattacctgcaccagaagtcaagtaggctgttgcacagagtccatgtccactgagaatcagggggatcttgaagagaaaaggtgttgaatgc

SEQ ID NO: 9695 - DNA, 1118 bp, Arabidopsis thaliana
cgtaacagtcatttaacaagcgagacccctagacttttttgcttactctgtctgcagtagtagtagtagtgttgtactaccgactcactgctaaagttatacaacggaactagcgataaggaattttcaaaacctgacccctcatattttctctttattctaatttcacacctttcttttataatctcactaatcaaccctctctattttctctttcctttgtcactatccgttgagaacccaaacggctctctctcttgtctgactctctctctctctctctctctcgatcggtcgaaattttctctgtaactctcttctctctttacgaatcccgatatgagccacgggtggttatggttatgaataatcctgcaaacaacaacccagtagcagcgtcttcagcgtcagccgtagctttagctccgccgccacatccgccgcagcctcaccgtccttctacttcctgtgatcgtcacccggatgagcgtttcaccggattttgcccttcttgtctctttgaccgtctctctgttctagacatcaccggaaaaaacaacaacgccgtcgcgtcttcttctaagaaaccaccgtcttcttccgccgctcttaaagcaatcttcaaaccctcttcctcctccggttcgttcttcccggaacttcggaggacgaaatcgttttcagcatcaaaggctgaagctttttctctaggtgcgtttgagccacagagaagatcctgtgatgttagggttaggaacactctttggtctctgtttcacgaagacgccgagcataattctcaaaccaaagagggtttatcagtaaattgcagtgagattgatctcgatgacaccgctgcagttgataagtatccaatctctgcggaacggtctgaagctagtgaacaagtttgtcctaaagtatgcttagataactgttcttgcacagcttatgcatatgatagaggaattggatgcatgctttggagtggtgatttagttgatatgcaatcatttttgggaagtggcattgatctttttattcgtgttgctcattcagaactcagtgagtgaaatatatctagtagttctcactttgtttccttctccatttttgtt

SEQ ID NO: 9696 - DNA, 520 bp, Arabidopsis thaliana columbia
cttaagggaacttattttgcattccataacatgaacacctatggaatcaagaaataaaccctctcttccaaggaatccaacaactttaccctcgtccatttgatgtgtaaaagacggtccttgttcttctccataaggtccatgctttcctctgttggtgcggaaagtcagtgactttatcacattaggtcccatatacatcagcggcccatatgttcccgttacatgtgttaaaacctctgaagggtagtcaaatacaatctgcaagttacatttaaacctgtgaaatatgaagtgtaattaaacttaagtagaccaaaaatcgtttcaaattcacgcaccttatcatgtttgaatcctcccacgccaccatgtttgcttcccacacagcttgtcctctaaaatcataacagaccttcatcgacacaatcccgacattgcgtgacaaattgatttgtcgaataccggtataaatccatcgtcaaacatgattccacggttccgcccatggtcatatgtt

SEQ ID NO: 9697 - DNA, 556 bp, Arabidopsis thaliana columbia
aaatatccacaatattattgggcatacgatgagttaagggtgagtaattttcttgaaatgtaaagtattttacttgaatacattttctatcacctttagtggacttgtttgttgcttgtgatattttacttttcggtcattgtttattttaaatttgaagtactgtgtattggtagcaagtctggcatttgttgccactacttttttttccgcctggtgctaaatgtaaaagttcagtgtttatagttgtggagtcgtgttgctccgtgcatttatcttcttcagatctcgatatacatggaatttgctttgcattttactgagatgctcatttgcatgatattcttattctcaaggttgctgttacatgttgcagcgttctggagttgaatcccccggcgttcacctgatgcgtcccctattataacaccaccagtgagtcatccacgttaagacagctcaggggggctatggagtactccagctggctatggagtacacaagctggttatggagtactcaagcgggttatggaatactcaagctggctatggag

SEQ ID NO: 9698 - DNA, 529 bp, Arabidopsis thaliana columbia
tggctgcatcgtcagactcattgacagtgacgccatgtctatctttggatcctgcaactgcttcaaccgcacaagatttaccaatggtttcagttccaactaaacaagagcaaagatcagattcgccggtggttaacagattgtcggttactccagttcctaggacaccggctcgtgatggttataattggagaaaatatggacagaagcaggttaagagtcccaagggctcacggagttactacaggtgtacatacactgaatgttgtgctacaaaaattgaatgctccaatgattcaggcaatgtggtagagattgttaacaacggtttacatactcatgaacctccccggaagactagcttctccccgagagagattagagttacaacagctatccggcctgcttcagaggatgatacagtagtagaagagctatcaattgttcctagcggttcagatccgtctgcttctactacagaatacatctgtgagtcgctacactcgttgaccggaaaagacactgtgag

SEQ ID NO: 9699 - DNA, 465 bp, Arabidopsis thaliana columbia
  unsure (1)..(465): unsure at all n locations
aaaacattcctaaatatttccgttaaaatatgttcgcagacatatactggtaacatcttgattgctgtaaatccgtttcaaaggttaccacatctctatgatactcatatgatggagcagtacaaaggagcaggctttggggaactaagcccccatgtgtttgccattgcagaagttgcttacaggttattaatcccaatcaatgatccactagcagaaattctcgtagtcactctttattcatacatttctcatgctagtctattctcttttgcttctctgggtagggcaatgataaatgagggcaagagcaactcaattctggtaagtggggaaagtggtgctggtaagactgagacaacaaagatgcttatgcgctaccttgcttaccttggtggtcgatccggcgttgaaggaaggacagtggaacagcaagtttctggagtgaggcttcnnaaaaaatat

SEQ ID NO: 9700 - DNA, 549 bp, Arabidopsis thaliana columbia
tacctagtggcatggaacttcctatcattgagttgatgtccatgtggagcatctcttctttcatttgtgctaccaatgatttgttctgtgtatcagcaaaacctgcaaaacaccaacagagatagaggctttctatcaaaaaataaaacgcacacaaaacagaagatatggattttgacaaaaaataaaaagcttgattgaaactttggatctccaaatccctcaggttaagtcacttttgagatgtatatactccacacagatcaatcttaattatagactagacagactcaagtcccacaaagtagctacatgcatcaatcaatgatactccacagagctcaatcttaattataggaaaagaatataatccagctagcaagagacttaggagaagaattagatacaaatagcaccatagttgcagagatccagcttaggccctagttataaacttattctagttacatagtatcttaacttgaagtagcatagttttcagctcaatctttaatccaagactaatttatgaagaagagccgatgtgat

SEQ ID NO: 9701 - DNA, 1278 bp, Arabidopsis thaliana
ctgatttctcaatcaccgttctgtttagttttggtggtttcttttattttcatgttcctataatctccgaaactgaaagaaagtggttgtaatttaccggctgaaatggctatttgcccaaattaaggtttataatatgataattatattaaagatttgggtatatgccctactcattgttgctccgtctgatttgctctgcttaggtcttcttggtcattgcaattgatgtttctctgttctgtttctcaggatgtatgtattggtacttgtcttatttttaataatgaaccgtgcagtgaagatcttgtaaattgtcaaatatgattatctacatgtatgtttatactacaagagagacagagagggagcaagtaccatgtgcttaattacttgaagtagctatagaagcttccaaaatgtttggaatcttactttgctgcttcttcctcttctgcttcggtatcaagctcgagaccttctgctgctaatagctgagtgatgagctttttcttatcttcctctgctttctttcgcatcagatctcttttcttcaacactagcgtgtgtcgctttaaagtgctgttgaataactctctcgatgctttcttctccttctccaatatcttcctttcttcttccggatccaccttaataagtttcaagattcacaacagagcagaagaaagttactaagttggaagaacaagctcaaaaagacacattatttcttactttagaacgagaaagacgacgagcacgcaggtttatatcaagctgttgttgctcagcccaagcggcaaccgccatgtcgcccctttgatcaaaagctttacgctttttcatcaaccattccatccaagcttgagatgcctacacaaacccaacacatgtcatccttaaaacaatttcagagggaaaaaagaaaacttcaagtttatgactcttatatatacataccttcatcggattaactcggttatccatatcatattgtactttcttttccgagtccatgagcagctcgtatgcagcctgaatcttaatgaatcttgcttctgctgtctctccttcttcaagagtcccctttccatcataaactagacaaacaaaatacagaatcagaaacagagttacaactttgtgacgacaaagtgctctaaagatccagaaaagtaccatcaggatgatagaatttggctaatcttctgtatgctaccttaatctgttcttcctctgcatttctatccaactctgttactcaaattcatacaacat

SEQ ID NO: 9702 - DNA, 525 bp, Arabidopsis thaliana columbia
ccccgttactaatctgcataattgctgcagtttagaaataaatatatttaagtttgtatcagatttgaagctggaacacctgcaataggagaagcaattgcccttggagcagcagttgattacttgtcaggaattggcatgccgaaaatccatgaatatgaggtttaattttattttcctacaactagacgtcaatgacgtacatacagtcacggagattctcacatgttttctaactgtagattttaatttcttgtgtcatccaggtagagattggtaagtatttgtacgagaaactgtcttccctgcctgatgtgcggatatacggtcccagaccttctgaaagtgttcacaggggtgctctttgttccttcaatgtggagggcttgacccaactgatttggcaacctttcttgatcagcaggtttgttataattgggagctatctgtcccatcacatactggttttctcttatcttgaacgtattcttttaatatgaggtagtcctcaagtaggataagggc

SEQ ID NO: 9703 - DNA, 630 bp, Arabidopsis thaliana columbia
gagaaaatagcgcagaccaacaagatcaagatggttaggtctttgaaagcttcatacacaaagaagagaagtcctttaggcggtggcttatggtaggtgttagagccaaagaggtcacggcgtctactgacttcttgctcattcccgtggatccctttggtggggttagtcctaagggaagcggcgacaccctccacgccgcccagcgcttggatgcccggtaagtccttacccttcatgatctccacaagttgttcttgatcaatggcaggaacgtaagagagaggcatagagttgatctttgctccctcaccggactcgagggctgtgtaggagagagagagagaggcatctgaggttttgggatcaatccttgcgggaactatctccttaacaagagagagcatagccctcatagagtagatggcagcgtaggcaaaacgccaacgcctctgggccttgttgaggctggaggtggtaaggttgagcaaaagtgcactgtaatcatattccttgaggtcctcatgctttatttgtgtgaaagaaagagagtttttagaaggaaaagagtctcgctctctctcaactaaatgtggtgtacttgtaagcacttaagctcgcaaagatgat

SEQ ID NO: 9704 - DNA, 900 bp, Arabidopsis thaliana
tgcaatgactgaaggaaaaaggtcggattttttcaatcacttgaaggctgcatgcgatagtttatctgcattggcttggattgctttcactgggaaagattgtggtaagcaaaaagcgatcatgttgaaaaagattctgactttatgaaacttttaagatgtaaattttccttcctgggtattttgtctgcaaggtatgagcatgccaatagctcatgtggaagaaagttggcaaatggctgagttttacaaccataaggtgctaatcttcgatatctctatgcttcaatatgttatgatgttaggagcttatggaaaacaatagcgaacgaggactttatagttacttgttcaggttgcagaagcttatattgctgtttgatgctctttgtacagtggtaattctgtgatctccatgttcttcttcaggttctggtggagtatcgtaacaaagacgcagatcatgtggagtgggctaaagccttaaaagaactttatttacctggtttaagggaatatgtcaaaagtcattaccccttgggacctgtatggaatgcatcagggaaacctgctagtgctcctgcaaagggtccacctggtgctcctgctcctccaccagcacccctcttcagtgctgaatcttcaaagccatcatcatcgtcaaaccagaaacaagggatgtctgctgttttccagcaactcagctcgggtgctgtgacctcaggtaggtttgaagctgtacctcttcatatttctggcatggtgtttatttagaatgtgaatcattagtagcttacaatcattgtgctttgctttccaggtcttagaaaagtgacggatgatatgaagacaaagaaccgtgctgatagatctggagctgttagtgcggttgagaaggaa

SEQ ID NO: 9705 - DNA, 477 bp, Arabidopsis thaliana columbia
ctcgtactctctctgcataaggcgtgacaagagatcagcgtaatcgttcaagttcccgagtttcctcatcttgttcctcctctctctcactgtcttattcgcaaacgcgtgaactattctaactgcattattcagctttctttcatacccaatccctagaaacctcattggcttccacacaaaaggaggtatcagaaaccttgcaagtgtatactccgtggcgtcctcaaaagccttagcgaaaggaatctccggtaaacctgtctctaacgatcctgggtaaacaccaaaggccgatatacatatgttatcaaaggtaaaacgcaggagcaaatcttgtagatcaaagactctcttagaagtagacaagttctccatcagcggcaccagcttctggtccaccagatctctcatcgtagtaaacgtgtgctccaagaaacgagaagaatgcatctcggttttagccacgcgtctctc

SEQ ID NO: 9706 - DNA, 613 bp, Arabidopsis thaliana columbia
catttcataataccataatcatcctagaaatacataaataaaaccctaacgggaacaattataagtcacctcttttgtgatcagtagttccaaatacagtcaagtccagcatgaagcacaccgacctttgactcattctcttcggcagtcgccggtagccagtaattcatcccggagacgcctccgccgccttggaaagaaggcagattaacggcggaggtcatagtcgatgcagaagacgatccaaagtaaggaaattgattgaagttttcttggaacgatctgaagttagattgagtcgagacgtttctagaaacgaaacgaggaaaagggtcaaagtcaaaccctagcggcggtggaagacggctgaatgagttaacgtctaagcccaaggccgtagtagtagtagggacagtggagaaacaggacacgtgctcggttattgcgctggctgtgacggttgtgttggtgctacggctgtcgtaggagcaactgctgtcggtgtaccgagggtagtggtcggatcaggagaggtgggagtgaacggaggaaggagagcttggttgtcttgatagttcttgagattgttgagggtacttccgctttttagatg

SEQ ID NO: 9707 - DNA, 565 bp, Arabidopsis thaliana columbia
taacatctgaatcaatatccttaactgaatgatagaggtatcaaatctcggattttcaaatatcattgtaagaaagtatgtcactttgttcccttttacctatgtgcatcatcacctaacttacttttgttcttttctctgttactgtttttattctcaagcttcgaggacgggctgaagcttgtaaaacttagaggagaagctatgcaggtaagattgaactctgctctgtatatccttcattgactatgtcaagtttaggttgatgttgtgacgcctgaactttgtagtgatcttatataccattcgaacagctgcattgacttttagtttttgataaaatgactttcttcaggctgctgcagatgctgctaagagtgccatggttagtatcatagggttggactcagaaaaggttcagcagttgtgtgatgcagcaaatcaagaagtagatgaagctgacaaagttcagatcgcaaattacttatgtccggtatatatgtcttccatgaatcttttgcattctagacttgtataaaatcattttcacattcctttatgtggt

SEQ ID NO: 9708 - DNA, 620 bp, Arabidopsis thaliana columbia
  unsure (1)..(620): unsure at all n locations
tctttaagacgattgacaaaacaatatggtaccgtactggatacatttacataagaaaagatgataagtcaaaaaaaaaagaaaatttattttcgtgaaacaaccaaccacataataatagtaatgaaaaaaatcccaaaattgtaccaagctctttctggtattaactttgatgtgattaaaactctcaaactttgggactttcatcgaatatttcctaacgccaacattccggcgttaaagaatggtctcgcttataatctttgcaataattgtataccatactatgtgtttgaacccatctcatggcttggtgttgttgtcgggttaatccgccagaacggtatggcgaacganncaacggatagcaccgagctgacgagtaggcggtgcagccgagcgctttaaaattggtgtatttagcagtgaaaggttgatatttatagtcggctttgtatttaccgtcttccgttgcccaagaagaagcatcccatatggaaccataaagccacattggtcttaaaggaaatgtagacgcactcttctttgggtacttcttatgggaatatcatccacaaaaatctgaaattcaaatgacaaaatactatattagtgaatag

SEQ ID NO: 9709 - DNA, 563 bp, Arabidopsis thaliana columbia
  unsure (1)..(563): unsure at all n locations
aagataacttttccccacgtattcatattcctccgccgttccaaatcccgaaacggcgagagtcgtgacgcatatttatttattgttctctgtgattttgggtttttatgattaaacctatagtttaggggttaactcgtagtaaatcattaattagtggactaaaagtgaaaaagtttgacaaagagatttcttttgcttccccgtgatttttgccgtgcaggtttataagctatcaataggagcggcgtgtggactttcctggccgtccgatcgtctcgtgattcaagtgttagatgactctacagatcctactgttaaggtattattattattacttagtccatttcacaaaaatataggtgcattattttcctccaatcaaattagattttttaccatttttttcaaaagatattttcctttatttaaaagagatgtaatattttcctgtgggtaagaagaaaaggggnaatattaataatttgtacattaatagatagatttttttttgatgtgtgatttaatgagatactcaaatgtgcagcaatggtggaagtgag

SEQ ID NO: 9710 - DNA, 607 bp, Arabidopsis thaliana columbia
cctaaagcccaggtctgatctgaactattctttatccatctttagtcaatctctatatcacttattggcttcaattgatcgtggacatcatacgaaccataatgaactagtgttgatatggttgcataagaactcccttagaaccctgcccttagtttcatctaggactttcgttactggctttatttgtttgaagaataatggtatcatgttcccaactccaacaagtcgatggtgtgatctttgtcacccaagcgccaccatatgtatatctccgacacatttaggtatctccttcaagcaatcctgcatcagcagtagagttaaggctcatatctctcggatctccaaagaagttcccaacctttttgagataattactgaaccttcgcctcacgcccttgtagttaaaggattgaagaaaatcggcattatgatcacgtctccaaggagcggtgattaccaacgcttcttcaacgcttcccactcctatcctctgattactgaattcaagcaaaagcgattcaacattattaagtttagtattcatgatcttcaaagcttgggaaagaacggcattatgatctcgtctccatggagtgatgat

SEQ ID NO: 9711 - DNA, 565 bp, Arabidopsis thaliana
tttatacttacataggtgtttaactggcgaacaaagctggagaaattgttgtgtttgaagtatttaggtagaagatcacgagaaaactccggtggatcccaaacaatgaagctattgttcgtcggactccatgagacaatcgcgtccgtcgccggatcttccaccatgtcatacgtcttgctaaggaaagggggcggtaaagagttcgcattaagtaaagtcgctggatgcggattccgcggtggtggcgccgtcacagcctcgccgatattcgttcctccgccggtaacaccgtccattttcgtacggataaagaaagagaagtatttgaaatttacaaacatacccttttatttctctgtgactcagatataaacgcgatatcataaagatgggcttttatttttctttttagtttgtgtgtgggccaaaaagatcaactttattaataactgggcctgctaaaacaaatataataataatcaatttaattgctatattgtcggcatacattttctggcgggaaagcagaggaaggagagtgagagagagagagagaaatgag

SEQ ID NO: 9712 - DNA, 552 bp, Arabidopsis thaliana
taatcatcttcttcgtttggctatttttgtgttagtggatactattctccagaagttttgatctcactatagcttatcttcttcgagttcattgttttgtgctgaaatttgtttagctgagattttgtcaatctttctaattcgtcttgcaagttacagaaacgtaatccaaatgtatgtagttacagatctaacgtagattctaactaaaactcaacaacaagctcgaaagatgtgtatgtacacacaaatgtgtcaccaaatctaacgtatgtggaattagttgtacaaagaacagctcctgcatcggagaaaacaaaattcctctagttgatgatacaaaattgaactgtatataatatatcaatttgttggatcactatggagcttgtgtggattggacttgacgaacgaattggcctttgattcgtggtcgttgctctgctaatttcttccggctctcgtaacgaacctgttaagtcattccaaggttcctttagtaacattaccgttatgagttcatctatgtgatggaccatcgaagttaagttt

SEQ ID NO: 9713 - DNA, 510 bp, Arabidopsis thaliana columbia
gctgcaaaacgactgtcgaatttacttcaaaggtatgatcagattcttgaagatgagctccattaagtagcttagattgaatgagactgaattaaaatctgcagggaggagatttggtgtgggagaaggtgaagcagatatggtcagaggaatcaaaggtgaaagatgataacagttcttggattctctgaatatattttggagactgttcttctctttctcatgagtgaattggtatatgaacattcttcacgatttttcttcccttcctcatataggcattataaagttttgaacttcttttgataattatcatcaaagaatagtataacttaagatttggcagaggtttatggaaaaccatttaaaaaacatgagggcccaaccgggttcgaaccggtgacctcttgatctgcagtcaaatgctctaccactgagctatggaccctttgttgtacatcatatctatattaagctatctaaatctacattaagatttctacatatagt

SEQ ID NO: 9714 - DNA, 550 bp, Arabidopsis thaliana
gtaatccaccctcatccaccagccacagcgccccggcaatctcgttttcgccagccgcctgtaaaaaatgttgccctggtgcatccatcatccggcgtaaatccagcggcgaagtccgatagtgcgcaccagacaagagctgataaacctttaacggcgtttctggatcgctttgccataacgtctgttcaaatgcggaaatgacaatattgccttgtggtgtatgggtgaagttttcatcgtcaaaaaccagtgcctcgctgaccattttttccagcgggcatccctgcgcccagcggatcggctgttgcagttcaaaacggtgtaaatgcggaaagcgagcgcaaaatttcagcaaaaaaccacgtccggtgccttcgtagccctgcaccgtagtggttaacaacgttcgagtaaaacgcaataccagttgatgcaacaatggcgcaggtatgtctgcggctgcatcgaccaccagccagtcggcttgatcatcgctggctaacaaggcgatccggcgcaataaagcgaaacttctcgcccgcaaatt

SEQ ID NO: 9715 - DNA, 529 bp, Arabidopsis thaliana columbia
  unsure (1)..(529): unsure at all n locations
nnnnnnnnnnnnnnnnnnnnnnnctaaagatacccgaaaactgacgccgggctgcctgtttgttgccctgaaaggcgaacgttttgatgcccacgattttgccgaccagcgaaactggcggcgcaggccactactggttagccgtccgctggacatcgacctgccgcagttaatcgtcaaggatacgcgtctggcgtttggtgaactggctgcatgggttcgccagcaagttccggcgcgcgtggttgctctgacggggtcctccggcaaaacctccgttaaagagatgacggcggcgattttaagccagtgcggcaacacgctttatacggcaggcaatctcaacaacgacatcggtgtaccgatgacgctgttgcgcttaacgccggaatacgattacgcagttattgaacttggcgcgaaccatcagggcgaaatagcctggactgtgagtctgactcgcccggaagctgcgctggtcaacaacctggcagcggcgcatctggaaggttttggctcgcttgcgggt

SEQ ID NO: 9716 - DNA, 547 bp, Arabidopsis thaliana columbia
aaattaataaaagaatttcacccttaaccaaaattatttagttttctttatggtaaataactctttaaaatactcaagagttactgtgtaccaaaatcaccaggcgtgaacgaaccgtcctctttgaagattcggttcaaccgaaccggttttcctctcctggaactcatggatcattctgatcagcgcactagccttcttgcttcctccatattcgccgttacttaacaccgtgtaaagcgaccccatgaccaacgaattcttcaccagaaccccaacgacgtcacgtcctccgttaagacacaagttcaaaatcagaccaacacaatgctgcttcaccgccaccggagaatcctccgacgaagacaaaatcttcaccgcgagtttcaaaccgccacgacgaatcaccccaatcgtcccatcaggatactccgccagcttcgccaacgtcgctaaacaatccgccgtgagtccgccgctaatctccccgatctcaacagatcaagaagaatcggaacagctccggcggcgagaacacgccaatggt

SEQ ID NO: 9717 - DNA, 585 bp, Arabidopsis thaliana columbia
gaaacttaaaatcgaaagatttatactgctttaccttccgtttggtaagggtgttgacagggattaggttcttgggctgccggtagtttctaccacggaacataataatagtttttacattatgtatgttaatgactaccccgccactcagtctcgctatcatgctcgccatctctttaatcttttccttagggaagttatcacaacaaacttgcacagtctcatgaaacttccagtgcatatgcatattttgtaccactcctccaaagactccacgaacaccaacaggaacatagtttttattcttgaaaccgattttcttgaacgcttgaacctgctcggatgtgaaaagctcgggatcatgcaccggagatggcagctcaggaagatcatacttcttgagcttttgcaacaaaagcgcaactttcttcttcgcctgcatcaagagagacatcattaaattcaactctctgacacacttcaccgcaaaacaaccataaagaatccaactttcttacacaaaccactcagtctcaagttttcacaataacaacacacataaagtctcaactttacaaaatatga

SEQ ID NO: 9718 - DNA, 853 bp, Arabidopsis thaliana
tagaggtttgttagcattagcgggagtatttccaaaggcttcgagctttgagttcgagttgggcggctaggcaacgtgaaccaacgtaattaaggtgtttagatgtcaagaaaggtttgagaccttaacaatcaagaatggagtttgctggtgagtggatttttgggtcaagaacaagagcaataacacaagctgctgtgtgatgatgaatcttgtcttgcggctaaaggaaatgtttgaggaaagttgtacatatgatcagcaacgtaaagtttatagctttttagaaaccaacttttcgatggttgttcttttttttttgtatgtaatattatagataagcttgtggtatatatgattttaatgtgacattacgaacttgatttataaccatggtaaaattatttaacaaaatatgtaataatagaatgggggaaggggaataaataaaaagacattagtgaaaattacaaaaatcaatgtgaatcatatatagtcgaaaagagataaaaaaaacaatttataaaaaaaagaatcaataagcaaacacaaatgtttctgtcagaatcaatgggattagattttcttctacctttacaaggaaggggaaaaataatcaacaaaaaataaatgtaagaacacctgaggatcattctgaatcatctgatcaaactactagagagaaacataaaaccagaaaagaagaagaaaaaatgggatgatgtgtgaaaggaaatccatggagatttacagaaaaatttagaagagataaaaaaacaaacaaatctcaggcagaaattgaagtaagatgatcaagaacttgtctgatgttaggcctttcattgacagagag

SEQ ID NO: 9719 - DNA, 607 bp, Arabidopsis thaliana columbia
atcccctgaatcagtaggtaaaaccctaacctgacgacgtgaggatcacgagcgagcattcgaaaatggagatctcgcggagagtggtggaaggaacgccttcttcgtcctcatggagacgcgtcttctttagagcgacgattttcccggtagctttctctctggctctgtaaactttcccgtatgtcccttcaccaactttctcaagcttctcgaaagcatccatggcggaaactgctataactccctcgtccatcgctctctaaaattcttcttctccggcgctctctctctctcagttggttcttattgggaaagtgaattgtcggagatcaaagtgtagataggttatataattaaatgagacctgaaattatagaatccttattcttgggctttcacaacggactgatttttcgaaattcaaactggagcgtggaggagcggtcttttcataaacgcctttttttaatttgccacgtactatagtatttaattttaatttttacatttattcatttgtgccacttgtcatatatatccgtagtactttgatttggcgcacatatcaaattatgacgagaaggcacaagaagttagtgaccca

SEQ ID NO: 9720 - DNA, 587 bp, Arabidopsis thaliana columbia
ggcaatcagaggatgatgatgatgaaggcttaggagatgtcgaggttaagacttttctccaatcaaggtatttccattatactcagatgctgcctgattatttcctttacaataatgatcgaatttgggatcggcttttgctgataaaacttgtgattctggtctatgatagggtcaagcgtggcagaggttccgttggtgctatgatggatgaaccgctaccctgtcttcctgagagggaattgtcaagaacttctgatacaggagatcggaagctagtgattcagccagagcgatcacctttattgagacgtaggacagattcttcttcttccgacgaggaggaagtttacaaacgggctcatagaaagagaaaggagcatcagaagacacttagtaagaaacacaagtcaaaagagaagacaagggataggaagacgagaaaatatggtagggactagatctttccggacaaaagtaattgcctttttacaccggcagtgatgttgtaccataagatgatcatatttcattaattcttgtattagtaaaatgcgaatagaaactctttgaagtaaggtagagag

SEQ ID NO: 9721 - DNA, 549 bp, Arabidopsis thaliana columbia
ctaggaggtgtatactcactcgattttttctcatcagaatctgtcgtggtgggaagagtttcagattcactgctcactattgcactcgctggttgtctattagctaaacgactccgttcagccctgctaagaagatccgaaacaaccatagaacttgtatcgctcttcgtacgacggagctcaggccttgagattacggattggtactgtcgagaagatggagattgtggattctttgagctccctttgttgctatttaaatgcaaatgttgtagatgatgatcttcttctccgagcaaatctctatatcccacagcagatgaatccatatgcgtataaagcggcatactccgcatagaaccatcaattaatccaacaccaatgttcaaaatcccctgaggtcgacctgaagtacgacgaacttgaagcgcaacaaatctcattcctggaggtggggtacgacgatattcattgttgctggttctgtatcctggacggcgattaggaggaatgaggttgctaatgaggacaacgaactgtcctacatga

SEQ ID NO: 9722 - DNA, 707 bp, Arabidopsis thaliana
tcccctactcaatgaattattggtttgaagtcagtattgtgttttcccgacctaggatggctaaaaaactcttgataatattagccaccacgaataattttgttttaaactaatttgtgatgatggctgatcatatttaactattttctttctttttgcaagatggccattttattattaacagaatgttttcaaacataataattgctgttatagtttaatctaattgaacgacttaaattaaaagagattcgatacttgatatcatgcattagtaaaaataaagttataatattttagatttcacttacataaatagttagctattcttgacggtttatataacaaaagtatccggtgttaatttcatacacggaaatctgaatcttgatgccaagattccagttgaaatattaataactcccattatgcatcatctaatgataattacagttttaagcacacacaagaaaaaagtattattccatgacaaaatattatacaaactataaacgtacaaaggaaccaccacatcctgatagatggtgatcatttattccaaattatagaaaacacacacgtcctctatggacaagtttctttcgtctgcgtacacatatagttagtaaggcctacgtcccctaacattaccaggatgagaatagttgcaagtcacaaaggttccaccattgtcacacttgactttg

SEQ ID NO: 9723 - DNA, 601 bp, Arabidopsis thaliana columbia
tttaaagcgccgtcctcctgcagatgagaaggtctgttgctgctgcgggctttaatcatttgttgccactgtctattttcagttttgagataattttaatgttagtagtatgattctacagttagtattatttgctaagaaaaatgtctttagtatctctcaggttgcttggaaatggctttccttcacaaattctgctaggaaagatgatttgcagctttaccattgggtaagttccttatctgtggaacaccattgtagaaacgcttaacatttcattctttctaaatgtgttatgcatttggggttttcttatatcttcacaggttagagtggttaatgatgttccaccaacaggtgactattcctttgccaaatataacaaggtattatatttgccttcatgattgtctattttagtgtcattgagtaacttttgctgtcctctctccgtttctgctttttttctgacttgtttttgttattggcatttgattgtttgtatctttgcgtgaatgcagtcagttgatattttgaaatacacagacgaggagtatgagaatcatttaacggattctgtaagtgttttctcaaggaggag

SEQ ID NO: 9724 - DNA, 226 bp, Arabidopsis thaliana columbia
cacttttggaattaccagcatcaacgactagattttccaaaaattagtcaaacacacctttgattatcctttccgcttgcgcctttagtttctcatcagttatgctagacaatggtatttctcatcaatcatgcgggacaataatatttgttgtctgacataatattaggctaaggataatataaaatttaaaatataataaaaaggtaccatagtatttacaagg

SEQ ID NO: 9725 - DNA, 567 bp, Arabidopsis thaliana columbia
cttgttaatgtaaatcattttaattggaatctaagaaaaaaatatttacttttttagaatttgaagtgattgaatctttgaaagaaaagaataacattttttcttttggtatgggtaaacctttttttaaataacatttatgtttttttttttccgtctaattttatttgtattgaaaaaaccaatgtctgaaagtcaagaaacaaaacagaacagagaaacttaaaaaacagagcataacaccactcacattaacaactgaaataaaaatttaaaagcccaaagatcatcttctcttttcttcttccagacgcgataataaccacgagggtcctccccgagctaagtaagatctactccgcccatctcgcgtgacgctagtagctatatcccttgtaatccgatttgcttttggggaagataactgaaaagatactttaccaaagctcgggacaagatgatgaatcttgttaagataagacgcgtaccgtggccaatgtaaaggctccaggatagctttgatggcagcattacaatcagaccagatttcaatgttatccaagtgta

SEQ ID NO: 9726 - DNA, 520 bp, Arabidopsis thaliana columbia
gccagtgtgctttaaagttgcgaagaagatccttccatggaaacgtaaggccccaaatatggatttgtagttatcaattcccatgaaagtgttcatagggtctttgaaaacaatatcatccctgcgaaattagacaagagaaagagctaatcaccaactgataaaacagatcattctctaagaaacctaaccaagaacagatcaaatttgggatataagcatgactctgaagcaaaaagattctttgagaaagctaatcaaagagcagttcaatttaaatcgagaatcttcatcaaacctgtaaatgtcaaaattaagctctttgtagaacaacaaaggaaactcttctctgatactacgaacggcgtgacccatattcacgtagtaactctgcttatcttcttcttcttcttcttcctcctctctgctaatcttgtagtcttctttcaccggagctgagaattgccagtacaatctcgatttcggattcttacaccaggcaaatctctggcgtcaatcg

SEQ ID NO: 9727 - DNA, 502 bp, Arabidopsis thaliana columbia
ggttgtatagcatattctggcctggtttaaaggcagccccagataccgagtaggaaatattccaagctttgtcccttgcaaatcacttagaacaacaacttgaatgtctgaataactaccaaagaagagttctaactttgcttgatttacatccaacccacttagttctttgaagtgtttcatgacttcacttatactagtcagagagtgctttgcttcatcggagaaaatcagcagagcatcagcaaatagcaaatgagttagtcttggtgagtcacaaagtgggtgcaatctgaactttccttcatatgtagcttggctgaggagattggagagcactttcatgactataatgaagagatatggagaaattgggtcaccttgacgtagtcccttttgccctgggaagaaaccagctagttctccatttacagagatggaaaaccttggagaagtaatacattccttaatccttggagaagtaatacagaggcgactaggg

SEQ ID NO: 9728 - DNA, 403 bp, Arabidopsis thaliana columbia
tgcacttgtgatctcaacctcctcgaatcaggtctttgcttttgatgtagaagctagacagttaggcaagtggtcgttgctaaacacttatgttctgccaaagaggtatcaagagtttcctggggaggtccttggactctcattctccccgtcaccaaattcatcatctgtgatagtttacagttccaggtactggttacactacttaccctagtcagtccacaactgccttttatacatagaaccctttataattcaaatactgtttacatatcagagcgaaatgtttgatcgacttcgggaagcctgtggaagaagatgaagagtatgatttaccaaacggcaatttgtctaaaacgctagaaggtaaacttgtcaacttgggcttgaaaaagggaaaggg

SEQ ID NO: 9729 - DNA, 506 bp, Arabidopsis thaliana columbia
cattggcagacatgcggatttcttgaacggttctctgagatttctcagttgatatagttgagctactgtgagctccttccttgggaggcagtagcattggacacctgaccgcgataataactttgtttacactcgcactatttccactagcaaaaaggagtcgcatatcactatattcctcatcttcataagcacacatgagccttttccccaacttatgttcgaagccgtagtatccaaaatagcttaggatgtgtgcagcataccaccttggaccagagccatatgttccatcgcggatttccttaagtgtggtgcataaccgatctttcaaatttccgctcttcattgaaagttcttcagcgtgattctgtccaaagaatgaatgatttaccaactcggccaaagccaagagagcgtatagaagaaaggcatctttgttgtccagtcttccgtacataccagcagcatatcctcttttcagtgatgctctgggaagaaggagc

SEQ ID NO: 9730 - DNA, 754 bp, Arabidopsis thaliana
actttgtggtcctacctttcgcaaatccccccagtcataagccaagacacatcaagacgttaataaacacaaactctgtttctttctcttcttgaatcggcaagggaagaagctatgatcatgtacggaggaggaggagcagggaaggacgtggatccaccaatcacttatcagacggaggagtgatattgaagaaaggtccatggacggcggcggaagatgagatacttgctgcgtacgttagagagaacggtgaagggaattggaacgccgttcagaaaaacacaggtttggctcgttgcggcaaaagctgccgtcttcgatgggccaatcacctccgaccaaatctgaaaaaaggctctttcaccggtgacgaagaacgtctcatcattcagcttcatgctcagcttggtaacaaatgggctcgcatggctgctcaggtataacaacaacttatacatatatacttggtgttacctgcgttacacgttaactaatcttcatgcaatttattatagttaccgggaagaacagacaacgagattaagaactattggaacacgagattgaaacgacttcttcgccaaggacttcctctttatcctccagatattatccctaaccatcaactccatccacatccacatcatcaacaacaacagcaacataaccatcatcatcatcatcatcaacaacaacaacaacatcaacaaatgtattttcaacacaatcttcacaacgaaacacaccatca

SEQ ID NO: 9731 - DNA, 521 bp, Arabidopsis thaliana columbia
gtgctatgttatctgctttttcattatgaatctacataaaataaattattctcagttttttggaggtgaaatttagacaaatcttcgtttaaattttaaatatgcaattatcgtgtggaatttacgatggtatacaacaacgatgttgaacaataatgatgactagtaaatcactattatttggtttaactcgattaaatcaatctgtattataaactaaactagattaaaaatagataagacaaaaacaattaccctggcttgagttcttctgttttgaaaccaaaatttgatttgtttgtgtttcagattcagttcgttacccaattgacgtcgctgagaatcgtctggatgtggacattcatgaaaaaaccttaaatcaaattttaaaaaaaaacattaactgtgaattaagaagccaaattttataagaaaaaaaaatctaaattaattaagtaaattaagatcttacgcttcgagcttttgacttgatgattagagtgatggcgggcgattgtgga

SEQ ID NO: 9732 - DNA, 563 bp, Arabidopsis thaliana columbia
  unsure (1)..(563): unsure at all n locations
gtctaagcttccattaggcatgtattcgtataaaagcatcgtgcaatctcgattcgtgcaacatccaaggagacgaacgatgttccggtgacgtacgttccctagaacatcaacctccgccaatacgccgctcttccgccgccggattttgccgttctctttgttttttccccaaagttttttcacggcgattatttctccattaggcatctctgctttgtacactgttcctgttgatcccattccgaggatgttatcagtctttgagagacactcaaccacatcatccgccgtgaagtttagtctctgaaaagccgttagcttccacggtcctatatctccgccgtttcttccaccaccgtcgactctgtttccgtagcttttctggaagcatctagtggcggctacaaggacgaagaatccaaccccaatcgccgccgccaatatccaaacaatagctccggctgttttcttaggtcgttcctctttatgatgacgtctatatctgcatttccggcgttaaacctatcagaattgcaaggtttccgacgagatnccacaga

SEQ ID NO: 9733 - DNA, 343 bp, Arabidopsis thaliana columbia
ttagaccaagccaaggagatagcttctagaacattaggcttattgagcaaccgtttgtcaaacctgaactgacccctgtaagtgtcttgagattcaatgagctttatcatcaccggtctatgatcggatcccctccaatccatagaggtctgatttgaagctgggaattgtgagaaccaatctttgtttccgaagctctatcaagcctactttgaacccaaatatcatatcttctgccagcccaagtgaacttgttcccatgggaagccatctcaaccatatcacaagcctgtaacatgtcagcaaaaggcaagaacacattatcacttctcaaaggccctcc

SEQ ID NO: 9734 - DNA, 491 bp, Arabidopsis thaliana
gtcgcccctaagacttgcttgctctgtattcttaagttttgatctgcactgcaaagatacgaaatcgtattaaaaaaattggataaactaccatttattaagaatatgcttgactaccttggatagaaatatgcatgcgacttcaggtgcgccgactactcgagctcgccgtagaaactttctccaaaggtatccaatccatcgttcaggttcaattcaagccgtacggcatgcgatcatcgcaacgttcacgacttggagctaagtcaaattcgttctatatgttgtgttttgtggtataacatttattttcttccgaatccgtaatagcgtcgtgcttgagaacgtccacacttaagaaagctcgatgcctataaaccaaacccgaaccaactcctatacaaaagctcaatgcctataaaccaaacctgaaccaactccagatgaccaaacatatcagaccagccggtcaaaaaaaggaacacaatagt

SEQ ID NO: 9735 - DNA, 798 bp, Arabidopsis thaliana
cgaattgatggagtctttgctacggattgtggaaaaccatgtcttcgatacatattggaacttcaaaagagattttagtgataatctagttagtatctccatcgttagatccataggtccattaggcccaaacgcccaatcacgtggcgtgataaatacgttaacaattgcaatatgaagaaaacacgacaattaaatatggaagagaggctaattattcatcggtccaattgccaatgtctttgactgtagttaataataaatcattaagagattttcgtttaaaaacaaaaatacaccgtttcaagattaaaagataagttaattacaattgtatttttcctgattaaaaatcagatgtttacagggaaccgcagatcgctcagaaagtgtagtaagatgctcgcaaaaaccatgtgcatgtccatcaaccttcgccgtctcaatagcttacacaaaaatcgtttttgttttcttattaatataaaacctaatctaaatttacaaatttgttttcttattaatataaaatctaatctaaatttacaaatttgtattacacgtacaagtggatccaagtatctgactctacagatattttgaatctaacatttgtgtaattataatttataatctctgaagcatttaattttacttacaaataatgttagaccacgagacagaaggtaaaccaatcttccttatcccaagataagattcttcaaattaaatataacggctttttgcagaagtaataaagatagaaggaatatctagtatcaacggaaaaaaagaaaa

SEQ ID NO: 9736 - DNA, 612 bp, Arabidopsis thaliana columbia
caaatcgcataaaaatgtaaactttttcaaacagatccttaagtaaaagtaagctttgtatagaaatgaagtagaagaagagattttgtaaaaagaattgaccttgagggacatgggtgagattgattccagtagcgaagagagcttcttggttagttctggagagctggatcatgtctccgtaggcagtgatggtgatgggtcctttgattccacagattctaacggcggatgtgatggtttgagccaatttgaagacatttgcacccgacggcaaatggcagttctcaaaatcccaccatacagggaccctaacactccgtgaatcttcctcgtattgagaacgcttcaaagaagtgtagtgagcggaaatcgagctagaagaagaaaaatttccgaccggaacagagatcgcgcgacgcggcttgaagacggaggtggaagagaaaccggcgacgcggaagaagagggttttggaagatccgaattgcatgattatctcaaggaatgagtagagcaaggagatgtttcatgcgtgattgtaatggcggaaatgatttcatagagctgtgggttttagcatttttaggagtttgaggaggaagatgaaga

SEQ ID NO: 9737 - DNA, 567 bp, Arabidopsis thaliana columbia
  unsure (1)..(567): unsure at all n locations
nnnnnnnnnnnnnnnnnnnnnnctaaagcggcaaaccctgttcaacgctcaactttatccgcaggtaagaccgccatgttcctggcgtttatggggatcagtgagggtgcgattccgtttgcgctggaaagccccatcaccgccattccgtcgtatatggtcggcgctattgtcggctcaaccgccgctgtctggctgggcgcagtgcaatggttcccggagtccgctatctgggcatggccgctggtcactaacctgggcgtctatatggcggggatcgcgctgggggcagtcataactgcgctgatggtggtgttcctgcgtctgatgatgttccgtaaaggcaaattgttaatcgatagcctgtaagaaggaaaatccagatgacattactcgcttcgctgcgcgactggcttaaggcgcaacaactggatgcagtgcttctctcctcacggcagaacaaacagccgcatctggggatctccacggatcaggttatgtggtgattagccgtgaaagtgcgcacattctggtggatcgcgctattacgttgaggtggaagccgtg

SEQ ID NO: 9738 - DNA, 415 bp, Arabidopsis thaliana columbia
ggtatgaaggattatgattccaaagtagtatactttagaatgtaggatttgaattgtgatgtatgattatacgatgttttgtatttatcaggtgaaagaacaatgcatatgtgctctgtggaatctgactgtggatgaagaaattagggagaaggttgctgactttgatatccttaggctactcattagtttccttgaagatgatgatgtaaacgtaaaggaagcagctggtggcgtcttggccaatcatagcccttagccgctcgactcacaagattctggttgaagtaggagtcataccgaaactggtaagaccttgcttttcaacttatagaatttaacaatatattagatatgttagaatgaaatgattgctcatagtcaagggtgagaattgaaattactgcacggatgt

SEQ ID NO: 9739 - DNA, 595 bp, Arabidopsis thaliana columbia
cccttgctgtgagactatgttctgtggtgtacctactcgtatgtgttgctctagtggttttcgcaggtttgatgtcaggactgactcttgggctcatgtcccttagtattgtcgagctcgaggtcatgatcaaagccggtgaaccccatgaccgcaaaaatgcaggtcagtttcatgaacccattgacatactcatactttaatacttcatattcatactaacgccattttaaaaaaattgtaacaaaatggccagagaagattctgcccctcgttaaaaaccagcaccttctcttgtgtacactccttataggcaatgctttggcaatggaggtatcaagcttattgcatatatatttggatacttatttgtgttgtgcacactttggctttttagaacttatgatgcagtttttactgacgctgttttcaatgataaaatttgaaaggctctaccgatctttgtcgattccctgcttccagcctggggtgctattctgatatccgtcactctcatacttgcctttggcgaggtgaatggaatttgagttagctttctctgctgatctgatttttaacacgcccaatagcttat

SEQ ID NO: 9740 - DNA, 839 bp, Arabidopsis thaliana
tgtggtcaagcgttcttctattgctttcaatactttgatatgtataacatgggtgaaacatgttacagcaaaaatgtcacaaaaactcttcagccttgttaagatcatccaaaatctcagtcttaacctcatcaggaagtggtgcagaaggacctgcctttgagtaaaatttcgccaaagcgcggattacattctccagctccacgtatgattcctgaaacacatgaatatttcaatcaatttcaattgatcaactttcaataaaagaagaagataaagattaaacaaacatacttctccggcaacagtcttttgtcctctccaattgctcagataatcacgaatggattctttagcagcatcagcacttcttctgaacttagcattgtctttagggttctctttcaatgactccctcatggttttgacaacctctcttgcagatttcaagtaagcttttggtaactctttgccagactttgttctctcattaggatcaaacaaagtcttgaaagcaccaacaactccttctccttcgtctaacttttcctctgacgcctgagcttgtaatccagaaaactcaattgtggccatgaacgaagaagcaccaacaacacatttcaagaaaccacgacgatcaaacaaagatgatgtttggccttgacgaagcttttcatctattttaatttgcaaagtttaaagcagttaaataaaacttgtagatgagtgtagaaatcgtgaaatcaatccatctcttataaaaaactaaatcattgaagaaacatgtttgatttcaacattggatgatataacaacattgacattaaaccagaaaagag

SEQ ID NO: 9741 - DNA, 478 bp, Arabidopsis thaliana columbia
tcaagtcactcgagacgcttctcctgtacgagaataacttcaccggaacaattccaagagagataggaagcattaccacgctaaaggttcttgatttctccgataatgcgttaaccggcgagattccaatggagataacaaagctcaagaacctccagctactgaacctgatgcgcaacaaactctcaggctccattcctcccgccatcagcagtctagcacagttacaagtcctcgagctctggaacaacacgctctccggcgagttaccaagcgatctcgggaagaattctccattacaatggcttgacgtttcttcaaactccttctcaggcgagattccttcaactctatgcaacaagggaaatctaaccaagctcattctcttcaacaacaccttcaccggtcagattccagcgactctttccacttgccaatcactagttcgtgttagaatgcagaacaatctactaaacgg

SEQ ID NO: 9742 - DNA, 551 bp, Arabidopsis thaliana columbia
cggaaagattttcgaaaccatcttgtggagtgctctgtttaaaaccatatctacaaaagatctgacgagcttctttctgagtaggaaaatccacatagtatgtattcttaatatcgtcatgttgcttcaaaagctcttgattttctgtggtcactacaaccctactcccaggaccaaaccacttagtttcattagccaaagcttctagttgcttcagatcgtccacatcatcaagaatgataagcactttttggtcgcatagcattccctgtattgcacttaaattgtataccctcataccagtttggtttaaaatcttggaaagaagttgttcttgtaattgcagcttcaaaccatactcgtcaagactactattatagcttcccctaagattctccataaaacaagtaagctgaaacctatcagagagtagactgtgcaaagctctggcaatggtagtcttaccaatacctgcagggccatagattccaacaatcatagcttcatcatcattatctaaatgtaacaaagactgtattttctccaggtgt

SEQ ID NO: 9743 - DNA, 506 bp, Arabidopsis thaliana
tcccctgccttgaacaatagtacttagtgccctgtggttcctcgagtgccagccgcagagaggaatgccatcaactatgaagcaacaggtattaagaaaatgattgattatcatcaatttgtaacttcgtaccaacgaaaatatgcgggggaaaaagacgggatataaaacaaaagttacataggtaatgattttattgtcaatctgtactgtgttgcttacgacatgtgaccattgtttcaaacaagaatggaagctaaatcaaatttgttctatatgttgtgttttgtggtataacatctatagtcgtccgaatccgtaatagcgacgcgcaaaggcatgattagtgttacaaatctcactgcactgaccatagtaaactacttctcgtctgtacaaaatagagatttgatttaaacgaccaggtacagcatcacatttgacacctgaggaaggtacagccaagtatgaggtaatcagcagatgttaaataatacgtagatgag

SEQ ID NO: 9744 - DNA, 523 bp, Arabidopsis thaliana columbia
cataaatctgatagagatatcattttttctagcaaattttgaaaaacaaatagtcaagtgagaaataaagcaaaaccttcaagatcagtatcttgctctgttactactgtagaagttgactggcaactaccattgtccacatttccacgttctacgtatacaatgtgtggatagtttggatccgttgctagaagatttggctggaagatgagcagggataatagttattgataaatcccacaacgtcattaaagatgtgcacaaaatataataagtaaagacatacctttgggagttcatttggacggcgaattgaagatgtcctccatccaaccatagctttctcattagttaaggcaaactcttgtaaatgatagaaataatcaaaaaccattgacagtctctttaaaaacatgtttttttcagggaaggatacaatcaaaattcacgtttgcatatgcacacgacgcttgaaagcatttaaagctgatctgttgaggtcataagaagagatgatgagcat

SEQ ID NO: 9745 - DNA, 477 bp, Arabidopsis thaliana columbia
caagcgcttcacgaaacccactctcctcgcctgaacttttcatctctgagttgacaaagtctcgagctttcgacaaagcatgacccattttaagaacagtccctgttaaaccatcggcatctatgtttgcagatttctttacatgttcaagctcactgctcaagcctgaaactttctcaagtccaagattacggtaattctcttctgactcttcagaggtttcctcgactaggagatcctctgttttaacacttgagaaactttggctctctctgatagtacgagccgctcttacaccttcagtcctaattatctcttgaacaacaaagtggaggagcgttgttttccatctgttcccttgacgtctgctaatttcaaaagagtgtccagcttgaaagcttgagcaccacccctaaatgtaccatcattcattcggtttccggtcttaagaactgcctctaagagcttcaggaacag

SEQ ID NO: 9746 - DNA, 543 bp, Arabidopsis thaliana
caagatgctgctgtcactactactgacatggatatttctgaatcctctcgagctttggtcgtagttccacaagcgaccaatggccaagcgaaggaagctacgaaggatgaagatggagtcattgaaggacaagctgacactcggttagtggagttttttccaactccaggcacaatgatgatgactgctcaaccaaatcttgtcttggtaccgaaagagacagaacaacagaaaacaactggtgggagtcatggattcgatcttatggaagaggaaccagttcgtcaaggagagaagttgccagaggagctattacatctagagcttggaaacaagacaacattgagtgtagacaacaacatctctacaacagaggcgcctgatctatagaacctctggctttaatttatagtgaacttttttgaaggacaagacaagaaggtagataccaatatggaagcagaagctactccatcagtgcaatagttagaactctattcggttgttttggggatatgtacaaccccattatatattgtgttg

SEQ ID NO: 9747 - DNA, 610 bp, Arabidopsis thaliana columbia
  unsure (1)..(610): unsure at all n locations
nnnnnnnnnnnnnnnnnnnnnnctaaaggaccctgacttcccgtggcagctcaccgcgctcgatggttacggtgccaacctgacgctggttaccgatcataaatggggcgtctggagtggctcggcgaatctgaatgccgccgccgcgacattcaatcgtgttgatgttcgtcgcccgtcgctggcgctgaccgccaacagcagcacggtgaatatcagcgaactgagtgcatttactgaaaaaggcattctggaagccaccgccagtgtttcacaaacgccacaacgtcagacacatatcagcctgaatggacgcggtgtgccggtgaatattttgcaacagtggggatggcctgaattaccgttgactggcgacggcaatattcagcttaccgccagtggcgatattcaggccaatgtcccgttgaaacctacggttagcgggcaattgcatgccgtgaacgccgcaaagcagcaagtgactcaaaccatgaatgctggcatcgtttccagcggtgaagttacatcgacggagccggtgcggtaaacatcaatctcgccngggtacgactcagacgtaccggcattccatcaatagattccacgtaat

SEQ ID NO: 9748 - DNA, 296 bp, Arabidopsis thaliana columbia
ctcatgtactacacaaagcttaccagtacaaaaacgtttgcaatgcatccttcgctggactctggttgcatcattggactacttgagacctcaaccgtgtgaaacgagctcaatcgtatgccagcagctatcaaaattacagcccgggatcttatatgcagccttagctctaataacaattggatcaagtgggttgcaattcaccttggcatccgtgggtgattataaataatatgaatataagtccatgattaaattgtatttggaaatattgacccgtttgtgtagactgtgtg

SEQ ID NO: 9749 - DNA, 595 bp, Arabidopsis thaliana columbia
gcaaagcatactgattcatggtaggatctgaagtttttaattattgcacttgcttctcttagccatgaaatataggaacaataaaatttgaaagttttttaagaaataagactgaaacaaaacggtgaactatcggaaggcattaaaatcagatagaggatcagaagaaatcaaggaaagcatgtacctacaaggtcaccagtccaaattgcagcttcatcgccaccagttcctgctctaactgcggaaggaactaagatttcagactcgtccagaggtagataggtaaaacaatggcgggaagtccgagcaaaaggcagtttttcaagaaaaaaggccagtgtagacaaatgatactacttgtcgacatatagtttagtcagttaccttcaagcaaaatgtttctggcatcaagaggatcggaaggaagaagtaacacctgacacaagccaacacaatgttacgagttgagtatcagaatcaaatttttaaaatgagcaacattcgatgttcagctgccgaataagtcagctatggaaccaaggctctaaaccttaagttgtttttcaactcctcaatttcttttgtgagcgag

SEQ ID NO: 9750 - DNA, 548 bp, Arabidopsis thaliana columbia
atctagaggagccacattagcggaggcacttcttcttgaatctcatcgcgaacgttcggtactacatcttttgcaaagaattacctgtggtaagttacttttgtgcaagcttttttgagtaatagtctagtggtttattgtcatgttaattaggaaatatattacaaaaatatattgtagataatttttaacttgtatggagcaagcatagactccaagatgtctgtctggaattcttggctaataacagatatatttatattgtatatgatatgtaatagtaataccacgattgattgagtatattggacctattgatttataggtactggaagcttttgcccatggagatgagtatttgttaaataatcaccccgagctactagaatctcctgtttgggtttattccattccaacatcccggagtacaacaaggtcgaatgttggggaccgctttgggagccatgtcgcagcaccacacgacggaaggaccacaagaagagtgaactctaccggagctacattgtcatgatgagtgcaagtgttgc

SEQ ID NO: 9751 - DNA, 559 bp, Arabidopsis thaliana columbia
ccgttacgttgacgacttaaaatacaagcacgatgatgagtgatctaatcatttgtttgtgtaaatttctagaagctgcaaataaaatgatatagatttttgaaaatacctaaaatgctgatgattatgattagttgattactatggtctatgagatttctttttttttttttttggttaggtggtctacgggaatccttaaaataaacgaattgatttcttaatattgattatagttacatgaaatgaaaactatgggaacttcctgtcaaaattggtggaactagataaaaaaataaattctaaacaaatttcttatatcttttatgtttgaaggtgacaaacgaaaaggatctttaccatttgaacatgaaatttacaataggattacctcctgaagcagtcttcgatatactcactacttatgagaacccatcatacttcacaatgatgaaaaagcgccaaactctggtatttatttcttacttcctattattgtattgtttgatttgcgaactaataatagccgtacttgcgaatgtgatatttcttatgaagg

SEQ ID NO: 9752 - DNA, 550 bp, Arabidopsis thaliana columbia
ttaagctattggctaatgccactgtcttatcacaacacatgattttgctgaggtttagcatcaatcacgaagaacctttatgatcttgcggtatacatagtcttcaaaagttaaagactcaaacttgggaggattctcgtctcccgtgagctcaggcaaaggtcccacgaccaaaccacgcttaggctctaccaaaatcggccacgacattcttgtctttttcgcatccattattgatctgtgtagcacgttcttgtacttcccgttgctcatcctctgcatgcaattcacacattttaaaaaccaaaccccaaaaacatttccaaaagttaaaaaccaaacacaaacggaccatgatctgatccccaatgaggacaatgacagcggagttgatatactcaacgtcgaaccaatggtcatccttgaacacttgaagccctggaacctcgttggagacaagaagtgcgagtccacaaaaatctgtgtgcgccggtgctccgatggctgaatccgatggcggatagtaattgatctcatcacatactgtgct

SEQ ID NO: 9753 - DNA, 485 bp, Arabidopsis thaliana columbia
ctttattcaaccataagccttttatcagcaacaacttgtacagtatttttaccccatatcttcaccaataactgccgaacatatgcattattttgtaaccatgaccactatatctaaaaaatcaccattcaaaagttttactataaaaaaaaaaacccgccaaagtcttacatcacgatataaaagcatcaagtacatcagtaatagtaataagtggataccttgcccatggatcattttcgtcccataaatcacccgtctcaagagccatttcagcaagagatatgccttcttctgtgagttccactgagttttctttcagttcaactttgtaatgctattaacaagatagtcaaatatcattttagaaaagtcagttccattacttaaaagaaaaaagctcgcaatagaacaatagacaaagggaaagatgaaactcgctctatcctttacgagaagttcagccactttagcagaaactggat

SEQ ID NO: 9754 - DNA, 533 bp, Arabidopsis thaliana columbia
cgacctctagagaaacgggaagaaagttgtgttaccggaggtcgaagcacatcgagcttaatttcggagctccgaaacccagcttctccgaatacccgattcacaatcggatcgtcaaggatcgagagtatgaaatacttcaattcgactttcaaaaccgtcgtctggcatcctcccccgccgttgttactagcgtggatctgctgaagatgatacgactccggatgccgtctctggttcgcctgagaccgtttgatcgccgccatgagcgaattcgaaaccggtggatcttcttccgtcgccggagacttcgacgacggaagcctgtcgagagatacaccgacgcagagctcaagagctcggaattgaagtcgcgacgagtaaggaacactcctagcggcgcgtgagacgcaaacttcacggagaatcgacgacggcatagctaaaagagcagaaactgcatgaagagacgtcgtctgcgcgtggcttctccgacgagctacaacaacagcatcgtcgagggcacgagcagc

SEQ ID NO: 9755 - DNA, 628 bp, Arabidopsis thaliana columbia
atcgtgaagccggtgaacaaaccagttactgcaaaagatgctcaaaatggcgtgaaaacggaacaagaagaggaaaaaactgctggagaggaagaggaagacgaagttatcccagaaccaacagtagaaccccccaagatggtccgtatggccaaccttgctgttgtgggtggtcatgctgtaaatggcgttgcagagatacacagtgaaatagtgaagcaggacgtgtttaatgatttcgtacaggtaaacattctaactagtgaagcatgatgctataaaatgctctacagggaagaacacaactctcatcgttcaatattctatattttttgcagttgtggccagaaaaatttcagaacaaaacaaatggagtaacaccaaggcgatggattcgtttttgcaacccatatttaagtgatattataactaactggataggcacagaagactgggtcttaaataccgaaaaggttgcggaactaagaaaggtatgtactttatcagattcaatgttgtttccatgctgttactttattgggcgacattggttacattgtttggctttcccagtttcagataatgaagatctcaactgagtggaggcacaacgagaagacaagttgaa

SEQ ID NO: 9756 - DNA, 519 bp, Arabidopsis thaliana columbia
tgttgatcctacaagtttctactctgcaaaggtattccaagagaccagaccaggtcatgtaccctactactaccgaatcctaatctcctgatcctggttaaggattttgtaaagtattgttacttaacgagcatatcaaagtcaccagagtgattaggtagcttcagtcttcccataagatgcaaagcacaaagagtattggtaacaatcaaaatgtacaccctgcctgctacagttaacaaggaaatactacaaattactggaattttttaaaaagaaagaccaagtgagagtgaagtagtaagaaacaagagagaacttcagactaaatctgcagagagctccattttcatcaaatgaagatttgtgaaatcacctgactttaacaaaaccgagaactctcctactctcctaagatatttcaatttcctactcacaatgaaaaactcaaaccttacacaatgactatcctataaaccagacactataactaaggtcattgttgcttcaaattggagc

SEQ ID NO: 9757 - DNA, 552 bp, Arabidopsis thaliana columbia
  unsure (1)..(552): unsure at all n locations
nnnnnnnnnnnnnnnnnnnnnnctaaagacccttcatattcctgacccagcaccagtaccattttcgctggcagactagttttgaacagcggtttaccctgctcgctggaagtggtcactacggtgtaacctgcctgacggaaatcatccagcacgttaacaatgttgtcgccagtaatcggctgaacgtgctctgcgccgccttctgcggtacggatagccgcccccgactccagcagtgccgcatcctgcaccacgacacctttcacgccgaagtgcgcgcactgcgactcatgccacccaggttatgcgggttagattcgttttccagtgccagaacgcaatcctgcgcgcctgcctggcttacccactgctgcacggttgtaccgttacgctttttgatcaagaagcaaacgccgccgtgatgttccgtgcctgacgcttttgtcaattccgcttcatccaccacatggtacgctttgcggtttgctgccatccagcgcaaagcttctttaaaacgcggcgttacactctggataaaccactttagag

SEQ ID NO: 9758 - DNA, 516 bp, Arabidopsis thaliana columbia
cccattctacccctcttcttccttctaattccccctcaaatgccactgtcttctcactaaactccaaaacccaccggaaaaaatgattacgtggcacgacttgtacaccgtcctcaccgccgtggtaccactttacgtagctatgattctcgcctacggatccgtacagtggtggaagatattctcaccagaccagtgctccggcatcaaccgcttcgtcgctatcttcgccgtccctctcctctccttccacttcatctccaccaacgatccttacgccatgaatttccgcttcgtcgccgccgacacgcttcaaaaaatcatcatgctcgtcttacttgctctatgggctaacctaaccaagaacggtagcttggagtggatgatcacaatcttctctctcagcactctcccaaacactcttgtcatggggatcctctgttgatcgccatgtacggaacctacgcaggttctctaatggtccaagtcgttgttcttcagtgtatcatttggtac

SEQ ID NO: 9759 - DNA, 934 bp, Arabidopsis thaliana columbia
atctacgcagaatgtggatcttcctcctattttaccaaagaacaagaagaaaccttatcctattccttttaagcaaatccaagaagaggctaggaaagataagaaacttgctcagatgggtatagagaaacagttggatcctcctaaaaatggattgctagttcccaatcttgttcctgtggctgatcaagtgatagataactggaagttgttgatcaagggtttagcacagcttcttcatgttgttcccgtctttgcttgtagtgaatgtggagcggttcatgtggctaatgttggtcataacattagggattgtaatggtccaacgaattcacagcgacgtggttctcattcttgggttaagggtaccattaacgatgttcttattcctgttgagtcgtaccacatgtatgaccctttcgggcggcggattaagcatgaaacacggtttgagtatgaaagaatcccagcacttgttgagctatgtattcaagctggagttgagatccctgagtatccttgtcgcagaaggacacagccaatcagaatgatggggaagagagtgatcgatcgaggtggatatcataaagagcctgaaaagcctcagacatcatcatcattatcatctccattagccgagcttgatactcttggtgtttttgaaaggtatccacctcccactccagaggatatacctaagatagcacaggaaacaatggatgcttatgagaaagtgagattgggggtgacgaaattaatgaggaaattcacagtgaaagcatgcggatattgttctgaagtgcatgtaggaccatggggacatagtgtaaagctgtgcggagagttcaagcaccaatggagagatgggaacacggatggcaagatgctcttgtggacgaactttcctccaaactatgtatggcatgtgagagac

SEQ ID NO: 9760 - DNA, 477 bp, Arabidopsis thaliana columbia
ttgcatgttggtttcgacttcagaggccaaaggatcacattggagatttggaaacatgggctaaagctgaaaatgatcttgaaaaagctctagatgattttggaaagccatgggttgtatgtgtcactactttctgatgcttctactcaaaactttataattcatagagagattctaaagtgtgatgttttctgaagataaaggaaggagacggtgcattttatggcccaaagatagacataacagtgtctgatgccaggaataggaaattccagtgtgctactatacaggttaggctcccaaactctttttagttttttcctctgttttttgttcttgatctcttacaataagattttgatcgttatttgcttcgtaccagcttgattttcaacttccggcttgcttcacactgaaatacctaagtgacacccacgaaatggaggcacctgtgatgatacatactgcggtgttggg

SEQ ID NO: 9761 - DNA, 656 bp, Arabidopsis thaliana
  unsure (1)..(656): unsure at all n locations
acttggaaggattatttcgagtggagaaagttacctctagattcacctgtagctctacttctccactgggtaataacagtttttctgatgagtaatgtgatttcaagtatgattagaatgcttgaggttttcttttttttgactcgtagagcttgcttttatttcagccacttacgatatatcatgcagttcaagccattgggatgggaaatttgactccccaaataagtgatgaacttcgtatacattatcttggtatgtttcactctgtaactcttctgctttttgaggaactgtatcctctctgaggttgctatcatgttctcgttgttctgttaggcagtttttgttaattgcctccacttcctttatattagtttagtcccttaatattggcaaaagaatcatcagaaccactatggtgtaaaattctgatatatgatttgctgatagtttgagcttctgaagggcctcagaaggaacttgggcaacttggtgtttttgctgagctgcaagcgctcttccctggtctgcgcatttatgtagatttgattggagcctgacgtccacaacatatgtgagtcctgcattccacaatctatttgattactttgtataacactagttctattttagttaggaagagtanagatatg

SEQ ID NO: 9762 - DNA, 592 bp, Arabidopsis thaliana columbia
  unsure (1)..(592): unsure at all n locations
nnnnnnnnnnnnnnnnnnnnnnnctaaagacctgagctgaagccatccgaaataccaacactgctcggatataccgccagcttggttgataaaaaatggttgcgactggcagcaaggaggagtcatggctgatttgagaaaagcagcgcgtggtcgggaatgccaggtaagaatccctggcgtatgtaatggcaaccctgaaacgtctgtactggcacatatccggctgactggattgtgcggcaccggtacgaaaccgccagacctgattgccaccattgcatgttctgcctgccacgacgaaatcgaccgccgcacgcattttgttgacgctggatatgcaaaagaatgcgcgctggaaggtatggcgagaacacaggttatctggctgaaagagggggttattaaggcgtgaatacctacagcatcacattaccctggcctccgagcaataatcgctattaccgccataatcgcgggcgcacgcacgtcagcgcagaggggcaggcataccgcgataacgtcgcccgaatcattaaaaacgcaatgctggatatcggcctggctatgcctgtgaaaatccgcattgagt

SEQ ID NO: 9763 - DNA, 602 bp, Arabidopsis thaliana columbia
  unsure (1)..(602): unsure at all n locations
tcttcttgctttaacaggctgctcagatcaagacaaacatattgggcttctctggtttcgtttggcatggagatgaggtgtgcaacattacacataatgaatgcttttacatatgcctttgctttgtatataattgtggctctttggtatttgcagaagaaagcaaaagaaaaagtaaaagaaaagcttgagaaatgcaccaaagagaaactgtgggagttttgtgatgtgttggacatacacattaccaaggctacaacaaagaaggtcattatggttatcaatttctaagtttttgttcttgagattcatttttttcctctgtgaatagatacatgtgaaggtttaaatttctgtctttgttgagcagcttgattagccatttctggttgtccaagtttatgcttattcatttccccatttaatcgaatctggcaacttcttgttgcatgctttttcaacacaggaagatattattacaaaactgtttgagtttttggagaacctcatgtgacaggtgatgtgccggtgacactacagtttctgagaaagagaaggtaatgtggtgttgggaaagttttgtntgctttaataactattgt

SEQ ID NO: 9764 - DNA, 514 bp, Arabidopsis thaliana columbia
tttgttagaccattcttcagtcgtgcttggatatgaatctataattggagagtattccacgccaacatgtgttttggattttaattgatcttcatctaaagtatttctatcatttgtactagaaaatcaatatattgtatcatatatttcagattgtctttggtttcaaaaatttgtatgttaacttaacttgaaaatggaaggtcgtcgtcaacgtttactggtgttcatctttggggctttggccattacacatcttgttcaagctcagccgcctgatcaacgaggtttctctatatacctttttttaataattgcttcatgttcagtttttgacacataaagacttaaggattagccaagtagttgagtgttcttgctcgactggtcgagatcactaaccgatttctactttgttgtacgcatagccaccatgaaaataatattaacgattacagatataagagatttggttaaagaaaataaaggattctctgtttccaaaacttttgat

SEQ ID NO: 9765 - DNA, 588 bp, Arabidopsis thaliana
gtccctaaagtcgcaacaacagtaaatccgattcattatccttctcaaaccaaactatctccaaaacccctcaagaaatgatcttagatgaaaccaaatgggatcaaacctggttttacagattgtagccctgatgttacacaagcaatgttttcgtaacctgcttcctccaatctactagctgcagctgcagatcttttcaagaatcgaacaaagaaacttataatttttcttcatactacatttggtgatacatgtctcagtgaaatccagagtttgttctaccaacctgagaccttcttggcaaacaagtaaaagtttgctgtcttgagaaaactcgtttctaacagatttaagaaattccggattcactttcgtgaaaggtaaaccaaagaagagccctgagaaattgttgtgcactgtcctctttatgatcgtgcctgcaattttgttcagacaaaaccactcagaatctcagaattataatgcatacagacacagtatgttcaagttaaggctcgagtgcttaccaatatcgttgtcttcgttgtaaatgaagagaggaatatgggagcaagattttatatg

SEQ ID NO: 9766 - DNA, 572 bp, Arabidopsis thaliana columbia
catccatgtcccaatgatgaggtgaaaaacatcggctttcgctgccacggcttttaatcggaatatctcatcaaaatgagcaatgtaaccgtcaacgatcaaccttaaatcattgtcagataaatgagcctgaagaccggttcgaatctccgacatatgccggttatcatcctctagccatctcccatattccatgtcaaatattgcagctcctacgtacattcgattttcaacattttgttaataatagtttaaccattattgtacttattttaatacaataatacattgcaattggtgttttaggtttcaagtaccggaagtgatgttaggtcctggctggtccacaaccacccatgaacagcccctaccatcgacataaacaatatattaatttcaacaaacagacattattaataaccaatgaacaattgagaaacttagcaaatgacaggttttgacaaatttaaaaaaagatttagcagaatatataggattataggaatataaatgattcaatttcaacctgagaacgagctcgctgaagttcttgctccaattgggaaagcttt

SEQ ID NO: 9767 - DNA, 610 bp, Arabidopsis thaliana columbia
tttttttattttatcgtagttttcgtaaatggagaattctgcaaagatccaaaactagtaacatcagatgatttctttgcttctggccttaacatcccgggaaacaccaacaaacgccttggctcctttgtgaaccccgctaatatccccggtctcaacactcttggggtcggcatcgcctgtattgactttgcccctggtggtctaatcccaccgcacatacatccacgcgcctccgagatcatcttagtcatcaagggaaagctcctagtcggttttgtatcgtcgaacgactacaactacacactcttctccaaaattctttatcccggagatgtgtttgttcatcccatcggattggtacaatttcatgcaaacatagggaagacaaatgcggttgcgattggggcggttgggagccaaaatcctggttatatctcggtaggtgatgcagttttcgggtcgaagcctccgattgacccaaagattttggctaaagcttttgcgttggacatcaatatagtaagatatcttcgaaaagtgtttcacctcaagatgatatcgttaatgattaagaaataagttgatggttatcaacagataaaatata

SEQ ID NO: 9768 - DNA, 594 bp, Arabidopsis thaliana columbia
gtcatcatgattaagctctcctgctacaactctaagccctcctgatttgctcaaatctacacaagaaaagaatgatgccacaattgatcagactcatgtgaaactgtaacacaaacacatttatatatacaagattcaatagcaagttacaagcttccagttaccatttgcattatcaataggttcaacgaggatcaaaagttcctgcaaagcacggtgacgatcttcaagagacaaggatgaattattcaagtcatctatcgctatttgcatcaacttcgcattcgacggcattttcagcttctccaccagctcctatataagagcactttcatgaacttccagagacaaagcaatcagaaattaaaaaccaaaatcacaaagtccgtacctttaactctaattgacgcttctgtaactcatccaaagacatcttctctgcatctttagctgcttccttcaatgtcgcaggatccgagtgacctaaccgaagatatcaacatagaatcagatctaaatgaaattagtgaggaagaaggacactgagaaagaaaatttacctattgcctagtgtaacatccatcaagtgaagag

SEQ ID NO: 9769 - DNA, 566 bp, Arabidopsis thaliana columbia
gcgcttaaagcatgtcgtggagacttgaaacgcggctgccaaatccacgggttttccacaacttctgggttcacttcctttgtttgtgtttcaaacgcagtaatgggtatgtaccgtaaagccggtcgctttgacaatgctttgtgcatatttgagaatctggttgatcctgatgttgtttcttggaacactatactctctgggtttgatgacaatcaaattgctctgaattttgttgttaggatgaaatctgctggagtagtttttgacgcattcacttattccactgctcttagcttctgtgtgggctctgaaggatttcttttaggattgcagttgcagtcaactgtggtgaaaaccggactggagtctgatcttgtcgttggaaactcgtttattacaatgtattcgcggtctggaagtttcagaggagctcggagagtttttgatgaaatgtcgtttaaggatatgatttcatggaactctttattgtcaggactttctcaagaaggcactttcgggtttgaagcagtggttatctttagggacatgatgcgagaaggtgt

SEQ ID NO: 9770 - DNA, 557 bp, Arabidopsis thaliana columbia
tgaaagcgagaaagctctagatgaggttttcagatctgctagcaatgctacaccagctgtggttagagttttgcactttcctctttattagacacctaaatttaccaggatatttccatattcacttgttaccccaacagtagatatcttaccaagttagctgcttccgatgtgaataatgttgtttcttgtaaaggtgttcattgatgacttggatgccattgctcctgctcggaaagaaggaggcgaagaattgtctcagaggatggtagctacattactgaatttaatggatggaataagtaggacggatggcgttgttgtaattgctgcaaccaataggcctgatagcattgagcccgcccttagacggccaggaagacttgacagggaaattgaaattggtaagactagactttgtggaaaaaagaccatcctcgatgttgttaagattcttactccctaatatgtgtctaaatatttccttaataatataggtgtacatcttctacacaacggtccgatatacttcacataattctccgtgggatgcggca

SEQ ID NO: 9771 - DNA, 748 bp, Arabidopsis thaliana columbia
caagtttttctcatggtccaacaattcaaagttccctttgtttttcatatcttgtttctttcatactgtttcatatatagttcatgacatctttttaataaagaagtttttgacatttttgtgacagaattgttatacgcaaattaaatttttacatataattttagacagaaagaaattgaaatatatagtttagacggatatttaaaacacccccaaaattatgaaggtaattaatttgatactcaaaagtgagataatttagttatacaagaaaaaaacgaggttggtcgacgtagccggacatgggacagaaagataagcctaagccaggagcggcaaaagcagccgtttccaccgtcatgcgctgctggatggtggcggctccggcttcctcgaactctttcactatagtacgataatacgctttgatcttcttcacgagcctcacgtagtacagtctcagccacttgagtctcatcctcgtcaccaccttcttgagcgagaaactaccacgtggcgtactgtttttcccgccgagacgcacaacttgtggtttacgacgacggagatagatctttcggcgactcgacggccaccggaatgcgctggaggcggcagtgatgactaaatggggatccatagaaatcccgcgagagaattttttagaaggaagaaagtgaaagatggtttaaggagttagattgatgagaaacttgtatacttatataaagaggtaatttttgta

SEQ ID NO: 9772 - DNA, 936 bp, Arabidopsis thaliana columbia
  unsure (1)..(936): unsure at all n locations
caacaggttcgttataagtttctgtctcaattagttatcattacaaaaccgttacacgtctctctctatgtagacatctatccatggtttcaatgacggatcagactcttcttcaacctttcctagccaaacccaccaccaaaggcttagcaacggaatcggattcaggtattattctgcggcttttctctatacttctcgtcggagcaatctctttgtgggcaaaccatgaggcttcaaaaggcttctccataagtatcatcaatgatgctaaagattctccttccggtaaaagattcgcccttttcttcgaatctgatgatacggcagtgcggatattgctcgatgcaagcttctttgtggagaggtttctctacgagggtgttcctcatcgtctccgtaagcctgtaaaccacgttaccgtccaattctgtggaaacagtagtgatagagtagataggttctcggtaacttcaggtgcaagtcatggagagtatgtgatcagattaagcccatctctcacggaaagaaaaaagtttagcaacgccgtggaatctgcattgcgacgttctatggttagaatatggctatggggagacgagtcaggagcttcgccggagcttgtggccggcatggtggagtatttggccgtggagagccgaaaacgacgtcactttgaaaagtttggtgggaattggaaggataaggaaaagtctgtgtatgtggttagcttgttggattactgtgaacgacgtagcgagggtttcatccgacggttgaaccatgggatgagacttaggtgggatgatcggacggtggatcttgcttcgagtggtgcgtgtggttccgcaaggatgtgttgcgtgcgntaagatggacgacagtggattgataattgagagacgaacatgatatgttctcgtgctgccatattgt

SEQ ID NO: 9773 - DNA, 518 bp, Arabidopsis thaliana columbia
tgtatacatgatataatgcaaagaacctaaccagcctcccacggtcccaaaataaaagtgccgataaatctaattctagttaatcccttaggttttctactccaatgatatcacaatgcaaccaggagaccatgtagattcttatattattagtggcacgaaagcacactgtcttaacatctgaaattttcaaaagaactgcgctttcagcaaagatgaaacgctgacctcatttttcccaggtaagattggttttgcatgcaaaagttcggcaaatatgcaaccaaccgaccacatgtcaattgctgggccatattttgtagccccaagtagtaattcagggggcctgccgcaatatatgtaaatcagcaaagtagtaataacaatgaattagcaaagaccataatattaagactatctatgtatatcatgtaaactttgaatgacgatttttaggcttacctataccacaatgtgatgacacgatttgtaagattccagtatgatcatgagaatac

SEQ ID NO: 9774 - DNA, 501 bp, Arabidopsis thaliana columbia
atcccctacgactttgttttgacaacatctcccatagttgagaatgaatataggaaggatgaaggagtggacgaaacaatgtctcctttacactctattaagtggaatcgtatcatcgtcgatgaggtcagtaccaagacctgctggttcttcttcttttccattttcaagcatgtaaggaaaggggactgtgagatttattgtacagtaaaccacagcaggggaagctcactgcaaatttgctttttgtgaatcttttatccttcaggggaagctcactgcaaatttgatataattcccgtttgtcttcatatcaggctcatgatatcaaaaacagaagtagtcgcactgccaaagctgtttttgctttggaggcgacctacagatgggctctgagtggtaccctctccagaatgatgttgacgagctctactccctggttagttactctttcctcaactttttctatagcacgtaatgatatctcaacattgctgattg

SEQ ID NO: 9775 - DNA, 566 bp, Arabidopsis thaliana columbia
gatactgcccataggtatcaactatctttcttttatattaatgtactgtgatattgtactctcagctattgacttgcttcaaatgttttgatactgcagctatggcaatatggctcttttctaccatggactgaatcagacagaacttgctctacaaaacatgggtcgagccttgcttctacttggcctttcatctggccctgaccatccagatgttgcagctacatttataaatgttgccatgatgtatcaagacatgggcaaaatggacacagctctacgttatcttcaagaggctttgaagaaaaatgagagacttcttggtcctgaacacattcagactgcagtatgctaccacgctcttgccattgcgttcaactgtatgggtgcattcaagctctcacaccaggtactaaaactttcgtaaagtcttctagatcccacctttcgactctgttcttgtcaacatgagaactatatgtctcacctttcgacttaattgttctgttcttgtcagcatgagaagaaaccatacgacatacttgttaaacaattgggagacgatg

SEQ ID NO: 9776 - DNA, 538 bp, Arabidopsis thaliana columbia
tttctgaaaaattgatgttttgagtttttttcttctttcatcaagattgatgttttacattaacatcattactatttttattgttaaccaataaaagaagagagaaatataactaatactatagttaaactaacaaaataataatatttaatgaaaagttgttattcttactttgtgtcaaaattctacaacataatatttggtgaaactaagagagtaatcaaatctcagctctgtgtattccaaaaatttagatttaacaaaacaaaacgacatataattgaaataactttattaattcccaaaaaacacaaataaaataaagattgtttagatcttaaaaaataaaacaactctgataactttaaacaaataaacaagaaagaagaaaacgatcaaagctggagtagtcattgagcatcattcgccggagcgttcctcagacatggtcatcctagaacacttcttcctacttgtggaagcctgatcattccatcaacatcatctgaatcttttcgtttcatgatggagtagaggt

SEQ ID NO: 9777 - DNA, 528 bp, Arabidopsis thaliana columbia
tactaatatatcttctataacaagcaaattcatatatagtaaaacgttatagcgtacgtacctcgacgaaatcgccgtcaggtaacaaggaccggcacgcgtctctgtctctccggtacggagaaatcaaacttgctatacaaatgactccgacgtcagcaaacaacttagccacctcacctgatattaaatttaaagatcaatcacaaatcactttacaaaaaccattaagcatataccataaaacgcgttaaagaaattggtttcatgagttagtaaacacatgattataatttttggaagaaaggaaaaattgtgtaccaattcttctaatgttttcggtgcggtgctctgctttgaaagtgaggtcacggttaaggccgtgacggacattgtcgccgtcgagtgtgtaagtaagtttgcctctttcaaacaatgctttacttagtgcacaagcaacagtgcttttccctgaaccactgagaccagtgatccaaacgacacaaccccttttgttgaagaagttgt

SEQ ID NO: 9778 - DNA, 613 bp, Arabidopsis thaliana
tgcggatatataaatctcatctttaacctaatgttatgggatgattttattatacaatgaacttctatataactaaatacacgcatgcatgcatagtaaatctttcaatgtatatagatcatcaaacatatattatatatacataaatatgtgacaatattgggttttatatagttgaatacctgatgttgaagggcgaagatatgaccaacgcatccgtagacgggatcgcgaacctagccaatgcctcgtaagtaagcgtgacgacagcgtccagtctccggctggctggaatcatcatgaggagcttggaggcgttgctcgccccgaaaaccttgtgcacggccgtgaaatgagacgtcccttccaccgaatcaaagtagggagcgaagacacagtcagcaacgcatttccgtcggagaaacttacatgcgccgcatggacctccacaaccggtggtgcttccgctcatcttttatgtcaaagacgtaacgttttgtttgggggaagttgtgtcgtcgtcgaccacagttattatatatcaatccaaagagatgtttaagagagagagatggatgggtttgtttatgaataaatgtttttaagttgatgt

SEQ ID NO: 9779 - DNA, 679 bp, Arabidopsis thaliana
tatccaaacacagtttacatgatgagcagttgctacaaacctgaatgatatatatatagttatatacaaacagataaagtaattgttgagttttcaacggtaatacatttgaacttttttcctaaaatcaaacagacatcggaggagaattcttttagcagttatctggtctgttgtactttggaggcagagttggacattgttcgttcatgtgcgagtatggttccatagtgttgtaaccaggaagttccattctgtatttcccaagtatctgacagtaaggaagcttcacactgtcattgtcattgcaccatgtaggaagacgacttgcgttgttctcgaaaaagttgagcatgtaagcatcttttatctgcagattcaagagattaagaaatgaaaatggtcacatgagcttgcgtgcatgaagggaagcagagactgtgtacaaattcttaccgtgaattccgtgacttgaatagaactagcaagtggaccgaataggccagcttctttgtacatttcgagaatgaaagcgatgcatgaggttgatttaccatcgctgtatatccaatcgtctagttcaggtactgccagtaatttgtcaaatgaggatccacgcttctctacttctaccagtacatcagaaagatcaagaccctgcaattttaaccatgttaga

SEQ ID NO: 9780 - DNA, 574 bp, Arabidopsis thaliana columbia
tgttgagccataatctgcttcaaatccgtcacttgcaacaccggaatcatatctgcttcagtcgtcacttctccattcattatcttcccgattgctcccgccgtcaaacttacctccatcattacagattgacactaaaacccaaattcaaaagcgttacaaacctcaagaaaatttggataatcagtagaagcaattcgagattcgaggaggaaaagggtgaaatctttataaatgaattcaaaattgaggagacgaaaaacgatttgtttgaattgacagagaccagaggttgaagaagatgaaggatttgagattagcccctagagtgaaaggtggaaactttacgctccctttgagagggaaactaaagaaggagggtttcaagaatttggaaatcacaatcgagccacgatttggtgttattacggatctaccccttcacaaaattcccttacaagcttcgttaagatgtagactggtaaggctcaaagcacatatataggcccatttgaaggccaaaatggcaagtaaacgaacatattacgtggaagacgtggcaagtgtactgctg

SEQ ID NO: 9781 - DNA, 887 bp, Arabidopsis thaliana
ggtattctccagggtctgctttagaagtgtcgtggtgtcttcttcttctcgatgtgagtcatattgaggcagcggttaaagtctcgttagattacgaaatcaaacaggatcctgaaccaaaagattccggcggcacaatcagagtcaatgcagtgatcaagaatgaaaatgatatcttgactttcacgactttgacgtttgtcaacgaattcctcaaccaagatttttgtctcgtagactggtgtaatttcatgaaggaagcagggatcagcgaccaaaatattccagttgtgatttatcatattttatatgttattaaaataacttcttctgcaagtaatgggcattctcccgggtgtgctttacaagtgtcgttgtatctttttcctcacgacgagactgatatcgaagaagcagttcaagtctcgtttgacgagaccactaatttctgtttgggacccgcaagcaaactcgtggtcaagtccttaaccaggaaaatatatgacaagattaattatacaggcgaaagatgcacaatttgtttggaagagtttaacgctggaggaatacttgtggctttaccttgtggacatgactttgacgatgagtgtgccgtaaagtggtttgagaccaatcacttttgtccattgtgtcgttacgagttgccacgcgaagaagatcaatgatgaactaggtttcttaaatatatgatagaacaatttacgagatttttctagtttttttttacagaatattgcgagattttctggttttttttaatccttctacaacaaaggctagtgttaaccggcaacatattctttagataatttttgtaatccttaatgcttcggactagaaattaacaaagttcgtttttttgttgc

SEQ ID NO: 9782 - DNA, 526 bp, Arabidopsis thaliana columbia
tgcgttgttaagtgagtgactactcacaagagtagtaacacgtttcaatttccagcccacgtaaatctagactacatggctcctatgtaataattctttctttttgttggtaagtaaacaaaaaattataaaaaggatttattcttacgttaacttgatataaaaatggaatttcgagagtatatagtatatacaaacgaataaatagaccggttgaaatgcaaaaggtatgtatttgccaaaaaacagagagttttgaatataaagaattaaagacaaagattgtcatttaactttctttttttcagtacagtaaacgtgcacaacacaatatagaccacacattaaacttataaagaagaacatacaaacgaaacagaggaattttctttcaacaaatgccataactcttcaagctttgtagtatgtaagataaaccctgaaatggagaatggtatcatgaccatcagtaacatgttggtcttcatggttgtgtagagtctcacgacagcataccctttagcat

SEQ ID NO: 9783 - DNA, 651 bp, Arabidopsis thaliana columbia
  unsure (1)..(651): unsure at all n locations
tagaggattagaggatcccccatcggaacagagaagaaaaaaccaacatatgcattgaaaagttactgacttagcaccaaagtgtcgccattgaaatccgtatacaggtccaaggtcgccttcctctctctctgtcaggccgatactgaaaatacggtggataaatcagcaaataggtcgtcaagatcaatatttctttaaccaaaaagataatgcaggttacaaatattacccatcgagatactctcttgacgcattcccatcccatatatggatacctttttcctgaaggacctgcccatgtataaagtctatcatagatataaccaattcatttgcatagttttagagcatagcagagacactctggcttaatttacttttgcattggttgaaccgcttatgaaccatagaagttcctcaacaacacctctccagaaaactcgctaccaaaaaaaagcaaacagattgcgtgagtttgaatatgagctagtgtagatatgcaactgccactaaatacaacagaagacaaagcattctccttttgcgagtaaacgtggaaagttaaggaaaaagtgagcatacctttgttgtcagaagtggaaactctctgcgtaattgaatttcatctgtgttcgnaaggaatgtgag

SEQ ID NO: 9784 - DNA, 327 bp, Arabidopsis thaliana
caacgctttgtcagaaacaacatccacgctatgtatctttggtgaaacaacatccgtaaagtagtaaaccccatcacgctcttcaccgcttccaatcaaagtcttcgaaaattggtcccgcaaaacgcacaaggtctcagtaaacaaagctacacacttggtttgttttatgaacttagcaactgagataagtgtgcaatttaaagatggtacgtataggacatcggttaacgaaaccgtgtcagacaatgggaacactcccatactcaaggcaaatgtgttacttccatctgcgaatcccacgaacatggcgaaatatttttgatg

SEQ ID NO: 9785 - DNA, 565 bp, Arabidopsis thaliana columbia
caaggttgaagaagaacaacatcattcaacatcagcatcacgaatattttcgagtcatggagagaagcgccgttgcctcaggttttcatagaaattacatcctctgtgcttcacgcgccgccacttccacgacgcgcctccactctttgtcctccctcagaaactttccctcttcctctctcagggtaattaaaaaaaatatcacttcttccgaaaactcatgttttatgaacaaaatctgattcgaatattctgattcttgtagattcgtcactgtccttctcccatctcttccaatttcatcgttagtgaagtttcccgaaaccgacgatgcgacgccgtttcttccaggtttgacttcttcgatctcaatggaaacaacgacagaatcagttttagttgacttgaattcgtacttgcgttgtgtttacaattctgtgatttcgtgacttttgggtgcagaccaccgatgtgactgaattagccgaaattgattgggacaagattgattttgggcttaaacaacggattacatgtacgccatgaaatgtagccgtgatggtga

SEQ ID NO: 9786 - DNA, 510 bp, Arabidopsis thaliana columbia
taaaattatggattcgtttcaaagttttttttttttcgtatggaaaacacttgagctctctcaatcttgtagtcttgactcttgatgattcttctatgttctcgttgtgattgcttgtcactgttctatcttttatatatgattaaatgcaattttgcccctttttacgcgcgaatgtatttattatctttcgcactctgggtccatttcttgtcacttgagcacataatgattgatttatgactttttaaagttatgaaaatttattatttttgttgctatggttttttggaattagaagctcatttcaaagttgttgattttctttgcagggtagggaattggtgtggtagcttgtgatgcactgtgtttgagggaaaggaaaggataacgatggggtttgagtttattgaatggtattgtaagccggtgcctaatggtgtttggcaaaacaagtggctaatgcatttggtgcatacacgccttgtgctactgactcttttgtgcttg

SEQ ID NO: 9787 - DNA, 525 bp, Arabidopsis thaliana
aaactggtgaagtgcatgtgagagactaactcaatgccctctaatattacccgaatttacattttatgccactgtcagtgagtgagagacagagcatcaaatcaataaagccttgggaagaaagttaacaaacttatcaatgtgacaatctacttaaattagcaatctgactaatgattaagacttacatttttcaaaagggaaggctctttgaagtggagctcaaacttagtgacttgaaatgctctgaaggaacaaagtcttgtggcaaattagctctcttcacaattctcttcatattactctgtaaactctgttgcactaactgtttcacggctttcctctcttcgctcatcatcaaatcgttttcctcgtggtccaaaccgttgtctctggtcccgtatatcggtgcggataaggctccgcatgatcctgtactatccaggacttgctttcctttgtctactctaagacactctaatatccttgatgctctcttttgtgccagtgcacttcctaaaagag

SEQ ID NO: 9788 - DNA, 640 bp, Arabidopsis thaliana columbia
ctgaaagtgtgtatgtaggtagggtttagagctaataacaataatgacatgtaatgttcaagtatagtatatagtgttagtgttgttaactaaacaacataaaaaaaatctagctacggtcaaaacacgataattaaagatcatataattgtctagaactaataaaagacaacacatatttgtctatttgtcaagatgttatacaagactttcttacaagaaagccggttgagtcggttaacagaaaggtacctgagagtgcccggtttagggttgacggcatcatcgtcggaagaatcagtgacaaagtaaaactgaccacctttgcctcccaacgcgtactgtccgaacccgataccacaatctgctagaccttgtctgttattgggccagtttgggtcacatttccaacagtcatcgattgggttaccggtgatacacggggtcgaaccggcctggtccgtcgtgtctagagcttgacgccttgttatagatgcatttactttcctgcaaaacagttacaaaccgtattattaaagtctttccggtttaagagaacagaacaaaacagaggaaaacagaaaaacctcagattcacaagaagacatgaaaatagcttgtcaaatgtaataaccagatg

SEQ ID NO: 9789 - DNA, 552 bp, Arabidopsis thaliana columbia
ttttgtctcccatttgattttaagattagcgtctaatccaacaagttccaacaaggtctaaagatcaaaagctcaaatctttgttctttgttggtggtgtgggtgggaagatttcattttcagtggagaagaagaaaaaaggaaagattaggaagctaatcaaaacatacagtttcctgattccggtcaggaaactgtggagcattgacggaatcacgaagccgtggagaattatgggctgcaattgcaccaaaggaacacggcctgataatgataacgtcgataacagcaacagcattgtcagcaatgtcaatgtcaaggagagaagaagcaagcctaagaaaacccccaagaagaagaaaaaatcaaaatctgcttcttcgagcaaagacaacaatgtaggattcgaggaacgaagcgacgacaataaagaagcctccttgacgttgttgatacccattgatgcaagaaggatgatgagtcgagaagaaggtgaactcgagagaaagcttctagattggtgtttagagacggccaccggtattgaggttg

SEQ ID NO: 9790 - DNA, 642 bp, Arabidopsis thaliana
tgagatcgcaccggatccatacctgagtctacacaagtttacggctattatagagacactacccgaacactcacgtatcgttgacgatgggatctacagagccattgatatgtatctcaaggtaaacaaaaacacaattgaacaaagtctttttatgttttgaaaacatctgaaactgataatcaaatatggaaattaggctcatccattattgacagaagaagaacgcaagaagctatgcaacttcattgactgcaagaaactttcacaagaagcaagcaaccacgtggcacaaaacgatcggctgcctgtacaaatggtggttagagtgctttacacagaacagttgcgactgaagaaagctctgtcgggagattcagaagaagggtcgtgggttttgccttctggagtacaaagccgagcggtttcgccaagagacacgtatgcagcgttgaggagagaaaacagagagctgaagctggaaatatcaaggatgagagtgagagtgagcgagttagagaaagaacataatttgatgaaccatgagatgatggagaaatccggtaataatggtggaccgtcttgacgtactgccaaaggaatgggaggatgcgcattcggtggagacccggcaaaaggtga

SEQ ID NO: 9791 - DNA, 536 bp, Arabidopsis thaliana columbia
gcgtctctgatttattacatctgaaactcttgtctgtattgctatggtcaatttacaggtacaaaacgtggtagaaaagccacataatgaccatttgccattgttagaagccagcaggtttgtgaataaaaaaccattgatatacctttggtgaagatggaatctgaacctcattggttaatatatatttatgtgcaggttgtgtaatatggacatcatatcacaagttcaacaagtgatctgcttcgcgtttcatgacagtaagcttcttatggagacatgtcaagaagccaaaaatctgcgcaagattgtcactctcttctacctcgattgattcacattcactctttattttcttctcgttacaaaacagagaagataatcctccttgtaaattatgaatcttgattaaacaaacacacacaaccacaattatattcttttgtctaaattttgatacacatcagtgctatttttataggattatttctcaactactattcgtcagttcacatctctgtaacaaaacaatttag

SEQ ID NO: 9792 - DNA, 532 bp, Arabidopsis thaliana columbia
gtatttaaatagaaaatcatttaacaaaaaaaacatattcatctcaagaacaattgacgtaagtgtgataatccttgtctggttttgcattttgtaactagtttggttttgcattttgtgtgataatgaatcaactcgagaaattcatgtacaagtgtaaccacaaaacaagtattgtttatgtttttatcacactatcaaaaccatctaatcaacaacttcactgctaaacaacttgaacttattagcatcaagaacaagtttcctaatggaggagaaagctcccatgagtcctgcacaagtgaacacaaccattatcgtcatgtttatccaatacgtgaagctccgtctggttggcttataggtcatgttgtatagaagcattggcagcacgaaatcgagtgggataacccaaacgctcctaccaccgcgtttatatccccaaagaacggtagcatcgctgccatgaacccgcaaaacgccatatatagtgttcttagtataaacgcggcacaaggttgcgttttgagaa

SEQ ID NO: 9793 - DNA, 541 bp, Arabidopsis thaliana columbia
tttgttatataattcgtataaatatacatatatatgctccttgttgaataattagatcataaataaataatataagtttgaatttggacagcaagaagaatcaacagaagagagttgttgagcaagtgaaagaagagaatctgttgtcggaccccatgggcgtggcgtaaatacgggcagaaacccatcaaaggatctccatacccaaggtctttaaccaatcccggtttaatctcatcttcctttctcctaatcaaacataaccggtttactaatctttcaattttggtgtttcttttttttcaggagttattacagatgcagtagctcaaaagggtgtttggcaagaaaacaagtcgaaagaaatcctcaaaacccggagaaattcaccataacatacactaatgagcacaatcatgaactaccaacccggagaaactcattagccggttcgactcgagcaaaaacttcccaacccaaaccaaccttaaccaaaaaatccgaaaaagaagttgtttctcccctacaagtaatcctatga

SEQ ID NO: 9794 - DNA, 502 bp, Arabidopsis thaliana columbia
ttgttcagcctcttctggtggttaaagcatcttcgatataagtttcttctggcatgttataactaccagattcacagaatgcacgacatgtaccacatgcgccatctcggcaatccaaagggatattgatcttctgacgataggctgcgtcagataaagtttcaccttgtgtaactgtaataaaacgggtcacaccatcttcaaattgaagtgctacattatgattagacatggcaatcatcctatttaaaaattttgatctcgcttacccaaccaaaattccatttggctgggcttactggttagagatgatagatatcaatcacttgattgatataatcattctttaacaccacatatttgctcatgatttttggttgttcgttagagaaatcgatcacataacgagacataccgaaatagctgtagttggttttgtagcgaaaactcaatgtgttccaattaaaccgaacggtgactttgtctccatcacgttcgagca

SEQ ID NO: 9795 - DNA, 1256 bp, Arabidopsis thaliana
tatggcacactgaaatataccttaacattaacatgtaagtatatgtatttaacagtttcgtaagagatgtccaagaaacaaaggtggaataatatggtacgaccaatgttttctcgatgttagtatgatcaatgacctagccccaaggaagatcaattacaaggatacttttgctatgcacaacccaaacaatgtgaggggggatacaaagatgttcagcaagaagacaaatgatttcctccaacagctgattgtgaaagctgataaacccgacatggacggcgtcgagttgttatattatgcggcgggagagatgagaatcgggagggaaaaactgcatgcgatggtgcagtgtgcgaaagacctagcggactgtaagtcttgtttggaatggagtttcaaggagctttctaagtgctgcgacggtaaacgaggagcgagatttttgggtacaagctgtaatcttaggtatgagctatatccttttcttaggacttgaagactcttttgttaatgcggcaggacacaagttttcaatttttttgttttttttactttctaattctcttatttttagcatgttacattagagtttgttttggtatctgttatatctacacatgtgaatagggaccaaaacttcgttaccactcaatgctctgttatttgtaataaggacccctcagtactctttaaaattattaatacagaaacaatagcttttttcttcactcttaacttctttttctaataattacttttaaaactagagcagacttaagaaggtttgataaaactgatatacaaaacaattaaagagcaacgtcatttgatgtgtgttctgcataattataacaacagtcataattaatctacaatataatttttgtatgatttttgaatcagtttttggataaaataaaaagaaatgtactcttttgttttgtttaaaacggattttttatttattttatctgttaaacatttgtataggctaggacgtgtagcgttgtgattatgttaatgttttcgtttctgtcctactatattcaaatacgcaaattgtacattcttaacaaagaaaaatatttcaaaagaatttttatgcttgagccaaaattcacgaaaaatgatataaagctttggttaaggctagtgcaaaaaacaattgtaggaaactcatgatgtgatgcaaactttggaatccacctaagatttacgattttcggtttctccgcgtacggcttgaatgattc

SEQ ID NO: 9796 - DNA, 697 bp, Arabidopsis thaliana
ccttaacttgaagcctctgtctctttctctgttcctgttttcgctcaatttatgaagaagctcgtttcttcttcttcgaccgttccgcgatgttggtaactactgtttgttgcttcacattcttccttcgtccaagaagtttactttagctatgcaatttctgtgtgagttgattgattcgacatctaaggaagaagaagatgtgttcagagttttggtttatgctagtgatgaatgtaattgggatatatcttgttgttttcgatatgggtttggtagaagatgatgagtttagggtttttagaacggtgattgattcgggctttagtacttgatgtcaagacataccgagctcttataggctgctcttgggagttgtttaggtgttctcctggggaaggttgcaactgtccagatatgtgtagactccaacatcttattgaggattcaacacttgtaaaggtttgtttatattttatgaagttgtcaaagtttttgttgtgatcaattaacatagttctgatacatatatataggtaggtattggaattgatggtgactctgtgaagcttttccatgactatggagttagtatcagatcaaagatgttgaggatctttcagatttagccaaccaaaaaattggtggagataaaaatggggccttgctcactaactgagcacttgtgtcaaagagg

SEQ ID NO: 9797 - DNA, 844 bp, Arabidopsis thaliana
gatttccctaaaacattcacacaactagataagtcttctttctttctttctttcttctatagactaagaaataaaggaaatttgtatttcgtacccacaaatatctggtaagtcctctgtttctggaacatcaggagccataaagcaactcaaggtatctctccagttcgctgaaggagagctataaagatcaaaattactgttatacttaactgttttggtgacgtcacgagtataaaactttttcctaacgtctgagtcttgctcatgaaacccacgaatcccatctttcatcttctccataacatcattactaatcccatggttaatcacctggaaaaacccgaatctctcaaccgcgtctctgatcatcgcgatgacgctctctcgcgtgactgtgtactcgtcgaacacgcctcctttaagatcgattgttggtataaccatcgttgtagaggaaagaagtagatttgagtcggttaaattaagatgtggatgatggaagatacgtgggatctgagtaactccggcgtctaggagaccttttacgccgatcttcaactcgtcaaaagcttttacctcactagcacgatcgtatgttgcttccatcttcttcttcctttgtgtcaagaaacaaaacaaagagaaaacgttttctaagacaataggtatctgcctactactgttgaaatttggtacctctgtgtatattataatagaaaatgaggtaatcgaataaaagtcaatggaattaaatttttctgattagccaatagatgagaaaaggcaaaaagattcttcgctcaagtctatatggatactgttagcacacactggcataatt

SEQ ID NO: 9798 - DNA, 956 bp, Arabidopsis thaliana
cagtcttctctgactaaatccatcggaaattattaccgtagtcctgatatgggagatggtatcgaattctccatccacattactactccagctgagaaaatcatactcatcaaacagagaatcacaaggtacattgcaaatttggaatcacagtttcacaaattttaatacctgaaaattcttgtatttcattacctgcattcgttgttgtgatagttacattgagggcaagaaggatcattggtatccagcgccaatgatagtattcaaagacatggagtcattaaacagcgtgagaattgcggtttggccaacacatcgaatgaatcatcaagatatgggagagaaatgggctcgaaggtctcaacttgttgaagagattgccaaaatttgcagagagcttgacattgagtatagattgtatcctcttgatatcaatgtccgaaacttgcccacttctacggctttgcctgtttccgaccgtcttccaccaaactggagtgctccagcttctggcagcaactgagaaactatagataaaactttttatatagtttggatcaagaggttctgttttctcatttttcttttatgagctctacaaatttagaattaggattggatacttgatgattactctactttaatgtgatgtataaattttggctctctcaatctgcatagtggtctcatagtgtttttgccttttggatttttggttgaaaagaatataagaaggatctgactccttcatgcatgctccacttggctcgggggatatagctcagttggtagagctccgctcttgcaattgggtcgttgcgattacgggttgggtgtctaattgtccaggcggtaatgatagtatcttgtacctgaaccggtggctcactttttctaagtaatggggaaaaggactgaaacatgccactgaaagaatctactgagacaaagat

SEQ ID NO: 9799 - DNA, 820 bp, Arabidopsis thaliana columbia
ttctcttattctagccgttctgctagtatatatcatttgtagttgatcggatttggatttgatgacgtaagagatgtccaagaaacaaaggtggaataatatggtacgaccaatgttttctcgatgttagtatgatcaatgacctagccccaaggaagatcaattacaaggatacttttgctatgcacaacccaaacaatgtgaggggggatacaaagatgttcagcaagaagacaaatgatttcctccaacagctgattgtgaaagctgataaacccgacatggacggcgtcgagttgttatattatgcggcgggagagatgagaatcgggagggttacactgcatacgatggagcagtgctctgtagatcttacgtataattagtaataagataagaaataatatctataagaaaaggttaactaattcacatgaattaaattaagtaaccatgaaaagcaatgtagtaaacaatttagttagaaaggttgatatatactattatataattcagctccgagcaataggaatcagactcgagagccatactactctgacttgatttttggaaataaaaatcacaagaagaagtttctaaccaccctacgtatgtatatgattataaaattgagattatgaaacatcatgacttttattccccaatcaataaattcctctgtaagacaccacaccgggatttttttttataatatattatttgcgtgtgactttctgacatttttctctctaaactttgacatggatcatcaaatcaagaacaccatgaagaacaacaacagttcatcagtttcaatcga

SEQ ID NO: 9800 - DNA, 228 bp, Arabidopsis thaliana columbia
tgattttcatccaaaatgaaaggtggaatccgttcatagatgagcttcgcagacgatctaatggtttttgtcgaaggaaacaagaaataaatagaaggagcaccgaagtctttgaagatttcgtagttcactctgtcctgaagattagccttgaaaaatctacgctttatatggccgatgtcaccacaagtgtaaaggaggagatcgtggaacaatttccattttaat

SEQ ID NO: 9801 - DNA, 557 bp, Arabidopsis thaliana columbia
cttccgattccatgagtttcacttgtagcaagagcgtcggcatcgctgcgagctttaggatcatcaaaattttcagccaaatagtctaaagcatctcttatttttggatcttgaaaacgaatttcttgaacactttctacgcgactttcccaacgagtctctgataatggcttaagtgtgagacctcctaccatctctttaggagttctcacctaggtgtaaaggatgaaaacaagcagtagatgcgttggatattccaaagaataaaatcgcttttgaagatgatttggccatatcagcaagtgccaaattaagactgtggcaaccacatgacgcataaaatgctattgaattgatatcaagcaatcgcttttgtactcttttgtgttttgctttgatattggatccattatcatagccttgtcctctcacatcatcgattttcaacttgagatcaccgaatgtataacaaagcaactcaaaaagtccttccccgatctatcgatgacttctaaaaacgtcacaaaaagttcttcaactcgtgtcgttgtggtgga

SEQ ID NO: 9802 - DNA, 534 bp, Arabidopsis thaliana columbia
cctttgagcatgaaaaattctgcacactccatcttcgatgatgattgaaagctgcttctcttgcaattgaccaatgctcagcaaattgttagtgaggtttggaacatagtagacatcactcaccacttgtaagattccctccacactaattcggatgttcccttttccctcaactcctaatttagatccatttcccagcctgacagagtgtctgaaactctcgtccagttcggtgaaccatgacttctctccggtcatgtgatttgagcatccagagtcaaggaaccatgaaccttgatcttccacactttttatctctgcatgtgccatgagtagtaactcctcctcttcgtcaaactccacaaagtttgctcccttctcaaggcttgtgcactcaaactgataatggcccatttttccacaccggaaacacttgattgcagatgtgtttacaaacgatctgcttcttcctcgtcctcttgagctgctgcctcctcgataggaatcccatttcctctacacgagcactccttg

SEQ ID NO: 9803 - DNA, 1727 bp, Arabidopsis thaliana
taaaaacattatgtaatggttctcctaattaagtatgaccatgtcaactaacaaaaacgtgcaacaccgccttgagctcgaatatcggcgggaacacgttcaagagccatcagcaggcatgcgccagcttcttcagcgattcgagcttgctctgcgttgacgacatccatgattacaccgccacgaagcatctgagcgagaccaactttcacggagaagggagatttctgtttcgtctccgtcatggctccttcgccgtacaccgccacaactccggttcctgccattttttctagggttttgagagagtgtggagcagaggagaggggattttataggacgcgatttgaaatttgtttgtggactgtgagctgttggattgagaaaagatagtaaaagtacgtgaatcggacgggtttagaggaaggagcacgaggattgtggtggacgtgagtgtagagaagagaagctacgtatggaaactttgaccacaagatttgtttctttttgttgtaaatgtatagtcccgaagagattattatcttgttgacgtggaagctcatttccctataccatcgtgtgatgtcgaagaaccactgattcggatatgttatgtgtgtaagggtgttgttctttttttatggtataaaatatgtggagaatttggaaaagaatattaaatttaataaaataaattacagtccttaattatttaatcaataatttatactcttttcatttcacaatatacgttgttttaaataaaaatatgcaaattaaaaatatttatttttaaaaagtttagctaatcataaaagagattacataatataaataatcaaaaaatattaaaataatatattatttacatagaaagttaaaaacaatttatgttgtgaaacaaaaaaattggtccaaaactacttatattacgaaacggaggaaatatacaaaatccgaatttattcagaaattaacaattaatttatgaaatccttaattatcgattcgggtttcgaaccattttgtgatgtgagtcaacaaacaatggttcactatattgcctaccctatggtagttaaccaatgatgttgtcacaaagatggttaagagatgaaacgaattaatgcaaagaaagacctgagccttgtcaatatcaaattatatgatttttattaatgctctaacgattcaacatcacattggacagataatgatacatcttaagctgtatagattcgcttcacatgcattattttctttcgacatattggacacctccccttggttctttttatcctgcaaatattgtcaaatcacaacgttcaatattttagatcaatcccaatatggtaaacacattaccattacaattatgcaatccagaagttgtacttagttgataaaaaacttactttgttccgcattggtaacaggagacgcaatggccacacgggaggaaacaacaatctcttggagcatcaaaacaaatggcacagagacttttgttacttgcttcgacatcattacaacaatcattgtcacctttgtctgcaagtagacatgttctcactgaatcatcttcggataaaaatccctctccaccacaacactttaacttgttgcagaagtgtatagctaccagcatgaaggaaagcaacacacctgcatacgcaataatactacatgtaattgcttccttgttacagagaaactaacaaatgctt

SEQ ID NO: 9804 - DNA, 580 bp, Arabidopsis thaliana columbia
tatctttcctctccgatattggatctgtgcagtaattttactaatcgatttcgtgttcttcgttgcttagtaagaaagtagaaagtttctgagaatctcgggcacgaattgaatcagataattcgctagaatcggtttaacgctttaaaggcaatcgctttgcattctcatgaattctcttatactcggtgctgctagaaggttcgtggggttgcatttgagagtttcagtgaaccttttgcaaaatgaatctttctcttcgtattcgttctcttctgctagtgctgctgatgtgagccctaaaggggagacctttaaatcctcgtccttccttgattcactgcgtttagctacaaaactcactgacaagggaaattctgattccgttctggatcttctcagaagttatgggttcactgattctcagatctccagcatcatcaggagtgattcaagagtgcttatagacaatgatgcgacatcccttggttcaaagcttcagtttttgcagtccagaggagcttcaagctctgagctcactgaggttgtttcccagttcctaaatcttggggaagagaga

SEQ ID NO: 9805 - DNA, 581 bp, Arabidopsis thaliana columbia
acattcagagcactgggcagaaatcagattaccttaaacgaggacgaagtatattaccaagtaggaagaaagagatcgatgaggatttgactgacgagtctaggaacagtaagtacaggagatcgggagaggatgctgacgctagtgctgttaccggtgaagaagatgagaaaaagagagctagactcatgagaaaccgtgaaagtgctcagctttctaggcagaggaagaagcattacgtcgaggagcttgaagaaaaggttaggaatatgcattctacgattacggatttgaacggtaagatatcgtatttcatggctgagaatgctactctaaggcagcaattgggtggcaatggaatgtgcccgccgcatcttccaccgactccgatgggaatgtatccacctatggctccaatgccttatccatggatgccttgtcctccttatatggtgaagcacaaggatctcaagtgcctttgattcctattcctaggttgaaccacagaaccccttggaacaccaaggctaagaagtcgagagtaagaagagtgaactaagacaagaaggtggtagtattag

SEQ ID NO: 9806 - DNA, 573 bp, Arabidopsis thaliana columbia
gaatgatactcccttctccaccaatgtcacaacagctctctttgaagaagcgaataaaggagcatagattgtcaacaccatttttcttctctctttttttttctactatcagtttctttctaaactcactatagcaggacgcgattttatagagggaaagaaaagagagagaaaaagggatctggttagctgcgtttgcggtagtaggctaaacgcagtcgcacttattagtatattattatttatacgtgtcggtataggtggcggctagctagtggcggcaacgtttcacgtcatatttgacttttctcagcacgaaatttccaacgtcccatcaaattatgaattacatgtgtgtgttttttaacaatgttatttattcatttttaataagcctaataaagagagagaccacttgttgtaagtatatttgattaaagatatccccactttgttgtaataagatgccaaaatgattctcacttttttgaatcaacacattttaataaaatagttacgagacttgattacactttgttttgttttggttataaaaaaaatgatcaggcaatg

SEQ ID NO: 9807 - DNA, 493 bp, Arabidopsis thaliana
tagttcccaacagaacatgccattctagctaccagtgtaacctttgcccttgactctcttatctgtcgatatccaaattacattttcataagtatcatatcatataaagaaaataataatagtgttgtgtaatagaacattacatctacaccagggagaagaatctcagagtgtcgccagctagtgtcacccgcgtagattcgaacaagcagatcatgttaggttgaagtattggaatgccttcaggagaagcgaagaaaccatcaatgtagtaagcgtttcgaggacagtcgttgagtggcacaagtggcattgaagaaggtcctaaaccaaactctccagcatccatgtaagcttttgaataccaaccttcccctggatccatattcggtacgaacaactccgacgcaaaacctttgtacattacacttcttgcttcacctgtttcaacctcaacaaattgggtttcattgtaacttggaagacttttgga

SEQ ID NO: 9808 - DNA, 551 bp, Arabidopsis thaliana
ggtggtacagcttctggtaagacgacggtatgtgacatgataatccagcaacttcatgatcatcgcattgttttagttaaccaggttagattctgtacccgtccctgttctcagtatttttgtgtgtggtactctgatgctgttttgttgattaggattcgttttaccgtggtttgacatctgaagaacttgagcatgtacaagaatacaattttgatcatcctggtgagttgttcttttgatttgtgaacattgatgttttggtgaaattttttaacgtctcttgtttttcattttctgcagatgcctttgacactgagcagcttttgcattgcgttgacatactcaagagtgggcaaccctatcaaattccaatttatgacttcaagacccatcaacgtaaagtagatgcttttcgccaggtgcatggatcttcttttgtttgcctccttatatggttcttttctgcggttttatgggtttagcttgtaatgtcatgtggctgaatcttcggattatcgtttcttaaaaccaatcagttgtcgctttgg

SEQ ID NO: 9809 - DNA, 1658 bp, Arabidopsis thaliana
caatctttttaaagtgccttaatcggcattaagtttccaaaaagtgtctaattacgtaatattctcaaatgataaacatagtaatttgtacgattatttatgaaacattgaattttagggacttaaatgcaaataaaaagatgaaacttcaaatttagagtattgaatagtgatactccaaatatagtgtcactattctttttttttttttgtcaaaacccaatttcattaaaactaaaccaaacgtacataaccggaagataaagttccacggccatcaacattacagaaagagagtttagcggtacatccgcaattgcattagcagaacgagaaataaaattaaaacagagggaatggaagctgactcgaagagctcgaatctccatcaacaaaccgtagatctcattaattgagatgttagaagtcaaggcatcaaccaccgatttggaatctgagagcaccattagatcagttcgtcccagttgtagcgcatgtagaagggctgatttgattgcccaagcttcagctgacagggctgaaggaagccgacgacaaccggcggagtaggtagcggtttctttctccaacgccgttgctgattgaaagacccaccccgaacctgctagcgacgactgcgctatccaggccgcatccacgaagcaaaagtatccggatctaaggaccgggagttgagatattgggtgtacaacgtttctagtctttggtaaacaccgttgagctgattgccaggccagagcatcaagaatagctcttgtcactgtctctattgcagagaaatgggattcttgaaagattaactggttcctagctttccatatatgccgcagatccaaggaaacaacgctgcactagtaacacctgtagggggtagaataattgctttcttgaggaggcttagtgcatctagcatagaagaaccaggtgggactgtagtctcttgaaggggagctaactcccagacttgggcagcaaactcacaatggaaaaacagatgagtggtcgattctggtgcaccacatctatgacaagccgctgaaggtgatatatggcgtcttaccaattggattcccaccgggagagcttccatcgctgctttccacataaggtgtttgatttttggcaaggtttgaagcttccaaaggtttgattgccaattgaattgagtttgtggtatagggattgaggctactgatgcaatgccatagccagagcgagaggtatattgtccagattttactggaagccaagcaagtttatcaacacctctactagatggagccgggagttgtttaataaggttctcgtagttagggagaatgacagcgattttgttccagtcccattggagtgtgttttgattgattagagctgaaacccggagatcttgatgttccctcaaagcaggaccaataggaactagtggtttggaaatagatagccaaggatcattccaaatgctaaccttctctccattagtaatcaaccaaccaagaccttcttttaggatttctcttccagctatgatgctcctccaaccatgagagggttgagaaggaagtttgcactccataaaggaggaggaatggcaatacttgcccaaaaggattcgtgataatagagattccggggaattc

SEQ ID NO: 9810 - DNA, 743 bp, Arabidopsis thaliana
gggtgagctgatagtggatattgtattacacactcggctgcttattgtatttcttatacaaactttgcatattctttatagaactggaatggctggtgttcctggtactgccagtgccattttttctgctgtcaaggaagttggagccaatgtgattatgatatcgcaggttatttagttcagctttataatttctttcatcagttatgtattcccttgtcaaatgtaacttcttaatataattacataaaatgcaggctagtagcgagcattctgtgtgctttgctgtacctgagaaggaagtgaaagctgtttctgaagcattgaactcaagatttcgtcaagctttggctggtggccgcctttcccaggtgcctttatatctctctttgttcttcgaaagatatcaaatagctattctcttagcaaatcaactggactattattttggcatctactatttttctcaaactatggtttcattgttttcattcagattgaaatcatccctaattgtagcatattagcagcagttggccagaaaatggcgagcactcctggtgtttctgccactttttttaatgcattagcaaaggtaagttaagtgtagtgtttgcaaagaaaatcagatgacggttcatcatacatttcatatccttttttctgcttagaagctctgctgatacattgccatttgccatacctaaataactgcaggccaatatcaacatcctgtgctatag

SEQ ID NO: 9811 - DNA, 456 bp, Arabidopsis thaliana columbia
catctcaaatctctatcgaatctgtaatgaaataaataaacggttcggtaaatacaatgcattaaatatcgaaaataaaagatttgctagattataactttcttttaaatggtgttagttagttgcagctatttctttgtagtttatcttcatatatacgaatgaccatatttcttaatttaattcattatatatcttattataaagtgtgacgtaccctggataatacggtgtgggaactagaagggcgtcgttaggatcggcgagaatgaaagttaagagttcgttagcggcggtggctccggcggtgaggacgatccggtcaggatcaaatctagctttgcctcctcgaatctgttccatgaaactagccatggcttgtctgaaagttttgagaccgtggtagtcttgaaacaatgcgttttcacggaacccaggagctccttttgatcccac

SEQ ID NO: 9812 - DNA, 454 bp, Arabidopsis thaliana columbia
tgccaagattgtcctaccaagattgtcctgccataacatgtatttggaccagaatagtaccaaggcaaaaacaacatgtgttttttactcaatcactgcatgaatgggtttatgctaacctagatgaaggagcggttgttgagggcagttccttggctactttctttacaatatcggtttcgtggcgatggtcatggtgatgtggtaatgtctttgggcagaatggggtgtgccgggatagagtaaagtttctgaaagatgcagttaaagaggtggccttagctaagctcgcaaatatggggaatgagaggatgatcagccgagaggagaggatgattggttggtcggcaccacaagtaggctggattaaggtaaatacacatggtgcttctagaggaaacctgggcttagcacttcagcgggtgtttgcgagatagtgatggagcttggtgtg

SEQ ID NO: 9813 - DNA, 551 bp, Arabidopsis thaliana columbia
tgatcgctgtgatccaccaaggcaagatcgtcgagaaaggtaaactacctaacattcttattcactttttgcatatggatacacatgtgtgatagcaaaatttgatgaacaggttctcacacggaactactaaaggacccggaaggagcttattctcagctgattcgtctacaagaagagaagaaatctgatgagaatgcagcggaggagcaaaagatgtcatcaattgaatcattcaaacaatctagtctgagaaaatcgtctctaggccggtctctaagcaaaggaggatcatccagaggaaacagcagccgccattctttcaatatgtttggttttcagcaggaattgacggaaacgtcgttcaagatcaagaagaggatgatactacacaaccaaaaaccgaaccaaaaaaagtctccattttcagaattgctgctctaaacaaaccagagattccggtgctaatacttggatcaatatccgcagcagcaaatggcgttatcctccaatctttggcatactaatctccagcgtaatcaaagcgtttt

SEQ ID NO: 9814 - DNA, 840 bp, Arabidopsis thaliana
actcttcttcatgtaaactcaaacaaccctcctctcttccctattctggtatgacgacaaagcctatattttaacattagttaacttctttgtttgaggcttaatattcatattaacataaggttgattcaatgcaggatcaaactttagtaagccaggcgatgatccgtcagaattgtttcttccttttcgttgctactgtgctagaaaagatgtgcgttttcggcttttcgcttcactttttttatcttgtcaagcatttcatttcatttgactgacattatcttgttactgtggcagatcaactgccaagatgtggttgtggaggacgttagtgcggctaaaggaatagttgactacgtgcaacagaatgcaatcgagactttaatactcggttcttcgaagatgactcttttaaggtgattaggcaaacgcttttctccttacttaagactaaatctgagcatccttatatatatgttttatttgatagaaggttcaaagcagcggatgtttcaagcactgtcatgaaaaaggcaccgagtttctgtacagtatatgttatctctaaagggaaaatctcgtttctgagatcagctacaagttcacctccccattccaatatgccatctatgcgacatcattcacacgctcagacgagcaatatgaatggtatatatgaccaagttttttcaaggacatcatataagctaaaatagcttttcctaactgatcaaatgtctttcatgttgcagttgaaaggaggcacaaacaatgcaaagacacatgatgagacaagatagagacaagtatgttcttactacataagttgtttatttt

SEQ ID NO: 9815 - DNA, 931 bp, Arabidopsis thaliana
tgtcctcatgttatgctatctgatgctgtgatgtcctcatgttaggctatctgatgctgatgtgctcctcatttttatggctatgggattggtgtgagcgcgatgtgtcaaccagatccaccatgagcatgatgatgttcctcgtggaaaaagattaacccgacgatattcacgagaagcccaccaaccgatacaaccaaaagactatttgtagaaatctcctgaggatccaagattctctcaatcgactcaagcacaatcagagccccaacaagaacaaggaacaccgcgttaacataaccagaaagcacttcaaatctacctcggccatagttatactgatggtttgcaggaagacgagagatataagacgcatacagcccaattgccaaagcagcacaatcaaacaacatatgacaagcgtctgagatcaatccaagactgttactcataaaaccagccacaaactcaaccaccatatacgccgtattaatcaaaagaaacaacgcaatcttcctcgatttcttctcgctcaaaatgtgacggataggcttcataaacatagtggaaaacgactcaggcgattccataccaatctcttgataatctgaatacacagactccaactctctaacagcaatgtaaagcaacaaaccacaaagcaacaatccccaaagagatagctcaggaaaatagaagagttccaatactatagtacatagaaacgttacaagaaactccctctctgagtccttcttcttcgagcttgaaaacttatcatcattataattctcactcaacaacactccaaatacaacagtgttagctaaaggccaacctaaattcccaaaagagacactatcatcaccactaccagagaagaagaaactccaaatagcaagtgggacaacaacacagtggttagaacaaa

SEQ ID NO: 9816 - DNA, 810 bp, Arabidopsis thaliana
gttcgccatttttttatccaagagcttcagaaatcactaccgacattgtatacatctctctcagtttacccggctctatacggggccataagcaacgatgcaacaaaatctacaactccctgtttcaaacgatctgcactccggatatgatttttatgtggctctttattcactgtaacctgtgacacggaacattcattcgctcgttggtcatgcttccaactaggagggccagtcgaacaagcaatcgaatcttcttcatcctttatatgcaaagtacgattgaaaaattcaggatcagcagcagcagcttgagattgccatctatctatagcctgagaatccttgaaaccatcgctactaccaccagtatcaacccatgccccagttaagaaactggtatccgcagccacactttctccagaacattctctgaacttcgaatgagatacaagctcattcgaatggctaggctgtgaatagttatcaactggaatccttgcactgtcaaggtcaaggcacgaggcaggaaaatcataccagtccctaactttgcagttcctcgagtcaatctctgacatacaatcttgtcttcctaagacatttccaggaaactttttcctgaaatcagattcgtccatctttgcatactgctctcgcctggcaaacttatgaaatgaggggatcttaggaagctgcaatgaagtattatgataggcctcagaaaatgcctgcaagacagaaacatataatttattcgttaacaaacagataaataaagagttaacggcctcagagaaaacaaaaaca

SEQ ID NO: 9817 - DNA, 615 bp, Arabidopsis thaliana
atttttttatccaagagcttcagaaatcactaccggaaaacggataacctctccgcaaatccgtttatacactgcggcggccgtcgcgggaaaactggaaatggagaaaggaaacaaagagccaaagcaccggcgaaaactccggaggcagtgacacctgtgaaaccgctggagattgcgtcagtcacggcgacgacggagaatgaattgcctcggcctaatgagatagcttacgagagtgaagtagcgaattgggttaatctgattggatttgttgatcaaccagttcaattcgaagcttcttctgatggcaaattctgggctggtactgttattcccagaggtctgcttcagattcctctggtttctggtactctctctaatctatactcaaagatgagatttttatttgtaactttgtttgtgattcatatttgaaaaggttttggattttgttttgtcaggattccgataatatttgaaggcgatttagctaaaaccgcagctcgatatgtaagcaaagacgatcaaattcatgtgtctgggaagctgtttatagattctcctcctccaaatatgacttatgcacaagccaatgttcactcgcatcctcta

SEQ ID NO: 9818 - DNA, 584 bp, Arabidopsis thaliana columbia
cacagactgtaatgaatcacttattttacaactgattgaggtctactgggttctccatacactgtctcaaaatgaactccgctcttcttcttttgtcatctctatcctcctcacgcacaaaggatatgggtctatcttcacccttcatctgtagacttagatccaaaggttgtccgagaaatttcttctcggttctgagcttagaaagagcaacaggtttattcttcttccattcagtgtgagcttcactagaaaacccatctcttgcagcctccatagcaggagcaaatgcctctatcactgataagccatctctattcaatgattcgactttctccccggacgatacagaacgcagttcactctcatcatctctcatttcttctttcacaccatccatatctccccacacaggattccttgaggagattttacaaacaagtttcctctgcaaactcaacaaagctctctcagcctttcgtctctgcctcgcttgttcaatcttatctccccttggatctgatactctttcgatccacataggggtttccttataagtatgaggatcaggaaaagctggtagc

SEQ ID NO: 9819 - DNA, 609 bp, Arabidopsis thaliana
gagtagtcttcgagtgttaaacaatgtttattgtgtttcacctatggtagggttgcagaagaggtgatctttggagacgagaatgtgacaaccggagcatcaaatgatttcatgcaagtgtcgcgggtggctcgccaaatggttgagagattcgggttcagcaaaaagattggacaagttgcagttggtggagcaggaggaaaccctttcttgggtcaaagtgtaagtatataaaactcgatactcaggttttcataatttattgtgttgtttccagctctcaaaacatgttttgtttgcagatgtcatcgcagaaggattactcgatggcaacagcggatgtggttgatgcggaagtgagagagctcgttgagaaggcgtacgtgagagcgaaagagatcataacaacacaaattgatatcctacacaagcttgcacagctccttattgagaaagaaactgtggatggagaagagttcatgagtcttttcattgacggacaagccgagttatatgtttcttaaaatcaactaattggcttgtaataataccaattagcttcgatctatacatactgtatgttaatatacattgacatgttcagagact

SEQ ID NO: 9820 - DNA, 979 bp, Arabidopsis thaliana
ctcaacagaatccacaagtgtttcctccaacggccggtaagtccaacccaacttctgcaatttctctgaactcaccttcactctatcttccgcatcaatgtatctaacattggataagtagaggttggatcaaagttaggtcttaaagaaacttcaaaacactgatctaaaggtaagtgtcattgcttattgaatgaaatcagtaatgagctgacagcaattagtctgttctcaagacaaaaggttttcgctcaaaaaattgtcaaggatggttttgagtgtacaaaactaagcagagagatgtgttgtttgtttacttacttctttgggtagttgtaatgtggataaaaactcttcagcttctcaaccacaatctcttctttaaccgtgtgggatgtacatatgtatcttccttcagcttctgctttctcataaagcaagagtaaagcttgagctacatcacgcacatctaccaaatgacgttcttggttatcacgtgtttcaaaaccctctgcaccacacaaaagtaaaatcaaaacccgagattcaccaacccatgtataccacgctgcttctaacaatcccagatgtgaatgataaggcttgttgtatacctttaagaagcttaagaagaaccaggctactagcatttactgtgttctgctgcagtataggtcccaaaacaagggtagggcaaacactgacgagatgaagtccggttcgttttgcaaattcaaaagcttcactctctgctcgtgtctttgccagacaataccaattctgccagaggaatttaaaagtcagcaaaaaaaagatgtgatatataacaagtgagatgagatgagggattgaggatgcattaacctcagttttcttgcagtattcctggtcagaccaacatgcctcatctaatacttgattctttgaccacatagggttcatgaaagccgcagctacagaggaaacatacacaacacgc

SEQ ID NO: 9821 - DNA, 867 bp, Arabidopsis thaliana
gtgttaatggaacaatgtggtgttgaaacaaagctagggctgaaaccaatagactttagttgttcacttgtatatgatttgtgttgatatgtatctaagctctgatgtcttactctttgtaatcgcttatacggttaaaggtcgaatgtctgaacttggagttaccacatggaatgataacttaatgagtatagatcactcgccttgactctcagaacatgcatctgattggttaagatagtagtgcttatccagatacggagttctttgacaacttcagtaaaaggcgcgatcttttaaaaaccgtttagagggtttctgcaacttaacttctaaaaccatttgagtttcaacaatatccattggtgttaccgaatctgagtttttttttgtttctactgtttgtgttatgttttgttattacaaagcattatgcctttgttagctactgaaaaccattctagatgaatctctgtatgggatctttagcttaatgcccggacttgctaaccgaattagttataaacttactgagttactgttagctatttatcgtcctgttgatagaaggtcttgaaatttatattcttttatttggctttgcaggaagcagcagataacaattgtgtttacagaaacgaggttcatcactctgtaagtgaacaaactcagatcctatctgacgttgcttccgacccaactcttccacgtaccaaggctgtgcgatgcgccaagtgtcaacacggtgaagctgtcttcttccaggtgaatcattatcttatatcttaatctttaattcgtcatcaatcaaggagtaaagaaacattctttcgtttatctctgatctgacttaaagatcaaaagaga

SEQ ID NO: 9822 - DNA, 475 bp, Arabidopsis thaliana columbia
tctgtaataagtgatgtcgtttagttcaaacataatttgcgagggaaaaattcctagggactccctcgcaaaacaccaattgcaaggaatttgcgacacagaagaattcctcgcaaatcacgtctcgcaaaaaggaaaacattgcaattccctcgcaaaacttgcgaagaataattcgcctcgcaaattacacacatattgcgaggcaacaattttgtcctaaattacttggaaaatgaaagcctcgcaattctctagcatactttgtgatggatttactacgttgttttcatcgcaatcggtaaacagtaccagttttcacaaagtcaacattttttttgtcctcgcagagccttagcacttctacgagggaattgcgattctgtgttcttttccttgtaaatccatcacagagtttgctaggactttgctcttcgtttgcatgtttgtttatcgttgtttaactgtgtaatta

SEQ ID NO: 9823 - DNA, 555 bp, Arabidopsis thaliana columbia
caacatgatgaatggaaggaagacattatgcctgacattctcgatggtcacaatgtggctgacttcattgatccagacattttgcagaggcttgcagagttggaacgtgaagaagggataagggatgctggggttgaagaagctgatatggagatggatattgaaaagctttcggatgagcagctgaagcagctttctgagattagaaagaagaaagctatactcattaaaaaccacaggctcaagaagaccgttgcacagaaccgatcaactgttccaagaaagtttgataaggacaagaagtacacaacaaagagaatgggtagggagttatcagctatgggacttgatccgtcttctgcaatggaccgtgcaagaagcaagtctagagggaggaagagggatcgatcagaagatgcgggtaatgatgctatggacgttgatgatgagcaacagtcgaacaagaagcagcgtgtgagatcaaagtctagagctatgtcgatatcaagatctcagtcgaggcctcctgcacatgaagttgtgcctggtgaagga

SEQ ID NO: 9824 - DNA, 519 bp, Arabidopsis thaliana
agaatttgagcataatgttttgtgggaagcaaacagtgaagatacagcataaccaagtagttaaataaataatggagcttaagagagttatacctggaagaaaacggcctccctatgctgacacttagagcaacgcacagccttggttcggggaagagtagggtcagaagccacgtctgttaagatctgagttcgctcacttacagagtgatgaacctcgtttctgtacacacagctgttatcagctacctcctgcaagtcagtgccacaaaaagtataaattctgagatgaggacaacaaacccatttacatgatctaatctaatctgtcaatttgtaacaacaagattgataatgcagcttaaaaaattgcaaataactactcagtttgtgtaaatcaataagctaaaagaggcccttcaagtattcatatagatctcataaacacaacactagaaagataaaccataagaacttgctaagccttaattgaaggagttagtaaatagagaggttggt

SEQ ID NO: 9825 - DNA, 561 bp, Arabidopsis thaliana columbia
ccaggcgtagacaacaacaacctaaaatgggtcggagacaagacttcatcacatccggagactcggctactatttcgtccaccaccgttgagaaatccctcaccacacttcggtactttctcacgggcgactccaattgctactccaacattccggttacaaaaggcggaaaagttctagtgagaaccatgttttactacgggaattacgacgggaagtcctcaaccccatccttcagcgtagtgtttgaagggaaacaccgaggcaccctatcgatatcctcagcattcgaaccttaccttctggagttgatatttccccggccggtggagagaccagcgtctgttttgtacgtacttcttcatcatcaaacccttttgtgtcttccattgaagttgtcgacttggatgatggcatgtatgccgagcttggtcctggtgaaggtttattttaccaacaacgacgtgcgtatggtgcaacagaatttctaaggtacatcgatattacgtgtataagtagcataaacatatgtctcaatatatatatattttagttttggtg

SEQ ID NO: 9826 - DNA, 552 bp, Arabidopsis thaliana columbia
tcttcaaaataaaaacaatttaaacaaaaaatggataaaaacaaaaaaaataaaggtattttcttattcaagttaaaaaaaaaaaaaactattcaacttcgacaagtcaacaacatataaccacagaaggcaaagaggacaaagtaagtagttccaaataacgaaaaaaagagatgttaccatgagattaagaaaggctcgtctaagctgttgtgtacgttaatgatgagattgtcgtttgtcacactgtgaatgtctggtcccggaaattgcccattaatcaatattccctatttttcatataccaataatataaaaaaacaattagcatcatcgattaattcagttcaccggatctaaccttcattgtcacaatataaaaaagagtaacttattttataaagtattgatctgcacattttaaaccaatcattacacaaatgatacactttaaggaacaaaaatcatctcgaagatacatttttttttccaagtaaagaagtaatatgcagtctatacgtaaagagttaacaaagagttcttttttttttt

SEQ ID NO: 9827 - DNA, 598 bp, Arabidopsis thaliana
ttctccatacccaacttgcaacacaagcaacaccttctgaaacgcgcccaaacgcaccgcatcttcaaccgcaaccgtgtttcctgttttccacagcttcaaaatcattgacattgagctcctagtcgctaattcagaaaccttcgcaatcttcttcaccaaaagcggcatcaccaacgcatttttcctcacttcctctctaccatgttctgtttcgcaaatcgcgtcaagaaccgctaacgctttttcacaaacgctattctcggcatcaacgatcatctccaccgttatactcaccaaaccaatttcgagaaactccgacgcgatttcaggcttttgcaacaccatttgataaatcgctatcaacgaagattttgttgaactagacgaaaccgaatcgcgaatcaactttactaacgcttcggcgactccgttctcaaccgcaaacgagtgaactcgcgtttcgtctaatgagagaatctccttcataataaacgcggcgttttgacgaacggaatcatccgtactcttcaacaaacccgccacgcaacgaaatgatgtcgcagacgcgagtttcgaaataccctctaaaccaatc

SEQ ID NO: 9828 - DNA, 508 bp, Arabidopsis thaliana
tcttctctgctgctttaccctttgcatccttcttcttcggctgtagtggctcagttactgattcttcttgtttttcctccttaacctctacagaagaggttgctgcagcagcactgctgcttttttctccttctctttctccttcttctttttctttttcttcgcagcagcagtctcttcttctccttccttctcaccagcattctccacaggtgcaactggctcaggctgagctgctttctcttctacaggcgtagatgaagcaggtctttcagcagcaggggtttctccaagtgctgcaagaagtttgtccaaatcttcctcttcctgtactgtccttccactcttgtgattcttcttctttttcttactctttccagtttccacaacctccacattcttagtatcagaagttttagtttcgtctgcaactgagtcatcacctactgaggccaaaacacatgctgcccttctttttagaagatttcttcttacctgaaaacgttac

SEQ ID NO: 9829 - DNA, 1259 bp, Arabidopsis thaliana
ctctcccctttacacaccgtgacttgggttccctgtccttagaaaatccagcacgtcctccccgtgcgttcccacactcatttgcaacttcagttgaaggattgatgacgattgctgaatccataagcgccagtgggtgaatttgagaataaatgttgtggctaggattaccaggaatatcaccacaagagttctcaaaacacgggatgggatttaagagttcactatcgtttcgttcttcactgaacatatcagtatgttcgtagtcaatcagtgcatcgtgatgtggatcaatatctgagagcctggcctcatttgaatcagcgggtgaaggagtgttaaccgcatcgcctccgttctctctatcttctgattcatttaccaccacattgatgtcctgattgtttgccaactccattgcatcctcatcattgatctccctaatgatgacaccatgattctgaacgcgatcctgatcctcctcatcatcattgtcgtgctgatcttctccaccattctgtataagacacgccccggaatcgtgtgtgagcatcccacagacttcacagaaacctcgaagacgctcatatctgaagcggagcagagtattggtgccaagcgcgaattggaaattcctttggaagtgaagtgggtgagtgatgttccagtgaatgagaatgcgaacaaagtccattctagccacgacttcaacgtcaaaatccacatcgagaacctgaccgagtgaacgaccaatgtgttcgacgacgccacggttgaggaattgataggggatgccacgaacttggatccagaaagggatgaagtcgaggagaggcagttgtggagtccatctttggatgatgagcattctgtcgttgaaggcccaaggaccacgcctcagaaccgtctccatggattcctttgtcgggaaaatgaactgaaactagccctgcttgtccccatattcgcggtaaagaagcaactatggagcggatgttctgacgtctaggtatcaccggtctgccaatcaggatgaaacgattgtcggcaattgcttgattcacaatttcttttgggatcgctatgggctcttcgtctgcacccagattgatgttctgaactgcacgcctgagattgtctgccatttttgagaggtttttatagaatcgaagtgggtaaaaaattgagaatttgatgagaagacaaagtgccattcccaatcgacaattcgttgcttaaatagatgaaggtgtttggga

SEQ ID NO: 9830 - DNA, 717 bp, Arabidopsis thaliana columbia
aaaagtgggaaaagacaaaaccattgtttttccaaagagacatggaatctttagcatcagcatttttccttagatcttaatgaacatgcagcttgcattcataaattccccagcttgaaagttcacatatgaaaaaatttagtctatgagatatagttttgtgaggaaatattgagatggaaaagtctttttttcaaaggtgaacatctcaacatagttaagttttggaacttgcgacacctggataagttaaacttgacagctcttgcagtgtaattggctagttaagatcaagatgaccttaagtatggcactcccagagtgtgctaatcttttaaaggggttgtggcaagagaaagaccattatcacattcaagaatatgaacaaataaggagtagaattttgcacccaaatgacaagcatgatggaaaaaggagttgtacgttaatgtcaattttaaaattccatacctgaagtttcactactgttgagtatataaattcagtgctttcttcgcttgcacgggaaatggacaacacaagctcctgaaaaggagagaaagcaaatattctttaccacactgaaggttgcaaccttccaattctaagataataaactgaaatcatgcattaccttcttagtatccttcagttttccataaaacccatcgtaatccccttcttgcaatgctctcaaacaactgagaaattaaacat

SEQ ID NO: 9831 - DNA, 508 bp, Arabidopsis thaliana columbia
taatcaactaacatagcataccagtccttgaacgttctgttgaggaccatagtaaccattcatgtccatcgcctctgaacttatagtttcctgcacaaaatgttaaaactataaggccatatatccaagacatcctactcttaatctcataaagcaatgtgcagttacaatgatcaaactaattagagaagatcaaatcaaagcacaaaccattggttgcaagctctgttgagattcaagcatttggctagcctcttgttgtccctgcataagatcaatttgagtatcttctttttaacctttgaagctaagaaaatgtacgtaggtttagattggcgagaagcttcagtaaaagcatacctttcttttcctatatacagtcttcttttttgttgcttttaccccagccattacctggttttcttcttcgtgagtaccattattaagctggctattagactcagtgatgttgtttctagcattatgcatatcaacacaatttttcagg

SEQ ID NO: 9832 - DNA, 546 bp, Arabidopsis thaliana columbia
gctatcaataatgctcaaaacatcataacgtgagccattccccatgaagagctgactagagaagatagggaaggtcttggcatcataaatgttaagccagtaacaaacaggcgtgacgatatacataaccagcacgaaaccaatggctacattgacggaagcgaacaaaggactagctaaagggcttccaagataagcactaatagtgacccaatcaaaaccaatggaaccaatgccaagaccatgttcacctgaaccgagttggtttaccagaattgatttgggattgagccaacagacccatgagattgatgttaacatggtgaaaagataaccaggaaagatgtagtaagcaaagctagctacgaggacgattaagaagaattgagttctactcatgcctcctcttgatttcttttctttctcgtgtaacgcaccaaagagagagacttgaacaagattgcttggcaccacatttcaccaggctcaacaaggtgttcctgaagagaccagccaaccagaccaagaatctaacacaagaaacga

SEQ ID NO: 9833 - DNA, 676 bp, Arabidopsis thaliana
ccctaaacatggaaatggtcatgatcacgatgtggaagatgatgatgatgagtatgacgagcaagacccagaagttcacggcgcaccaggttaatttctctgtattaaagtcctcgtcaatcagcagttatatttttttgtgtattaacggtttttctgtttttttatgtgtatgcacagtgtatgaatcctctgccgtgagaggtggtgtaacgggtaaacctaagtctcttagtcatgccggagaaactaatgttccggcatcggaggagattgttcctccagggacaaaagtttttcctgtcgtgtcttctgaccacaccaaacccattgagcctgtatcattacaagatacctcttacggacatgaggcactggctgatcctgtaagaacgacggaaacatcggactgggaagcgaaaagagaggcaccgactcattatcctctcggagtgtcagaattttcagacagaggagagagcagagaggctcatcaagagccattgaacactcctgtgtctctgctttcagcaacagaggacgtgactaggacgtttgctcctggtggtgaagatgactatctcggtggtcaacggaaagtcaacgtcgagacgccaaaacgtttggaggaagatccggctgctccaggaggaggatcggattatctcagtggtgt

SEQ ID NO: 9834 - DNA, 491 bp, Arabidopsis thaliana
cgggtctagtgggatacgcaaagctcacgtttctaaactctatatctcctttgatatgagtgaccaatcttgagttaggctggtctggaggtatttcagtctctctatgtaaaaccctaaatacggacccgagtgcttgtgtgcccttcacgatatctggggttaacgcaagcgtttccgctacggagtaagcagtgacgagcaataccatgaaagatttgatactatcctcaaagttggtctcgttgcgcttaatcagaactgagatataccagagaccaagtgcgtaggaacagaacgcgagacactgtgacaaaccgtatccagatcccgagatatgacctctgagtaaggcactcttggtgggtttgcttagttcacaagtaaactgttctgagatttgcttttcagcactaaatgcagcgacgggttcttatattcgaaatcgcttcacgcgccaagtgaagttgccctagagtaagcacttgtgt

SEQ ID NO: 9835 - DNA, 593 bp, Arabidopsis thaliana
tgaaaatgtcaatttcgggtcttgtcgggatacacaaaactcacgtttctaaactctatatctcctttgacttgactaaccattcttgagttaggctggtctggagatatcttggtctctctatgtaaaaccctgaaaactgacccgagtgcttgcgtgcccttcacgatatctggggtcaaagcaagcgtttccgaaactgagaaagctgtgacgatcaacaccatgaaggatttgatactatccccaaaattcgtctccttatgattgatcaaaaccgatacgtaccagagaccaagagcgtaggaacagaacgcaagaaactgagacaaaccgtatccaaatccagagatatgacctctgacaaaggcattcttggtgggcttgcttagctcacaagtaaactgttccgagatctgcttttcggcaccatatgcagcgacagttcttatatttgcaatcgcttcacgtgccactgaagttgcctagagtaagctcttgtgtaatctcctcaaagccttttaaaaatagttgctgcaaaatgtcatattcaagcttattcagtttcaagattcaaaatatggttgagagga

SEQ ID NO: 9836 - DNA, 647 bp, Arabidopsis thaliana columbia
tgatgagctttgctcatttttacaccatttgattaactcaaatatgaagaaaggctaacgtcataggaaacttaatcctcggattccaactctttcttcaccttctaaaatgatgcaaataatcttaaaccaaaaaagtaaaaaacaaatttacaaaaactaacaagattattgatcaagcagagagagacgggaaacaactcccagatcggagaagcgaccgtcgtgactctacgccgtcgatccccggcaaagctccactcgagcttgtcctcgtattggttctccgtggagagccatcaagactccgccgtagaatcctaccaatgacggatatcggatcttcctcttcatcgggactccaagaacggaaacggtggcaaaacgtcgtgtgacggcggagagctcctcgacggagatacgagtggaagatcgaaccacctcgtcttttaccgcttccgcacaaagcccacaaagccagtgtcccttatgccgttctttgacacggttgatgtaagctggcgtacactcttcagcgaaacgcacgtgtcgacgtgacagactccacgccggcaacgaagacgatggctttgtgttagtacgggtgctgacgatgatgatgatgatgcatgatttgtttgtggaaa

SEQ ID NO: 9837 - DNA, 557 bp, Arabidopsis thaliana columbia
atcccccaacagcaaaatcaaatttcaatacaagccatatattttgaggaaccagagcatctagtaaaggtacaaatgtaaagatcataggaacaaacccgttcaatggcttcacgctcttcaggtgtaacggtaacagcttgtggcattgctgcttccaactgttccataacattcctggtggcatcgaatgaaatgtcagattacatgctttaatggagaaaaaagaataaaatgaaaacgtaaaggagaatcatgatattaaacccactcttctccctcgacaggttcgtttatcaagcgtaggaagtcagcctggtgctcttgaattagtcgcacaagctgggggttttgtttaccgagctcctgaagcataggctgcaaaacgaaacagtataagtgggaaatcaatatcatataacctaccacataaagaataagaggttaaaaattttacctgtagaatttgtgggtttgcttgtaccatagctcgcaaggcttggaactatgaaaaggcacaagaattgcaaatgacataagaggagagaactgaagat

SEQ ID NO: 9838 - DNA, 537 bp, Arabidopsis thaliana columbia
gaggtctcgttgaatagatacagactttggttctcttgtaattggttgtgttgaaagcgcgtttggttcacaatcaatgccatatggctgaagacagcctacgggttggtatgatttcatctggtttggctgttttactgaatggtgaagatgctaaagaaaattcctcgaaagctcgtattgttccacattttgattattctggtcaccggcctttagaacggactatcgaattcatatttggtttagcagaaaagtcggttggtccattggatggtcaagtagacagtagcttgattagagctgtgattaagaatcagttctcgaagcttcatggtgatttggatgtttcagttagtcagagagaaggaatcagtgtagttcatcatggtgttggacctcctattgttggccttgaagagtttagcatatgtggtgatatcaggattgtgaaccacctcttgtattggagagcttagcacttttcagtagcgccagggctaatgcttgtatttggaaaggaaaatggatgtatga

SEQ ID NO: 9839 - DNA, 571 bp, Arabidopsis thaliana columbia
tgccgaccagaccacaagcatattccctctgcccatttctttccattattttatcatttttattttaagttaattgaatctacttttgagttttttctcgagttaggaaacgatgatttttctattaaaaacaatcaaacacatcggagaaaaattgtgaaattgtaaatacagagcaaaataagaagtttctctcttttaggaagtagcaacgcagaaagattcccaatttagcaatcccctgttttcccgatcgccttgaacacatcttcttgatacttgaacattctcaatgcccatcacttcatcttcatcttcatcttcttcctcttcctcctcctcctcgtattcttcggtttcttcaggctcaatagtctcttcttcgttctctacaaactcattggagtctttcaagatagagagacggagacgaccattgctacggtcagcttgaaagcatccgttacgaggaggcgcgtttgtggcggtcatgaccaatcttccgttttcacggtgtggtctcatttgaatgcattgaaatcctctcatagtggtcacaggaggtgggaga

SEQ ID NO: 9840 - DNA, 189 bp, Arabidopsis thaliana columbia
  unsure (1)..(189): unsure at all n locations
accgagctnnnnnnnnnnnnnnnnnnnnnnnaagaggcggctcttgtcgtagatgaagtagaagtagtattacaagtaaatggtaaagttcgtgataaacttactgtttccgtaaatattacaaaagaagaattagaaacaatggctaaagaatctagccgtgttcaagagtttacagaaggtaaaaat

SEQ ID NO: 9841 - DNA, 771 bp, Arabidopsis thaliana
gtcgataacaaaaaccggatacataaattcagaaccttttgaggcgtattcaagagccgggttgtcgtgaacccggagacctttccggaaccaaatcagtgaaccggatccagtagccattgatgttatgggattgagacgataacttgaaggtgaacagacgcagaatcgttgcatgaatatgtttgagatttctatagaagtttcttttgagaaattcgcgcctttgaaaagcgcgagagaaggtttcttaagacgaagatgtggttaatatacgcttcttcaactctgtgtttgctaatttgcgcggtaatcagcgtaagataaaagaagggaataggttattatcaacggttatatttaggccacgtcattactaaggagcaacatcatttgggcgatgtgttcaattatccaacatttagtgcttattagtatccatgattagtgaaattaagaaaatttacttcatatatttgagattgcaatcgtaattatatttgtatactaacattttaatctttatacgtgttgaacatatctaccgatccaacagttagcattaacaactgaggaaaaaaaaaaaaagcattaacaactgacaacaaataaaaagctaaactaactaatgatccaacggttcacaataaagcaacatcatacacgatccagaccgtacaaacagaaaacgacgccgcacaataaagcggttcttgagtatcatcgtaaacaaaaagttattcttcatcccataaaagagagacattttaa

SEQ ID NO: 9842 - DNA, 461 bp, Arabidopsis thaliana columbia
ctccaccggagtaacctccaccaccgccgctgcgtgatccaccgccaccacctccacggtggcctccgccgccaccgcttcctcgtgactgagcctcgttaacagtgatgctacggccatcgagatcttgtccgttcattccctcaatcgcatccttcatggctttctcatccttgaaggtgacgaatccgaatccccttgatcttccagtctcacgatcgttaatgatctgttatccaaataatacaaaaaccagatcagcaaaacaatccaacaaaactgaacaaaagcatttagatctacaacaaatatacaaaatacaaaaaaatccgatcgatctccgggctcacagaagcaggaagatgaacgtaccgatttgggaaaatacaagtaacagtagtagtagtagtagtaacaaagaacgagaatagtaacagagtaatcgaatcaagtaacagaga

SEQ ID NO: 9843 - DNA, 1515 bp, Arabidopsis thaliana
caccaggtaatgtacacagcgcacaactgcctcttggagttcgactttgcgcagagaaagaagccattcattaccaccacctggctttgcttgcaaacattcactgtacctgttatgtatttggctctgctcaccacaagataaaccagaatgagagttttcaaatgagatcagaaccaatcagagaaacggccacacaatgattatctagcttagaccaaacattagcttcaattctatgaatgtatagccacagagtaaataaaagtataagcttcaagcaaagttttagcctaaatgtctaattcaacataatgcaaccattagagagtgatgaaatcacctgtaaccaaaaccagcctttctaaactcttcctcagaaaccctagataatcgatccaatgatgggaactgatgaaactcaaatccatcaatgtcacccaaatgtaaccctaaagacgaaacaaaatccaccatcttcgtaatcctcgcaatgttattgttcgatgagcacaaaaactgtatcaagcactcgagcggatcctgcctcaacacacgagcgccacggagatgtctcgctagctctccgaaacgaggatcttttttcgagaaatcagaccatagctcagctaacgagatctcagcattgagaaaatcgagcaacgcaagctccgcggatttagggcttgtgctacaatggacgcagtaggaaactgcgtcgtctcctggacgttgtctaagagagactaagtgaggcccaatcgttccgctatactgaatcgctccagttttcttccaccggaatgtttgacccgtcggaaaagttaacggcaacgtcagctccgtgtgggttagttttaacgggaaccatttaggtgttcctgttctgtgtagcttctgtttgagaatcggtgtgaccggcggagacagtggtggtttgacggtggaagagatcgacggctgagatgtaggtcgaggtctcttcatcgccgttgctcgttaacggaaccaccacaccagtattaatgcgcgacggtcgactaatgtatcaatttaaaccggtttaaccaatttgaactttaagaaccgaactaaataattgattcggtttttctcattcaaaattgaaaaataaaaccgaagtaaagttgactttaaccgaagttaaaccaaaatttggattggtcaacgaagcttgaatttcgaaatcagaaccctcttgtttgtcgagaaggttaggtcgtcgtggagaatgaattaatatatagagattaatgaaggaaatagtgaaagaaattgcgagaaaaaggtttggtgtttagctcgagagctggaaatcagaacgactcggaggagagaagacaaagaaagcaattctttttactaagggtcttgcttcgattccacagaacccaaaacctctatttctctatcttcatccacaaaaatgccagcttctgaaggtaaattgctgtttcacatctttatctctctcaaaatccgaatttaaattgg

SEQ ID NO: 9844 - DNA, 801 bp, Arabidopsis thaliana
agtttacatgatgaagctgagaagctcgagcaagcggagagtcagctcgctaactcccggtatggaggaattgcgccagcaggtcaccaaaggaggaaagaggtttgtctaaatggttgctttagcaaaattatttgttatgttctcaatgtttattgactgtctgagatactggaccatgatcttgagctcatacacttgccacttttcaagcttgttcctgtgtagaaacttttcatttggctaattaactgctactatcaacatctagcaacttggattaaatttgaactttttattcttaggcattatgttgactggatattgactaatagaaactctacctgcaaaacactatgttttaccttttctgggtttgaaatttcacaattgagtgtatgtttagtcaaaaatatacagagctattaaagtttgaactagtaaaacagggagactttgatgtatcaatttgtcaacgagttgttgccaatagtctatgtctgcttcctagagttctgttatctctggctgtgtgactcattttgatattgttttaatcttctttacataaaaacatttgttttggagattacattacctaagtatatgtgttgtggaccactttcaggatgagcctcaactcgcgaagataactcgggatagtgcaaagataactgtcgagcaggtccatggactaatgtcacaggtgagtaaatacaatctgacaatgctgatcctatttcccttgcggttaatggatcatgaaattgacttaaaagtctttcatccacaatgtgcagg

SEQ ID NO: 9845 - DNA, 891 bp, Arabidopsis thaliana
tcaaggaattggagctggatttgtacccaagaatttggatctggctattgtagatgaatacatagcggtatgatctgttggtttggttctctataactatacattcatctttttcactttcagcaagcaacaattttcctttttaacttcacctgttttgttgcttcttatcagatttccagtgaggaagctattgaaacctcgaagcaactagctctccaggaaggcttgttggttagtctatatttgttattctgtttgacttatttgttagtgggaacactctttataaaagatagaaaacgaatgtaaatgcatatgagaaatctatgacgattagtaaacgactataaccttttcaggttggtatatcttctggagctgctgctgctgctgcaatccaggttgcaaagagacctgaaaatgccgggaaactcatagccgtaagtcctcaatgttcttcatcataatttctttatggaccaaaacctagtcttgtatctgtgaccaaccactgaatgatatagaaaaagagttcttaagttatctaatcatgaaccttggtccttttagagtcttactacttattttaacatttgtatttgagtagttggtttggtttatacgtctaatgaacgtttacgttgccttaatctctctgccacaccaaaccctagtcattgcaaagaacaagagaggagcttaatctctctgccacaccaaaccctagtcattgcaaagaacaagagaggagcttattattcaattactatagcccaacgtagggaatcagtgaaaggattttagcttagtatggagtaaaaaatataagagattcatcatatgtatagtttgatatgtgagttgctgaatctctggtttcaggttgtg

SEQ ID NO: 9846 - DNA, 665 bp, Arabidopsis thaliana
tattttttcaattttgttcttagtgattgttgtaatgaattttgttatcagatatcgccatggaaagcaatagagaaagctatggggaagaaatcggttgaagatatgttgcgagacagatacagaagaaagacttttatgatactgacagtggcggcaacatgcctccacgtggaggaggcagtggtggcggtggtggaaatggtgaggagcgtcctgaagggtcaggaggagaagatggtggtcttgctgggatcgcagatgaaactttgcaagtggttttggcgaccttaggcttcatctttttggtaaatgacacaaatttcaggaaagatttgaacttcaaatatcgtatcttgctttgatggaatatatctttgtttttgcagtacacatacattatcactggggaggaattggtcaagcttgcaagggattacattaggtttcttatgggaagacctaagactgttcgattgacccgagccatggatagttggaacggattcttggagaagatgtcgaggcaaagagtgtatgatgagtattggctagaaaaggcgatcatcaacacaccaacctggtatgatagcctgagaagtcagacgtgttacaaggcttatgttgatcaaatctgatgaacttatgtggaatcaatctgatga

SEQ ID NO: 9847 - DNA, 803 bp, Arabidopsis thaliana
ctaaagcaaacaatggcagaccaacgcaggcgtgaaccttcagactctcctgcccaggaatcaaaccgtcatagggatcgggcaattcgctgtctgcgggaaagcgcaccacatccccggcgcgggcaatcgcttccagccgtggatgcccttccagcgcaaagcgtctaccgagtacatcctttgccagaccgtcgatggcaagcggaataaactgccgcgaatcgtaacgtagcaacgcagacgcatcgcactccagcacctgacgtagcgtggtgatcaggcgctgaaaacgatcctggtgaccaatcccacgctgcaattcgatggcgatattcgcagcacatcaacggaaaaactcatctttgcctcactgtcaatttgactatagatattgtcatatcgaccatttgattgatagtcattttgactactcattaatgggcataattttatttatagagtaaaaacaatcagataaaaaactggcacgcaatctgcaattagcaagacatctttttagaacacgctgaataaattgaggttgctatgtctattgtggtgaaaaataacattcattgggttggtcaacgtgactgggaagtgcgtgattttcacggcacggaatataaaacgctgcgcgcacagtctacaatagctacctcatccgcgaagaaaaaaacgtgctgatcgacaccgtcgaccataaattcagccgcgaatttgtgcagacctgcgtaatgaaatcgatctggcggatatcgattacatcgtgattaccgatgcagaagaggacacgctgg

SEQ ID NO: 9848 - DNA, 588 bp, Arabidopsis thaliana
ctagagccaatcaaagcttgatttcaacgctccagtcgctatggtactgtcgaggatgctaacgttgtctgcattgctcaaatggataccatcggtgttggggctttcagctggtgcggtaagcttaatgttttggatgttaacattctcagttttgactaagaacatgtggaaggcctttgcgttcaccgagcttatgccattgatttcaacatttttcatgttcctgaatttgagagactgcatgtatgcgtacaaatgtgtgattagttattgcaagtatctatatatacatgatttgaaataatatatagttatttggtcttaccgttggaggaagattgcattggacctttttaccacaaccatctgctttccagacagcttcacctttcccgtggaatgtgccggttccggtgaggacgagattgtcaacacgctcgaacaagaaccactcgggagttgcgtacccgctggtcgtagcgatgattgtgcctataacattgacggtcactttgctcttgcatggaccggcgaaaatgactggaccagccaaaaatgttcccttaggaactagtagcgttgctg

SEQ ID NO: 9849 - DNA, 889 bp, Arabidopsis thaliana
caaactaattacacattcgactatcctatccttcctatcattttattcaagtattattattcatcttcctatattacacattcagtcaaaaatatacttttaccccccaaaaaagaaaactaacatctaaaatttaactctcgataaggtcgaaccgtgactctaacaaatcatatggaacccaaagtgcatcaagcgggcaaggtcgaccatcatctaaccttacccatggcttccctttcccactccaatgcaacaaactcactggacctggatgcaaatctcgacacagtcctctaaaattatctcctcctaaaccgtgttggttccaccggtgatctaccggagctatgtttccggcgaagacaagtaaaaacggtggtaaagagcctaactcgtagattcttatccgtttttgtaactccatccactctatgatcttcctcgtgtaatctccttctcgccatttctttaactcgatgaccatcactccggtgttgaagtaacacggtgtagcacggcggttgagggatagtgtgatggagagagaagggtttgaccaaaacgtcggagtaaagtaagtcgtgaagtttgcgttgcagtactcaggcgcggttaaaacgacgtcggtagggatgtgagtggagaagagcttggagatgtcatcgacgagtatgagatctgagtctaggtatacgacacgtgagaggcacgtgggaagaatgtcggcgaggtagtttcttgcgtagtttagcggagagtctagcgcggagcggatggaggttgagatgaggccggagatggcggctacgtcgtaagggttaattcggaatttcaagtagggtatagaagcaacgacgtagttttggagtcggtggctttgttttga

SEQ ID NO: 9850 - DNA, 1452 bp, Arabidopsis thaliana
tttaagtcgaaaaattcagtaaataatttgaccatttttttgttacctgacgcaataatatgattttcagttttcaagatttaaatttaaaaatcatgaaaagggcttggaatctaatcaatatataaatattttttaatgagagaaacccaaaatctaagcaaaaccatttttttaattttcctctctcttacacacacacatgataaaaagtgtttagagacagctcttctcttcttgttctcagtttgagagaaacaaaaccttccaatacaaccagagagtcgacgaagaagaaagaaaccatgtcccaacatcttcttcttctcattctcctctcgctacttcttcttcataaacccatttccgccactacaattattcaaaaattcaaagaagccccacagttttacaattctgcagattgccccttaatcgatgactccgagtccgacgatgacgtggtcgccaaaccaatcttctgctcacgtcgagctgtccacgtggcgatgacactcgacgccgcctacattcgtggctcagtcgccgctgttctctccgtcctccaacactcttcttgtcctgaaaacattgttttccacttcgtcgcctctgcttccgccgacgcttcttccttacgagccaccatatcctcctctttcccttaccttgatttcaccgtctacgtcttcaacgtctcctccgtctctcgccttatctcctcctctatccgctccgcactagactgtcctttaaactacgcaagaagctacctcgccgatctcctccctccctgcgtccgccgcgtcgtctacctagactccgatctgatcctcgtcgacgacatagcaaaactcgccgccacagatctcggccgtgattcagtcctcgccgcgccggaatactgcaacgccaatttcacttcatacttcacatcaaccttctggtctaatccgactctctctttaaccttcgccgatcggaaagcatgctacttcaacactggagtcatggtgatcgatctttcccggtggcgcgaaggcgcgtacacgtcacgcatcgaagagtggatggcgatgcaaaagagaatgagaatttacgagcttggttcgttaccaccgtttttattggtttttgccggtttgattaaaccggttaatcatcggtggaaccaacacggtttaggaggtgataatttcagaggactgtgtagagatctccatcctggtccggtgagtctgttgcattggagtgggaaaggtaagccatgggctaggcttgatgctggtcggccttgtcctttagacgcgctttgggctccgtatgatcttcttcaaacgccgttcgcgttggattcttgaccagtctcgatcggtttacttattattaataccggtacatacatatatacaatatacaggtgaatttttgtttttactgtacatcgattcg

SEQ ID NO: 9851 - DNA, 736 bp, Arabidopsis thaliana
tgctatggagacgatttggaagaagatttcaacgaacacggacacaaagtttacaaattgcttcttgaatacgcaaacgaagggagtttaagttcattcatggagaattatcccgacagaaagttaccagatccgatgatcagagacttcacgcggatgattctcgaaggattggtctcaatgcatagtcacggttatgttcattgcgatctcaaatccgataaccttcttatcttctctcggaaagattctgcttcgtgcgagttaaagatttttgattttggaaactgtagacaagtcggagaagttccggatcactggaaaagtgattacccgtatgtgggaacgcctgagtctttcttcgacggtgttgccaagaaaaccctagatttgtggtcgttagggtgcttagtgttgaagatttatacaggtgagcagccatgggaaagagttactagtgtcgatttcgtgaattttcttagtgatggtgaagctccaaatattcctgaatatgtgccttgtgatgcaagagagtttattgaaacgtgtttcgcaagggaacatgagaagagaggtaccgcgtctgagttgttattgcatccgtttttgtgtcagaagcaacccttgctggtgaagttgaaattgagaatcaaacaagcttcgaagataacaatgggtattagagagaagcccctgacattgaagatgtttctatctaagcctccacaacttaaaa

SEQ ID NO: 9852 - DNA, 583 bp, Arabidopsis thaliana
agctcgagcaaaacaactccataactgtaaacatctgattccttgctcctcaccgtcttgtacgcattttctgtttgatagaaatatggtcatcagagcatgaataaggtaacggtgaacaaaatacgaacgtgttatgttgagaagtatatatacctggtgcaatgtacccagttgtgccagtaacagtggccgttgaaactgttgagtcatctagaatccgagccaatccgaaatctccaatgtgaggctccatatccgagtccatgagtatgttctctggtttgatgtcgcggtgaattattggtggatgacaatcatgatgtaaatacgccagtccatgtgaaatcccaagggctatgttgaaccgtgcagaccagtcaagaactgcttctccttgattacctctgtgcaaaacgtcgtgtaggcttccattgggcatgtactgatacagcattaagccatcttctttcctcatccaaaatctttctaaccgaatgagatttctgtgcctgactagcccgattgtttcgatctccgcttcatattttggtttgcgcgaatgtgtccgcaaagatgagtt

SEQ ID NO: 9853 - DNA, 658 bp, Arabidopsis thaliana
tttcacatcttccaacagtttcaccgcatctctcatcgttggtctcattgccggatcttgctgtgtacaactcagtgccagttccgtcacttgcatcacctgctccctaagactcgaatccagaagctcgtccacgagaatcggatcgacgattgttgttaccatatcctccacattgttgttgctgctgctcaaggcagatctcacccagcttactatatctgtactttccgggaaagatttgtccaccgctctcttcctcgtaaccagctcaagtaacacgactccataactgtaaacgtctgattctcttcccctcacggttttgaaagcgttttctgcagtttaattgtgaaattagctaataagaaacagagtatcttcctaacagacttttttaaccggtaactaactcggtttgaacactaaaccagattataccaagtccactatgtataatgagaagatgcattacctggtgcaatgtagccggtggtgcctgtaacagttgcagttgaaaccgttgagtcatcaagaaggcgagccaaaccgaaatccccaatgtgaggctccaaatctgagtccatgagtatgttctctggtttgatgtcacggtgaacaatcgggggatggcagtcatagtgtagataggctagtc

SEQ ID NO: 9854 - DNA, 528 bp, Arabidopsis thaliana columbia
atcaagtttgtcgacaacagaccttttaacgatcagaggtacttccttgacgatcagaagctcaaaaagttgggatggtcagagagaaccacgtgggaagaagggttgaagaaaactatggattggtacacacagaacccggagtggtggggtgatgtttctggagcattgcttcctcatccaaggatgctgatgatgcctggtgggcgacactttgatggctccgaggacaattcgctggcagctactttatctgaaaaaccaagtcaaacccatatggttgttccaagccaaaggagcaacggcacacctcaaaagccttcgctgaagttcctgatatatggaaagaccggatggatcggtggtctgcttggaaagatatgtgataagcaaggaattgcttacgagtatgggaaaggtcggttggaggatcgatcttctcttctgcagggatattcagagtgttaagccaacccatgttttcaattccgctggtgtgactgggagacccaatgttgactggtgtga

SEQ ID NO: 9855 - DNA, 610 bp, Arabidopsis thaliana
attcttgaggcctcaacgtgttctcctgatagttgtagattcttttggagctcgtcgatcaccgctctgcctcctgcgtgaatgcaaaagtgttcgaaggccagcttgaaatccggtatgtatggtttccatttcgggttgaagattttacgtccgattagggacgtgaggaagagaagttgttctgacgccggtaggaccaaaggacctgttcaaacaaattcatctatcaaaaccaaaaacgtaccataattccttaaacctaagccaaaccaaactttgctttaaatcataataaaatttatatcgaacaaaccgaattgaatgcaaccgaatagagtaacctaaatttccatagaagtgagacatataccaagaaagtacatttaaccataataacaaaacatatatagagatagagtaattattctgttatttaaaaccgaattgaagtcaaaacggagccgaccaataatatttaatgcccaccccttgatatagttttcaccgtgtatatcattgttagtgtatatatgtaggtgaaataaaatgatgtgtgtttattacctattgtggtgatgtttgccttgagggcttcaccggcgatggc

SEQ ID NO: 9856 - DNA, 565 bp, Arabidopsis thaliana
gtttttaaggtttcacgcgctcagtgagtttgatgaagccaagcggagttgcaggagacgcttagctggacacaacgagagaaggcggaaaagcacaactgactaaagacggtgaaacgtgtgagatcccggtttgaaggttaatgaaacaggctttgcttactctcttctgtcagtctcttttagctccttgtaatcctctgtgtctctgtctgtttctccatattacctgtaatcaaagctatctgctaaacctacgacatggttaaataaatgcattgagacttagtaaatgcttgaagaaattatgtgtaataactctttaaacttgtcaaatgttatttcaagccaagatcttaaactacaccagggatctgtatttgttttgcaatcaacaaatgaggagacagctaaatagctatcaaaaataataatctgggagacacttttgattcgtgatatatgtagttctgttacatgaaagctcatcaaaatctgaagcaaatgcaagctccttgtggtttaaagatctgtaaatcgaaccaaataaattagattggaagac

SEQ ID NO: 9857 - DNA, 683 bp, Arabidopsis thaliana
tcactgtgtcctgtttcagatcccagaataaaaaaagcttcatgatgggaccagtaattaatggctttgatcatcaagacttgtaaagaaggtataagtacctgaatctcgatgaggataatggagtaagagtaagcaaaagcaatgtctccaagagcttgaaaggtcctccatatcttctgtgtctctgttactgctcctatgctaatcccagtgagacttcccttcaccttcccattaactgatgaaaccaaaacacataaaacctattagttttttacctatgaaagttcttatttaagaccctagaagctttatggttcaagaaacgaaccgacaacttgggctatgccgagggcgagaccggctgaggaataagtgaaggacataacggcggcgaggattgagagccaccaaagttgatcaaaatctggaatctgagagaatagaatctggactaatccaaaagctatcatgtaaggattactgttcatgtgacatggatctttccctccactcttgtggaaacagtttgatctctttattgccctgtttttcaaaaacaaaattttgtttattttttattatcatcaaaacctatttggtccattacctaacttcgtagttttaagagtgtaattagtgagacactcacatcatgcttatagctgaagcaattgtgt

SEQ ID NO: 9858 - DNA, 777 bp, Arabidopsis thaliana
caataggccttgaatcgctacatctcggtgacgaatttcggcaactagtgacgactttacctcccgagaaccccggcggttcgttcacggctttgcttgagcttccacctacacaagcagtggagcttctccatttcactgattcttcgtcttctcaacaagcggcagtgacagggatcggtggagagattcctccgccgcttcactctttcggtgggacattggcttttccttctaactcagttctcatggagcgagcagctcgtttctcggtgattgccactgagcaacaaaacggaaatatctccggggagactccgacgagctctgtaccttccaattcaagtgctaatctcgacagagtcaagacggagcctgctgagaccgattcatctcagcggttgatttctgattcagcgattgagaatcaaatcccttgccctaaccagaacaatcgaaatgggaagaggaaagatttcgaaaagaaggttagagtgagagacaaatgtttttacttttttacatttgatccttcgtttcatcagattgattttttatagggtaaaagctcgacgaagaagaacaaaagctctgaagagaacgagaagctgccatatgttcacgttagagctcgtcgtggtcaagcaaccgatagccatagcttagcagaacgagtaacttgcatctgccttcactaatttttcttttttttggtattaatcagttgattaattcgctaattgatcactaatttttggattataggcagaagagaga

SEQ ID NO: 9859 - DNA, 811 bp, Arabidopsis thaliana
ctgctatgttgtcaattggtggctctatcttctaccgtcccaaggacaaacaagttcatgcggacaacgcaagaatgaatttccacaccgggaatgtcggtgaccatattgctttgctaaaggtttgaaccttctgtattcctccttttctgcattcttccactagtttatacttttattctctgtatgtttatcgtctttgtttttctcttcaggtttacagttcatggaaggaaacaaacttctctactcagtggtgctacgagaactacattcaggtaccaagttgtttctttatgtttatcagatcacatgtggatccaattgacctttgttttgggttaaacatgtgttcaggtccggagcatgaaaagagccagagatatccgtgatcaattggagggacttctcgaaagggtggaaatagatatcagctcaaacctgaatgaattggattcagttagaaaatccatcgtagccggtaattgccaatctcattctcctttttgttgatttgaaatgtataattctttacaattatgcctctgctaatgaacttcttacttatatactcagggttttttccgcacactgcaaagctacagaagaatggatcgtaccgaacagtgaaacatccccagacagtgcacatacatcccaattcgggcttatctcaggttaatgaattctcactctacataaaccacaaatatctgatttgacagaatctcaaaactttgaatactgataagtttttctcaatgcgttgttgtaggtattgccgagatgggttgtatacacgaactagtac

SEQ ID NO: 9860 - DNA, 582 bp, Arabidopsis thaliana
tcaaacgaaagagaatcaaagaaagtggaaagctctcaaaaactcaaagtgaaggtctctatgtggaaacaagaggcagattagaaaagaggtttgacaaaggaaaaggcaaaccatggagaggacgttctaagagcaaaggcagatcaaaatcaagaccaaactacaataaaaacaacaatggttgtttcatttgccgtagagaaggacattggaagagggagtgtcctgaaaagtcttcaaacaagccttcaagttcagcaaacattgcagtggagccaaaacagccactagtattaacaactagccctcaatacacaaaggaagaatcagttgtggattctggatgtagttttcacattacaccaaacaaggattctccgtttggcctacaggatttgatggaagccaagtcctgattggtaataagactccacgtgaagtgaaagggattggtaagattaagatcttaaatccagatgattatgtggtcatcttaacaaatgtgaggtacatacctacaatgggaaggacctcatttcatatggtcaattggagaagagcactgcaaatatgaaggaa

SEQ ID NO: 9861 - DNA, 1111 bp, Arabidopsis thaliana
tataaagcttttcctcatacttgagccgtcttctccaattgtagtatgtaccgcacatttgtaatatgaccacataatcatctggatttaagatcttaatcttaccaatccctttcacttcactgtgagtcatattacccatcaaaactttgcctccatcaaattcttgtaggtcaaacagagaatccttgtctagtgtaatgtgaaaactacatccagaatccataacccattcttccttagtgtcttgagggctagctgttaatactagtggctgttttggctccgttgcaatgtttgctgaacttgaaggcttgtgaagacttttcaggacactccctcttccaatgtccttctttaccacagatgaaacaacccttgttgtttttattgtactttggccttgattttgatctgcctttgctcttagaacgtcctctccatggtttgccttttcctttttcaaacctcttctctgatctgcctcttgttccacatacagaccttcactttgagagctttccactttctgtgagttctctttcctttgattttgcagctccaatgacttcattcaagctcaaagtgtctctgccatactttaacgtctctttgagctgatcataccggtcatataatgaactcaacaatagtatagcttgaacctcctctgtcacatctactcctatgttgtttagatcagtaactagcttaaggaaatcatccacattcccatctatacttctagaatcagtcatcttataagtatagaacttaagctgtaagtagattcgattaggtagagaagtctccatgtataacctctttaatgtggaccacatggctgcagctgtctcacagtttttgatctttcttagtacttgatttcccacgtttagtactataagatcttttgccttctctgacttttcaaactttataagatcaacattggaaggcagctcaaaatctccgacgtgatagtctcttccagctactgcagcttcctcttctataacaggtggatctcttagcagctgctcatcgttcaagataccttttagccctaaaacaccataatgagccaacattctgacctgccacaaagaga

SEQ ID NO: 9862 - DNA, 953 bp, Arabidopsis thaliana
ttgaacttcacacacgttggggcaataggtacgttttttaattacggtcatttatacactttattttctactaacaagattttgatcacaaagatggctaaatattattgtacacgaattagttcacatctttagtcatcaatacattttattttctgttaacaagagtttgaaagattggtttatttgtactagtaatgaatttgatcacaagttttcttcttcttgtgaggacagatggtctaagattgcacaatatttaccaggaagaacggataacgagatcaaaaactattggagaacacgtgttcaaaagcatgcaaaacagcttaaatgcgacgtgaacagtcaacaatttaaagacaccatgaagtatctttggatgcctcggctcgtagaaaggatccaagccgcgtccatcgggtctgtttccatgtcatcttgcgtcaccacctcctcagatcagttcgtgatcaacaacaacaacaccaacaacgtggataatttggctttaatgagtaaccctaatggttacatcacgccggataattccagcgtggcagtatctcctgtatcagatttgacggagtgtcaagtgagtagtgaagtgtggaagattggtcaggatgagaatttggtggatccaaaaatgacatcgccgaattatatggataatagcagtggactattaaacggagattttacgaagatgcaagatcaaagtgaccttaattggtttgaaaatattaatgggatggtaccaaattattcggacagtttttggaacattggaaatgatgaagacttctggctcttacaacaacatcaacaagtccacgacaatggaagcttctgaatagacaagaagctattttacaaagtaaagggaaaatacaaagcttctgaatttaaaagtgtgaaaggaatttgttataaacaaagctttttatttg

SEQ ID NO: 9863 - DNA, 1026 bp, Arabidopsis thaliana columbia
cctccaatactcagtaagaagactacttagaaaatgtaaatcgtggtgcagtgtctgtaatctagattgcatatacattgaagaacccaaagattgaattgttgttcgtatggcttaaatgaggtaatgctgaaatcgatttgtgaacaaaagagaatatgtgattaatatcattaacataatactcaattttgctgtacgctaatcgacatttgtttcaaatggaccgatatagctatggttgaagagatggaagaggttgagagtgttgtttacaagacacaagtagatgtgtgatccttagagaaaggtttatatgatgtgggagctgagatggagagtctagcaggtgagacacgcacatgtgtgaccatatcaagtagctatggaaatgagattgaagtcatcaaagcatttttaaaaggatgtgagaaggagattggagagctcaaagccatgaacttttgtagtaagaaagagattcaatctcgacgttacttcaaaaattttatcgggtgtagtttagttatggtttgtagtctatgttttcatcttttaagtatgaaaagttagtatgagtttgttgagttaagagttctgattgtattttattggattgagtttgagtttcaattgaaagttgttgtttgggttttacataacacaaacattgggccttaatgggccaacgaaattggcaaggtgaagaagaacaaaatgtgggcaaaagtttgttgctcatttaagtcacctatatatgcattacaacgtacgacgtatagtggaggtaggtgagaaaagaatctaaaaagagttctagagaagagagataaaagagcttcctaaacaagctttcttcttcctctttgttgttcttgaatctttgttcttcttgagtgcaaatctgtaaaaccaaaagacatcatcacaagttagtgaagcttgggagcaagagatctccccgagaccccgagacgtagcggttgaggccgtgaactcggttaccaatttctgtgtctgtttatt

SEQ ID NO: 9864 - DNA, 893 bp, Arabidopsis thaliana
cttaaatgttatagtgagttataatacttctacttgtggacaactatcacagggaccgtttgtgcatacgaagataagaagcatagggctacatatgaagcattagatgacccggagaaaaaggttcgttttttttctgctcgacaggttgcttgtcggctgcttgggagcaggggttatttatgccagaaggtacttcatttactcttcttgaattgttgtattttgccatgaataaacaactcaatacctaaagatgaaacatttctgaatatgcagtgttggcttgctatggaggattgcatgtgttcatatgttaagccatgtggtttatggaaacggatacgtttttggctgtatatgcatcctagggttagtattgtacccactagttttagctattccaatcgccaattcctatgtattgatatgctgtttagctgttggcaggattttctacgccagaacaacacagggaagctgttgtggcagatatttggcgtccaatcagctacactctgcgtctttggaatagctgaagacgaagagatcatgtggaatgaattcaagcgtgcaggttgttgattcttctaagtcttagtgtagatgcatttgtttaatcttacatagatgtcactccatgattttgctaaaaatcttgtctttttgttctgatggatgctcaggaaaaagccaagtccgttgcctctatcccaaccacaactcggaagtaactttctcggttaaagacgcttttggtagttcggcttcagagaatcatgtatcatccacggtaaagattgcaatgttttgactatggactctctgttcttctatcgttacttatttcgaacagaaaaatattagataaggttgtggaaggatatagagtg

SEQ ID NO: 9865 - DNA, 1568 bp, Arabidopsis thaliana
atgttagataatgaactcaacaatagtatagcttgaacctcttttgtcacatttactcctatgttgtttagatcagtaactagcttaaggaaatcatccacatttccatctatacttttagaatcagtcatcttataagtatagaacttaagatgtaagtagatgcgattaggtagagaagtctccatgtataacttgtttaatgtggaccacatggctgcaactgtctcacagtttttgatctttcttagtacttgatttcctacgttcagtactataagatcttttgccttctctgacttttcaaactttacaggatcaacggttggaggcaactcaaaatctcctgctataccgacgtgatagtctcttccagctactgcagcttcctcttctgtagcaggtgggtctcttagcagctgctcttcgttcaagatacctttcagccctagaaccccaaagtgagccaacattctgaccttccacaaagagaagtcaccggttccatcaaatctgtcaacctcaacccgagcgttactactcatcttgtaagtcttcttgtaacccctgatctcaaactccttaacaaccctatacaagcctggagctctgataccacttgtggagaaaagagtgatagagattgcttggtaaagaaataaacagacacagaaaattgataaccgagttcacggcctcaaccgctacgtctcgggggagatgtcttgctcccaagcttcactatatcaaagggattacaaacacaccactaacttgtgatgttgtcttttggtttttacagatttacactcaagaagaacaaaaattcaaaaacaacaaagaggaagaagaaaggttgctttagaagctcttttatctctcttctctataactctctttagattcttttttcacctacctccactatacgtcgcacgttgtaatgcatttataggtgacgtaaatggggcacagacttttgcccacacttttgttcttcttcaccttgccaatttcgttggcctattaaggcccaataattgtattatgtcaaatccaaacaacaagtttgcttttgttagatcatcttgaaaaatgtgaggcttctatgtgttgcacaatattgtgaagtttttgaagaacatcattgacagaaaaaaaaagtaagaggatcatatccattataaatgaaattgtgtggatcatgcgagaaggaaattgattaatttgtataaacgatatgaacgggtcattacaattgtatataattaacaaaatttaagttgactgggactctaatattctataaatatttagggaattttagacattcctctttgtacgaatgaatgttgtatctaaaaaaattgtcctcgatcaaaagtatatatatgtagatagaatcatataaccggaccagtttttatgtttgaaaatcagtgtctttgggtgaaatctactgatttaaaaaattgctgcggtagattatcatgatagcaaacaatttaacgtccacgacaaattacatttcacgaaagacatgtaatcagtgggatgtgcatagaaga

SEQ ID NO: 9866 - DNA, 608 bp, Arabidopsis thaliana
tgtcacatctttatgcagaaaagaagagttcattgttttgagcagaagaaagtagaaagaaatacaaaagcagaacgaatttagattacggggaatgttgttcttcctcactctcacttgcctatgatgagtttggctctggcatctcctttgttgatctggaactgatctgttagtccgaagtgagccattagaagccacacgaagtttatgagctctccgcctctgctgagttgctccacgtgagccgtagagtcgcaatgacaggctgcataacagagaagttccacccacactttactcagtatctcccatttatctttgttgtgtgtcttctccatctctgcaaggtctttggctagcctgctcgcgtcaaacaatacagacttgcttcgatctcccttcactcccattggttcaatttcactttcgacgtccagaatatttagggtggctgtctccacgcttctatcgttctcgatatgcctcctctggaagaacttgtgagtttcagcaatgtgtctctgaatctgatcttccaattccagcaacctcggacatcagactgggttgcaagatcaggagatacatcatgtagtctgagatga

SEQ ID NO: 9867 - DNA, 567 bp, Arabidopsis thaliana
cgtcgcctatggttcacccaagtttgagcttgtttcatgctggtggcagtactctcacatctgactatggcagtgatactgcttatgaaacatctgaggttggatcaccaagtgtaggacaggatgatatttctgaaattggtacggaagatctaactctggatgaagatttaactttaacaaaatccaatagagaagctcgttaactttagcatgtccaacattgacgaggggctttcaatgagcgaaacaattctagagcaacttgaagactttcccaaacataaagtccgctcaagatatgtcaataatatcctagggaaggatgtgtataatggaaatgcttcaaaaggcgtatttcttgctaacaatggttcacgacttctctctgaaccagaaccatcaactcactcagtaatgcatgacagaaatgatagtgctgaaaggtttgctttacacaccggtcagacatcaacatctggtctcttaatttcaagcagggatagccactggatcacgccaaggtcctggtgtacgcttggaactgggcttgtttgtacccggaga

SEQ ID NO: 9868 - DNA, 597 bp, Arabidopsis thaliana
gtctcatccggacagtctccaaaccctgaacaggaacagattcagcagtcggtgtctttccttcatcactcgccccacagttctcagcagaagcagccactggattgggcttattcacagcacatgaagcatgaatatgatagttacaagcataacagttgtaagaccaaaacctaccatccatagtcatattacaaagattgcaaacaagctgattcccgaaaccaaactgagtaaaagacataggaggagtactgttgtagacaagaagaagactatgcataggatgagactcatgaaccaagacctgaggcaggtgagcgcattgaacatgaaggtcaaagtcacacaaaggacaacagtaagagaaccctttacctccagtgcagccacaggctctgcagaggaaggtaccagcgctgtaagttgtgtaagggactagagtcaagtggtggagaccagcgtgagaaggatgttgcatcccagcgcactgcgttaccacattgctcatgaagattgaagtcacatgttgaacagatatacgcggtttcggattcagagatggctgattcacaacctgagcagattactgaagaa

SEQ ID NO: 9869 - DNA, 887 bp, Arabidopsis thaliana
aaaacacagaaagaatctaacttcaatctaacggactcagcagctactaaaatagaaaatatcgacggagaaagaagcttaaccaaattctccgccttgagctgaggactagtttcggcactaacagtaggagaagaaacgagaaagcagccctggatttagttgcatatatagagagaatttcattagctcttgatgaaaactagggatttagaaaaaaagagatagacaatcaaaatgagctaaaagctagagaagttacgagcatttcagcagaatcgtaaagcccatgctctattaaagtcgcgatctgctcctttggaacctccatttcagagacaagagagttcgtcgttagtggcaatggtgaagttttttcttcggagcagcgatgaagtaaaagatccttcacgctcgctcttcattttgaaacaagaaatctcgaaccgagtcaacccaaaccgacattaaccggttatctatctgaaatccatctcggttcattaaaacccgacttttccaagagcccgacttcaccgaacaatctctatctccggtcatgcctccattaccgtcctccacggcgccttcgtcttcgagacatcttcgatcgccggaaagtatcgcgaaatttgcagggagagcaatatttcctgctttacaggggaaatcgtgtccgatatgcctcgaaaatctaaccgagcgaagatccgccgccgtgatcacggtgtgcaagcacggatactgccttgcttgtattcggaagtggagcagcttcaagaggaattgtcctctttgtaacactcgttttgattcctggtttatcgttagtgattttgcttctagaaaataccataaggagcaattaccaattcttcgtgatcgtg

SEQ ID NO: 9870 - DNA, 847 bp, Arabidopsis thaliana
ttggttctgttcggtttgacacgagtttggtttggttgatttttaattttggtccggtttggttttgtagacgattttattaaatcagagctgtaaatttgtagtgggtattcaacacatggtcgatgtatgcccgtttcgtgacacgtttctatgaaatatgcatgccatgtatcatataattcattcaaaaaagattacatgcaatataaccacgaaaccataaactagaaaattcaaaattgtaaccaagaaaataaaattaaggatggctttgagcggcggcgatgatcaggtacctcctggaggtccgatgacagtttcaacacgtctgattgatgccggatcgacgatcatgcagcggcgattaccggtgaagcagatgaacactcatgtctctacttttgcgatatatggtggtgacatgtcccggctaatagggactcaccactatgtccaccgcgtcaacgacgagttccttcagtgtgctgtttacgcctctgaccgctccgatgcacctctaatcggtactctttttttcataccgttttttcttgttaatcacatcgaatgccaattatgaaaacttatagcaaagttgtgttaacaggaattgaatatgtaatatccgaccgattatatgaaactttgtctgaggatgagcaaaagctttggcactctcatgcatatgaggttaagtcaggctcgtgggcttatccacgattgcctgaggttgtggctgctccggagctcaagaacatagccaaaacgtacggaaagttttggtgcacctggcagatagaccgaggtatgtctcctcatctaaatactggtccgaaaccggatc

SEQ ID NO: 9871 - DNA, 710 bp, Arabidopsis thaliana
ctcttgcattcctcaaccttactcgaaacaatttctcgggcgagattcctcaagaaatcggaaatctgaagtgcctgcagaatcttgatctgtctttcaacaatttctctggaaactttccaacgagtttgaatgacttgaatgagctgagtaagttcaacatctcatataaccctttcatttctggcgcgataccaacaacaggacaagtagcaacctttgacaaagactcctttcttggaaatccgctgctgcggtttcctagtttcttcaaccaatcagggaacaacacgaggaagatttccaaccaagtcctaggaaacaggccaagaactcttcttttgatttggatttccttggctcttgcattggcgtttattgcatgtttagtggtatcaggtattgtacttatggttgttaaggcttcaagggaagcagaaatcgatctcttagatgggtcgaaaaccagacatgacatgacttccagttcaggtggatcatcgccatggctatcaggaaaaatcaaggtcattcgcttagacaaatcaactttcacatacgctgacattctgaaagcaaccagtaacttctctgaggagagagtggtaggtaggggaggctatggaactgtttacagaggcgtattgcttgatggaagagaagttgcagtcaagaagcttcagagggaaggcacagaagcagagaaagag

SEQ ID NO: 9872 - DNA, 1196 bp, Arabidopsis thaliana
tgtacaaagccaaaagcagcttacgtgaccatcaagataaacaagaagaaagttgctaaaacaagctcagaatacgaccgtatttggaatcagacttttcagatcctctgcgctcacccggttactgacacgactatcaccatcacgctcaagactcgatgttctgttctcggaagattccgaatctctgcagaacagatcctgacatctaattcagcagttatcaacgggttcttccctctgattgcagacaatgggtcaacgaaacgtaacttgaagcttaagtgtttgatgtggttcagaccggcttatcttgaaccgggatggtgcagagcgcttgaagaagcgtcttttcaaggtattaggaacgcaagcttccctcaaagatcgaactgcagagtcgtactgtatcaagatgcacaccacaaggccacatttgatccaagggttgatgatgttccttttaatgcaaggaatctatgggaagatgtttacaaagcgatcgaaagtgctaggcacttggtttacattgcaggatgggcactaaaccctaatcttgttcttgtacgcgacaacgaaactgagattccacatgcggttggagtaacggttggcgagcttctgaaacggaaatcagaggaaggtgtagcggtgagagtaatgttgtggaacgacgagacgtctttaccaatgatcaagaacaaaggtgtaatgagaacaaacgtcgaaagagctcttgcttacttcagaaacacaaacgttgtttgtagattgtgtccaagattgcacaaaaagctccctacagcgtttgcacaccaccaaaagacaataacactggatacacgggtgacaaattcaagcacgaaggagcgagagatcatgagcttccttggcgggtttgacctttgcgatggtcgatatgacactgaggagcattcactgtttcgtacactcggaacagaagctgatttttaccagacaagtgtagctggagctaagctaagtagaggcggaccaagagagccatggcatgattgccatgtgtccgtggttggaggagcggcttgggatgtcctgaagaacttcgaacagcgatggacgaaacagtgtaaccttccgtgttggttacacttcagggatcagaaacttagtaaacctaaccggacctactgaggaaaataacaggaaatggaatg

SEQ ID NO: 9873 - DNA, 596 bp, Arabidopsis thaliana
caaaacaaatggcacagagacgtctacttcggttacttgcttcaccatcatttcccataaactcttctaagtcagcatcatcgtttgcataagaatcgtcacacgaacccatgcttgaaccatcgtcatctttgtctgcaagtagacgtgttctcgctgaatcatcctcggttagatgtccctctccaccactgcactgaaacctgttgcagaactgtatagctaccaacatgaagcaaatcaccacacctgcatatgcaataatactacatgttatagagaaactaaccaatgctatgaatttgactttgaaaagattgaaatatttacctgtgccgattacatatgcaatttctctaggttgatatgagaacctgatataccattcatcttcaatggatactccctaagccccgaggcagtaagacaaacattcattcagctaagagtcataataataacgctgttggtgtttcgttttacgaatacatacctgactcgctgctggtgaagttacgcaacagaatttcaacaagggacattgcattgaatgtgactcgccattgctgaagttcagttgtagaatgattgtttag

SEQ ID NO: 9874 - DNA, 833 bp, Arabidopsis thaliana
cataggggtttctgcggtgaaagcatttttcgagttgtgaaccaatcctcgttaagtcttcaacaccctgaagacggcaagcctgtaactccggctgaactttgtcccatcttaaagatgctctacagaattcttataacaaggtactctcatctctttactgggtaaataacatatcaacttggacctcattcataaacatgattcacaccttgatgatgtttttagagagttctcgtgtgaggcgattcttgaggcgctgagagatgaaacgatgaatgacccacgtgaactcatcgagattgctcacagccatctcttcttccagccatggcttcttggtcagaaaccttgagcactttcttctgtataagttcccctgctaggctttggtgcagacttgtttgtattttgaagatttatcagaaatacgcagagtagataagagttgtatacaatttatagttggagaataaaagttgtgtactttatagtgaaactcagtctcatattatatctttgactttcctttccttagaaacagtttttatacaatttataaatattgtgtatgggagctaaagatacatgctatacctatacatcacaaattctatatctgatatttggagctttaaaagaataaactatccaccagaccaccagtcatcatcatatcatcttctcaaatttatcaagcttatttaccctttgcatagacctcagtaccaataacatgaatatccctgcacacaaaagaatatttatgaagcttatgtatccttgtcatagacctgaaatatacctgcatatacatctacgtgcacgtgtgt

SEQ ID NO: 9875 - DNA, 497 bp, Arabidopsis thaliana columbia
ggatgatgccatagaggtaaaatctctctgaatgtaccatataaaatgttgttaaaaagacgtgtttgtaatggaagtcttgatatttttcttgtagatgttagcaaaaaaggttgaaactttaacaaaggcaatggaagttgaagcaaagaagatgagaagggaagtggctgcaatggagaaagaggttgctgcaatgcgtgtggataaagatcaggataatagagctaaaaggtcttcaaacaccaaaccctcatccaacaccgcccagattcttgctgcaaggtatctaacaatgttgaatatctttgtctatttttatgatcaaattgcgattttagcaatcagactaagcttggtgttcgatattctgcagagctgctggccgaagtgggttaacaaggagtacacaatgagatgagggaggagatgtgactagttcttgtggtcgtatcagtttaaacaagtaaaacccgttataggctggtgtgattttt

SEQ ID NO: 9876 - DNA, 1377 bp, Arabidopsis thaliana
gtggtttggaaaatttctaataatgtgtattaactggattagtcaacgagagttcgtaattaaattgaaaatcaatataaaattaaggatttaaatcactaggtcaaaagttcatgttctaaaaccaacaaaaatggtaaactagtgctgatttaaatgatatttttaccaattgaaaatacactttccttttttattgttctagaagacttatccctctataaagtagccacactcttctgtcttctctcatcacctcattcatatctctctcaacctgaacattttcattttttctaaatcaagaacttcaaatcttgaaactttctaaaaagatggagcttattcctgatcttcccgaaactgtagcctacgagtgtctcctacgctcctcctacaagcaattccctcttatggcctctgtttgcaaactctggcagcgagaaatcagcctctctgattttttccgacaccggaaagcttcaggacatagtcaagagcttgttgtcttgtctcaagctcgggtcgacccggttaaagaactcgtatcgggtaataaaaccatccccacccccgtgtaccgaatctcggttcttgaacttggtaccggtctaaggagcgagctgcctccggttccaggtcattccaacgggttgcctctgttctgcagattagtctctgtcgggtcggatcttgttgtattgtgcgggcttgaccggttacatggcgtacctctgattcggtcttcgttttcagcttcttgacctccacgtggcgcgtcgggaagagcatgccaggtggaccgcgtgccttctttgcctgcgcttcggattctcaacggaacgtctttgtggctggaggacacgacgaagacaagaacgcgatgatgtcagctctggtgtatgacgtggcagaagacagatgggctttcttgccggatatgggccgtgagcgagacgaatgcacagctattttccacgctggcaaattccatgtcatcggtggttactccacggaggaacaagggcaatttagtaaaactgctgaatcgttcgacgtcaccacatggcggtggagtccacaaggagaagagtttctctcttcggagatgactatgtggcctccgatttgtgctgccggtgaaaacggagatttatatgcttgttgtcgccgtgatctgatgatgatgaaagatgacacgtggtataaagttgggaatctacctgctgacgtgtgcaatgtatcttacgtggcgataaggaggtctggaaacctggttgtgatcggttcggctcggtacggcgaaccaagtgtagggtataattgggatatgagcaattctcgatggttaaaactggaaacacatgataaatatga

SEQ ID NO: 9877 - DNA, 666 bp, Arabidopsis thaliana
  unsure (1)..(666): unsure at all n locations
gtatgatgtccttctctagtcgccgtccacataaacataacacaaaacctccttctcttcctcatatctccatatcccaaaaatactcttataacattgtattattatacaatctacatttcccattttaccctcgcttctccttccaattctcaccccattgccacttcactcagatgtcttgtacactgacatgaagaagacgattcaaatcctcctcttcttcttcttcctcatcaatctcaccaacgctctctcaatctcctctgacggcggcgttctctccgataacgaagtccgtcacattcaacgccgtcaattactcgaattcgccgaacgaagcgtcaaaatcaccgttgatccttctctaaacttcgagaatccgagattgcgaaatgcttatatagctctacaagcttggaaacaagcgattctctctgatccaaacaatttcacttcgaattggatcggatccaatgtctgtaactacaccggagttttctgttctccggcgcttgataatcggaagattcgtaccgtcgccggaatcgatctcaatcacgcagatatcgctggttatttacctgaagagcttggtttgttatcagatcttgctttgtntcatgttaattcaaaccggttttgtggtactgtacacaccggttt

SEQ ID NO: 9878 - DNA, 838 bp, Arabidopsis thaliana
tatttttttatgttggactttgaattcatttgaccttttagttttggtttaatttgatgtcaataatagtacgcgattggagaggtggtatatctgcggggaatatatggaacagtggcaactatgaacgtttggaatccatctgtagaacatggagcaaacgaatttagtcggccccaaatttggcacgtcgctggacattacaacgattccgagctcaacacagtcgaggctggttggcaggtaattttactgcttctattcttctctctcttttttttttctctatattatgatcacaattgttcgtttactgcaaagatggacaaatgagtaaaattagtttttgattttcccattgtttaggttttcccggatcattatcatgacagccagccacgacttttcgtctattggacggtatatagcttgcactttctttccttgatttaataatagtaataatatagagtaaagctagcagatagtatatatatataatatatatgcacacatttgttatgttattttttaatagttatcaggaattgcaggataaagaatcttaactaatgacgaattgtgtccctcactattttatgttctactcttaacaaatgaacaatgaactagacacacacacacgatattgttcggtcgaaaggtgcggttcggctagtaaaaaatgggaatcataattgattcgctgacacttgaccgaactgatgcgtatgctcctctcgatcaaacggtacgcaaaaataaagaacaattaactggacatttattaagacaaaaggcatatatactttatacggacagataaacttttgtgata

SEQ ID NO: 9879 - DNA, 1199 bp, Arabidopsis thaliana
cctcttcacacattacttcttcacttatagagattctcacttacatttcccattgtacccttcttcttccttcaaatccactgatgtcttgttatgtgaagtaatgaagacgaagatgatgatgaagaacacgtctctgatctttgttcttctttttatcaccttcttcttcacaagtatctcttactctctttcacttactttcaatggagatctctccgacaatgaagtccggctaatcacacaacgtcaacttctctacttccgcgacgagttcggcgaccgcggcgagaatgtcgacgttgacccatctctagtcttcgagaatccacgacttcgaaatgcttacatagctcttcaagcttggaaacaagctattctctctgatccaaacaacttcacaacaaactggatcggttctgatgtttgcagttacaccggcgtttactgtgctccggctttagataaccgccggatccgtaccgtcgccggaatagatctaaaccacgctgacattgctggttatctacctcaagagcttggtttgttaacagatctcgctttgtttcatattaattcaaaccggttttgtggaaccgtaccgcatcggtttaaccgtcttaagcttttattcgagcttgatctcagtaataaccggttcgccggaatattccctactgttgtccttcagttaccgtcgttgaagtttctggatctaaggtttaacgaattcgaaggacctgtaccaagagagctcttcagcaaagatcttgatgcgatttttatcaaccataaccggttccggtttgagttaccggataatttgggagattctccggtttccgttattgttgtggcgaataatcatttccacggttgtattccgacgagtttgggtgatatgaggaatcttgaagagatcatcttcatggaaaatgggtttaattcttgtttaccgtcgcagatcggacggttgaaaaacgtaacggtatttgatttcagttttaacgaacttgttgggtcgttaccggcgagtattggcgggatggtttcgatggagcagttaaatgtggcgcataatagattctctggtaagattccggcgactatttgtcagttgccgaggttggagaatttcactttcagttataatttcttcactggagagccgccggtttgtcttgggttcctgggttgat

SEQ ID NO: 9880 - DNA, 590 bp, Arabidopsis thaliana
caaagagtagcattgatgagtgaccatcctgagtttgagtagagtcatagattgatggggtttttgtattgtgataaccatggagtggtgttgtgtgcagttgagtggtggagagaaacaaagagtggcacttgctcggacatttttgaaatcccctgcgattctgtaagtaactttgcacagaagcagcattgagtttacttatgtgattatgtacgtgtctagtcctcacatacatagagatggttggtgtacacaggttgtgtgatgaggcaacgagtgcgctggacagcacaacagaggcagagatactgaacgcactcaaggcactagcgagtaacaggacatctatcttcattgcccacaggctgaccactgcgatgcaatgtgacgaggtttgtagtaaatagtgtttgtcaacttagctcaaagaaacaatgtttttgcataactgaaacttttggttgcgggcagatcgtagtactggaaaacgggaaggtggtggacaaggccccacgacgagctattgggaaaatcagggagatatgcgcactatggacacaacaaaacagcagcgtggatatgcttga

SEQ ID NO: 9881 - DNA, 784 bp, Arabidopsis thaliana
gaccctatggtttccttccaatgctttcttggagcttttttgatagttcctcatagtgtcttctttgctgtttgttcacagaaggtgagactaaggacaatgcttgctcgaaatgagtcatcttaatcgtacactgacttgtatctgtaatatcgtcatcatcttcacatgaaattgtggtgatctcctccactgcctggaatgtagctttttgcaccaagtgagcgagatcagctccgctgaaaccttcacaattcatctttgcaatgctatcaagatcaacactaggatctatgggcttcttccttgcaatagcttttagaattgaagcacgttcatcggcgttagggaggggtacatatagaagattcccaaatctaccaggtctcaagaacgcaggatcaactacatctggcctgtttgtagctccaattacatatacattacgcctctctccaccatccagctcaacaaggaactggaacatcgaaatgcatttgatcaatgcctgactaaattgtgcagctacaccattcaataagcgtttattacctggttcaaaagccgttcaacaacccaagcaccttctttgccacgacttgttgtcaaagcatccacctgaaattcaaaaacattactcatggacaagaatcggacagctcttactgctgcatcaacccaaacatggatctactttgtttgctcaatctcatatcttattgtctgcatatatagacatcggtcttattttcgtcatatagttcaacatgttaaaaacgaaccc

SEQ ID NO: 9882 - DNA, 485 bp, Arabidopsis thaliana
cgtgaaatgaagaacaacaccactcaatctctccttctccttctcctcttcttcttcttcttctttgaaatctctcattctctctcaatctcatccaatgctcctctctccgacaccgaagtcagattcatccaacgccgtcaacttctctactaccgcgacgagttcggtgaccgtggtgagaatgtcacagtagatccatcactaatcttcgagaatccgcggcttcgtagtgcttacatagctcttcaagcttggaaacaagctattctctctgatcctaataatatcactgttaattggatcggatccaatgtctgtaactacaccggagttttctgttctaaagctcttgataaccggaagatccgtaccgtcgccggaatcgatctcaaccacgccgatatcgctgggtatttactgaagagcttggtttgttaacagatctagctttgtttcatgttaattcgaatcgattctgtggt

SEQ ID NO: 9883 - DNA, 625 bp, Arabidopsis thaliana
ccctggcaagtgcaagcacccgaccaggggtaccaacaacaatgtgaggacattcattcttcagcaagtctttgtgaattttaatgttgactccaccatagaacaccgaaacctttgtatcaggcagataggtactgaatcgcacaaactcattgcagatctgcaagtaattgtcagcatcaaggcaaaaagcattagaggaagaagacgtacaacaaaactataagccaagaacctgagtgaaacaagaaggtcatacctggtaagctagctctcttgtatggcacaagacaagtgcagaaacctggccaggagatggttcaatctgttgtagagtagacaggacaaacacagcagtcttccccataccagactttgcttggcagatgacatccatgcccaagatagcttgagggatacattcatgttgcactggtggagaaccaaagaaaattgtaccgaagaaagcctttataagtagatgataacctccatatcttttaaattggtggctttagcacatgtttaagctcactccaaaccaatagattgaaatatcgtttattacctggaaaaagtaatcagtgaaacgttaataaacaaagaaaacaaaaaccattataac

SEQ ID NO: 9884 - DNA, 802 bp, Arabidopsis thaliana
ccttcttccacattctcactgttgtcgtgtcgtctctttccttctcctaactgtttttcacaaggactttccatttttctcttccggctaggcattgttgaagaaacatcatctatcatttcaccttcctcggtattgaccaccaagttgtttccatcaagaatctcgccatgttctgtacccatggagcttttgttttgtatatctttgtcatcctcaacagctaattccacgtcttccagttctctttctatcaaatcatcctcatccaccaaatccttctttctcgtcttttcaccttggaccttcttcgcctctagtttggccttcaccttatctctaaacatttttatgtcttttggggattggctgaccgtgacatcagctgtaccaacaattctagatttatcatcttctggaaaatgtgcacctgctttctctattttatcctccccaggtgcctcaactcccgatctagacttatgggctggatgactttcagtatgcatgctatctttcgtttctgtatctctttcccccttctgctcggtgatgacactacctgcctcaccactcccattatcattgctccggttttgtgtagcttttgtcgagcccccgagattatcagaatttgaatgttcatgagttagacgtgctgatggcctagacccaacatgatgagctgatcctccacctacactactttcgacttcgcttacttgagatgcaggaacacggttttgctcatagagctcaagcatttggttgctaacatctgcagtatacataagggagtagc

SEQ ID NO: 9885 - DNA, 762 bp, Arabidopsis thaliana
tttattacgatgttagacatttagttgaatttaaaatttttaatcactttcttattattgtttgatatatatatatatatatgtttttctggtgtaaatgattttatattttatcaaacataatatgattttatatttttttattaaacatgatatgattattttgttttctattaaacatgatatgattattttgttttctatttataaacactataaaatctctattaatattaaatttattaaataaattttaatcaattggtccgtggttcaacccggttgacccagaaggtaatccggttcactgtctgggtcggttttaaaaacattggaaagaagtataccagtgagggtcgtgggaatcagggagcttcggattaggaggtggagggaggaagaccttttcgtcgatggtgatcttaggagacccgactttggctttttccgcgtactgtcttttagcatcttcaatgaccgattcaacaaccttcttgtccatttctctgcatctcagcagcactgatggctctttcaggcgcagcaaactctgtagtaatgttatacaatggtaaggacgtgtggatattgaggggagaaatgataaacatatatacaaacctcaatgatgagactcttaagaagcttcttgtaattgttcttgtcgttggagacacggagaagatccttagctgcggagtctttcatggcagtgacaacgtcatcttgagcttgaaggtacttaatcctacttgcattcag

SEQ ID NO: 9886 - DNA, 568 bp, Arabidopsis thaliana
ctgctttcttttgtttctctctctatctcctctttgttatcgacactgacattagctgcctcaccacccccattctcattgttctgattcaatactcctttggatgaacccccatgattatcagaatttgattgttcatgggttgaacgtactgatgacgtttgcctagaaccaacatgctcatcggttgaaaccgcatttctggagcctggtcgctgagctgaccctccacctacactactctcgacttcacttccttgagatgcagggacacgattttgctcataaagctcaagcatttggttgctaacatctgagatatacaaaagacgattactcttgaaatcataaagaaaaagggaatggaagtcaaacaaggaaacaagaattgtcaagtcaattcatattgtacatacctctccagttgtctgggtgtgacatcaaattcttgccaccaaaccttctctccatctgatggtaacttcactttaaggaactttggcgcaagaaatatttgcacagccgaaatatgatgaggcttaaattgcaggcagagagatgtccgtag

SEQ ID NO: 9887 - DNA, 713 bp, Arabidopsis thaliana
aagcttactttgtgagtaatcagctcgcattgtgtacctttaccagaagcaggagctcctgatatcataattttcagaggctccgatttttcagccgccacaatctatattccttccacacacaataaaatccaaaattacaagctcgcaaatcgcattcaaaaatcggaggtcaaaacaatcattcacctgaaatttgggagcgataatcgacggagatcttgatacacgtcggtgccggtaaagagagtgtaaggcatcgccggataatgagaaggacgaccgtgacggagaggcacgatgccggtataaagtcaccggcggcggagaaatagaattcacacagcccgtcatgtctctctcccactctctttctgtcaatgagcctgtggtggtgaatacagagggaccagaggacttcactgttccgataatttagtggagggcccaaacctaaatggactcactttaattattttaagggtctatttgtttgatcatttggtatacttgaattgttttaagggcctattcgtttgcatttggtatttgcatccagcatgtgaatgttgtttatttgatcatttgctaattcatctagatgatgtaaatagagttttgtttgtttgattatttggatagatcattgacattctcatatatataaaaatgagtaaaacgccttatgttaagtaacaaataaccaacagcta

SEQ ID NO: 9888 - DNA, 889 bp, Arabidopsis thaliana
ccagtgtgcactaaaggctgatcaaaaaactatcaccaatctgctgctgtgatctatcacatcaacgtcgtgacttgcgaaccatggtgctcggcgatgccttcttccacacctgagcagttacaagccaacattcagcttgcttgcagtcgtgtggattgtacaccgaacaaacccggtggattttgctattacccaaatactttactagaccatgcttcgtttgtcatgaactcttactacaagagtcaaggtcgcacttatgctgcttgtagcttcggcaatactggttaccttatttattccgacccaagtactggcacatgtgaattttaaatttaatcgaaaaaaacatagaaatcttcagcatacttatacatttttattttgttttaataatgggtttctgtttcggactcttgtatttccaaactaaaataaatgaaatagacgttatttaataatttattctgaagtttcaatgttcttagtgatgacgtcttttactttctagtactattgttgtggttcaagatcaggttgttttttgactcgttatagtattcaaaattggagacttcaaaaacttagatttgttacaaatagtgccttatatatgtaagtcttgtcaccaattataattacttacaaaaagcctttggagttaatcgttactaaggtgtagagtgcttgtgttaatattatcttacacctgacttgttaataatttcaaaataaacttccaactgattcacgaagctatatatggagatgagtttttttttttttcttatgtatctacacaaatcatcatttatctagtaaattcaactcatcatgtaaactcttttagatgtaacgtaggagatgttgtttaatggtttgtacg

SEQ ID NO: 9889 - DNA, 988 bp, Arabidopsis thaliana
cttcccatgactaaatgactttgtcaaaccttgataatctgtgaatgagaatacagagactttaagcattgattccacgatatgcaggcttcttctgtgtagtaatttataattagacatacagctgactacttacgatcgagatgaaagtgtgtaagaaaccagtggcaacaatcgcgtgtgaggtacttgaatgcgtcctgcatacatatattaaaccagaaaagtcaccaaacataaagattacttaaaagataaatattcagcatcagcatgacgttttaaatctaatttcatgagcatatttgacttgaatgagaaggatgcatatgtaataaggttgttgcattcatgcggagaagttaaaccatgacctagcttgttatgtaacattaccactcgaaaaggtgtccccggaatgcaattccaatgtggaataactttagattttccgttgttgccatttcttctcacagcacgtctagagctagaatctgatggactcttttctgcgacaggtttaggggctgtccggatcttagtgccctcggtagcctgaccagggaaaaactctgtaatcaacttgtttgcagttggttttttgggctcacttgccttacgagtggttgacttatctctctgtctctctgtaacatggccacttgtacaatgagactgtgcctgcacttcagcagaagatgcaaagggatctctaactccgctaagtgcattcacaatcttctttctgggaccaagtgacgtgatacctatgcttagaagatcctgtggaagtataaccttgtcaatactcaattctgtttctctgtgtaaataaataaataagtaaactttagttccattacctcctcagtgagtgactgaagggtatccagtcgatctcttcacgaatagaaacatcttcatatttagctaaacctagactcctaagccatttcagcactggagacaagtcggtaactagctgagg

SEQ ID NO: 9890 - DNA, 1046 bp, Arabidopsis thaliana columbia
gcaggtcgatccgaatcatccccccatctagtcttcactgtagggtcattctgtaagaggcgcatgggcctcgatccccacaaatatccctttcggattaaccttttgacaagaagaaataacatatgtaagttgttattaatgccattgaataaaagacaagatatatacatttatcagaaattctgtcggaatatgtaatttagtgattttatatgtggtgtcacaatccggtattatgtgtatatatataattaatactttagtcgttaaacaaaaagctggaatagctcagatggctagagcgtgtggctgttaaccacaaggtcggaggttcaagccctccttctagcgattccttttcttttctctttatagggctctatttttagcgaatgggcttccaaccaatattgggccttgtgattaagccaatacatatcaatgcgacaatgcctaagattgatagataacgagtacaaagacttcacttagcggttctgaagcatacgggtggtgtcccgcgtgttgcttcttgatatttccatggacgtctcttctccatcaacgtacgctctctagctctgtttgcctcacgcttagatgattcattcctgctgaatcttggacatcatttcttgagtctgccagcatctggaagtaggcatgaggtccccaacctgaaagcaaacaatccatatagagatcagtgttccttaatatctatgaaacaaagtgactttatcttgaagacaagaggttcctcagtcacacaccgtctggatcgtatggaggagggaaaaattgcagataacaaaatgtggccacagtcaatcctggacattgcaagaaagatgtgtgtctgtcatcagctttgtttctcacgtaattttgaattcatgagttaaaaaagacaaaaacaaacaaacctatgatagctcctccaaaaacatcttgccagtgatgccaatagtcatcaactctggatacaccaaccaatgctgcaaccagtagaggtaaaatcacaatgcagagctttgcaacat

SEQ ID NO: 9891 - DNA, 1339 bp, Arabidopsis thaliana
ttgcagccattaatcaaacacatgcttaatgagagtgtaacttgtgcattttagtgttggtaataaaaaaagactgacctgagacatgttgggggcaaagactaaagcaaggttacgagagttcatcttattaacatgctcaaactgaataacatcagccatgagattgatggcccaattgagaagagaagcttctgtttgaggtaaaagtctcacaactttgacaaaatcctcatctgactcacactgcatcacttgctccgatggcagaggatccagtacccctctcggcagctctctgaaccaagcctgaacccacacacacatacataatcaaactcaggcctaccattttcaaaaacaaaggtaaggtgattcacaatcacaacaagaaccttaataagaccggctaaacaatggacatcaatcccatcaggtatgatccctttattaagctgctccctaacaaactcttcctcgctgttctctccagtgattctgaatactccttctgcctgcaagcctccttgatcataaagccggctctgcaatagcaacagtatcacaggaacacagttccctctcgagtcgtatgataactgcattgactctgtcgataccccaaacaccgttgcactgccaaacacaaacaagatgatgatatgaaatctaaatctctcaaaaccaattctcaatgagtttaaagaagaagaagaagaaagtatatataaaccttgcactgggagcttttctggggacatcaggctcgaactcagagggaaggccgaggaagccatcgaagcgatcgaaggtaacgtgagccacgtggcggatattggttggaccgccaatgtccatggctggtcggtcgttgtcttccacctccgccgtcgagaaacaacgggcgagctccaggacgactcgacctacagacgacgtagagccgccgaaccaccaaagttcggacttaccgagctttctaagtctctctatctctcctctcgcaaaacctgagtcttcttctcgctctgtgttgagactttttggggaatgtgatggaagaaggaagcagagaagagattatgggataaaggaattggtaatggccggcaacgaacttgggttaataaaaaagaaaaggttggcaagttacacgttacaagagaggatgttgcagagagaaagattgagtggcgatgaagaaaagggttaggaggaaggtgcgacgtgggaatcactcacttccttatttgatttccaagtcttttattcatttttatatttaagcataacaagtagtattagagtgggttttactcccaccctatttgataacatc

SEQ ID NO: 9892 - DNA, 664 bp, Arabidopsis thaliana
attctatcacaaagtgctttcacggagctgaatcgacctttcacgcctgctgagattgaagaatcagtacgaagtatggggaaatttaaggccccaggcccgacggctatcaacccgttttctaccagcagaattgggagactgtggggtcgtcagtgataaggttcgctttagacttctttgagacgggaatcctaccggagagtatgaatgatgctttggtagtccttatcgccaaggtagcgaacgcggagctagtaactcaatttagaccaataagcctatgtaatgtccttttcaagactattactaaagctttggttataagattgaagggagtaatgcctctgcttattggaccagctcaatcaagttttataccggggaggttgagtacggataatattttgattgttcaagaggcagttcattccatgaggaggaagaagggagtcaaaggttggatgctgctcaaattggatctagagaaagcctatgacagaattcggtgggattttctagaagatactcttagagcagctcgactgccggttaagtggatagagtggatcatgaaatgcgtgaccggtccttcgatgactgtgttatggaatggagaacaaacagaggcatttcagccctctagaggccttcgtcaagggga

SEQ ID NO: 9893 - DNA, 1134 bp, Arabidopsis thaliana
gttttctaattggaaagatgatcagaaatccatttaacattgactatataaattgtaatctaatgtagtatacaagagacataaccatgaacctttgagaacaatgttttggatatattatgttctaagtgacgttcttgcttcatgatttgttgatctgttttcgggtttgcagtgcaacagtgtttggggtttctacagagtcaatgcagttatcatacgactcgagagggaattgtgttcctaccatactcacgctattacaaagccggctatacgatcaaggaggtttgcaggtagaaggaattttcagaatcacaggggataacagtgaggaggagtttattagagaagagttaaacaaaggagtcctaccagaaggcatcgatatccactgtctcgccggacttataaaggcatggttcagagagttaccgaaaggggtactcgattctctaccatctcaacaagtgatgcagtgtgagtcaggggaggattttgtgaaggttgtgagactcttgtagagtttgaagttgtcaacaagatgacctcccgtaatctagctttagtctttgcacccaacatgtcccaggtcacttcttgcaccacatcacaattttccaagagtttcctttttttctctactcacattgatcttacacagataatgtcagttttatcttagtgctaataccagaatgcatcaatatatcaagcctctgatccgcatactgggtctgttttggttttactgcagatggcagatcctttaacagcattaatgtatgcagtgcaagtgatgaacttgctgaggaacctcacagacaaaacactcagagaaaggaaaattgcgacttcaaatgtagatccttgtgataacagaagtgaagctgaagatggtaatgtcgaagaatataatcaagaagtagaaatatatgttcttgaagaagtagaggaagaagaaggagaagatgttgatgatctggacaacgaagaatccgagagaataacactgcttgctgatgaacacaaaccatcaagcgcagtgaatgctaatgatcgaaagaaacaagaaacatgaagacagccgttggagttggaaacgtcgttagcagtattatgtgtttcgattga

SEQ ID NO: 9894 - DNA, 1003 bp, Arabidopsis thaliana
tgaagctcgacaacaatcttcttgatcctcgaagctgcgtccttagctcctccacaaacctctaagtatttcagtgatacttcaagaagctcttccatcaaaccatcaccattaagaagggcttgttgagtttcagaagaagacttgaagagatcttcacttaaacatctgtaaagctcggtgagaccagagagactgtcacggactattgtcctcgagtctaacgaagaagaccccaaagctctaaccttggagaccacttcttgaatcctcctaacactcggatgagaccgaaccggtaagctaacacatctagctttgtacgctttgtggagtctcggagacagtgaggccatatacatctcaagaaatgatgacgaaaattagctattcgagttatgctttgttctgtcctttaactctagggtttatataaatacacaagaaatgacataaatgtcaatgagtagggcctagcttagctaagacgtgaagaccatgtgaagtgagtgtgggtacttcactaaggaagaaaacagaacacgtaaggctcaataaatgctatgtcgattgattattgagttaaaatcgttgtcgaagttcgatgtttcggtttcggttactataaccgaaacctttttcacacctcttttcatgcaccaaagccaccgtccatttacatttctttaatatttaattgattttagtctcgttggattttgtttcttttgaaggttacaaatacaatgctttatttttttggtgggtactcgattgaattgaatttcaagatctttggaagattttttgttacattgtttatgtaaaaaaatatgagatatgtaatgtatgcacggatgatgtggtccacgcaagagacgatcgatcgatgcctcccttgaataacaccgtcacacgtcagcaattatgttaccatgaatttaggagtgccatatcagattttccatttacaggtttagataccttttggttcgagtttggg

SEQ ID NO: 9895 - DNA, 947 bp, Arabidopsis thaliana
atcgtttacctctctacatgaaagagaaaattaagtaagaacataattttgtccaaataatcttctcaacatgaattaagtgaattctactttataatctgtctagcacaaaaggagagaagatctcagctcgaattcccgaagtataggtaaaaaggatgattacttatggactacatctgcagaggttggttgtaggctcaacagttttccatcttttccctggaggtcagataagataccataatcaaaacatgtggcaaagcagatctgcaagtgaaaagccagaaacaaaagtgaatgaacaggccatgagcgttcagcaacgttttgcaccagaatgaaagtttttacctttccatttcttgctcgaacagaaacatgagatagtacatccggcatgtcaggtgtcagtaccgcaactgcaccatcagggatttcctcctctcctctcactctgtttgcaactataattgtaggtctatcgtaggttttattctgtacagtgagcaattcgtccacaacaatgacatatccgacgacctctacaggactaataacctgccaactgatcaagagaaagagaagcaacattagattttctaatgtgtaactaccatgcgtcaatagatacaacttgctacagaacatgtcaatcagtcacagacaattgcttagctatctaaccttcccaagttagcagtcttcctaagaactgggtcaagtcggttaacaagtgacgacaatgctgctgcagatccagctcgaatgatctcttcagtaaatatactaacctggtaaagagttttaatgaaatatcaaaaccagggacattaataagttatggatgaaaaaagaggacgggttcagtcacaggaaatgtaacttacagccgactgatcgactccaagacaagatccaagatattcagccgatggttgcagaat

SEQ ID NO: 9896 - DNA, 544 bp, Arabidopsis thaliana
cgaacatttgatttcgaaactaagcattcataagaaaacagatgaaccaaggcataaacagagaaatacagagcaaaatcgacacagatcgggagatagagacttactgaagccattatcagcgagataattgaaagtgtgaccgtcgcaattgtaggtaaatttgttgttcgaggacggaagtttctggagacactgagcggcgacggaggtgaaattgcccttgaactcggtatactcggcgaggatcaccgtaccgcgagcgacgaagctgtagatcaacgattgttgtcccattcttccttttatccagatgagagaaagataaaaaaacgaaacctaagaacaccacaaaaatccgatcgaattgatgagagagattagtaagcgatgtaaaaatacacaagggaacgaggggtagcgatggagaaagcaggacgcagagatcggagaagagaaactatatgagagcgctggatttgcgcgagtaacagagacattattttccctttggtaacgttcaaattttgaatttttaaatata

SEQ ID NO: 9897 - DNA, 1094 bp, Arabidopsis thaliana
ctagattttatttgatcattgtatttaatgctttttagttaatgtgtattcaatgagtttatcgagattataaattaaattgttccccgggttttttgataataaaaagttacacgcttttggttaaaaatccattgcattataaaattcaattatgatacaatgccacgtcactggaccacaatgttgccgtacgttatattgttgccggagtaaggtacacgtcgtcacggtgtcaggccgtttctttaaagagttgtcacgcatttaacggcgcgtgcgtctcacgtgacactctccttgtttgttggtgatttgttcattgattacagaaccaatcgtcggtacctaccaataaccggtcggtttggtaactcttctcaaattaaattttgaaccgttccatattaattggtgctgtcttttgtgtatttcagtacgatgtgtatggcaatctctttggattactagcggctcacccggtggctccactggttacgcttcatcacctcgacgtggtcgaaccgattttcccaaacatgacacgtgttgatgccttgaagcatctacaagtcccggcaaagctagactctgctggacttatgcaacagtcgatatgctatgacaaacgccgcaaatggactgtttccgtctcttggggattcgcggttcagattttccgcggaatcttttcggctcgagagattgaaatgccgtcgagaactttcttaaattggtaatctatatcaaaacattagtaaagtacataagtaaaccccaaaatgtataaatatatggtcattttgttttacattgtattttttttccgttaggtatcgacgggcggattacacggcatacgctttcaacacccgacccgtgagtcgtcatccgtgccagaaaccgtttgtgttctatatgacatcaaccagagttcatcgggtgacaaatatgacagtgagccgttatgaaatccacgcgtggctcatccagagtgtcggtggaagatggctaacccagcgacattaagacagtcattgtttacaagaaactggaccgtcatctttgggacagggtaagtcacatgttatata

SEQ ID NO: 9898 - DNA, 580 bp, Arabidopsis thaliana
catttgaattcaccatcaccatagacaccaagaagctccaacaaaaatgtcaagaaggcacaaaaggttttgaggatcatctgacacaattatcacaaaaactcaaaaacatgcaataattaggttgcaagaagagccgaatcacttgacttacatattgaacgagaccaaacttttctatcacaaagagctctcgtcccaagacatatggatcacacaagaatttccaaaatgaattcttcttcttcttctttttactctcatttgctccttcttctaacaatggtttctttgattcattttcaaggtattcaacaactcttctttcaccacctgaccattcatttggaatcttggcttaaagatgcaaaacaattactaacgagaagcaaaagagagagagggcacacatagctcacctagacatgccaccaagtagcttccaaacgaatacaaagcaaaagcttcatagcagtttctcaaaatgtcacaaggcagcgagaatttcgaattggacaaggaaatgatctaaacaaaacaaaaccagattataattgaaaatataagaacagattcataa

SEQ ID NO: 9899 - DNA, 1144 bp, Arabidopsis thaliana columbia
gaggatcacaggatcccctttgtttcgggtcggtcggtagtcggcatcatcgggtcggtcgatagtcggttttatcgggtcagttttcttgttttattttgcctctgaaaacatgcaaacattgtcaataattcggttcttatatcccgaacaagcataaaaagtacaaaaacagaagaaaccttacaaaaccatacataaagttgtactagtagccttaagctgagtttgttagtttaagctactagtacagacaaaccgaatattacataccattatagaagctgccaagctagcattgtatcaagaagctagcattacatcaaaaaaccataacagaaccatacaaatatcaagtttgctttagtagttagcttaccagttgtagattctcaaaagcatgctaatctgcatcaaaaagttgtcaaaagagcaactcaaagttagtactatctaaggttgttgttcttctgcatcaaaaaggacaaaagtgcagcttcctacctacctgtgagactcataacaaggacatgacaacgtaattcaaatcataatcaaaaaggactgaggctactttaagacccaaatccggagaatcatacctgccatactatgaagaatctagacatgagttattgttgaatttcgagcatctacaaaagaaaacagagtcaaaagttatcaatacttcaacagttgagaaaaaagaaaaaaactaagtcaaagagttagtcaaacttaccaagagattcaaagaaatcaacttcttctaacatttgatctaagtttgctattgcatcctcttttttataagaacaccttaaccattgttgtgggcatagcaaaacctcaaccatgtaaggagttaaagaactcctattgatatgtctataatttgcatgatttaggcattcattcttcaccactttgtcattgtttcatccacatttcatctcattaggagtcgtttttgtgtgttttgcatacttaggacgattttgcattaggattgcatgtgcattgcatatttggttgttttcaggtactttggatgcttttggagttcaaacagaggagaaacggaacaggaagtcagaatgcccaatgacgccttcagcaaaagtattctatcgcagcttcggag

SEQ ID NO: 9900 - DNA, 731 bp, Arabidopsis thaliana
ctattccattcaatatctttgcataaatcataaccaatattattcttttcatcacccaaaatctcaaaaacgaacaaacatgtcttccaacaagattgttttgtctagctccgatggcgaatctttcgaggttgaagaagcggtggcaagaaaactgaaaatcgtggaacacatgattgaagacgactgtgttgttaccgaggtccctcttcaaaacgtcaccggaaagatcctctccattgttgtcgagtattgcaagaaacacgtcgttgacgaagaaagcgacgagttcaagacttgggacgaagagttcatgaagaaatttgatcagcctacggtcttccaactcttgctcgctgctaactatctcaatatcaaaggccttcttgatctctctgctcaaaccgttgcagatcgcatcaaagataagactccagaggaaattcgagaaatcttcaacatcgagaacgatttcacacccgaagaagaagcagcggttcgcaaggaaaacgcatgggcttttgaatagacaccaaaaccctagtttttggtttcgtttcttattgtcggttttagggttttgatgactttcgtctctcttttttttttggttttccatatttcgatttcgtgaatgattttatattttggcttattcaagtggtgtgattgatgactttgatttcgttgttagttctttaccttactctctattatggtgatcaataaat

SEQ ID NO: 9901 - DNA, 1605 bp, Arabidopsis thaliana
tgttggaaagctgaaaaatatgaggtaacgtaggttattgactgtaacggaagcgaatttaactatgtttcggtttggattaaccaaaaccgaatagaataacgcaatttaactttggttcggtttggtttttgtgaattaacttttttttattccacccttaccacttgcctaacggagccgttgtgacgcccatccacttttgcgctagttcacgccttgacgccttctccttccgtttcttcagcctctcgccgctaattaacgccgtctctggttgctaccaccgccgtaaccctaacggcatttttaatggcgtcgtgtgatgacgatttctctctacttggagacgatcagtcaaaccctaatcaacatcaccaccaccaccaagttcttcatcacacgccctacgctcctagacgattcaacccgaaaccatcgaatcagatccttttaccgcatcaccagaggaacggcgacgaggacgacgagaacgatgtcgttgtagaagcgtcttctgctttccacggtcacggtgttaatcctttcacggcggacgaaaattcgaatccgtatgatgataataacgcagctgtagacgaagacgaagacgaagatctcggtgccaacagatctagaatcggaggtgttcgtgttgagaagaggcagagtcaggaggagctaagtgacggaggaactacaaatggcggtgagattactccctacggtagcttcaagagaccgaggacttcgtcttcctcagctggtgagtataggaaggatagagaagagtggagtgatgcggcgattgcgtgtttgttagatgcgtattcggataagttcacacagcttaatcgagggaatctccggggaagagattgggaagaggttgcttcatcggtgagtgagaggtgtgaaaagctgagtaagagtgtagaacagtgtaagaacaagattgataatctcaagaagaggtataagcttgaaaggcatagaatgagcagtggtggaacagcagctagtcactggccttggtttaagaagatggaagatattgtgggcaattcattagccttgaaaggcgcgtctgatgaagatagaagcggaagctcaatggggaatactgtgaagccagctagaaggtaatgcagaaacgatcactagcaactcttttgtattttgtgctcttgtgaaagtgaaagtttttggttttgtatttcttgtttcaggtatcctctggtaacatataacccaggagttcagattaataacgtcaaatcaaaggctacatcaaaccctagatggcgaagagtggttctaaaaatcagtggtgcagctcttgcctgcaccggtcctaataacattgatccaaaggtttcctccagaatgtgtaatcttttgttgattcatgcattttctctatccgacctcagcatcaaattctcttttgattatttaggtaatcaatctgattgcaagagaagttgcaatggcttgtcgtcttggtgtagaggtacacttagttctagattgttagcgttttatcctttctcagttaaatggtattcatagtttggttcttccaggtagcgatagttgttggga

SEQ ID NO: 9902 - DNA, 644 bp, Arabidopsis thaliana
ctcaaataaataagagttttattgaatggagtggaaatctaatctctaactaataattataaaacatcttctgacgtaaagagccggttatatcaatgatatatatataggagctcctgataataatcaaaaacataacattgcatatatagagaaagatatagtgaaggtagctatagagaagaaagtagtgtaataagaatggggaaaggaagagcaccatgctgcgacaagaacaaagtgaagagagggccatggagccctcaagaagatctcactctcatcacttttattcaaaaacatggccatcaaaactggagatctcttcccaagcttgctggttagtatttattcacatgcatgtttcggtaatactataaagttttaaataactaagagaaataatgattgatatatatacataggattgttgagatgtgggaaaagttgccgactaagatggataaactatctgagaccggacgtgaagcgaggcaactttagcaaaaaggaggaagatgctatcattcactaccatcaaacccttggaaacaagtttgtactctacctattcatctaatttctttataataagacgatatatagtatgtagagactaattgatatatgtgatcatcaggtgg

SEQ ID NO: 9903 - DNA, 942 bp, Arabidopsis thaliana
agtgtgctctaaagcggcaatgactccggcagaatatcttcaacgtcgttgagcttaaaacgctcgctcatttcagccactcttgcgggaatttccgcttccgggatgtgaaacaaacgggcatgtaactcaaggttttgccgcacggtgagttcgttatagagcgaaaacgcctgcgacatatagcccacccgacggcgggtatcgatatcttttggatcaaccggttgcccgaacagccacgcctcaccttcgctggcgggcagcagtccggtgagcattttcatggtggtggatttaccgcagccgttcgaaccaagaaaaccaaaaatctccccgcagtggaatgcggaaattaacgtgatcaacggcaacgaaggaaccaaaacgcatggtcagatcgcgcgcttcgatggcaatctctgcgttttcaggttgatacggtgggatcactaccgcctgatgcgcctggcgttgcgcttgcggtaacagatttataaatgcttcttccagcgtacgctttgcgtttgctgccgtagctcttcggcgctgccagttgccagcacttctccggcattcatcgctaccagccagtcgaagcgttcggcctcttccatataggcggtggcgaccagcacgctcatattgctctgccgctggcgaatactgtcgatcagatcccagaactgggagcgggagagcgggtcaaccccgttgttggctcatcaaggatcaacagttccgggtcgtggattaacgcgcacacagcccaagtttttgcttcatcccgccggagagtttcctgccggacgatcgcgaaacggtgctaaccggtgctggtcagcagctcattgattgcacttccgctccgctttgtcgtgacgaacaggcgagcgaaaaaatcgacgttttcatacaccgacaaggtgtggtagaggtttt

SEQ ID NO: 9904 - DNA, 515 bp, Arabidopsis thaliana
tcactcacaaccgaagactccattctcttcacagctatttttgttccatcgtggagttcgcctttgtaaactgtcccgaaaccacctctcccgagaatattctcttcgctgaagttattcgtcacattcctcaagacctgtatcgatataaccaagttcccagcttcaacaacgtgaatatcactcgctgcacttccgctgtgactgtagctatcacttcctccaccactgttaagactagaagctgcaacagtgagtttaatgtcatcgttgtcacccgaatgatgcggatgaataaccatgttgctgcttggactttgaactctagcaggtcgcttccttttcttcgcataaagacacacaccaagcccaaccaaacacaatgcaccaacaaccccaccaaccacaggaacaataatcttgacattgcttgatttcttagaagtttcactgccatcacttcctcctgaaggtttacttcctggtgaagctccaggagcatcactcgttttgtt

SEQ ID NO: 9905 - DNA, 342 bp, Arabidopsis thaliana
ggttagtaagtctgatgaagagaacgagcggcatgagctcaagaaacagagtgatgcacgagatgaaactggtgtttgacatggtgagaatgagtatggcatgaattcgggtcggcgattggagctggaatcgtagacttgacacgtcaagaagctcgtgagcaagcagcagcagagattgtggagtcttatgatgtttcaggtccgtctgctatgctctctgtcatctgctactacggaattcgctgtggaaatcacggtgagtcgtaagatctttcgcctagctacggattgagcttggtgattgtggagcgttcatcactgcagggagtatacttcttg

SEQ ID NO: 9906 - DNA, 544 bp, Arabidopsis thaliana
ctcctaaagacatagacatcctcgtagtcaacgtctccatgctctcttcaacgccatctttagcttcaagaatcattaaccattacaagatgagagacgacgtcaaagtcttcaacttgaccgggatgggatgcagcgcaagtctaatctccgtagacattgtcaagaacatttttaagagctacgcaaacaagttagctcttgttgccacctccgagtctttgagccctaattggtatagcggaaacaaccgttcaatgatcttagccaactgtattgatccggtccggtggatgtgctattctcttgactaacaaacgtagcttgagaaagaaagcaatgtttaaactcaagtgtatggtacggactcaccatggagctagagaggagtcttataattgttgcatccaagccgaagatgaacaaggccgtgtcgggttttacttggggaagaatctccaaaagccgctactcgtgcttttgtagaaacctcaaggttatacacccaagattcttcccgtaccgagcttataaggttcatgtt

SEQ ID NO: 9907 - DNA, 632 bp, Arabidopsis thaliana columbia
tccaaatctttaaccacatttctcatctattttgttcattgcctatgattcgagaaaagaaaatgctatccagaaactcatactaagaacagtgattcctatgtaagcaccttaacaaactcatgtatatactcctctattctcaaatgcttatcaaaatgcttcctttattttctttttgattcctcactaaagatcccaattataaaaaactagcaaagggtttattacctttcttcaatccaggagaaacatcatctccaatgaacacaagagggatatcaactttcaacaaagcacctggaggcgctcttatgaatgtcacattcagtggagcatcagtcccagagtgcaaatgaatctgaaatcacatagcataacatttctaaaaactcaatacataaaccaataatccaaacacaccactaaaccaaacattgaaaaaatgcaaactttaatcaatttcatgagtgagagaaatggagactttaccgctctaggcaaggctctgactttctcaataacctcatcagaaccaatctcagctcgaacctcaacatcaaagagcctagagaggaaaaaagagtacccaaatgattcacaagcttcctgatctgattcgtctgaactga

SEQ ID NO: 9908 - DNA, 1201 bp, Arabidopsis thaliana columbia
ggtcttgtattgtttttaaaccctataattattgagagttaattttttttatttttgttacacgtacatttggggaagagttaagatgatttcacattccatatggattggtgttacgtatttggaattttgattatatattaaggagagtagtaaaacacggtaacaaatttagcatataatactagattatgacccgcacatacgtgcagggttttatattttaaaaaatgtattggaataaacttttaatgaaagatattgtagagtataaattataatctacataccaatgtgtatattgttatttatgacacaatagttatgttgtgaaccgcacattatgctagttgtaagtattatcatattcatttggttttgataaaagtttgtattaatatttttttgagaaaactacaaaatctaccacatttccccaatttcttttaaaatctacaacatttcaaaactccttccaacccataccacattgcctacttgaattttccatattaccctcacggtttgtagcagtttttgcgcctacctgaactatttcattttctttttatctctcttccctaggaatcgtgcgggtaaagaacacatcgttatctcccctcatagattttcgtctctctctctcactttctctttctctttcttcgttatctcctttcatcggattttataacttgtaaacattttttgattctctgcacataacgctctatcgattctatcccccaattttgttcatccaaagtcagtttgtagaacataattaattagtagtgctcatctgtcctgatttaatcgtttcatccctaattattattaggttttttgtcgttctgtgtgattcttttgatttgttggattaacaaattcggtttcttctttgtttctccccgctacagatgaggtcctccacgagtaaatcaaaacaaaagtcccctcttggcagtttcaggcggacggtatcgttcgaagatgatgacgatactttcgtctccgccagatcatccgccgagacgctctttgacctctaggaagactggttatccttgaagtaaacatggatagacttcccaaaaggctctacgccattgattgctgatcgccatgtggtcgtattaatgcctactcaaagcctgagtatcttcttgatctcgtcaaaatcctagatgggacaagagag

SEQ ID NO: 9909 - DNA, 551 bp, Arabidopsis thaliana columbia
caaacacatgggtcttgggggagatgatagctggactccatgtgttcacgataagtttctgattccgcctgcacagtattcgttttctctcaggctatgccaattactgcatccacctcgggtttgaacatctacaaggatcaactcccctgctagaaatctgttcttgcatataagttgaatgctataaacaactagacttagtgagtcttgcaatgtttctaagtttgatttctcaaatgaaaaaaaaaaaacctaataaactaaaacattcgattcaaaatcttcttgtgatatagcctctgttctagtgtagttgttacaagcaatccataccaaataaacctcttaagaaatctatcccatcaaagcttaagcacatagagaggagcccacaaagtgggatataaagccgttttagacgggtgcttcccaatgaagtggccactccacttggaaagataattatttcattttctgcagaacatttttaaccattacatgtgaccacaaaactctgtcaaaccccaaatattaaaaaacttatgttt

SEQ ID NO: 9910 - DNA, 711 bp, Arabidopsis thaliana
cctcctattatgttgttggcccgagcatgcgttctgccaatgtttcacttggttatttctggttcatttagtctgcttataaaatcattgtgaaatctataaaaaaaattcgttttcttttgaaatcttcaatccagccttctaactattttcgccagaatcgattgttcctacacacgttgagcttcataatgccaagtcttattcaaaatcttgtcgaaacaacacatgcaagaaccaacttgttttgagagccaacataatagaaccaaacgagaactctaaaagcttttgttgttgtcccgaagcttggtgaagaagtcattgatgtgagcagtgacctcttgaggtttctcttggttaacgaagtgaccagcatcttcaatcaccactatctcttgaagagttggaacatctgcagcaaatccaccaccgtgaatgtactctttcatccctggtgtggtgtacaccatgtcgaagtcacctgtcatgaacttcactggaacttgaatcttagctccggtccatggtgcagtgagctcccaattcctgatatattaaccaataacaaattaacccaaaccctaaaatacgcattcatatactaagaacttacagatccatggctctgtagtagttcaatcaccggtaaatcctgccttctcgaatttggagacatagaaatcgagatctttctttagaaaccattca

SEQ ID NO: 9911 - DNA, 801 bp, Arabidopsis thaliana
ttttacaaaattgacgtgttcagacagtaatcagtttcatgctgtttgtatggatacatctccacccatattctacatgaatgacacctcccacaggtatctttttctcttattttgtttcatttggcagtcatttgcagcttttagctatcagtgatgtggtattgatcgcaatccactaactaatgatgccaggattaatcagcttagttgaaaagtggaaccgttctgccggtacaccagaggtatgtatgcttgcttactccatagctcaaaagcaagtattgaatttcatataggtttcgagattatgacgttggacaagtcttctgatcttaatctcgttgtcctggacagattgcttatacatttgatgctggcccaaatgcagtcatgattgcaagaaacaggaaagtagcagttgaattgctgcaggggctgctctactgcttccctcctaagcctgacacagacatgaagaggtgagataggaattgttattgatctgattgattgatttaattcctgactaataaaaatggtgttttggtactttgtatagttacgtactgggggatacatcgatagtaaaagaggcaggcttggaaggagagcttccacaaggaattaaagacaaaattggaagtcaggatcaaaaaggtgaagtgagttattttatatgcagcagacctggaagaggtcctgtggtgcttcaagaccaaactcaagctcttctccatcctcaaactggcctccccaaataaccatttctatgtcttgttgttactcaactctgagatt

SEQ ID NO: 9912 - DNA, 633 bp, Arabidopsis thaliana columbia
tagaatactgaattggtttgtgtagggtcaaaccaacaaatatggaaagaaaagtattatttagttacaacgtgaaaacacaggttcgtgctactactccaatgatacgggtctcaaaatactcaaaactctggcatgtctcaattccacaaattattgtttaatcattctgcttcttctgtaagtttatatataaatgtgtatatactcaacgtaaatatttgcttacctcgtatattttctctcttctcaggcttattaattctctgcagataactgcagaagaaagaagaaagaagaagaagaagagattagagcttgagccataatatataatcccttgatcattagtctaaagaaccacataaaaagatgggattctggtcgttgttggaggtggcttctatgccggttattcaagttcttttcatgagtcttgtgggagctttcatggcctctgatcgttgcaagctcttccctgttgaagcccgtaattccatgaacaaggtaaaccaattcaatgatccttgactctttgaaaaaaaacctatcaaacattcgagatgtgtttttattgactttagcaaaaaaagatgtgtgttaatgacccaaattttgtttaggtggtgtttg

SEQ ID NO: 9913 - DNA, 607 bp, Arabidopsis thaliana
gctagatctccacactgtaaaataaaaaaagacagtagcaggaagaattcagaagcaaaaacagcttcaatctctctctgatcagcttcctacttataagtattgactgactcttaatgaagcttcaaaaaacaaatccttttggacagatttgttagcagagaagtcttgagttgtcagaaaaacaatagctgttaggaatgttgtggagaggtggcagagaagatgtctgtagcaaactgctcccatcatagctcgaaaacatatcttgagagaagctagtgttaccataagggaattcatgtggaacagtgtttgagagattaggatgttgtaaaccgttgttgttattgatgatttcactcatcatacacaagttctgatcaaaaccatgaagctgatcctgttgctgcatcaagtgattattcaacccgtagttattcgccgaaagtacaggtgagtagtcttgtgtgtttgacacgccaggatgttgaaagttgttgtcgttggtgatgttgtccaacacatgttctgaccagaaccatgctgcatctggtaattgatgagttgattggagtgtgaagcagacagtgagagttgtgagaga

SEQ ID NO: 9914 - DNA, 578 bp, Arabidopsis thaliana columbia
tgggtggaaaagtgtggtgacactggcgaattcaaatctcatgaagttgtgcattttttccgtagaggaaatattggcaggcagaccagtgccagctgtatgtaatgcagagcttcacacagattatggtggtgctgcagtgagatgggggcttacacatcataaagagagtgcagctgattgttgccaggcttgcttagaccaggcaaagcgtgcgaaacctggagaaacgagatgcaatatttgggtttattgcccatctgagtttggttgtttctctccagatatttatgagcataaacatcaggagtgttggcttaaatacgtaagaacttacctcgtacacatactactttacccaattttcagtttccttgagattactcgtccaagttggactggaagcttggctcatatccaatatgtctatgtgaattgcaggcagagaagccaaaacagaatttcaaagacagatattctgagacatacagaaacaaccacccaaaagcgccatctatcgttccatgggtttcaggtgttgtaacggcttgagcaaaacccatgtggacagattgatg

SEQ ID NO: 9915 - DNA, 471 bp, Arabidopsis thaliana columbia
gataccattaaaaaaaacagtaacagaagaaatcggaagcagaaacagcttcaatctctctccgatccgcttgctacttaactattgactgactcttaatgaagcttcaaaaaaacaaattcttttggacagattttgttatcagagaagtcttgagttgccaggaaaacaataactgctaggaatgttgtggagaggtggcagagaagatgtctgtagcagactgctcgcatcatagcttgaaaacatgtcttgagagaagctaatgttaccgaccgcattaccataagggttctggttgaaatcgagaagagaattcatgtggaaccgtgtttgagagattaggatgttgtagaccgttgttgttgttgatgatttcactcaccatacacatgttctgatcaaaaccatgaagctgatcctgttgctgcatcaagtgattatacaacccgtagttattcactgcagatg

SEQ ID NO: 9916 - DNA, 782 bp, Arabidopsis thaliana
ggagcttctaaagtctccggcggaacaaatagcagaaatgagcggaggaggcaaaattgaagatgaatgagagtgagagagagacctttgaaggtgatcaacaatggggatgggaccatgatttcgcttgtagaaaaggtcgacgggagtgacataagatgagactaaggccgagcgcagaggctcggcgttgaaaggttcctgcggatcacccaaatttagatgccatgaagaaaaaggctatatcagactagtgactgattcgattggaaagagagaagaagaagaagaagaagcttaccttggcgttgaccttgagagaagggtgacgaggtggttcctgcgagtattccgaagacctctaattccaggcattcttctttcgaggaggagataccgaggaaatgacgattgagtgctttcctttgtgacgtctctctcttcttcaaaggaaaactatggaacggcgtcgttttaggtttgcgtctcttaatttgtggataacagacagagcccaaattgagcccaaacaaaaacaaattgtgagagatggcggtggccaaacttcacggcggaggtatggcggcgatgcgtcttcttctacttccttccccgatgacgcaccggcgaccatcaacgcttccgagcactgcctctttatctccacggagatacatcgtcgcgttggcggccaagagaagcctaagcgtctcaaatactctactcctcgtttcccaaggagggggaattggtgtcatcgaggtcgatccttgtggtgttga

SEQ ID NO: 9917 - DNA, 1104 bp, Arabidopsis thaliana
aactaaattaattcatgttaagggctatttagagtgaacctaattttcgggatgatttacggagaagctctagtaaagaattagcttttcgtttagctctctctgtaccgtctcttgatagttccatcaatggaacaacagctccaagtctaccaatggagatcagtttttcagtatctctcttgcaaagacacagtagtatcgcagctgcgttctctcggtttcgcggttgatccttctggagacaatctatcaaaggtggtattgcgttggctctcaaaatcgcagttttcgcgacttggttactagctagaaccgagagtatggtcaaggcttcatcagccatcctctcgctcgaggagtctgtcagcattttcaccaatggctttactataccggctctaactgctctgcctttgtttccctggtaaatacacaagttgaacagagccgtagctgcgtctttcttccctctgacgcttccatattgaagcagatccactaaggccattatcgcacctgatgcgcctataatgatcttgttctcatcagctaacgaaagactaaagagagtagctgcagcgttttctctagcttccatgcttccagctcggaggactagcactatagatgtgactgctcctgcaagcatgatcagttctttgttgtgttcgtatatggagaggttaagaatgcaagtgacagcattttcctgcgtttcagtgtcaccatctgaggtcaaaagcttgaccaaaacagggatggctcctgcctctgcaatcagaattcggttgtctgtgcttctttttgacagagagcggatttcagaaaccgcagtcctgcggtcttcgattgattggctagagagtttacaaaccaatgctcggatcgctgacatatctccacttagatcacggaaagacccatcactgtttttggtcctaccgttcatgtaaccacctggttgctcaatgttgtgcttagtgcccactgagatatcaggcttctgaggacatagtttggagtaagagtaaagttttcaagtttctgctgtgtctttgggcagctcagatttccacagtctatccatctctgaatgaacga

SEQ ID NO: 9918 - DNA, 916 bp, Arabidopsis thaliana
tgccttccagggaaaaagtttttacaggttctctttctttcctgtccacaacattatgctttgttcttttgaaacaaaaaggatatcttttaatttctttggatgttcattagattattgaaatcgaatcagagcctggaccctttgaggtcctatacgatgaagagtggctagcaatcacacgaaagttcaattctattttcccgctaacaaggagatacacaaacgtcaggtataccatcccgaacaagctacctactaagaaatgtttatatatcttccatttatctttctacctaccgtcccacttacgtattgttttactacaatagcactgctggaactatacaagagagccgtgagtgggtgaggaagaagctagaagaaaggcaatttaaaccttttgagtttgcgagaacagtacctgcatataacccatcacaacgtgtatttgattccattcctggtatgttaatagtgtactggatatagaggattataaaaagttgatggatcgattaaaagtgttttattcatatggcattttgtagagatcccgcagaatccccagacgctgtctttgttagagctccttggtctcccatatctccttgattcatcaccagtaacaggggaaagaaccgatatccctgcttcactggctccatcaggtatgacgatagttttctttgtagatgaggacttggtttgggattatcagatacatattctgtgaagttgttcatttactctttctatctgcctattgtcatgaaactgcatcaagcaccaatgacagagatgtttagtgcagtgtcaagaatcaaccatgtcttgttgtgtattgcagatcttccgacatatgatagcgaagaaatcccaattgatgacattgatgaaatagaagagatggagg

SEQ ID NO: 9919 - DNA, 1518 bp, Arabidopsis thaliana
gaaaccattggcaacttgagagctgataagacttggggacgctaggcacaacaacattgcagctctcaacctccccccaaatctggggtccgaaataagacatacgctcctccaacctaatcacagcacaccaaatttccttctcttggctgcgaataagggaatacccgtctagaatcatgatccacttcgctccatataattaacagtctcccaccatagttaactaactgaatcgtacggtagccacaaccacgcttatcgtatagaacatccaaacccataactctttgccacgctcgatgacttgagctataccacgtgtacttcctgcacacatgatcagcaaacattatatttcctataacgcaccaaggtcgtccagttataggtttcataactttttctataccgccggaccaaggtccagttatgggttgtaaatccacagaccccacgtctggtagccatcttccttcattcggatcatatgcatagttgttacgcttggtgattacgtatagcctttctccagaaactgcaactttgtgattcgaatggacggcataattaacactagggctaggcagcggattccaagtctgagtctttaggtcgaaaacttcaccacaattcatggattcttcctcactctttctgcatcctcctattacatatatatttccgtctaaaaaacaagacttggcgcctacccttgacactctcatgttaggagcacgacgccacctgtgagtccaacaatcaagtacaaaaacagctctggatcgcttgcccttgacagttccgccgattttgtagatttcggtaccagcagctacagtggttgagtttactcgagtacgaggataagaggaagagagccttaccggttctaaacttagtttaccctcaatctcggctagggtgaaccagcgatgttttttgggtaaccacaggcacacgtacgggcaaggctctgtcgctccgatgtgggatcgggccgcgtagatctctgtagaagagagaagagagtaaaagcttttggagactaaagagagggaacggtagtacgatttagagatcagggctaagaaacttaaaacgatttcatctggaagtgatgaaatcgacatagataatggagtttgagctgtgagaatcgtcttcttcgtttcctgaggtggttctactttggcggtgtccatagcaacgataccgtgtttactaagctcaggttttaggtctcaaattaggtcttatataagacaatagtaaaaaggaaatattttctccttagttaaaattaatgaacaagtcccctgaattaaaataaaataccaaatcgcccgtttttaaaacagatttcagtattgaaccctgttaaaaccggtttgaaaactaaagtaatattaaaaacgataacaattaacaacacatcgttatatatacattatgttgtgttactggaatttcggtgttcagttttttaaaccgaacacaccaaattcgtataagaaa

SEQ ID NO: 9920 - DNA, 788 bp, Arabidopsis thaliana
ttcaaaattttggagtttaagacatgtttcctaaaaagcttaaacctaaaaaccccaaactcaaagaagttaaaccatataacttaactgaaaaaagcatgtccagacctatttctcgcaacaataatcaggtacattggacttctacaccacgatagaagctcgaacagaatccacaatctccttcttgagcgacataagaaaagattctttggaagcttttattatggtgtagaagtcacattcttgtgttttattttgttgccctaagctctagtactgtgtaactgtaaatgttgctctctttggatagatcagatctaaactttgaatgaaattcattagttttctaatatattaatataagtaaacgactagatctaattttaaccttgcttttggagtgaatatataagcttgtttccagaatagtgagtcgatttcgaaatattagacaagatttaaatgatatcataaatattcttataacatcataacttaaggtcaacgagccaataaaatgaaaacaaaaccaaacatcgcactccaaataacaaaataaacatacataattatttctcgtcatggctaacctcagcctcaccagagagttcttcaagggacttgcctttgggctctgggacaaggaaggtgaagagcataccgataaagttaagaacaccaagcatgatcaatgagttcttaactccgatgcctggtgggtacctgcgtctaccttggccttgtcttgtgattgaccgcatataggacccaaaggctcaacaatg

SEQ ID NO: 9921 - DNA, 780 bp, Arabidopsis thaliana columbia
taagtacaaagggtttggggaagttgaagaagaaaagaagtggtggaggttcccatttgtttcagaatttcttcagagaaatgaaattaagtcagttctgaagaattttgttgactctgaagcagttgagtcagttttgaaaaatcttgtcgactctgaagctgtgccagcacgtcaatttgtagagtatgcctttggacagttaaagtcactcaatgacgctcctcttaagaatactgaacttttaaacaatactgctgaggactctgaaggagcaagttcagaggattcgtcagatcaacatcgcagtactaatctgagtagttcaggaaagcttagcaaagacaaagatggtgatggcgatggtcacggcaatgaactggaggatgataatgaaagtggcagcattcagtcagaaagtaatttctgggataacatccctgacatagttggtcaaaatatcgtccagaaacttggccttccttcacctgagaaattgaagtggaatggaacggaactacttgaaaattttggtctacaatcgcgaaaaactgcagaagccggttacattgaatcagggcttgcactgctgatactcgagaagcagatgatgaaaaggaagatggtcaggtcgctattaatgcatccaagtcttcccttgccgacatgaagaatgcgacacaagaattacttaagcaggctgataatgtctttggtgcattaatggttttaaaagcagtagtgcgtcatttaagtaaggacagtgttggttcagagaag

SEQ ID NO: 9922 - DNA, 744 bp, Arabidopsis thaliana
actacatgaaagatcggagtttgtctggcatttcatgtgttattattgacgaagctcatgaaagaagcttaaacacggaccttcttttggcattgcttagaaagttgctatccagaaggattgacctgaggcttgttatcatgtctgccacggctgacgccaaccaactttcacagtatttgttcgattgtggtattcttcatgtcaatgggaggaactttccggtggagattgtatattcccctagtggcacagaagagaattctgttgttggccgcattgcttcatatgctggtgatgttgttaagatggcagtggaaatacataaaacagagaaagaaggaaccatccttgcattcttgacttcccaagcagaggtagaatgggcatgcgaaaggtttgtagctccgtctgcaattgctttgcctttgcatggaaagctttccttcgaagaacaatttatggttttccagaactatcctgggagacgaaaagtgatatttgccacgaatattgcagagacgtcgctgactattcctggtgtcaagtatgtaattgattccgggatggtgaaagagagtaaatatgaacctagaacgggtatgagcatcctaaaggtgtgccaggtcagtcagagttctgctcgacaacgtgctggtcgtgctggaaggacagaacccggaagatgttacaggctctactcaaaaaccgattttgattcaatgaatcttaatcaagaaccgg

SEQ ID NO: 9923 - DNA, 569 bp, Arabidopsis thaliana
tgcagagacgtcgctgactattcctggtgtcaagtatgtaattgattccgggatggtgaaagagagtaaatatgaacctagaacggggatgagcatcctcaaggtgtgccgggtcagtcagagttctgctcgacaacgtgctggtcgtgctggaaggacagaacccggaagatgttacagactctactcaaaaaacgattttgattcaatgaatcttaatcaggaaccagaaattcggagggtccatcttggtgtagcacttttgaggatgcttgctctgggtgtcaacaacatagcagaatttaactttgttgatgcgcctgtcccggaagccattgcaatggctgtccaaaatcttgttcagttgggtgcagttgttgagaagaacggtgttcatgaattaacacaggaagggcattgtttagtcaagctggggctggagcaaagcttggaaagttaattttaggctgcttcagacacagaatgggcaaagaggggattgttcttgctgctgtcatggctaatgctagtagtatattttgcagagttggcacttcgatgataagatg

SEQ ID NO: 9924 - DNA, 915 bp, Arabidopsis thaliana
gaagacaagaagacctagaaactagccatttgtcaatacactccacgtggaaagaatgaccacaaagaggaagcactcttatttcttcaccgtcggcgaagtcagtgaggcaaatagcacattccgtcgagtctccctcttcagcggcggcgccggaggttgattccgcggcggtgaaagtggatcttggaagagactgaagagctttctttttcaagcctttgttcggtgacggcgaatctcctccggctgtaaaccgccggagccaagcgcatcgtacgacggcggcgagaccagcaacgcagataagagcgcaaagaagagccgacaagatcaccaccatgtcggattccgctgcgatcatctcctccgacggttgtggtggtggcgccgcgtctcaagtaatcttgacggtcgagtcattgctttttgagctttggagacttttctttctttgtgtgagtttgaagacaagaaaatgtgtggagtgatgaagataagaaagaatcttgatccacgttataatagagacacataaaggatacatacattatgatatacatctttacttatataataatattgcaaacaaataagatatttgtaatatttaatatcgaatctgtatgatgataataatacacgcagaaaagtttggatgaagggaaacaaaattagtaagtattattatttggttgtttattcgaagttattggctgaattagtgtttacatgcaatgtgcatctcgtatttagagtattgttgtttcgtgtggacacatattctgtttataaacaaacattttgctcttaatggagatgcatctatctatctccaacttcttagatcacaaatccatttttttcttaggattataaatagttataaaagtttattttcttttcttgggtatg

SEQ ID NO: 9925 - DNA, 491 bp, Arabidopsis thaliana
gtcatcatcaaagggctcatgctcgtaagtattctcatacatataaaccttaaatataattttttttccttggactcactaaatgcaaacataaaactgaaagaagaaagatggtttatgtttttacatttatattataaagatattatatgtgtacatgtgtagatgaactaacaacttgtgtgtgaatttaatgtatatagagtatgatgctagctggaacggatactgcggccgtaacattggaatgggcgatggcaaatttattaaaaaaacctgaagtgttgaaaaaggcaaaagctgagatagacgagaagattggagaagagagattggtcgatgaacctgacattgcgaatctaccttatctccaaaacatagtttccgagacttttcggttgtgccagctgcaccacttcttgttccacgttctccatctgaagatctcaagattggtggatcgacatacacgtggcactatcgtgctagtg

SEQ ID NO: 9926 - DNA, 832 bp, Arabidopsis thaliana
aaagatttagatttcaattagtaaagttagcgatcgtagcgccgggctgagtcgcctgagcttcagccgccggtttcacttccttcgacggctcaacatgttttccggtaagctccacaggtaaatcagcagcaacacctttcaagtagaaagtgtaaaacagcttcgtaggatacacaagctgacgaagcttgacctgtccataagctccttcaaacacgccggagccaccggtgatagcaagaaacgtgtcctcgtaagtgagataaggtccttgaactgatatgtgaccataatctccgaagtagaaactgtaagaagcttcaaagcgatcacctttcttctctggaacatgttggatcaaaacgcagagacctgcggtgattcctatgcgttttgtgagatctcctgtgtagagtttgtttgtgaaggggacaagatctccgagacaaagctgatctggttttttccctagttttaaaaccgctggactgtttcgatcaccttcgttgaactcgtagacgttaagctcttggatcttagctgagatttttcacaaaataaaaatcagtttttgtgaaatgggtacttgattttgagcttaaaggttgattctttttttgttcttatacctaatttgatgctaattttctcaaatcatgaaatgggtacttagttgtgagcataaaggttaactttttacttacttggtctggagtagtcattgctactgctgctgcaaatggttctgaagaacctccagtggaggaagtggtggatcttgctcgtgtggagagactggactgttagatgagatctttggttatggaag

SEQ ID NO: 9927 - DNA, 1000 bp, Arabidopsis thaliana
caattgttcaagcattgcctcggcaggaacatcacttccggctgcaaagtctcgagttgttaaaaaaacaacagcaagctccacttccagatcggatcttatggtaacagctaattcagtagctgcagctgcatgcatgggtgatgtattgactgctgcatcaggacgaaaggtcgaacctggaaaaactgatgctccacgagtgccaaagactaaacctgtaaaacatgcttctacagtctgcatgcctcagccctcaggtagcctctccatgccaaaggttgaaccaggaacgagtgttgccgcctctatacggtctctagctaatggaaaattgaaacctgttatggcttcatcatcttccaacaaacctcctctcatagctcctcgttcagaaggatcttcaatgctttctgcttccgcccccttggcttctctatcaaggattgtctccaatcagagagtttttgcaggctctgtcccagctactgagattgtcacttgcaaaccagatggtggacagaaagggcaagctcgtggaaatgaagcaagctcatcggctgcaatccagccacatcaaataacctcaagaaacttggagattagccagggaaagcaggctacacaggctcagtcccctaatctcttgcctaggaaagttccagtagttcggactgcagttcattgtgccactaaccaaaagttgatggataaaccatctgatcaaactgtagtacctatcagaggagctggttcgcaatctaaagccaaaggtgaagtaaacagtaaggttggtccggtgatcaaagtgagtagtgtttgcggaaaaccccttgaggttgcaactgtggcagggaccggacagggtgtttagttctttgacaaaatcgttggatactctgttttggagctttcatttgtagtttttattagactgaaagaaagatatgatgtaaaggaagcgattcagtacattggtactaattaatagggtacgagc

SEQ ID NO: 9928 - DNA, 980 bp, Arabidopsis thaliana
gtacattacatacatacaccaaaaacttcaaagcccccacaaatctctaaacatatcacaaacttcaaatttctaaagacacaacccggatccggttccaaatcaaaacacaacccgaaatatgccgatcgggtgggtcaaatccttacattgcaaatcaaaagcattcgacgatgtctatcatcatcactccaacaaaggtaaactcttattgccaagttacagctgcagaaaaaacgttagagacgttgtcaatacacaacccggaaccgttaagaaaaacccaaaaccggacccgagtttaagacgtttatgctcttctcgtcgacccgaattagactccaattctcatcacccgacccgacgaagtgtatcagctcgagcttcctcggaatctgtattgcccgtattgaccgatcttcctgatggtcatccgtcaagaaacgtcgtggagattatattccaatctagttggagctccgatgagtttccgggtcgggttgaaatgatttttaaagttgaaaacgggtcaaaagctgtgacccggtttgaggaatatagagaagctgtgaaatcgcgatcgtgttcgaaagttgattctgatagagttgacggcagcgcgtgtgatgaaaacgcgcggtgctccgctgatgggaatgagatgatgaggttttttccgttgggtccgattccgggagggataaacggcggcgcgtggggttttcccggagggaaaggagcggcggtttgtacgttttccggtagcggagaagcgcacgcgagcactggcggcggaggagggaggagagcgatgttgatttgtagagtgattgcgggtcgggttgcgaagaaaggtgaattcgggtcggattcggtagcgggtcgagctggtgagttgattgtctttgatgtcgcgcggtgttgccttgtttcttaatctttttcagattgtaaaaaataataattattaggggatcctc

SEQ ID NO: 9929 - DNA, 754 bp, Arabidopsis thaliana
tcaaagggcttcatcaagttcacgcatagaaaagtttgaagcctctgatgcttcagctagagattcaagcatgcatgtcacttcagtagtatcgtccaagtagtatttagccttgcttggcttttgcccaactgtgcatgcaaagactagagcattatcacagagtaaccttttcgacatcgcattaccaatcgcttcaaacatgtcttcatcagatctgtcatctccaatacataacacgaaatcaaccggttttccctttccggccattgatgaaaatatcttttctgacacggatcctttgctcactccctattctcacacaagaacaagcacaaacgtctataattagatatcttcgacaaccttaatgctcaaattgagcagaagagaggtaacttacctgaggcttgacttctactatgtagtgaccgcttttgactgccactggctcattagctagaacactctctaaatgctctagcatttccttcgcttgtaaagaaccaaagcctggatctgcatcccgatattgccaaaccaaagcgctctctttgatttcaatggaagagccatcagtcgattcagtgtactgcttcattacaggttccacgatctgcatcacccaaaatcagagctctgccacatgtctccattcttactgcctgacacctaagaaaagaccaaggcatgttctaaccttaagtaggagaatttatatttttaacaagtggtcataaagtagagagaaagt

SEQ ID NO: 9930 - DNA, 946 bp, Arabidopsis thaliana
tgtcacgttgtgtgatttcgacgacaatttgagggtaaggtgagagtctgagagtaattagtacgtaatatagatatgagattgtttctatgacgactatgacggttgttggattctcgtcttgtcattcctagacgactatagagtaattgcggttctcatcccttgtcatttctaatacgtttgtgctatggctttttatcgaaagactggatagtccgaatctctcatgtgtatagggaagctaatcatcttgccgatggattaacgaactatgctttctctttactcctatgtttgcatttgttggagtctagacccgatgttgttagttctattttgttagatgatgtagcgggggtttcgtacccgagacatgtccaagtgtaatttttttattttcttttaataaaacgggagacgcagtctccctcattctaccaaaaaaaaaacaatgcagatatttgcaaatttttcttctttttagatacagagtatatgtaggcatgtagctaaagatacttgatttggtgtgattttgatcatctggatgtaaaaggtatggtgatgcgtctagtgttggagcacttgaggctttggttattggtgttgtggtcattgttaattagtaccaatgtgaagcacctttatcgatttcacagggactggaccatagtgatgcttgagtgacgactcttattcgtcgtggtctaagccgcctctttatcatttttagggctctttggtcgactaattttattttatttttccctttcactagggtttcctgacttgttaaacaagctttagctctccgattaacagctaacagctcttttacactcagaccctttatttttttacccggccacctattatttattttgcttgattttattcattaataaaatttataggaaaaagaaaaatttaaaatagaacaaga

SEQ ID NO: 9931 - DNA, 1139 bp, Arabidopsis thaliana columbia
tttggataatactattgtaacaatattataacaataaagtggatgatttatgattagcgcgttgccattcgcaatttgattaatggaacccacttgcctttacctccacgtcattttcgtttcccatcattcatgtttcagtggttctattaaaatctgtttacacgtttttactattcaccatctaatcaaaccaacttgtataatcttttatggattttaattctactaaatatctgttggatatagggaaaaaatccgaaaaaatcttcatttatttttaatttgcccgtttaatacctgtattatttaatttgcccgtttaatacttaaattcatttttatgtcttttaaaaaccttcatttttaaattttttggcaaaatcagacattcgagttaacggccgttaacattgataacggaattactaaccgcagttaaaacttaaccctatgatatttattgtttatatacaattgtttttctaataataatgagcatattatcttagtccagtggtttatgagaatttacattacgcatcaactcgagatcgaatctcatatttaacaaaaattttggatttttttttttgtcagattttttttggattcctcttctcaatgttagattttgattctaggtcaataatagccaccagagttgacttaatctgtttaagactctttttttgcttctaggtttatttcttctaattgagattagataagagattgacattggagacgtttagaagctcaccaaggaaaactctcttcttgttgagccgatcttcatcaatacccatcgccgtcgaagctttgcgttttgctgccgctcttgtaaccctcacccatatctcttgctccatcatggttgaattgagagagggagatagagagagagatgaagagatagagagagagatgagagatcggatgagtgaaagaagagaaggggagaagaggaagaaaaaggtttcgaattgatagaattagggtttttggtcgcttcagataatttgtggattgtgggtgagaagaggaatttttgaaagtgaaaaattcaaaagaaaatataaaaaaaagaaaaatccaaaagttggctggttatgagattcgatttttggttgatgagg

SEQ ID NO: 9932 - DNA, 1375 bp, Arabidopsis thaliana
tacttaatcatataaaggatttctatatcatatatttgggagatcgaccggataatacagaagaaactatcaagacacacataaatcttctatcatctttgaatatcaggtacatgtcattcatcaatacatgtataagacatactctaaaacatataaatgcgtaacgttttatggagtaatgttctacttggttgtttgctaatcaaatttataacgtctcttgagaaaacagccaagaagaagcaaaggaaagaaaagtatatagttacactaaagccttcaacgcttttgctgccaagctttctccacatgaagctaagaagatgatgggtacgtaacattatttgtttttgatatttttcccaaaacaaagcactagctagtgagattcatataactcccatccatgcactggtgcagagatggaagaagttgttagtgtacccgaaatcaatatcgcaaacttcacacgacaaaatcttgggattttgttggacttcctttgacagcaaaaagacatctaaaagcagagagagatgttattattggtgttcttgatacaggtttatttttttctatatgcaaattgattcgatattattcatttatgcttcttataatttatctaaaccttcctataatacaacaatcaggaataacgccagactcagagagtttcctagaccatggtctaggacctcctccggctaaatggaaaggatcttgtggaccttataaaaatttcaccggatgcaacaagtatacaatttatctcttaccattttctactttaatcgattttaaatacaaactttgatcactagagaatcttgatctctaagcaacatgaactcttgagcaattgttaaagaaaatgtcattgctagaaaaacaaataaggagttagttgatgaatttaagagtttagggagcaaattagaattatgcgttaacataaggagttagttgatcaatttaagagtttagggagcaaattagaattatgcgttaacataagggttctgattgaaataataaatatttaattaatgtaacttcaacagcaaaataatcggcgccaagtacttcaagcacgacggcaatgtgcctgccggcgaagtccgatcaccgatcgatatcgacggacatgggacgcacacgtcatccaccgtagccggcgttttagtcgcaaacgcgagtctctatggcatagcaaacggcaccgcccgcggcgcggttccgtcggcgaggttagcgatgtacaaggtttgttgggcgagatccggctgtgctgacatggacatactcgccggattcgaagcagcgattcacgacggcgtagaaattatctccatctctatcggcggtccaa

SEQ ID NO: 9933 - DNA, 987 bp, Arabidopsis thaliana
tccgttgctgatttagtaacacatttcggttgattaacaataataaaagaacactacattctattgttttaatcgctaatggccaaatttcgttgtcggaatatcatgttactggtttataacaaacataatttgtcgtaaacaaataatgacgatggaatccaaaattggaacatcaacttacatcggatgctcgtcgaacgtgtaggcccaaaagcacttatagcagtttggggcttttccaatatcaaagaagaaagtaggacccaatattagcctcgagtaggtttatattcaatacagtcacttgtggctcatgttccttctctacatcatctctttaatatatactcattttaatagtgttatactattggtatactatatgattattagtataaaaaaatgatgcttttttttttgtttgtccttttaaccaaactattgcgtcaactagtttgttgagattggaatgtaagtacacaaaagtaattaaaacccaatttgattatttttcttattattaaaaaagagagttacattcattaacacacaaatttgttaaagatagaagtacaaatatatttctacttgtacaagcaaaagtagtaaaaagaaaaatggagaaacaatattctcatcgtctcaatatttgtagcgtgaagatctctcatgcatagtcttgtcttctaccttcttatctgcaaaaaatctctgcaaggatctgaggaaatgaacctgtttggttgatatattaataaagctacttcttcctttaattatcttctttaattatgttttaaactagaagcaaccgaaataaagagagaaaattaaaataaatgaaactccgtaagagaatctgatctttgcatcggatccggacataacagattgcggcggagggttgtaatagtaaaacggaaaatatggacgatagggtttggaggcggtgtataagggtagtttcctccacttttaggaggt

SEQ ID NO: 9934 - DNA, 745 bp, Arabidopsis thaliana
aggaataggacccaagaaacagtaaaagctcctctctctttcttctcaaaataaagaaaccattttatgaaccttcttatcctgagagctattgttattcatttagtccttttgacacctaactctttgtgtcaatgtaacacgataagaatcaagataaagtttggaaaccgtcataggaggtgtatccataattgacaggtttcttgtgttctgatgttcagtctccagcccaatgatttcccactagacacacacgagtgtttacataattcttgtgtttggtatttgacaatttgttattgcttcggatcaaaaacgaggtaaaagttgtcactttgttataatcgtaatataattgggccttatagaaagcccatttaaggtttaatagtgtcgacactaataatcaacaacatccaatacaaatgtccaaagactcaacctagctcccaatctatatacatcgtccactttcgaaagtcgaaacccttttctcaaacccgaactaaaaaacgaatatccaataatattatttatccaaatttttatatatcattgggcaaaaaaaatgatttaaaattatcaaaaaaaaaagaagagaataaaaatactttcatctttttttttttttacagaatacgagaaaccctaataggcaaaccgttaggaaaatcaacaaaaggaaaagcaaatggtttatcatcttctgctaatcccaattgaatttaagaactagatgatg

SEQ ID NO: 9935 - DNA, 635 bp, Arabidopsis thaliana
acactttgaggcagaaggttaacttggataaatcaaagatcttttttcagagaatgttcagcgagatttggcgatgcaaataagcgatgtgagtgggattaaggcaactaaggatttggggaagtacttaggcatgccagttctaaaaacgagaataaacaaagatacctatggggatgttattgagagagttacgtcgagactttcgggttggaggagccgttttctgagctttgcatgccgtattactcacacaaaggctgttttaatttcgatcccagttcatgcaatgagtacaatgttgttaccagcgagtattcttgtgagacttgataaactgtaagaatcatttatttggggcagcaccattgagaaaaaagcaacatttgatttctgggaacatagtttgttgggccaaatctgatgggggtttgggaattcgagacacttaacacatgaacaatgctttaatagctaaagtgtggtggcgggtactacatgataggagtagtctctagtcaatggtgctaagaagtaagtatagagttggtgagttcacgatcactcttggttggtgacgaagagaagatggtcgtcaacttggagaagtgtagggagtgggctgcgagatgttg

SEQ ID NO: 9936 - DNA, 553 bp, Arabidopsis thaliana
tacatttgcaatttgagagaatgtatttcctcttcttattgttcgtttagcagattttaatccattgatttgttgattagtgtgagaatcacaatcaccacagtagcatcagagtcggcattcagcgttggaggtcggatgttaaatccttttaggaatcgccttcttccccaaactgagttagcattaacttggtactcgcaattggctatgtggatatgcagaattgtaggcttgaaagtataattgcaatattaagtaattaactaatgtgacttcttctctagtgtttatatgtgcaaagggagaatttcattaatcaaaggtttaaactggttgatccgggtactatagaaaaagagataagacttgatcttgctagttcatctgctagtcgattcgcacttcgtggaacaaaggaaaagctaacatctgcaaatcctagggataaattgaggatgtaaagatgatccatagaactaggttgaaggagatcagatgtgatggctgtgattaattgttgtgaatctgaggccattgagagtttggtgat

SEQ ID NO: 9937 - DNA, 1377 bp, Arabidopsis thaliana columbia
  unsure (1)..(1377): unsure at all n locations
ctcaaatttgatggagattaggtatttacagacttcttcttaaaccctaactttgtttgttctactcaaacaatttgagttccactcaagaggttatatataatgaggtaaaaacaacttatccacatcgataacacaaagtaaacccgagagaaaaaacgagacactgacgcaataatgacacagaccagaagagagttttttagttgtttttaaattaagatactcctacacgacattgtacttgcaaatccagaatgatcacaccataatgctttgttcagacgtactcgttgactcgaaaggctgtcactttcaaaacgaaatctctggttctgagcagctcaaacacacagacgtctccttctcctaagttgttctctagagtgaattcgtaccatccttgactgaatttggctctcccggctttgtagagacatcgaacaggccattgtttctccgcaagctggactttgatgaacccggagatcccacttaggtacttctcagcaaacccagaaggaagatactgttgagagaaacagaaacagaaggcttcttttagagatcagtgaagacaccgataagatttagtcttcctaagatgtttttttattaccatgatgcaacctctgtatagataggatggtcgcagaaccactctgaagaaagggtttgttggttcgaacgttttggctgcattgatggctctctctctttcttctgcagtcacggttctctttctcgcagaagcactctcgtagaactttgaacggttctctggatcatcatctcgcggacgtgatgagtttatttcctctgtaaggacaatatcaaaaggatatatgtatcatgaggaagaatctgtgaatcctctgaaaacgagtctgaagcatttcaaagaggaaaagtgcttaccaggatcagcatttttcttcttcctccctctctttttaggtatttttggggttggcgttggctcttcagctggagataaggaaaatatcaagcatcaacctcaaaagaatgataagacgcgtaatcagcgatagataaagggaatcagttggttataaatatcacctttaactggtccagtgaacaaggtttggatggctgaactagcataccctttgttggctggtactgtagactcaggaagtggtgatgggtacacagaagaaggaaagatgacctcggcatcttcatcttcaaggtcttcaaacaaacgggcgcgtttgaagtggttgtgagcggaatccatgagaccggtggaatggtaattgatctcagagtgggataaattgaaaatgtagacgctgaaggcagagtttccttcatatctanaaatcaaaagataaccaatgcgaatggagt

SEQ ID NO: 9938 - DNA, 498 bp, Arabidopsis thaliana
ttttttcagagaaaaacttagcaaaaatttcacgcattcacataatttctcagagagaaacttagcaaaaacttaaactataggtcatatacaaagcccactaggcccatatcatgatccatcatatatataccttgagctgatcaacaaaacgctgctgctgttccgcaggatcattcaactcggtgtaggcattacaaagctgcagccaaacaaaaatcatgattcttatataaaagctcacttcatgttggttgacgaacaactcaaatcgttcagtaaggaactcgttggatctgtgacattttgttaagaataagaaacgtaatctctatttcttaacttccgatataccgtttcataagagattgagccaccggcacatcaccgattcataactctctctctcacaagcgacacatacgtcactgaacattcatcaaacaatgcattaaaatctttctttagaagctactctggtcttttatactttgttat

SEQ ID NO: 9939 - DNA, 876 bp, Arabidopsis thaliana
catgtttattctcatataacagaaagtatcagtgcacagcacaatttctctaacagtaaacttatatccaacttttactttgtatgtgtcgtcgggatttgaatgtgtggtatgatattttattttagtcttctataacaattaagtttctataaggttggatattaatttgctctgtttttattaccctagaaaaattatattagtgggagtcattggctagttcacgtttggaagttatgcaatttttgaggatcttgacagtttactttctttgatttcagttataattacttttctgaaattaagctctaaaaataaggatcaaatggatacttaccttagttatcaaatcaaagcaaattcgatatggacgaatcaacatcacaatcgtcttctttagtgttttcaccatcttccacctctaacttacttagacagctcctttccacctgtttcttctctctctgtctttcttttttctctttcttcttttatattctccgacaaaagaaaaagtacaagatacccagaaaaagagtgtagaaactacatttgttcttcttctctgttctgcttcgaaattatgggttcctctgtttctaaaaccgcttcctctgcttctgcttcttctataacatcgattttgaattcacctccggagacggaattcaacatcccttcttcatcggtacctaaagctttcacatttccgatgccgtcgattcatcatccacctgctaaaaaaggcgacactacaccactttgtctctcttacatcgaccacttacggttctcttgttctcgacgacagacaaacattgcctcacatctccgtttccgggaagagtacaagaagatgcctgaaacagagga

SEQ ID NO: 9940 - DNA, 1242 bp, Arabidopsis thaliana
aaattaactgagagatgaaaagggtttgttaccggagtggaagagattggtgctaggttcagcctgacgacgagccggtggagacagaaaagagaaccttgaagcatttgaacagaacagtcgtctcaaaccaaccggagacgaagctacttccgtcacagctctagatatcgctggaagtctcatagccatcgccatagattcaatggattgatttgatcggtcgtattgattcttcttcggggggaaaaaaggttttaactttgaaaagctaaaaccctaaaccaaaaagcagagaacaaacaaaatcgatttgatgcgaaaatgagtaatttacttaaggactgagaagatgacctaagaaaataaaaaatagggtaatattactgaataaccttttaactgtaaaatagttaagaaaataatgtttgacttgttttctatcagaaattaaccatagactgattttttagaagagggacatttaccaaataatcatttctatattttttcagaattagagaacaataggtagcagagaaaatgtacgagggttgaggaggcattattgcaaaaatgaatatgattatggtgaatagcatgatatattgccaaatatgaacattattgtgaaagatttcactcaattttattgaatagcatggtatattgagaaatttggacattattataaaaattcacgtaattttgttgaatctcatgaaattatatagaacataattacaagatttcatgtgatattgttgaatagcatgaaatatatagaacataattgcaagaatttattcgattttattgaatagcatgaaatattgataaatatctctatattagttattaaagcatggtggcgatggtgtcgagaatgatggtgggagattaaatctgacttgtggcaatggttaagaggatggatgtggaagttgtgttgatgttgatggtgggggattagatttgagtggagtgggggtaagttgtgttgatgttgatggtgggggattagatttgagtggagtgggggtagtggaggttgtgttgtgagattaaatttgacttgtggccgtggtgtcgaggatggtggtggaggttatgttgatgatggttgagggaatattgatttggttggagtgagggtggtgggcgattaaatcttgactgtcggtagtgtcgtcgagggtcgtggtggatgatgtgttgatgatggcgagaattaagatgttg

SEQ ID NO: 9941 - DNA, 644 bp, Arabidopsis thaliana
gagtattggatttaacaaacatttggtttcaggtccggatggttgaggatgatctcatgtacaacactttccttgaggtgtatgagaatcactgtgcacgaaatgaccgagaggcagatcttccaattacccactttaaggagcaactcaatcaagctatatcagggcaaatatcagcagaggcaataggagatcttcgtctgcaggcatatattgacatcacaaaaaccttggtcaatgacagtatcttttctcagtacatgtacaagacgttgatgagcggaagccatatgtgggctttcaagaaacaatttgcagtccagctagcagtctccagtttcatgtccttcatgctacaaattggtgggaggtccccgaacaaggtcttgtttgcaaaaaacaccgggaaaatgttccagacagattttcaccctgcttatgacgccaatgggatgattgaatttaacgaacctgtgcctttccgcctcacaaggaacatgcaagctttcttctctcagtttggagtcgaaggtctcctcatgtcatccatgtgttcagcagcgcaagcagtaatctcctccaaggtaaagggataattcaaaaactatatatacaaaaactaagtgatgcaacaagccactgat

SEQ ID NO: 9942 - DNA, 844 bp, Arabidopsis thaliana
tactcggaaaacatgggtctattttcttcatgaaaagtctgaagcgtttgccacattcaagatcttcaaagctagtgtagaaaaggagattggtgcgtttctaacttgcttaaggacagatcgaggtggagagtttacttcgaatgaatttggagaattttgtcgatctcatggcatctctaggcagttgacagcagcgtttacaccacaacaaaacggagtggccgagagaaagaataggacgattatgaacgcagttcgatctatgctaagcgagaggcaagttcccaaaatgttttggtctgaagcgaccaaatggagtgtgcacattcagaaccggtctcccacggcggcagtagaaggaatgacacccgaagaggcttggagcggtagaaaaccagtggtagagtattttcgcgtgtttgggtgcataggatatgtgcacataccagatcagaaaaggagtaagttggatgataaaagcaagaaatgtgtttttttgggagttagtgaggagtcaaaagcatggaggctttatgatccagtgatgaagaaaattgtgataagtaaagatgtagtcttcgatgaagacaaaagttgggactgggatcaagctgatgtagaagcaaaggaagtaacattggagtgcggagatgaagatgatgagaaaaattcagaggtagttgagccaatagctgtggcatctccaaatcatgtgggtagcgacaacaatgtgtcatcgtcaccaatcttagctccgtcgagtcctgctccgagtcctgttgctgcaaaagtaacacgagaaaggagaccaccgggttggatgggggactatgctagagtc

SEQ ID NO: 9943 - DNA, 630 bp, Arabidopsis thaliana
cggcttcgcgttaaccgcaacctccgccattttccctccatacggattgaaaacaagcccgattttccctaactcaatcatcttcttgaacaaagactcaatccctttcttcggaatcgcagtcgcgacgtaatccgatttcctcttaccgaaactcgaggtatcgagattccgatcaagaaacactttaggatcaacctgagtagcattaagacgattgtcccaccataaagcagactgaaaccaagtcatctccgaacaattctccttctttaaacccaattcaggaaactccttactaagcaaagcaacaacttcatctgctctgcctaaaaacagagcaaccacagaagctctcacagtctttaccttcttcctcgtcactggttgaatcaacattctcataaacagattcggatcagttttcggaccaaccgattgccatttgtgaaccatatccacagctcctgaatccatatactgctccactctaaacaccgtaacgaccgatggcacaggaacaagcttgactttgtatccaaaacgacgccgtagctacctcctcctccaccggtaatcgcccagaaaagatcctccccattgctttccgatctaaaaccgaccgtttac

SEQ ID NO: 9944 - DNA, 893 bp, Arabidopsis thaliana
cccgggtaaagtttcatttttggttttgaagtaacctttttctaatcttttttctttgcctaattgcttggttttggtcttagattgctctcaatcgcagaggagactttggcagagttcctatccaaggctacaggaactgctgttgattgggttcagatgcctgggatgaaggttatacgcatctcgtatcattacttaagtgttattttatctgttgatatctatggcaatatgtgaaatattgaaatgttgtgtgttgtagcctggtccggattcggttggcatctttgccatttcgcaaagatgcaatggagtggcagctcgagcctgtggtcttgttagcttagaacctatgaaggtaagaaagggacactcttttcgttgctaaagatacaagtcataatgtttcattttcaaccagtttgggttttttgtgttcttacagattgcagagatcctcaaagatcgaccatcttggttccgtgactgtaggagccttgaagttttcactatgttcccggctggtaatggtggcacaatcgagcttgtttatatgcaggtgaatcctttagcctcttcatggtttagttttctatcgtctaacacttgaagatgaatggaatagttgtgacatttgttcagacgtatgcaccaacgactctggctccggcccgcgatttctggaccctgagatacacaacgagcctcgacaatgggagttttgtggtatgcagctctcataatgtctagtgtttacagaaaaactctgggatcttgatgtttttcatatgtctttaaaaggtttgtgagaggtcgctatctggctctggagctgggcctaatgctgcttcagcttctcagtttgtgagagcagaaatgctttctagtgg

SEQ ID NO: 9945 - DNA, 675 bp, Arabidopsis thaliana
catttattgcgacccgaagaactaacctcaaccactccctaaccttataaaagctcttgctgtttctatggataagagaatcccattccatttaaaagggaaagagttggagagaggttactctccccctccccgtaagagaattagagccccagatctggatacctcggagcttatagaagccaattctctaactctcatgggccgactcactaacccatctgtgcaacgcctctggtctctattccctttcctctctaataggtggaacctgcgaggtaaagccatagggtcagatctaggcaaaggttgcttccagtttaagtttgattttgaggaggatatgcaaaaagtcctggagaacaggtcatatcactatgaccaatggatggtgatactacagaagtgggagcctgttatatctgactccttcccgtccctcattcccttttggatagaaatccagggcctacctaagcactattggcaaccagaaatgctaaaaaccattggagaagaattgggggagatcttggaaatggaaataacttcggccacagttaagttcaagctgctcatcaatggcttacaacctttagtcaaagagaccattgtggactttcctgatgggagtgaacacttgtgtatctggattataagaacctcaagaaccat

SEQ ID NO: 9946 - DNA, 638 bp, Arabidopsis thaliana
tcccacttctaaatgctacttttttttttattagaaaattaaaatcaaataccacatcatctaaaacattcattcagccggatcggacaatcttggccattcatttataaaatcattactactaattaacattgtaaaccaacaattaaatgcggtttaagcttagttaaagttggccttaggatcgagcaagataagccaaagctccaacaagtggagcgttaatgtaagttgctggctctgaccgtccgtagtcggaccgttcgtcagggaattgatcgttctggtccggaccaccgactactgcaccgactaggtcgttaggattaggagattgagaggtaaacaaggagaagccgtcgtggcactggatcctggtcgggtggactgcaacggaggggagagatgagccacggtggtgaatccgacgtggatatttcagaccataaccaaccatgtatgacatcttcaacgggttgcctccaagtagataatccactgaagcatatatcacatgaatcaattaattaagcaaatactactctttccattttatattgggatattaattaattcatgctttacaaaatacaaaatttatttcatttttgctaattatcattataataaagtataga

SEQ ID NO: 9947 - DNA, 575 bp, Arabidopsis thaliana
tgttattaacattcaaattcaaaagaaaacttcagctgttgaaagatactaccttgacgattgcaaggagcatggtcaagcagctataagttacatgagtaactgccattataaagatgaagcgatgcaactgttcaaggccttcatatgaaacaaacggctcatgcccctgcaaaattgaatttagttagttccttagaaatgatcagaagattctaaagccaatgctaaagatctcagtcatttaagtttgaacctcgctgcaggtggttcgttttatgacatccaaccttctcctaaagatgttgaaaaagagggattttgttaaaagattccgcttgacagttgaaccgctttcgagctcctcttggatctcagatcgtgtacacggaagaaatctgtcattgtagaaacttgaagggacacatatattggctattgtacttgaggtagctgttaatagaagtgaaatgaagccaagcagcatcaactctgtaagaaaataccatttcaaaacacatcaaagatttatgtaacacacacacacagacactaagaaggatcatatatgagtt

SEQ ID NO: 9948 - DNA, 908 bp, Arabidopsis thaliana
ggattagcgtgtagtttggttctttccttttgttttttgttttctttttctagaagaagacaaattccaataattgaatagtggaaggaagttatctacacaactcatttggtttggtccacaagcttcactttagggaattcgtcttgacttttgactattccttgtcccgcaagtatattcctcttcttgttatatccttcaagcaaccttttttatcatttcacatctttcttcttccttttttttgtgtgtggttaaggtctcatcgatcaacggataagatgaagcgtgaaggcaaacaacacggtatggtgaggacttaccggattctgcctccgtcgctgaatccaaggccggaatcgaagttggtcaaccctttgacttcacggccaaccgctggattatttaccaaagtgacatcaaagccgaccaatcactcgaaattcaccgggaaatgtggtcaagcaaggtgccttgactgccatatgcacccggtcaccaaatctaaagccaagactaaaggctcttcaaaggtgagaacaaatgatgtcacctataagatgctgacttggcaggtcgctgccggtgggcctagacccggtttgaagctttccgggttctcggctaccggaatacttgatcttatgtctgatgattatggttatgatcatgattatgattatgatgaagaaaatgaagaagaagaaaacagagggagtgttgtagaagaagttgtgaatatacagagtagtgatgatggtggtgaacagaagaagaagggtcaaatgatgatgatgatgatacagatgatgatggaaggatgagtttttgtgatgtggggatgatgatgatgatggatcatgtggaagaatatgatgaaggatgctacttggttgaagaatgat

SEQ ID NO: 9949 - DNA, 673 bp, Arabidopsis thaliana
  unsure (1)..(673): unsure at all n locations
aattgagcagattggttaattgagtagagaatctccacaagagtttcagtgaaaggtctaccctttatgactgcatcttgagctcgacgaactctagctgccgccacgagtctcatcgcttccgttatcttctgggtattcttcacactgtcgattcgttctcgtaactctcggattccagctcgaatttgaattgagggcaacggagatctcgacgaaatccggtttggtgtcagtgattgaaacggataataacgaactggtttcaaggtagctatgaaagagtaggactctgagctcgaagccgaattcgaattcgaaggagacgacaagagccaagaggtcgagatcgaacctgtcattttcgtttgggaaagaagaccctgaacttgagaggtttaagatttcatcttctcgtgaagaaatgagcaaagaaagagaacttgaggggttttctgtaattatcatgtttattaggggtcagtatataaaaattactacaaaagtcaaaattagagtttttgtttttttttttctatgagaaaaacgagggaaatatcaataccctcctaaatcctaataaaaattactacaaatagccaaattaatagaaaccaaaaacaacaactatagtcagcatatgnaaatacgaaatttctttttaagatcatat

SEQ ID NO: 9950 - DNA, 600 bp, Arabidopsis thaliana
  unsure (1)..(600): unsure at all n locations
nnnnnnnnnnnnnnnnnnnnnnctaaagggaaaccagtgcagcctgctcctgaatttgccagccctgttttgcggctaaggcacgcaaggctgtcacgccatgattaaaaattcggcgtgtgacctcgctgtctttaatcggcccaggcgcaaccacggtaaaggagaccagtggaacaggatggcgcttgagccagacgtgttgccgtgcttgcctttcatcccggctgacgagcagctcgggaattgataccgcatggtggctggcgagttcaggaagcaggtgcatggcttattccttcacctgatgcacaacatcgatcaccgagccatcgcggtaacgacaacggcaacgacgcggtctgtgaattcaatcggctgtggttcccggtcagcagacgcgcacgttcgcgcacgcactcaatggaaaccactttaatgcccgcttcctgcagacgttctgccagttccggacgtgccgggttaactgcgataccgtggtctgtgccagaatatcgacactggagcctggggtgatgcaggtcagtacgttatcaccagagtcggaatacgacagcgtactacggcgcgacgatgatg

SEQ ID NO: 9951 - DNA, 1207 bp, Arabidopsis thaliana
caaacaaatttgttactccatacagagttcgaccacaacaaagatacaaaaaatcaaaacagaggctacaatttgtaaatgtagagaatataccaatataccactttttacctcatccatagttggattgacaacaaattgcccacatatccttcctatccggatgactccaatgggccctccccatggaacatctgatagcatgagcgcacgtgatgatgcattagctgccagtatatctggatcctgcttcccatctgacgatagaacacttgccattatctgcatgtgacaaaatttacagatgaagataccaaaaaacaaactttcacatagatctatatcccaaagattttttagaaattttcatacctgaacttcatggtaaaaccctgtaggaaacaatggtctgattggtctatcaatgagccggccacataacagctcccgctcctttggtgcaccctctcttcgcatatacgtatttggaatcaatccctgagcgtattgcttctcttgatagtcaacctgacagtagtttccaagaagaatcataaacatcagtttaaacaaatcaccatcaaccattacagataaagcaatttcaatagcagattcctgagagaattctacaaatgtatacagcataaaggtaccaaacatctctagaccatttcttaattcctcacagatcatagattccttaagacaattcattcaaaatcggtaactaaaagggaaatggtggggagattagtaacatacagtgagaggtaagaagtcccgaggcgagtcggtcttagcacaagtaacagtagagagaactttggtctcgtccatgccgagaacaactgaaccattagcaaagcgagcgatttttccagtctcaaacgagaccacgcgggatccgacttcgaattcctccttaaatgattccaaaattttggttcctgcggagaccggcgagtctggaacagacggagcgaaaccaaggcggccggagcagatggtgcgaaaccccagagcacgccatgcgaggaaattaggaagagaagctgaactagctcgattcacaatcgatgacatcacacatacacagagagagtgagagatgcggagaagagagggaatgagaacggaaaagggtttacgcaccggtgaagtgaggactgagccgacaacgaaaactaaaagaagggttttagca

SEQ ID NO: 9952 - DNA, 671 bp, Arabidopsis thaliana
tattcttaagcttcatttattcatatagatagatagagagagagagtgtgtgtgtgatcaagcgtagagctcaatgccccaaaacttggctgtttggtgcgtgcggtaattcctctccatgcttttgatcacttccatgtcctctttcgatagttggaagtcgaaaacctgaaaattctcttccaaatctttcaggcttcgatgtctttggtaatcacaccgtgttcctctgaattccccacctcaggacaatctgtgccactgtctgtttgtacttctcggccacatcctatgaattcagacagacaaaaggtttaattatttaactgtttcagtccaaacttttaaggtttagaggatggggcttactttgagaactgggtcatccagacatgacacggtgccaaaccattcggcattggctgtggcacctcccagaggagtatgagcagtgacacagataccatgtttctggcagaatttgactagagaatcgcgttggaagtaaggatgtgtctcgatctgattcacagcaggtttgatcttggagtaaccaagcaatctctcgttagaaagacatcatagttactgcaaaaaacctaatggtcaaataattcatatattggcgactaaacaagagacttgtaatgatagtgagagaagttgacctg

SEQ ID NO: 9953 - DNA, 952 bp, Arabidopsis thaliana
agataagaaattgaagacagttgaagagagaaattaccgctaacgaagagccggggagacgtaagagttgagcagcggcgaacacacaaggatggagaagacaagaggctactggatccggcaacgagacggcgaaactggaaacgaacgccattatagcaagtgggacaaaaggatttgagatcggaaatggcaatctttagggcttatcaaagggttttaacttttataaatcagacaaaacgtcgtcgtttcctctgttttccacaggttaacaaacatgaaagaaatgatgatgatacagtatacacatatgtaattgaagtataatttcaagggaaacaaatttgaagttaagattgttatcttcatccaaatcttacataagattccacaaacattacagaaaacaaaaagaatacttctgaaaatgatttattttctggttaataaaaaacttagtcccaagaacatgtttatagctatctgttttctatttattctctttggtctctatacaaaacatggaactgttctgggacttctttgtaaaacctactatctatattcaaaaatattacaaaaaattaccaaaaaacggttccatcttccagaaaacaaaaacaaagaagaggaaagatccgaacaccaaaatcttgacgaatcttttaacgaaacagatcagatgagagttgtagattctgataaacccgttgtcgccttaggtactttcttctccagcattgaggttcctttgaatattgtaagctgcacttccttttggtactcctgcaactgcaaaaaaaaaaacaccattgtaatagcttgttaccaacaacatcttgctgcttaaccaaaatctatatctatcgaaactatttgttttcccacgacttgtctgaatactaaaaatctaaagaaaaacacaattccaaaagaaagaacaaatcac

SEQ ID NO: 9954 - DNA, 1621 bp, Arabidopsis thaliana
  unsure (1)..(1621): unsure at all n locations
caatgttccaaaacttggctgggtggtcgtcgcggtatttcctctccatgcttttgatcacttccatgtcctctttcgatagttcgaagtcgaaaacctgaaagttctcttccaatctcgcaggctttgatgtctttggatcaccaccgtttttctctggttccccacctcaggacaacttgtgccactgtctttttgtacttctcggccacatcctaagaattcagataaacgcagtccttttttaattgtcaaaggttcaatccaaacttttaaggtttagaggatggggcttactttgagaactggatcatccaggcatgacacggtgccaaaccactcggcattggctgtggcacctccgagaggagtatgagcagtgacacagataccatgtttctggcagaatttgacaagagaatcacgttggaagtaaggatgtgtctcgatctgattcacagcaggtttgatcttggagtaagccaagcaatctctcgttagaaagacatcatagttactgcaaaaaacctaatggtcaaaaaattcatatattggcgactaaacaagagaacttgtaatgatagtgagagaagttgaacctgattccaatgctgcggactaaacccatagaaacaagcttttccatgtcgtgccatgtagtttccagagagatggtcgtgtctatgtccaataccccgtcatcgcccaaagcactatcggttgtcctactcctgcaaagcatatatagaagacacttaagaaaacttgatctcagtcagtgaaaaaggaggacttgtaataaaacgaaatgcaatggtctctgactctagactaataaaacgctaatgaggcagaggcctcaccggtgtgtttcgttgctacgggaaaatgaacgaggaagagatcgaggtaatcaagttgaagtttcttgagactgtctttgcaggcctcaatgacatggccatggtctgaattccatagctgcaaaaaaccaattcagatcacagatcagagcttgctcacattaaattgagatcatagctgtatagttttcgattggaccttggttgtaatgaagagatcctccctcttaaccagaccagtcttgaatgcttctgtaagagcatcaccaacttcggtctcattcctataatcagctgcaccaaggaaaacgaacacaccaaaatcaagacttaaaacaacgcaaatcacacaatagaattaaaacaaagctgaactctgtctataataagtaacaagttaaaagctattatagaacaatctgtcatcaatacagcaatagaatctagatcattctatgattccaaatacttagaacttcagaatcagatgcaaataaagatgtacagagagcatttactttagataacaagtttatagagactatgaaaaaaaaaacaaatcttaaagacatattttccaagaaagattccaactatcaaaaagttaaaacaaacccagtattcaaatcacatatttagacaaaccagaagcaacaaagatctgaaagagaaggttttgagagaacaagtgaataccagcacagtcgagatggcgatacgaantcttgatggcattgaggataaggtctcgaatccct

SEQ ID NO: 9955 - DNA, 524 bp, Arabidopsis thaliana
gtatttggaaatttggaatcgtagaatgatcttaagtctttgctgtatcacagacaattgtttttgtttctttgcatgtgagtgagttgctttgttctgtatcctgatttatgagtatcttttggggttacttggttcagctaattataagaacgaagctgaagttggtgaggctcttacagaagcattcacgacaggtcttgtcaagagggaggatctcttcattacgactaaggtccaaacggctttaagttaaactactacatacctttgatatcagttcatttcagatcgaatgctctctgtcttggttttgcagctatggagttcagaccatggccatgttattgaggcatgcaaagacagtctcaagaaacttcaacttgattacctcgaccttttcctcgttcatatacccatagctacaaaacacacgggttaggcttcagcattgttcatgaatattatcagtttcgagtagagccattgcatttcagccttgttactggctggaaaattaagtt

SEQ ID NO: 9956 - DNA, 548 bp, Arabidopsis thaliana
caaaacagtatttatgcaagtaattttaaactcgttttaaatttgcatgatacgtcagtgattgagtgctttacgaagcaaaagttttgtaaactcataaatataatagtaattttactaattagcatatgttgtatataatagtaatttttctaaaggaatttattacaagccatttgttttgccaacgaacttttttttttatttaatcatccatatagccgaataattatgataaaccaaatttcaatatttttaccttcttgcaataataaaattcaaggtgcggattatagtcttccggctcatttctcgccgatacattttccaatgggtaatgcggccaccggattcttcattatgtttgctttaattgctggagttgctggagctgcctcggttatctccgggatcagtcatctccaatcatggacaacgactagtctcccggcagctgtctctgccgccactattgcttggtcgctaacacttttagccatggggtatagacttttaacagcacttttgacttaatactcaatcatttt

SEQ ID NO: 9957 - DNA, 234 bp, Arabidopsis thaliana
gcctcaactctaaaagcattggcaaagaggctagagaagaaggaattgttcctcggaatgcgttattagccagcaaaattttcttcaaaagtggcatacctagaaatgcatctgcgggtatctcccccgaaaaccggttattagacggatgcgtagatttcaacgaagtaaacctctgtaccctgtggcattgggtcaatgccgttattgttcatgaagcttatggctcgcaga

SEQ ID NO: 9958 - DNA, 880 bp, Arabidopsis thaliana
cgactctagatgttgctgccattcgattagcaaaagtctctaaaagtgctgctgcgaccacttcaaaggtctttcatttcatcagcaaccaagaccgaccagataaagcatttacaaccgagcgtgcaaagaaaactggcaaggcaaacgctgctagtggaaagatttatgttacaataccaccagatcattttggtcctattccagctgaaaatgaccctgtcaggaaccaaggtcttttggttggagaatcctgggaggacagactcgagtgtaggcagtggggtgctcatttcccacatgttgctggcattgctggacaatctacttatggcgctcaatctgtagcactctctggaggttataaggatgatgaggatcatggagaatggtttctatacacaggaaggtctgcctttcattactcctagattttggtccatttgatttattctacggattgggtatagaaacaatactctttattatgcgtctcgaatcaataatcttgatttattattgttccttatatatttttgtatattttagttctctcatgcgtatagaaatagctattctccaatttactgatggacatgtctctttttctcctgattatgtggggatgtgtcacacagtgggggtagagatctcagtggcaacaaaaggactaacaaggagcagtcttttgaccaaaagtttgagaagtctaatgcagcattaaaactcagctgcaaattggggtatcctgttcgagttgtcaggttagctgttatttgagcacaactccattgaatgcaacgtctttattactcttcaacttgaagctttgagcatgctttagtgatcctaactcttcaattaccctttttctagagtc

SEQ ID NO: 9959 - DNA, 992 bp, Arabidopsis thaliana
tctgcagtaagagctctgatgtcatgtgtatgagccttgacataaccaatatagtcccatttctgagaggaagaaggcttcaaatcttgagaaccgttagtactaccagagagcttataaaggataacctacagaggatgaccagagaattagaatgttgaaaaccattgcaatgaaacaaacacaacaaacatttcagaatagtacatatatttaacttctacaatttgtcaaagtatctgtctctagtatagtggtacaataatagatcccatatattgtcaacacgaaatatttcaatcagcaaaaaaaatctacattaaaaacaggtcttcacaattaccttgataatctgatccatcatcaactatattctaaaatcattgtataacagttactgcattctagtaatttcatttacctgtccatccgcaccagcagaaaagactcgattatggctgggggctgctgcaagagtattgacatcacctttgtgattagagtgtgcttccaaaagggttccatgctcactatcccaaaactggacagttcctgtactatctccactcacaagaactgaacacctagagtaagcatgtagatactcagcaagagaaaaacaaaaacagacacaaagttaaagctgaacattacaatcagtacctcaacgaaagaagtgaccaaacacagatctcagaactacttcctagtccaccaagaccagctgtaattctgtatacctcatgacacgaggtagcgtcccagcatcttatcagcctacaaatgattgttgcaacagaagaaacagttactcagaataaacttaacacgtatatccaagtaaacaatgaatctacaaaaactcacccatcactgctccccgaaaagatcctttttgcatctggactccatgttacacttaaagcacgtcctgtgaagataatattctatgaaactaaattaacgaaacaatgattgacgattgaggcatc

SEQ ID NO: 9960 - DNA, 480 bp, Arabidopsis thaliana
cgggtacgagctcgaatctccactgccgacaagcaagacggcccttccaggattctccaaccaaaagaccttggttcctaacaggatcattttcagctggtataggaccatcatgatctcgagggattgtaacaaaaatcttgccactggaagcatttgcattccctgttttcttagcgcgctcagttgtaaatgctttatctggacgatcttcattgtcaacatagtgaacaacttttgaagtacgcgcatcagccttttcggatactcttgctaacctaatagcagacacaatggacaagttgatacggggattggtaaccatgctttcaggaattacgctgcggcatgttccacaactgctgtgtccctgcgccatccacttcaagtagcatttcaagcaagcgttgtgcccacatggtgtctgatcgagaaatacacaggctatccattagccctgtttatttttgacaagagtgc

SEQ ID NO: 9961 - DNA, 1309 bp, Arabidopsis thaliana
taatgcttgtaatcgtctcagcgttctatgctattgtaatgtcatatccttcaccggacattatgactagcaccaccggtcctctcgctgtcttagccactttagtcacaagctcttgttgtcttccgggaagattcaagtctatgcgatctaatgtttccttctcaatggtttgaatcggctcccattactaacaccgtcgcatctgcagatgccgctagagtcttggctgagtctaaatccgcctcggtgcaagtcacgttgaaacagccacgatgatactttgtggtcaacaccgtcctctcaagtccttgaagcggtgttgtatacttgcaagccacgcctgaaaacataacaattatatttgatccacgttcgaggtttgagtttaaaattaatttgatataagttatgaatttaccttcgtaatttcctatcatagtttttgtgacattagcatttggtccgattacggccaacgtcttgatggcggaaggagagagcggtagcgaaccagctgagttcttgagcaagacaatgccttgccttgcggtttctacggctagttctcggttttcaaccgtgcacacgtccttgggacccaaaccaccatatggctgattcttcgggttaccgtcaaagaatcctaagcgcatcagagtcgcaaaattgtttgaaattgctttgttaatagctgcttcgtcgatcagccccttcttgaccgcattctctgtgtggttaccaagaaagaccacaatttagatccaaacctgccagtatagatttagctgccgcttcctctggagtcttggtatagtgttgtgaaccatacaaaatacctaatgaatcgcaatccgaaacaatgtacctaaaacaaacccgtaggtctggactgcccaatccaagcctgtgagtgaaccgtatgaaccaagcgaaggtttggtccgtacggttgctaaaggttgagggtattgcgttaggctggcttcacagagcagcgactacctcccgctctcagcagtggatggaccacggttcgtcgtcacacaaatccactatgatccgctggctcgtacccagcttgaaccaccatttttttcgttacattttaaattgctaactcattttatttctccctctctgtctcctcgacgacgttctcgtagtgcgctccatttttttattagggttcatcgatttttgcctttatcaaagagacgacggcgacaatcatgactcgtgacgcgtgaccgtgaagaagaaaaccagaagacttaactacgaaacttttaaaaaactgttaaaaggg

SEQ ID NO: 9962 - DNA, 1397 bp, Arabidopsis thaliana
  unsure (1)..(1397): unsure at all n locations
ctttggtgctgtggaaatggtcaaaaactggcagcagctttttctgttttatttcaagttcatgggccggaaccttttctatctcaaactctccaccagtggaactactatctcttggagaatccataacatgaaaagaaatctagcaacacatcaagaaagtaaaaaatcaagagacaagtacagatatatcaaagaaaggaagagtttttgactaaacaaatacctttgaattttgccacactggtagcatccccgaggtaacctttacctcaaagttagaaagatagcaatgtgatctttcagggggcttctcagaacagcttttcaaatacttatcttcactaaaatggctgttcatgtcaagggaaagacatgcatcctcatggcttgtcaagtgattcgacactgtctctaaatcatattgcttttcagtgatacttttgggaagtcgttcctcagtctctagccagtcagaccttctacatacatcccaccactgaataggctcaactttgaccctcaaatcatcctcctgaacttgaacatgtgatgttttttgcactctcaaaccattttcaggtgattctgtgcaaactgatggcagaagttcatgctgcaccacatggcctgatggagtatagactaagatatgctccaacgcgttagtccgggagttcagctgaaggtcatgagtgacagatttatgaaaaacagcagccacggcacctgatggtacaaaaacttttccagtagcagcagtagtagcattgcttactgtgttaagccacccaaaactgctatactttattctgcttacaacagaaagggcaacagctgttggtggcgataaagactgctgattacttgacaacgattgagtaaaccaccatggcaaggatgaagctggtagtcgggtaggctcctcaccctcgcaaggttgaaacgcagcgtcgctaccagaagagtttaaaacaaatatatggcaagtacccttggatgaaataatagcaacccactgactctgctgactaaagcaaatgtcctggacaatctgttaaaaagagcagaaaaaatccaatcaagcaaagagaacattgaaaagaaaaggacatagatcaaccaaaaagtatacttacagctgaagtgatccctctatgcagtttgaagagatgcacatgagaagattccactcataacttaggtcaccaggtgcattatgtgaacgagatggcatgatctgaaagacattgatattgtcccacatactgaagcagtaaccaatagagttccactaggatcaaaacaaagtgctgagataggactcgtatgagccttgaactgtgatactanagctccagaaacaagatctttaacagcacccctgttggacgaca

SEQ ID NO: 9963 - DNA, 1050 bp, Arabidopsis thaliana
tctgcataccttgtgaatcccacgaaccggaacgcaatctctcggagtctcgaacaaagacaaagaatattgctttcgaacaacaccaacgtcgaagtatataagaccagaactcggcacgtcgactcggattcctttaaccggaaaccacaagaatagctcttgcgccgagattccagacaaatcagagatttgagcagaacctatagtccccgtaatattggcgtcgtaatgtatctcagtctcgtatttagcctcgcatgcctgattcaaataaaccgagaatcgtcccgtttcgacgtcgaaggtgaattctctgacacctttcgggaatatcccgaaggtaatccgtttgccaggaggatctcgtatatagtctcagtctctgatatcgccgtggagatcgagatcccggcgacgagaacgagacatagaaacgcgatttgaacaatacgaagcatcatcggcttattcttcccgaattcacggtttgtgattttgacagatctctctctgctcgtttatcaggaaattgaattaatgggtttaagggaagacgaagaaggagaagaagaagaagacgacattctggtgacagcttgaaacagagtggatcaaaattttatcaaattattgaaggcggaatttggaatggagcagtaatcttgtgcttctcattccatagatggaacagaccaatgaacgatagccacgtcggatgtgtgtccaccaagcagtatttagttaaatgtggcttgtttcgttaagcctttggttctaacttcctaaatttcttacgcgttattggaaaaagtaggtggaccgtatcacatgggaacagagtggatctggccggacttgcggctattcgaatgtttatagatttttttctgtcttaaatgcctcataaaatacatagaagcaatgttttcttcaacccaaactaaaccaaacaaaatatttggattaatattgaccggttcgattgaacggtccagttagaaatttgggcttgtaagtatgtaacttatctttgggcttataaagaag

SEQ ID NO: 9964 - DNA, 864 bp, Arabidopsis thaliana columbia
ctcaatagcaaatattatgtgcatcagggaaactagattactacgctactaactacagttttaaaatattaattagtatgtcggtaaattgaaacccgatatagatgcttgactttgactatgtctttctatgtcttggcaagtcacttggtacatataattaacaactatctaaatatatgtacctcgttaaaccgtaagaaaattccaggaaaatcaatcagattttacataatgttgcaagaaaattttcattaagatatattaaaaatgttgggagaagaaaaatatgtttctttggtagacatattgatttataaaaatatctctagtagaatagaattttttgtttttcttctgttgtcacaaacttgcgtaaacgtatgtgtctcgacctagatatattttacatgagttcgatatgcaattatctcgaacattgtttaaacacatcttttgtcattgcatcgtctgttgcctataatatgtcggggaaaacattgaaaagagaacatccgaccgcacaaacggtccaataccatcaaacatcatttaaaaacaatttttataattttattttgtcatgtaaccaatgttgcaagttggcatgtgtcctaactacttaacctgtcagcgactcaagaaaccaagcagcttccactagcaacaccataatatgtatctctaccgctcctctataaaaggcacaaacattgaaagatacttagatcaaggtaaatctacgtgctgagaaagaaactgattttatttcatacatacactatgaacggagaactggtgaagggaggttcaggtgtttccgtaagagaaggagcaaggagatactctgaagacttcggatga

SEQ ID NO: 9965 - DNA, 1265 bp, Arabidopsis thaliana
atcatccaatggtaactcctcctccgccgccgccgtcgccgccgtctcttccagctcttccgttattcgatcatgaatttagaaatcgtagtctctcagagattgataaacttgatctgtctatgaatcacttgatgtttggtattgctggatcttcacagctttgggaacgtcgtaaggaacttgtgagattatggtggaaaccttctcagatgcgtggacatgtctggcttgaagagcaagtttctcctgaggaaggtgatgattctcttcctcctataattgtctctgaagacagctctcgttttcgttacactaatcctactggtcatccttctggacttcgaatctctcgtattgctatggagtcttttcgtctctctctccctaatgttcggtggtttgttcttggtgatgatgatactatcttcaatgttcataatcttcttgctgtgttaagcaagtatgatccttcggagatggtttatattggaaacccctcggagagccactctgctaactcttactttagtcataacatggcttttggaggcggtggcattgccattagctaccctttagcggaagtctctcccggattcacgacgattgtctcgatagatacccgaagctatacggtagtgatgatcgtctccacgcctgcatcactgaactcggagttcctttgtccagagagcctggctttcaccaggtatgtttcatcatctctgcttctatgatctcttggatcttcaatctgatgataatgctaatgttaggtttttgtgacagtgggatattaagggaaatgctcatggtctcttgtcctctcatcctattgcaccatttgtctcaattcatcacgttgaagctgttaatcctctctatccgggattatctacattagatagtttgaaactcttgacaagagctatgagtttggatcctaggagtgttttgcagcgatcgatctgctatgatcatactcacaaactgacatttgcgatatctcttggttatgttgtacaagttttcccaagtattctcctaccacgggatcttgagcgagctgaactttctttctctgcttggaacgggataagtcaacccagtgagtttgatcttgacataaagcttccaatttcgtctctctgtaagaagcctatcctcttcttcttgaaagaggttggcaagaaggtaatgctacacttggaacgtctcaagatccttggtaaaggatgatttgaagacgaagcttctatgtt

SEQ ID NO: 9966 - DNA, 988 bp, Arabidopsis thaliana columbia
tgtgctctaaagtcaaagatgtcccaaaagaaggcagcctttggatcttcacaaattatgtacttcttctcacccttctcatccacatttgagcagtcgtaactgctgttgaccccgacacaacacggttttaacgggttcccaaacctcgaaacacctgagggattcacaaaagatatatatatatatataaggatcataaaagaaaaatgaacattttagctaggatccaaaatttaaacttttctttttgggtttaccaggttccggtcctttgttcttgaaaacagtcaagaacgcgttgtagtggtcaagaacgacgaaagtggatggctttgtctcattattaagcctagcgatggctttatgcaacaaatagttgtgaagattcgttgatgcgttatctgtggcgttgcaacgttggaatgaattaaagactgtgatgctagggaggcatccgagtggctgcattgaaggaattactattttatttactcccaacttgtggatgcgcatggcgttaaccgcaatttgatcaacaacttgcttcatgaatgccggtaactcctgcaagatacaatttcgggcttaagtatacaaaatgtaagtacgtgcacacaaaatctgatatttttacttacggtcagtgggcgttttagggccaagaaagtggcgtagtcgttgccggcgacgctgaccagagcgagggaggaggggagatcggaaggcgagtagatattgccggcgcggaggacacgttggaaataatcaatctgagttgtcatgtttggcaatggattttctttagtcttaaacactcctgttcctccatacgcataattcattccgtacaatagccgttccttccggcataatccttccacgtgtacggaattggtgactttaccccaagtatcttgctgcacacatgcattaaaaattgaatcaaaactttataaatggttcacaagtaataatcgtagtatgt

SEQ ID NO: 9967 - DNA, 727 bp, Arabidopsis thaliana
cagtcatggtaaaatccttggtttatttaataatcagggactcccaagcgcacaaattctctaagtagataattgagagcttgttatgaaacagtataacatgacttatatagccatgtcaaccaatgtaaaatggataagatccttttagtttagattcataaaaaattttttgtaatcgatgaaataaattagaagcgaatccacatacatagaaatagaattgctctaggaatattttttccaaatcatatgaatacgattgaatacgatccgtagtgggttgcccgggactcgaacccggaactagtcggatggagtagataatctccttgttaaaatgaaaaaaaaaaggtaaaaaacccctccccaaaccgtgcttgcatttttcattgcacacagctttctctatgtatacatagaaaactcaatttctttggttccttataaataggactccaaattcaatactcagtaaatttaatcgtagtcttactgtatgaacatttaataatagaaataaagcacttttgataataaaaaataattgattttttttgttatctctgcataaattttaataaatttcgatttcatttatggggtctcagaacccaattattcatgattgaccaaatcattaagataaagaatatccaaataccaaattcgcactcgatataatcttttagaagcataataacttcttgggaagattaaagaaaga

SEQ ID NO: 9968 - DNA, 677 bp, Arabidopsis thaliana
tatatgcttaaaaacagtagatcacagaaatcaacgccagttaggtagttgccggctaataatttggctggaaatggaacttttcctgttcaatctttaaatctttgagactaggaaccttgttaatagaaaattggtgtgttcataatgaaagagtcatcacaagcattgttttaccgaaatttgttacattaagactaggaacctcgctattaatctagttatggaagttggaagtgtaaccgtgagaataggaagttcattgttgtctaggtgtttacattggaggatgttttgttaggctgtaaggtaatcttggaaaatcattgtttttgtgcttaaaaaatgtttaggctggagggttagatacgcttacacttagcagtctatacgatgatggagcctacatagcttcccaacgtcctgtctacggtgcaccagctcccaatccatttgcgtcccatgacccgtttgcatcgtccaatggcacagctcccccacctcagcagcaagcggtgaacaacaccattcggtgcttaccagcagacatatcagcatcagccccagccaacgtatcagcatcagtccacccgtccactaataatagtaaccatttggtgattttggggaatcccggttacccggtttacagcagcaaatactccggttatggtgat

SEQ ID NO: 9969 - DNA, 920 bp, Arabidopsis thaliana
taaagtgaatgcctgtgcaggtgctttccgcgcccgtgatattcagctctggcaggtcgtgttctcacgcggtgttgaaaacggccttcgagtggctcgctaaaggctattctatcgccccctctccgggggcgatttcagatcaggcttctgtgcctggttgattcatggcattttctcgtgccgccagcacacgttctaccgtatctaccactgcctgagtttgtggatcgatttcaatgttgacgcgtgcgccaagttttcccttcccaagagtcgtgcgttccagtgtttccggaattaaatggacgcaaaaacgcgttggcgtgacttcgccgacggtcaggctaataccgtcgatgccaataaatcctttgtacagaatatatttcatcaactgactatcctggactttaaaccagatctggcgattattttctgaggttaatattttcgccacttcagcagtggtcataatatgacctgacattaagtgtccgccaatttcatcactgaatttcgccgcacgctcaacgtttacccaatcccccacttttaaatcgccaagattggtaatgcgtaacgtttctttcatcaggtcaaaactgacatggttgccgttaatttccgtcacggtcaggcagcaaccgttatgcgccacggaagcaccggtttccaggccgtccagcatgtggtcgggtaactccaccacatgcgtacgaaaatttggtttctcgtcaatcgacaccagttttgcggtgccctgtacaatccccgtaaacatacttacaactcctgaaatcagttaagacattctgttcagcacaatagcaggtggaaaacgcccttaccagtgaaggggtaagaatggctattttttcactggagaattaataaatcctcgctacaatagactgaat

SEQ ID NO: 9970 - DNA, 923 bp, Arabidopsis thaliana
gagactttcttcggagctctaactcttacttcgacatgttctccaacccatatgaaaccattgcagccaataatcaaatcaatcccaagactttctacgtaatgaaagtgatgtttgcttctcttaaccaagtaaggatcgaccttcagaagttgtcccttctcgagctgtagcgattcatggattaatcaatgttcagaggaagagactagcgaaaggtataactacatgagcatgtgaccaaatgagaaccaaccttgccatacttctgacttctggcttgtaactgcaagctaccatcatgctgaaagttgcgtacttcagcctaagagtttgaacaaaccaaagagggaacccttttagtcaggttgacgtaactgttaagatatgtaaagattggaacattactaatcacaggacttacacatacgacatcatgctctacaaagatattccgcatattgagttcatccacagaggttcttcgcctctggaacaacaataaacttatatcattgaagccaaaagcaatcatccaaatggcaaaatatcaagaatcaaactgtacctgaataccatcaggcatgttcatggaagaaagcatcagtactccatcctgattgaagttgagctccactctccaacgtttttgagcaacctgaataagtaaagatcaatccagtaactgtgcaatgtgattgaaacctttatgttactcactcaatccgatttcaaaaatccaaacaccaaaacaaaaatctacctcaatgacacggcctaccacaatatccccaacttcaggcttgtacctaaaacgtagatcatcaaaaccatcagttctacttaatctcagagtagagagtccattctattcacattttctgggaaactagacaaattcaaagatcaatcacagacctggc

SEQ ID NO: 9971 - DNA, 515 bp, Arabidopsis thaliana columbia
gggtatcgccacaaataataagattagaacaaaattgaactcccagtaatcaatcacatgagcaataaatcttgtcaacaaatatgacataaaataaatagctgatgtacgactgtgcaacacaaaatcaaggtactcagtactaacaaattcaaaactaagtactgaagcaagtaaaccaacatcaaatgagaggtcaacaaagcaaaactcatagagaacaagctatctgaaaattctccctaaggtgacaaaagaaaaacgatcaatagaaaaaagagaacaaggctgttacatgacgagatagttagagggaagaaaaaggatcaataggaaatataacagatttgtgagttgtcaagattttggtcggtttgggctcaggagggtaagggattctccagaattactccttaggtttctggtctgttctttgttctatgtttcagtgaaagatcaagtaaagtcaattcctgaatcctaacaccacacactagatatcacacaccaagcat

SEQ ID NO: 9972 - DNA, 903 bp, Arabidopsis thaliana
cacagacaagaagaagattttaatactgtatcactaataccacgaatccaaaaaccaaagaagttaccgaggatctgtaccttgagaagatattgtgttaataagccactaccagtagtcccaactcttccaccatgaccaggacctgtcatgggtatctcaggcttgtgggatttcattggatccttcaatgctttctctctttctcgtttacggcttggtgcgtctctgaacaatggtaatgcatgaggattgtgtattactggttctggttggtaatcatctacagatttcttccttggtgcacgtgcaacacagacgcatgcgcctctctcgctctgacttgggtcgtaaagaatgtgagtccctccttggcttttgtctccggatgttgcaaatatctacagcaacagaacccgcttagtgtgaagttgagaaccagattttagaaaaagggaacactgctattgttgttgttgatattttacctgattcaacctcgggtgccaagcgcattgcaccacgctggaagttggagagattccgactttttgaactatctctagtttggtgcgatcgtagaaacatagcaagcctcctgttgtgctgtctttctcgacggatgttccagtcaggatgatttgttcgtctggactaaaggcaacgttggtttgaggataataattaggtagaccctcgaaaacttttagagcttctttcatctgccgcaagtcccagacctgatccaagattcaagaaatagctcagtttctatagctgagcctcgaaaacaggttattatctaaggtttaccttcagagaaccatcaaaactccttgacaacagaattctgccatcgctagagaactttacagaggttatatcatcagtgtgggccttccc

SEQ ID NO: 9973 - DNA, 608 bp, Arabidopsis thaliana columbia
gaataacacaactaacatactggctgtattttaaaaaataataaccgcaatgattaaatataaaagatttaggaatgaagtgttttactgatacattagaaagtattcagaagttgtttcttgggatgtagcttggcatttatctaggtctatgtggtccatgataaccttaaaatttttctttagatctctctcgtgaggaagtggcaattgccaagcgttatcctccacaaacagctttctgcctcagagaaggttgggagttttgcaagtctgatcttgcagcaggtatgtatctgcctctcagagttgtataatctttcattgtagcttgatggtagtgcaatcttcatatgaaaactaaaacctttcactctcccttgatttttatttgttaccaatggtcacacttagaaagttgactgtttaatcaaattagcattttcatccctttcgtactagttgctagttgaacttttatgtgaatagataagtcggtttgtcaactccaagttccgtatttgcatctaataacttttaaatattcatattcctgcaacttcttgtgtgcagaatcgacattctgcttcttagttgagaggtggaag

SEQ ID NO: 9974 - DNA, 1524 bp, Arabidopsis thaliana
gtcactgagctcatgatccaaatctgaagggaaagttctctacagaagaagctactatagtttaaaactcgcctctgaatgtttgcagtggaagggttatatagagaatggcatcactaaaaagcttgttgcaacacttaaacgcttgcaggctaaaaaagaagtaaggaggcttactgttacaataatttcatccctgaagatttttcgcattcatgttataaaaccaaatctttttgcttgtagatttcatcttctgaaatgcatgaagtaacaaagcagcacgatgtggcatcatcttcgagtcaacaacaacttccaccctgaatctgctaatagcttcaacaaagtaactcttctcgaagcaacatttttagggaagaagaatcttgattttctcacttagtgtactgacactgtgaagaaacaccataatccatgcatgatacatatacatgtatgatcaaacaatataaactttttacatagggaaaaagattcaacgttttaaacttcataaagctaatttcttgaatattggacatttagtaaataactctatttgcatttcataaactaattaacttatatatagaatacaataccacaatcctatacgttcatcatacaaagtatcacacatatatacagagagagttttttgttaattaagagaaagaaccaaatacccaataaatatataaaaccttaagttatcatatatcaaagtcctaacctaagatccaaggaacaacctaacgttgtgtctgaagatgtcgccgcaggaacattaagatcaatgcccctgacttggttctcttcctgatctttctcccaatgacatctcatgtgacctcctaacgcttgaccactggagaacactctagaacagatgttacatcgatgattcatcccgagaccaacttcacactcttgcccttatcttgatcaacgatctcttgaggaggtggaggaggaggatcttcggttatgtttttattggcgaaacatcctttgacgtctttatgtgttgctctatgtccgcctaacgcttgatgtgacccaaacactttcttacaaccatcacactcaaaccgttcctcaacttcacttgaacgggttgggacatcaccattagccatcattagtaaacaggaggctatgttatgctcttcctcagatggatcccaactcgaggatgatgacgcagcgtttgagttgatcctacgtttgaagttagaaggagggttgatgccacgccactgacgttcagggtgacatctcatgtgtccaaagagtgccttcagtgacccgaattgtttaccacattcagtacatggtcgtgcgatttgtgaagcatcagggtccggttgcgtgaccggtttaggccttggagaagacgaagaagaaccgacttcgttgttggtgagtttagtacgttttcttcttgggttttgattgtaactaggaagagttacattggaggaagcaaatgggatatcggaattgggatccgagtttgaa

SEQ ID NO: 9975 - DNA, 530 bp, Arabidopsis thaliana columbia
tcttggattcaagatgtttatgttgtaattctttagagatgtggtttttgatgattagtgtgtgagttatgtgttttcacatgtttgtataatgtttttatgaaaatgatttgaaatgcagatgaggaggagcatatgataatgtctgcacaggcggttcttgggaacaaatggtctgtgattgctaaactcttacctgggagaacagataatgccattaagaatcattggaactctaatcttagacgtaaaccagcagaacaatggaagattcctctattgatgtctaatacagagatagtatatcaactgtatccatcaatggtcagaaggatatcaaacgcatcccccaaagaacatctacctcaagaagaagaaaccggtgtattaagtgatgataaaatggatgatgaagcaaaggagcctcctcgggagcaaaatagtaaaactggtgtttatcgtccagtggctcgaatgggtgctttcagtgtctgtaaccaggatacatggctccatgtgagggacctttg

SEQ ID NO: 9976 - DNA, 520 bp, Arabidopsis thaliana columbia
tctacatatacacttttgcgattgacataggtcaaaacaagtttgttttttcgcgatttttaacattaacttttgtaactttattttgaataacgaaaaaaaacatagtgcgattcaaaagtccaaaactgatgacgattaaagattttgtgatataactctcagctaaaaattaattacgcaaagaaaagaccatgtcaaaagcaaacagagacaactaactaactactaccaaactcgaagttattacacacccgctcgtgtccgtaacacaaatctcattgtagtcacgtgcatacctttctactagagaaaccatttctacgtaggcaaaaaactataattacacactggttatctatggtttacgatccgattccgagtctctgacccgatacatcacattctaccggagctaaaccgattcttgatctttgtagatcaaattcgatccacatgttctgctgatgatgatgtcaatcacgtaagctccattccataaggtcggagttccaaatgt

SEQ ID NO: 9977 - DNA, 729 bp, Arabidopsis thaliana
tatatatactttaacaacaacaaaaaaaaacagataatatatactactatatcgaacattacgttatcgaatgcatatcgatccgtgctctttataaagaaacctagagtgtctccgtctctctcactacattctccactgttcacattctctctctctctctggatctctagacaccaatacgcatagtgagcagagatcgtgatggagataaggtattggcggaggttaagaggataccaaaggctagatggttctgccaagaaggcgagctcgggccggagaaatgtaaagcgggtcaaaatggatcccacacggaagagacggttttggaggatcaagatagtgccgaagctaaggatcttgaaaaaggcgtcgcctaagaagcttttaacgtggcttcgagatgcttacgtcaacatgatgctgcgcctagcgaattctcgggtcgtcggatcatcgtacgggtacggcgaatatgggtacgggtcgggtttggcgtcgaaggagtatgacgagaagaagctggtggagatttcaaatcgatattgatggctcaggggaatgtcgtgcaccgtgacgtacctaaactgtcctcaaattcgattttactctcacccattaggtaatttaaatccatatacatgaaaaataaatggttatcgatgtcaaagttgtgatatgtattaaacttatactcttattaaatatcaaattaataaaagttga

SEQ ID NO: 9978 - DNA, 517 bp, Arabidopsis thaliana columbia
tcgcgcctttaacactgaaatcccgacgcggccgtggtatagtcgttaaagtagatgacgtcgatgctgatggaggtggagcggacgagtatgatatggatgatgaggaggtagaggaagttgacaacaagaaggactatgatgtcgagtatgaccccttggccgccgcgatagcgctgcaggcgatggtggtgatggagatatcgcttttgttcagagtaagagttttatatcgacacaaggatgggattcggatatggtggttgattatcggataaacgaagatgagtttcataaactcagcttaatggactgtgatttctttatcagaaaacctcctgatccagataatgatgtttatgatttcagagaggtgtgtgaatcccagtgactctaattgctcatttcttcgatttctctagagtctgtgctcattcttcaattgtaaattgttttgtgtgggtggctgcagatgtatgttaccctccggatacagatatttactcaattccgagag

SEQ ID NO: 9979 - DNA, 1121 bp, Arabidopsis thaliana
  unsure (1)..(1121): unsure at all n locations
cgatgatgcatgaagaatctcaaatgaagggcaagaatggatgcagttcgcagcaaggtgatgaagtgacagtagctgtgtcatgtttcgtcttgggtcataagatccggttttgaccttcaagattgtcaagtaacgaaggaatcttatggaattctattcgactctaaccctagagatttgtaaggaccaaccggttcagtaacagttattatttattagcaaattctgactactacccaagtctagcttctttatttttgagggtgtttcacaatcaaaactgtgtatcggatttgactaatttgcaaagacattttggacacaaattcaccaattttttcattaaccttctctttaaagaccatacaaaagtagagaggttacagaagcatccacagctgaaagagtacataccgaataccaaacccgagatcaacacaaatcaactggtagataaatatagcaaacttgcaacatcataagataaatatattttcccgcaacggtgttcacgcaaaacaaaattcattgtggcacttgatatatcacctattagagacatggggtgtcagacatcattcctcaacgacattgacgagctcgtactccacaagggacagattgttgtcttctttaacagtaatgtcagcaggttcagtggcctcgatgcgaccccatttatcaacagcaagcctcattgatcccttgaacatatctatctttgcattccgaagattcacagtagctcctggtttcatcaattccactgcacccacacaataaaaaccaagaaagacttgtattagcccccaaaaagctaagtgacccactatgaatcaccaattgagtaccagagcagaacaaatcctattactagagagtcctaaatcaacagaatctttaattgtagcattgtatatagcatcaatgcctgttataggagtgaaactacaagtatatctacactgatttaaaagcaccaaatcttcaatgtgtgaacaaatttggaatgcgatcaaatggtttatcagctattgagagatganaatacagattccaacagactaagatactccacaggatcgttaaggctattcgagaggatgattcaaaaatag

SEQ ID NO: 9980 - DNA, 556 bp, Arabidopsis thaliana columbia
ttcagaacggaactggaacgagacgggtggcaaagatttcgagtagcacttcagactgatgatgttaattaagttgatgttatttggttcataagaaactgaccaatagcactaaggcttgtcttgtgtttttgagttcatcccaagaagatcctacaaactgcattcaggagaacttaatcgacaagtgaaatcaagcgattgaaactgtctggttactagaatcatttaaaacaactgaacttacatcttcagttgcctggctgcaccaagactctagttcatttagccagacattcaccttcttgcccatgatgaatgtgcagcattcacgttgcagaaggctgcattagttagattacagctttaagtttattggctgatggtgggttaggtgatttatattcgttaaaggttgatgggggaatgtaaatattttacctgttaaagagttgaacgttgatgtcttggaatgtttggcagaaaatcttctgagcaagaaacagaggaacctgaaagaagaagtttgtcagagtggaaatctaggagtaacaga

SEQ ID NO: 9981 - DNA, 205 bp, Arabidopsis thaliana columbia
actaacggccgccagtgtgctcatgctgcgacgtcagaagcaaagagtagctgaaatagcgacggtgaaggaataatcccaccagcggcgacatataaaccagtaatgcggactaagcaggctgccttcggcgatccccaattccactttttgccccggcactaacggctcatcacagggtacgacaatggtatgcgtggtttgc

SEQ ID NO: 9982 - DNA, 565 bp, Arabidopsis thaliana columbia
ttttgttttcaatattctaacttcctttatcaaagcccaccaatcaaaacaaaggccagctaaaataggccttttaattgttattgccttattggatatttttgttgtagattgtataactcaggctctgcagttgtcaagttctatctggcgtggataaaataatcgtatttgtgatctaacagctaacataatttcctaatagacagttgatgttttaagcttttagacaagaaagaaagatcacctatatattgaagaatagtgtaaaaataaaaatggttgatattataggaaaaagtaattcacaaagagtcaatgagaaaagatttcaaatgcttgacaaattccttggacttctccaaattcacagcatgtcctgctttcttgatcaccactatctctgcactctctcctatatgtctgtttcaccatacaattattataaacacataaaaaaatacagagggtaatctctatagttaatatacatgttgttgttacctttttaatctgtacctagttccagtggaaatatttgatctctcaccccatatgatcacga

SEQ ID NO: 9983 - DNA, 569 bp, Arabidopsis thaliana columbia
tagtttgaagcaaattcaaatttatcttgtttaagctaaagtccaaggccggttttgaaagttaagcactaatttgaaataatgtaattctaaagaattaacgaatttggacccaaaaaaagagatattacccaattcgtccaccacgacaggctaaacctctttggtttatagattagcagccacattatgcaaggaagctgcataacaaattgtaaagcatacaaagtttatatatacactatttgaaatttactatacatgaaaattaatctgcgttaagttcaaaatttaagaaccaatatatacacttacaaaatacgatgttggagcaaacgcaaatcctccaaagaaagcgagaaggcccccaaagaacggtatcattatcccaatgaacatcgttaaagctgtcctcacacattatacaaaaatgttacaagtattaatcaaatatctaattcagatatattcttgaatacattaataatcatgcaagacaaagtctagatcttcaattatattttaacacgaatgttgtttaattaagttgataatgcagactctatata

SEQ ID NO: 9984 - DNA, 551 bp, Arabidopsis thaliana columbia
  unsure (1)..(551): unsure at all n locations
aggatccccgggtaattttcattgtcaatcttgcaaagtcctttgaagaagctctcttgcagatttgctgaagttcttaagaccctaatcactcagaaaacacgcacagttttgaatttacccacttttgaactgaaagagatcataaagaaatgaatttattaaatacgtaccacgccttgcacgtcaagaattgttgtgctctgatcaatgtgtttatttgctgctacagaacaagaagggaacttgaccttgaaagtcttctcgaactctttgacatgatatttcacgtaccggtccattgttgtcacttggagtagcttgttagcatcgatttgacctagtctctcaatgtaaactggtctgccttccttgtcaactccatgatagccttgagggtagtgcttcatcacttcatcaatttcttcgaaatcaaaatcctacatcacatttagaaacatacattatagaactttttaaacccacaagagatgcaaagttggatcaattaaatgcccgagattttaggaaaagattcantcaatgattgt

SEQ ID NO: 9985 - DNA, 572 bp, Arabidopsis thaliana columbia
ttgacttgtcgtctgcaaacgtgattacgtgaaccttactggtaataatacaaaaatcacagctctaatttgccaacccaatccagatctctctagttctcaacttctcatataattattcattaatatatttattttgagattttggttgattttttgatatataaatattggacttgccattttctattacaaccatcaaatctcaataaagcaaaacgaacaagagaatggcgagcacggaagctctcttacccgtcacgtccctacaagatccattatctgagtcaagatccgaccagatcccggagactcgtcggagacgacccatcaaagttcatcttgcagtctattcaggtttgctcttgatcgctttgtacgtcactctcatcgtcacacacgacgtgtccaaggctgaaatagcgacggatcacgtcctcgtatggccggcgtgtcggagaagagcaacgacggggtctggatatcatccgatgatgggaaagttgaactgttcccgtggaacaatactattttgtcgtggcaagcacggcgtttcattccagcctgagaaa

SEQ ID NO: 9986 - DNA, 561 bp, Arabidopsis thaliana columbia
gaaacactaaagagaatgcagaaaatattcagaagaaagattcatctcgttctgttccaaatctcaccgttgtagattcttctactcagagttcacaaggaaagaaagtaagcttttcaaaatcttcaggtacacaacttgaatcaggaaatcatgcttcttctctgataatctcctctgatgttccatctgatctgaataatcacacggcaacatctttggttcgtgagatatgtctggatgagaaaagtgcagagattgtggattctaagagcagtggtagtaatgtcgatgagccgcttttctggccatatgaacagagatttgattggacacctgaggatattttgaagcatttctcaatgtcacctcgaagaaagaaattattgaatgccaaagtttctgcaggtagctctccaagatccatgagagcacaacttctccaagcaagaaaactagatcttaaagatggtagtaagagaaagcttgtgttcaatggccctttaacaaacgcagccaagattccagagcgtcaaagaaattacagcacaagaaaaatga

SEQ ID NO: 9987 - DNA, 516 bp, Arabidopsis thaliana columbia
tgacataacttcttttccttctattggttccgtttctggttcctgttcaagatcatttccaggttcttctgttttgtgggtgatccacacctatcttcagcctcagcctccatattttcctcagatggctcttgagtttcttcttgatcattttcaccttcttcaggatgcttttgatcttctgaacaaggttcttcctgctgatttgcatcttccttttcgacctcctctgttttgtccatctccatgtcatcatcaatttgttcattatcgacatcaggagttagtccaccaagtgcttcttccttggtctggattttttcttctaaattatctgtatcatcaaaatcatcctgctccacattctcatcgtttccttcttccggtttgtcagaagtattggactcctcaggctcatcagcagtttcaacaccatcatccttggctcttagctcccttgatcttgtgtccttgtcgactatagatggtccagattcattcttctcattcatattt

SEQ ID NO: 9988 - DNA, 583 bp, Arabidopsis thaliana
gagccattgacagtggtgcaacaagggtatgttgcaggtgtaatggctccaggaagatgctccaaattcacaaaccctaattgcacagatggaaatggagccaccagagccttatatcgttggtcacaacctcatcctttctcacggagccgccgtccaagtctacagagaaaaatacaaggttagaaaagaaaaagatgatgtttcttaagcatcaagttactgaaatagacaacgttactgaaaaatatatatatgcaatcttaaatgttatttgataggcttctcaacaaggtcaagttggtattgctttgaacgcgggttggaacttgccatatacagaatcaccgaagtatagattagctgcggcacgagccatggccttcacatttgactactttatggagccgcttgtgacgggtaaatacccggttgatatggtcaacaacgtaaaaggccgcttacctatattcactgcacaacaatctaagatgttgaaaggctcatatgatttcattggcatcaactattactcttctacttatgcaaaggatgtccctgctccaccaaagatgttactatg

SEQ ID NO: 9989 - DNA, 551 bp, Arabidopsis thaliana columbia
taagaaacaggaagaagggattgttgtcaacaaattcaaacctaagaacccttacactggtcgctgccttttgaacaccaagatcaccggtgatgacgctcccggtgagacttggcacattgtcttcaccaccgaagtaaatcccttaattagggggcttttgattgtattttttagaggcatttttcgagggagagatttgattaggttggttgatgacttaggtgaggttccgtatagagaaggacaatcgataggagtgattccagagggaatagacaagaacgggaagccgcacaagctcaggctttactctatcgcgagtagtgccattggtgactttggagactccaagaccgtaagcaaataatccctctaacaactaactaaataatgatttacaaaatgatcttctcttatctggaaatggatccttttgcaggtttctctctgtgtcaagagactagttacacaaatgatggcggagagattgttaagggggtctgctccaacttcttgtgtaagaaagaagaacaatgtgtctgtgatgg

SEQ ID NO: 9990 - DNA, 789 bp, Arabidopsis thaliana
ttaattaaaaaaatcgaataattaaaatcattaatttttaaaatatttgttttctgtccattcctaaacattagcgacaataatatgtatatattttcctttttttaaaaaataatagtacgattttatgatgaaacaacaatgataacagaataatattgctctccacattttgccacgtctctccctaatttactagctgtcttccaccggaccacccctttcggtgaacaatgtcggcgatgtcgtcgaatttacgttgtcttttagaataggtcccacccacatccactaactaggccatcttcatgacatttttcataactaacaagaaaaggtcacaaagggattgaaattattcaatgcacatgctttagttttaccttgtagtatagagtttctaaagttttattatagtatagatttttaacgaatcacataagataaaaacaaaaaaaaaatagaagtgtgtgaattatattcgttttttattctaatgaaaaaaattggatggacaggaacggagtacaaaacagaagaaattcttatgttgatggaatgtacggaaccacgtgtccaattccaccgagaagcaactacacatacattttgcaagtgaaagaccaaattggaagtttctattacttcccatctcttgcctttcacaaggcagctggtggattcggaggtatcagaatccttagccgtcctggaattccagttccatttgctgaccctgcaggagattacactgtcctcattggagattggtcaaatttaacacacggt

SEQ ID NO: 9991 - DNA, 556 bp, Arabidopsis thaliana columbia
ccaacttgtatatattcatgatgagtcacatttccttcacgcagagtagaattaaaacctgaaaccagtaaaaaggtatgagaaaaaatgtaaaaaatgaagtagatcatatgtgtaccaccaaagaatatgagatcaagctagtgcctgcaaatatgtcttcactaagattgatgactttagaagctttgcagataccacctctggtaaggtgaaacagacgatcaaaaatatctggatgtccgtaatggaatcgtactctggagcagcaacagaaagagcacatcaattttgacaactacaataccctgacaagatttcagaacagggaagaaacttacttcaagggactagctagcactctttgcccaatcgttacaaaactgttctcttgatttgacataaaccatgcaagagaagacacacttcacaagaaaccacaaacataggagatcagtatgcacacagaaactaaaaatctagaagacagaaataggatcattctgttagtaccttccagtgaaaatatgctctctaagaccaagaatcgtaggac

SEQ ID NO: 9992 - DNA, 376 bp, Arabidopsis thaliana
ggattccgtggggcagaaattgttaatgattttcgcgactatgccgatatttgtttcaagagctttggagatcgagtgaaacattggattacattgaacgagccattaacagtggtgcaacaaggatatgttgcaggtgttatggctccaggaaggtgttcaaaatttacaaaccctaactgcaccgccgggaatggagccaccgagccttatatcgttggtcacaaccttatcctagctcacggagaagcaatcaaagtctatagaaaaaagtataaggcttctcaaaaaggtcaagtcggtatagctttgaatgcaggttggaacttaccttatacagaatcagctgaggataggttagccgcggcacgagcca

SEQ ID NO: 9993 - DNA, 856 bp, Arabidopsis thaliana
tagcactttttcattagatggtctgacacaaaatatgtaacattacaagtataacttttaagaatatgaacaattctaaacattatttacaacacttcacctgattagaaaacaagtactgtactcttctaataaaagcgttaaaatgcccaacggcaacccaaaagcaaaagcacctttacggttcaaattgaaaatctgagcgtcaaaacgagaaaattgaaattttaaagaaaaaaaaaaaagaatacaataatacgcggtcacagatagagagagctctgtgtatagaagggaaatcaaaaattcaaacgctacagattctttctgtttctttctacatctgcctgcatttgggcgctcctcacttccccggcgttgcaatcgccgactagggtttttcttcagatctccggcggttactctatttccgccgctcatggactcagattcttctaaatcgcggattgatcaggtcagtttctctctatctttttctctttgcttaatttgtctccacgaacttcggacgaatgtttgtgttcttcttcatctctttctcctctttctctgtgtgaaaattcgtgcttgctgcaacaacttcaagtttctcaacacttcaaaaacttgtgctttttgaaatctgacctatatcgattcaaatggatgaaccttgtactttgttgagtcttcgattcattggattgttttgggcactcccagtaacttgaattgaatcacattttggtggaatcctatcatttgaattttctactaagtcagtgaagtcttttcatgaacaaagtcttacactttgttaaggattttccatgaattagattaaaaagtaatgttt

SEQ ID NO: 9994 - DNA, 721 bp, Arabidopsis thaliana
tgacctgtccgcgaccttgctcttgtattgctttttggagaaaacgttcgctctctccgctcgatatgagcttctcgaccgtctcttcgtccgctttttgccccgttacagtgaagtaccttcaatgattcaaccaaatactcaaaaccttaccatctcttacttcgaaagattaaacattttttgaaataagatttgatctttgttcaatcatagtaaaaggatttggtctttgttggatcagagtaacacctaaatgaaagaaaaagaaataaaatttaccttctctcgaccgtttctttgtattcagtagccattttggttcgtagtctctgaaaatcatccatcatgtctttaagcttcttccccaatccactaacgaccgatgttctggtccgatcagcagacgagccaggaccacaaccagcgactttcctctgcgcagcatttgatttctccaaagctacaagcttagtctttatcatcttgacacgtttcaagacctctgtaacactcgaatccatacgagcacgaagcttcttcacggccttggaatcatgtacggtcttggactcttcattagcatcttggagacgcttatgaatctcgtcgacagctttcatgtcttctttaacactctcgacatatccaaagaactcatcgaggttgcctgaatcaagagaaacattttgagactcgatgtcatcgagttgtcacgtta

SEQ ID NO: 9995 - DNA, 1758 bp, Arabidopsis thaliana
cagtgtgctcttaatatattagtctggtctagaagaaacttaaaccctgatcaaacaggtaaaaaaagagctacgatttcatccttcacgcatatgggcaccgagttcaccaaactgatcatcggcttctacagtgttatctgagagacggattgcatcaagcttctgcatcaggatatcaatggcatttagtaccagctgcgaagcctacaatgcacctgtagactcaacagtgaatacaaaaatatcatgtttcggatggatctcaatgagtcccggtttccccattgcttcagctttcttgatcacttcttcatcgtaagtgtatgcttcaggatcaaccaccacaacctaagaagcaaagtattataattacagttgtgatgattcaaacaatagactgcaaaagaaatgagctaaacgcactaaacacttaaagaaaattcatacaccacatcacatacatatatttcaaagcatggtagcctataaagtagtacaatcatattgaagtctcaaagctataaacttgtatagatgtaattcttacagaacatcgaaattaacctgtccggtgactgggtcaatgccaaacactttggtaggactgctctcaatcaagtcaattttttcctcatctgtcaaagtgttcatcatctcttcattgataataatgtcaggctcatacatatacgtaacagtagctgcaggagaccatttcgcatgatctttcccaattcctttcctagctaatgctttaagcttcaactcttgtcccctgcgtagtttcgcaatgataattcccctgaaaccaaaacaataacagtctaagaaactgcagaaaaaaaagccacagaactaccaaaaggaagactcatgcaaagggcatctaaagatgtcaaattttgtttagcattgtgtaatatctaagcttagcaattccaatcaattcataaagaacaaataatcactacaatgatgaaaagggacttacttgtgctcgcttgaatcagaagtagatgagttactagtgaaatcaacaggagtaacagtaggatcagcactgtagagatccctactagtaacatctagggtttggtcagtaacacacttagcactaaggggaaactcaacagagcagaactcgcaatgttcatctccattacaatcttcacaatcttgacagaaccgcatgctcatagcacgctcgctagtgagagggatgagactaagtcgttgagcaatgaactcgtcgttgagaacagaggaattaacctcgattttgacgagatggattgccatggtggggacttcggagatcattacgcgacggagagcgttggccattgaaacgtcggtttcacgaagctcgaacttggcgtagtcatctttaagctcacggatcttcaccgttgggaatctttggtaggtggcaccgtccatttcaaaagctaatcggtggtttctgacgactctctggacctttattagggttttagggataatgaattttcaatttcttcgccggagaaggagataggagaagaaatcagaataaagcaaaagtgagaaagatataaatattagagtaatgtttaaagttgggcctatatgggcctttttaattcttttggcgaaaagtaatgtcaccaaatttcaaacaggcccatataagcccaactcaaatgtttttttttataccttttcctttttcttttttctttttttttttgtcaaacgtatacctcggggatcctc

SEQ ID NO: 9996 - DNA, 598 bp, Arabidopsis thaliana columbia
ggatagagactcatgttcagctctctacattgacaaaagccttttgtagttgctctaacaattacggttcttatccaaacacaagtatttgtcctgtttgtatgggtttgcctggtgctttgcctgttttgaattccaaagttgttgaatttggtgttagattgggtttagctttgaattgtgatttgtctcttaagtctaaattcgataggaagcagtatttttatccagatcttcctaaaggttatcagatttctcagtttgatattcctattgcatctggtggttatgtggatgtggatattcctcttgagtttggtggtggacataggagatttggtattactagggttcatatggaagaagatgctggcaagttacttcattcagacacaggagattactctcaggttcatatggaatttatgacaagtttcagtttggttttatcagattcttgtaagggttttaggttcagatgcaagatgtttgtgttcttatgtgttagttggtactctaatggtgcaggtagatttgaatagagcaggtggtcgttaacttgagattgttctgaacttgatatgagaagtggtataga

SEQ ID NO: 9997 - DNA, 1354 bp, Arabidopsis thaliana
gctgaccctgattcttatagaagacattttcatcaccctttattgatcttggagttagtatgtcacatggaactaaaagtaataattaatgttttttttaatataaagaactcaatgtaaaattatacatatgaactttgaataaaatatattgttgtgaatttatattatttagaattcttttttggtgaattccccagaaaaaatcttcggattttgttaataagaatctaaaaataaattaattacggacttgtcgcggaaaagtagttccttcaacatcatccctcataatcgtctcaacgcaaagcgaaatagaagaaaaagcatgaaaacctaactatacagttaggttctcaatacacgtgagaaattctatgtgtgacatgccggtacgtcttgttacataatcttattatatgtactgtagttatggacatatagcgagcatatttcacgttaaaacttaaaaagtattgtagacgagatggataatgtttgatttgtgtctagaaaatataattataggcgaggtggatacatcgtggagactcttaattagatattaataatgtagaagtagtgaagagaaaatgtgtttggttgagacgtataaattgaaagccttttgctgataaaatcacaaagagagatcagcaatgaggagcttgaggttgagaacagttgttgttgctacaatagtcgtttgtctatcggtcctcctatctcccaccggtacgtaaaatcaagatctctaactacatagatacacaagtttttgttataaatgtatgtggctgttcgtgtcgacagaagtggatggaagctgtgacttcccattaggtgcttgtactcctttccgtgattgcaaggagagttgcatcaagttcaaaacgagggctggacagactttttttgatggcaagtgccgtccaagggataggccgagcgtgtggacggcttgtttctgctgctattatgatagtatcggtgctcaataagaaaacatgtgattccgaaaccatataatcgacatcgctttgttctactctgctttgcttttgtttgttgtactctgcttaatccaataacagagataacgtttcgaataaaggttggatgttttgtgacaattcaggaacagagagatgataagtcaagctacacccacatagttccatgcagagaaaattataatgtcaaaattgaaaattgaaaatttgtctgtcaaagttgtaatttataaacctcccaaagaagagagaaaccattacatcacatcggtgcataaaacagcaaaaactacagggccgaagcaaaatcattcttacacggtatcatgtgacagagttta

SEQ ID NO: 9998 - DNA, 565 bp, Arabidopsis thaliana columbia
cccatgttgattagacttctggtaaattttcataattttttgacacctctagctaggtcatttgacctgatacaacatcggattttcatggtctagttggggctccgtgggcatatttgatgcagacttggcattgacaagatcagaagactcgttgagcccaccgttgaacgggctttgattacttgtgttcctcttatcatttgaactcactctcccactcccaatgggagtaagacagggactaggcaccctagcaatggcctgtggatctggagttccatttctagacaaagacgaacccagaacagctgcatagctgtatggagatggtgcaccaatgccttgcgatgcagatggagacagattattcttagagtcaacattttcatcaaaggtattacgacttgcaggacgtgagggctgcttagtgacaggatgtccatgccccatatcagcctgcacaaaaagcaatccatcaagtttacataagcaagaatatctgttgcagaaatatacaaatacagagagaattatctttgagagaaaacattaacaaagtatc

SEQ ID NO: 9999 - DNA, 569 bp, Arabidopsis thaliana columbia
gttaccttatataagcaacaattataattggagttgtacaaacaccttcttaattctcttgcattttgttttcaagctaaatgaatccctttcctaaccaagccaatttcattgatcttttaacaagtcaacatgaaaccccaaaccgtcaacccaacccttatgagacacattcaccaagtattaaacttggtgaatctgaattccttgtctttaacacccaatggcatgaatcacatcttcaaggtggaaacacaactactaagcgcacaactactacgaggaacaagtggacaagtaaagaagatatcgtcctcatatctacttggctaaacacaagcaaagattcagtagttgggaatgagcagagagctgatgctttctggaagcgtgttgtagtttattttgcaagtactctgaatgtttctagtcagataaagagagaaccaagccactctaaacacaggtggggaaaaatcaacaagattgtatgcatgtttggtggatacatgaacagcaacactcagatggcgctggaatgaatgaggatgtttgatgaagtagcaatg

SEQ ID NO: 10000 - DNA, 453 bp, Arabidopsis thaliana columbia
ctccatcctccggtgtattttttgcaaccttgtaagttttcaaagaggaaacacatatttatgttatggattcggtatgttattatgtttcccggttctatgtctcagacacacgcgctcgtcttctccaataactaactgctccaaatcgtagccttctgcgagattttgcgccattcctcgttttctaattcgtaagtttctcttatgcgtgagtatctaatcgatacttatgtgtcaatttcagatcggaaacctaattaatgtgttcaattcgctgtgatgttagaaacccctaattacgttaaatttggaatcagggtttgtgtattagcgctgtgttatcaatggagacacagccgcagcaacgatctccgcctccggtagctgagaagatgaatccagaactggagaaggaactgtgtctggagtcgttgaagacacgagccgtta

SEQ ID NO: 10001 - DNA, 499 bp, Arabidopsis thaliana columbia
aaaactaatcttgtttaattcagtaagacatttactagacttttcacaattcaacacagttgttgttggttgagctacccagccagtatcaagagaggaaggtagagaggagtgagagagagctttgggatcgatttcatgtcgtagatctttcactctgggtttgcgttccacaaaatcctaattcgcggaactctggatttgatcggcgatggcggtaggcgatcagacggagcagaattacttgccgaagaagaagaaatccgaaacggaagatgataagaggttcatgattgttttatcttctttgtaatctatgtttgaatcagttgattttattttgttgttgctgggagtagtgagtagatcattaatttgagaaattgaatgtggaataggaggaagaaaattgttcccgggagcttgttgaaagctgtggtgcgacctggaggaggtgattcgagcccagttgatggtgatcaggttaataattttggtt

SEQ ID NO: 10002 - DNA, 817 bp, Arabidopsis thaliana
ccaaatcttatggttcatatctttgtgaataatattaggtacgacccaagaaattctgttctggaatggtctatactacttattgacaactccaaccgcaggtaactaatgatgatatcatcagtttaaaactatacttcagagttttgttttgacatgcgtatataaataatacatgaaaaaatcttgttgcagtggctcaatggagtttgttgtgcctccagtggattcatcggtgttcttccccatctctgttcagtttgcagcgacaagtacctacagtggcttgaaggtatgaatcttggtcctctggagaaaacccaagttccatattttggtttatatgagaattttgaaggcattttatattggattacaaatgagaggcttgttcaaaacggtgcaggtgactggaatgattcctctgagaggaggtggtggtgcgactcctaggtttgtgcagaggacgcagctgattgcccagaactatcaagtcatatgaaacactcctttgggggcatcggttgtttttaatttcttctatactatctggtgttggatttcgctcttttttttggatgccaaaagtacaatcttaattttctcggattttgctaggatatttctttctcaacttaattctaagacattatacatattcatatcttctttttttaccaacttctttttcaatgttttaaggatacaagtacgatttacaatcgtttttttacttctttcactagttcccaaataattcattgtcatttcattgcaaatcatacaaacatttactcatttatacatttttgtgtag

SEQ ID NO: 10003 - DNA, 2023 bp, Arabidopsis thaliana
tcaaattcaagaaatgttctttggtcactgatttcttcaagaatctgtgaacctcttcggtcacccaagatagtggcttgctgatcaagtcatcgattctctgcccaccaaatgggactgagagaacgtttccgaagtaagtattgttttctttctccataagtctcctccttccatccacaacgatcccgagtttcgaggtcttgatcgggactggatcttttgcagcgtgttctgccacgagtttccatagaaacgcgctgaatgattcaagttttgtccttttaccgttcttcgaactgctggctagagtttggagctcttgtaatgcgtttgctttgatgtaatagatacggctagcaaggagattttctggattggtggtttcctgtggagggggcaaggacgtgacaggcatataaatctggtctatagatggatccatgaccaatggtcgtcgtgggtttagcaaagatcttcgaaaagatggtacacaagagattggtacatctgatcgtgagatctcggcccacgataagaggaacatgttcatggaatacgcgtccgctacacgatgatcaaatgtgcagcctacaactatgctcccacatttcagttgagtcacctgttcacaaaattaaacaaaaacctagttatatatatgttgttgtagtgaactatcgttgaaactgttacctgtatcgctatgactccatgtttcttgatggggactagcttggcaatactttcatcaggatcatacaggttaagctctcggagctccacgtcagcaccggcttccacgaaatctacgccacggttgttgcagaggatctccggttctccggtaggattggtgacgagctcgccggcaaaggcgtagtaggagacgagagtctctgccaaagcagtcttgagggtttcataagccactgtgttggtaaagtgaagtggtttcttgtagcaaaagcaaacgtgaacgttgagaggaggaaggaggaggtcgaggttcgagagtgggagccagtggtcctggaggggaagagccgccgtgatgacttgcttcctggtggtggtcacgtggaagccacgtgcttgctccgccgcttctcccatttggttgttgttttcggagagaatgaagaatgttgtgtggtgtgggttgttggaagatgctgtctagaagagaatttataacagagcttaggagtgaattaggtgaaactttccaacatttcgctgatttattaatttgaggaaacagaacaagctggtttacgataatgcgtacggcccattagttttccgttgggccatattaccacccattgggccttgatttttcaacgagataattagaaataactgtaagccaacaacgtgttttgccgcatgtcacgaagaaacaagacacagtcacttggattccctcaatctgccaagcaattctctgaaacctgtgtattctttatattgagaccaaatatcaccgtgtttgaatcttctttccaaaaaaacagattctacaaaattattctgaatcagttccttttccttctcctctgtttcttttcatgtttcagggaccatagtcaccatctccgatcaaattgcatatatccgagcattccactaagctacaattacaagtcacagctccgataattaagatccatgctaataaagaaagcaacgaaccctttaatctagaaagaaggataccagtaattacggctacgaaatccttgcttgaataccactaatggcctttcatttacaagagatcaaaatatcagtcatgaagaattcagagagatataaacagaaacagagagagagagagagataccttctgatattgatcggtccttctccgtctccgctgcgaatgcaagtgtttacgcatttgactgtacatttctctgcgtttttggattttggtcgttggatcctctgtttcttacagtcttcccctgacagcgtttgcggtacgttagataacgtttctccatcttgcggcggc

SEQ ID NO: 10004 - DNA, 563 bp, Arabidopsis thaliana columbia
ccccacccccctttattaacgtttcaatttcacactttctcgcttcgtcggaccaatgcctcagcaagctttaacaaattacctccagataaggacacccgttaagcatctgcgtcaagttagactgaaaaacatcgggagaatccaggtctgccatttccagagtaagaaccctgtcattgaacccaaacagaaacactcattactcaattatcacaacttcaactatatagctcgaaactacatgcatcacactgacaaaatctgatcaagaaagaatataattgacaaaagccaaagcaatcccaaataagtaaaggcttgggagagacagagtattcaattcaattagtgacgaattcagaaaaacaatgtgacttttcatcaatttcagaaacagacatcgacgaagagcatgataattcattgagaagttcatgggaagacggaattgtaccggagatttgggcagagggtgccaatgtaagtgaggacggtggaggataacagtgatcacctgagcaagtgaagtctcggagatgtggccgagaactcacgcacag

SEQ ID NO: 10005 - DNA, 619 bp, Arabidopsis thaliana columbia
tgagcagagacgcggcgagtaagattgccactaaggttatgtaattggctcggaaataggaaaagttcttccttactcgtgacgttgcctccgagagcgatggtggccgggaaaacgctgaccggtcaacgagctctgcccagggtctggcatctgcagaagcgtgacggacggtggctagaacgcgggacaagaggacgcgtagagagctcagcaactgtggatcgccgccgggaagttgatcaggagtagtcgaagttgggagaagaggagaagccattgcagcagatctactttgcggacaaagtcagagagtgcagagagagatctaaaagtaaatggctttcacgatttgctggctttacttcaaactgtcggctactatcacatgtgcttttgcgtctttctttctttttaaagaaacataaaaatattccgctctttgtagtaatatacatttatgtgtatgcctttgtgtgtttacacatcatttgccacatccattccattccatcatcatcatgtcaaacacttggtgtgatgtatgtttgatttaatatcttgaaacagttgaataaagatttaccgtcggtagtgacatagggggcaaatgatggag

SEQ ID NO: 10006 - DNA, 386 bp, Arabidopsis thaliana columbia
  unsure (1)..(386): unsure at all n locations
gaaaaaataggccgaaacctttaaaatccactggacgaaccatcttcataattaaaagcaacctgtagcaaataaaaaagaaacaaatccatcatgtatcatagagataaaacaggaaacgcactgatacaaataaaggattatacgaagtaacaatatncatncactgtaatgaccaaagtaaccgcttggattgatgaacttgactccanagtgattcgtaagaagaggaatcttctgtcctttggcgccgctgcctcgaggccgagccgttgggagaagaatgttcttttttaccggctccgcttcagggaccagatttgctggaacgatcggtggtggaggtggtaacctctcccattcggttcatcagaatccatctctgg

SEQ ID NO: 10007 - DNA, 912 bp, Arabidopsis thaliana
ggcaaacccttaaagcctgctgattggttgggacttttttttctacttttctttttcttttctgttgctgccgttacagttccatttacagctcatattgcttgcggcagaaaattctcaccaagtcctctgttgaacatgacgattaagcctaaatcgccggcgagattcaagctaggtaggcagtcttcgcttgcgccggaatcaagaaccccgattgatacgttaacggaagatgaggacgacgacttggctgcggcggctacagctgggatcggggatccgacgattcgtttaatgtatttagccaacgaaggtgatatcgatggcatcaataagatgcttgattcgggtactaatgttgattaccgtgacatcgatgcccgtactgctcttcacgtcgccgcttgtcaaggacgaaccgatgtcgttgagctgctgcttagccgtggtgctaaggttgatacgaaggaccgatggggtagtacggtatgaattcgaactttctctgggctgaattttgtttgctttgcctgacttgacttctcgtagactctttagttcgttttgtgttcgacgaattgccgcacaaatcatatgttttactggagcacttagatttagcaaactcggttgcaataacagtgatggttaacaatttgtgattgatcttaccagcctcttgcagatgcagtgtattacaaaaatcatgatgtgattaaacttttggagaaacatggtgctaagcctacggtatgtgtttaccctcatagttgcattgatggatgttttagtttctgaatgtttggattgatttctttaataatcgtttctgattttagattgctcctatgcatgcctaactgataaagaagttctagagtacgagattcatctacagagcttgatttt

SEQ ID NO: 10008 - DNA, 1249 bp, Arabidopsis thaliana columbia
gaatgctgaaacagtgaataaagatgtgatcatggggagttacgaagactattacctagcagggtaaccaagtgagagtccaggcgaaatggagactagagctgccaaagttgctgcttgcccatgtaaagaagcaagatcagttttcaatttgtctccctacagaaaatgacaatggcaaagtcattccccgtcatcaagttgctccagcttacaatagagactgtctatttatagagacttaaagatgaagaacttcaattagatgaaggccaaggacgtcataagcatatgaagggaaactatgatgtctttcatgatatattgatattcaatttcaccatattaattattagtaatagactttcttgttctgcatttggatcagaatgtcacttcacatcttcattaatattcggatcagactttctcgttttgttgccacactctcatacaatactaagatatgccagatcatctaatacccaaaatctcttgcttacttctgacagaatatttagtagaaatacatattacaaatgcagcagaccgtgcatgcatgtgtaattaaatatacaattaaaatacatttcaaacttaaaagaaacttaaataaaaataaatggcatatcatcttactaaagaagaaaaccaaactcagttgacataaattgaaagtcatagtattaccttttcaaaggataaactttcccgtagagcattaagagttgttacagcaaaagatgtcaacccaccaacgcaggtaggatcaacctcagccaaagcacgtaaagttaaagcggcctcaacacgtacctaaaaaacaagtttaagtttgtaaatatgcatttacaattaccatcgggttgtcatttgacccaatgtacccagacattcatgttagcatgacacctaaaactaataaacactgcataaaaccgaatttgtttcaatatatcaagctactaaattcagaaaatcaatcagaaaatactgtgatgacggcctcttccaaccctctatttctatgcataaaggtcttatttacgtacctatagattactgtgatagcggtttattccaaccctctatttctattcataaagatgttgtttgcctagcttttaaagcagatgaaacaatttgacatccagtagtaggaagaaattcaaacaaacatatctttctgtgaaattactagacaaaaaaacccgtaataataatatctatatgctgaaaagaaatagaa

SEQ ID NO: 10009 - DNA, 565 bp, Arabidopsis thaliana columbia
atgtgttacaatctagacaaactaactctgctagcaatatacaaacaatctgatcaccctagctacaagaataccgttaggagaatctagctgagaaacaacaaaaacacagctagaaagttataaaacaggacttacatcaatattatctttgaacaagtttctttgtgcagcattctcttcttacatctgcaaaagagataacacagtctcagtacaatgcctagaaagaattctgatggtattaataaagctatgtgaatatgaatccgagttgtacctgtaattctgtctctgggaattacacaggaagaaaatcaagagatggtctctcatatgccaacgaggatttctcggtcaagccttggactctggtttccaaacagaaagagccatgacagttcttcccttccagccttgcaagagccaccggttatcttgatcgatcacaaaatccttgtggtagaatgtgtggaccttatgcagcgatgtcttcataatgcttgggtcaaatggaacctgcaccaaccctgacctcatagcccgtacgtgccactgcttgtat

SEQ ID NO: 10010 - DNA, 507 bp, Arabidopsis thaliana columbia
ttcctccttttgccactcttcccatctctcagctaaaccatctccttcaagcattcttacaacttcagacattttgggtctttccattggtgaactctgagtgcagagtaaagccacttggattagctgctccacttcttcgtctttgtaattaccctgaagatcaacatctactagtgcttccaatttcttctcttttaacaaccctttcacctgtcgaaatgaataattaacacaaatagaggtaacacagataatgaactatacaagtgggaaactcatatatgtatatacccagtctagtaacatgacatcatcatcattcgcgaggcgagcaagatcaaaagccctttgtccagtgataagctcaagaagcatgactccatacccaaagacatcggttttctctgatgattttccagtggaaaggtactcaggggctatatgaccaattgtcccacgcactgcggttgtcacatgtgtgtctttgtagtccatgagttttgc

SEQ ID NO: 10011 - DNA, 503 bp, Arabidopsis thaliana
gattgatgctattcctaatttggagaaaaagataccaattcttctatgcaacttggagaagatatttccactattttttcgttgatttcatggaacatttaccaattcatctctcttgggaagcagcacttggtggcccagttcaataccgatggatgtacccattcgagcgtcatatgttccatttgaagaaaaaggtgaaaaacttggcacgagttgaaggttctattgttgcctaatgcattaacgaaaaaacctcaaatttttcagaatattactttccttcacatgtctaaacaaagagttgccgacatgcacaacccaatgatggtggtgagaaaccatattatccactcgacattccaaatatatttgaacaaaatttggcaactaagagaaaaattcaagaagcgtcgactaacaaaggaaggagtatggtcacttgcatgtgtatgtacttacgaactacaaggaagttcttgaattcgagaagtttcaaatat

SEQ ID NO: 10012 - DNA, 577 bp, Arabidopsis thaliana columbia
atttgcaaaagcagtgaataaaaatgattttatgcatctaataagaagcgcggtagttaaaaaaaaaatcgtcattatactgacgaaaatatttcgtagtatgttttagtgcactgttttgttatgtacggatataaagttgatatgaaagaaaaatttattcattcaatacaagtaacaagaaaatatcatactacaaatttgttgagtatcccctatacaccaattctctacaaacccaaaggagagaaaaaaaaaacataataacccaatttaattaattttaaacgtgccaaataatttgaaaatacttattaaaaaaatctacgaaattttcttttgatgataataatgatatcaagatgagtatgatgttgttcttagacaatatgatcaattgaactgatgatgattgtgatgttgttgctgctggtcaggccatgcccaataactagccgacgtcgtttcatcaataccattgaacatattgcaaaacccttgatcttgatcttgaacaatctgatgatcaatatgggtagaggtcgtggtcgcggtcgcggatcggatcgaagaaggg

SEQ ID NO: 10013 - DNA, 705 bp, Arabidopsis thaliana
tgcctttgttttggtgctacgagatttcttcatggggtttagtaatcttgtatgctggaactgctttctcccttagaagaagagctgctttaactattgacgaaggagagtttgggaacagaaatgatcagggcttggagatgcttgaagctaatccgttggaattcacaccagacgttgaaagacgagtgaacgaggggtttaaagcatggatgggaccatctttattatcatctgatgaagaagaagacgaacctgacttttacaatgaagtgccgaatgtaactcatactctttcaagcaggcaaagatcttgattcttgcaaagaagaatttggtatgacacttatgcaaacctccaaagatgattgcttcagagattgggctcaccaaattgttccctcagtgattctcgggttatttcatgtctctgctttctgctgatgttgtttatggacggatcatgagaagattttgatccggaagataaatcagaacggttaggactgttgctgttgtagatatacacatagtggatcaatcaagattgtgtttggttctgtcttttgagcagttcatggtcggttttgatcgtttacattgttcattgtaggaatcttgggtttgtagtataggcctaacaatacattttgattgtacaataacctttagatcaacagtaatagcatcataaaaggattagta

SEQ ID NO: 10014 - DNA, 592 bp, Arabidopsis thaliana columbia
tattttttttattgtatataatacctaaatttattttaaattgtgtttattttcagaggaatggcaattcctgatgcaacacaaccacatggtcttaaactcctaatcgaagactatccgtacgccaacgacggtcttttactctggtcagcaatccaaacctgtggtccgaacctatgttgaacgctactatccaaacccgaaccttatcaaaacagactctgagctccaatcttggtactcagaatcaatcaacgtcggccacgctgacctccgcgacgctgattggtggccggagttatcaaccgtcgacgacctcgtgtcgattctaaccactctaatctggctcgcctctgctcaacacgccgctctaaactttggacaatacccttacggtggctacgtcccaaaccgaccaccgttgatgcggcggttaatcccgacgagtcggatccagagtacgcgagtttcatctcccatccggagaagtattacttctcgtcgatgccaagtttggcgcagacttcgaagtttatggccgtggttgatactttgtcgacgcattcgccggatgaggagtatattggagaga

SEQ ID NO: 10015 - DNA, 502 bp, Arabidopsis thaliana columbia
tcatcaacatcatatatatttacatttttattcagtagagcgattaattattaaggagtaattaatactatataagaagatgtttttttcttaataataaaattatttggaatggggtggtggaagattaagatcaagccagatttgcttgaagacattgatgataatagcgtgacattcgtctgaattgagacagagatagcaagccaaaagctcctctagatcctttgtcgctcttatcttgttctcagcgatcatctcctccatcgactccttaaagtctctcttcggatccaccgacgccttcaccaccgccctgctccgccgagccgacgacccgcttcttcttgcgctgctgctcaccgagatccgcggcgaccgcattctaagtctcacccccgccggagaattcactgcgttttcgtgcggtggcggcgttttggtaatgatgggccggagtcgagttccgcggcgggtaaaggttgcggttttggatacttgg

SEQ ID NO: 10016 - DNA, 952 bp, Arabidopsis thaliana
atgatttgtgtcggataattgctcaaaaccccaaagattgagtttgagttcacttgttgtataaaatgtttgcacatagcgagaacgaagaaggtcgatgataggttaactaacctcaatcacgttctagttgattactatattcttctgtttgtgtaaatttatggcataggttgcacgtgggagcaaagacactggagaatctattcccatgcttttgagaattccacggctttctgatccatggggtggttacaacatgatcggttttggagacattcttttcccgggccttctcatatgctttattttcaggtaaccctcttatgcatgatgcattggctcaataacgattatggttcacgacaccaattgtgaacacatcatctgttacaaacgctgtccgtattcaatatgccccatctcaatatgttttttgaccgctttttaactcttttacgtctcagatttgacaaggaaaataacaagggggtctcgaatggatattttccgtggttgatgtttggctacggacttggcctcttcttaacatacttgggattgtatgttatgaatggacacggtcaacctgcattgctatatcttgtcccttgcacgctcggtatcttgttcatctcatgaaaaactctgaattttgatgattagtcccctatatatgcattccattgaaacccaaccaaatgcaagatttcttacatattgagcggcttgcaggaatcacggtcattctagggttggtgaggaaagaactcagagacttgtggaactacgggactcaacagccttcagctgcagacgtaaatccatctccagaagcataaattgcttcaacatacataactcaaaactctggagactgaagaacaagaagaagaaacatcaaaaaagaaacaatttttcttttgcacataaaaaattataagagatatac

SEQ ID NO: 10017 - DNA, 1306 bp, Arabidopsis thaliana
cccttgtcaactgcctttctattctctttagaaccagatgctgcaccttctttgagcttttgatcagacaaactacacaaaggatctctaggcttaggtttcctagcatgtttgggcgatctgttcctttgcttcgtctttttcgtagtagtcccagtagagcctatctcaaagagattaggactctgaaccattgaactatccggaaaaggttgagagagagcaaggaagctaccagcctccgtgaaggaattcctgatcggcttcttcaacaaccactctctagcgtcttgcggctgtgacgattcagcaacaccagaagacgagttgaggttgaaactgattccttgacttgaagattcttcctgatcataaccgaagaccaaccctttttccttagacagatcatagtgcactaagggtaaggcttccaatcgcagaacagttttctgagtaaagggatctttttcagtctctctaacagattgaattactctgtctacccgaatagaacgctcctctgcatttgcaactctgaggtattgcctcataccttccaagacctctggagcaattcttggtcttcctgtgttgggatccaaacccacctgactttcttgtaagacaccaaaaagagggtccccttcctttaaaacaggctgtggtggagctcttggaatggatactccttgtctcgaagcagccgctttgtcttgacgagccttgatcaggagagggcacatatctttctcatgagttaaccgctggcattcataacacctcttttgaatcctttcataatggaattttaccgtggctgattctccatgtttgaaattgatgactttggatctccttaacggtctagagacatcaaagagcaccttaacccggacaaatttctgagcctgatgcaaatccgggttgaacaccacctctttgacctcaccaatgagatcaccaagcttcgtgatagctttctcagtgtaataattcaccggaatgttccagatttgaacccacaagggcatgaaccgtaaatagtcgtctggagggtgctcataccatctgtccacaataatggaccattcattaaaggaatgcactcctttcgccaggacatcttcaagatcatgtttggaatcgaaaatgaactggaatctttcatccgaaagagctacacctttgactttcccttctttctgccacttccttggcatattacgaatcaagtgtttcatcggttgacaactagggttgagaacctccctattaaacagagcttatccctttacaagacatgaga

SEQ ID NO: 10018 - DNA, 585 bp, Arabidopsis thaliana columbia
  unsure (1)..(585): unsure at all n locations
nnnnnnnnnnnnnnnnnnnnnnctaaagtgttctgacatcaggcagtgcaggtgcagacatttaagccaattgctgccgccattctttgacgtagtcaatcagggcgcggactttcggtgcaatattgcgacgctgtgggaaatacagatagaagcccggaaattgtggaagaaagtcatcaagcagcgatacaagcttaccgctttcaatatatggcctgaaagtttcctgagtggcaattgttattcctccgccggcaagagccagcctcaacatcagacgcagatcattagtcgtaatctgcggttcaatcgcaaggtcgaaagttctcccgttttcttcaaatggccagcgataaggcgcaacctccggggactgacgccagccgatacacttatgggtattcccccggaggcgagaaagcactctccacgcccggccgcaaggatcaggacgacgggggcaggcatgaatcctcctcctgatggagacgtacagaggcgacttctgccagcacggagagtgccagagtatgcgcatcccgggctttggggaatatccgacgggtgcccggattttgcgtg

SEQ ID NO: 10019 - DNA, 579 bp, Arabidopsis thaliana
ctaaatactatggccacttctcacctgtgacagtcactgaaacaattactacgaaatccaacatggcaacaaactacctcatgtggagtcttcaagtcaaccaacaaaaaatgtatcttgatttgatacaattaagtgtgttctaaaaggatctttctaaaggttcagactttattgcttactatatttgaaatgagaaatctaacagtcaatggaactcagagaacgaccaaaaactaacagtcaatatgcaaagattatctgtgggaaacttaccatatatattagtgttgaaccaagatgctgagagtaagaaaggcaatggagaataagaaccagaagcggtttgtgctcatccatggggtgtgccacggggcatggacttgggacaaggtgaaaacgcagctggaggttgcaggtcactgtgtgacggcagtggatcttgctgcatcaggtataaacatgaccaaagtggaagagattcagactctgaacgattactgcaaaccattgcttgagtttctgagctcgcttggctcagatgacggtaaggtgattgttgttgctcatagcatggga

SEQ ID NO: 10020 - DNA, 553 bp, Arabidopsis thaliana columbia
gtggtcgcagagtcacattgtagtttgcatcacggatcctcttcaatgtgtaggcttggcaaacgttgagggtcgtaatgtaagagtcacgtagccttagtctctgtttcaagtaaggatctccttcaagaaggtctttatgtccagcagtctgcaacaacgcaagtttagtgttattgcaagaacaaacccaacaaatatgaaacagaggaccctgttttttgttatgttatacctggaggacgaggttcttggtttcatcaaagttggctctgagtttctctccaaaagcccataaatcttctgagacaagaagtttgtcgtacaaagcagcgatcccggggtctcccttggcgaacaccatttcaattagatcgatggtgactcggaaaaagggccattgtttatacatatcttgcagcatgtgaaggtttctcacatccttcttgatcgcatacctaaatgctgctccgaaacctaaccatacaggaagatggaatcttgtttgcgtccaagcaaagatccatgggattgcacggagagattcgatcca

SEQ ID NO: 10021 - DNA, 522 bp, Arabidopsis thaliana columbia
ggtaatattggtctttacttgattggatatcactgagacacttaaatgctatctgatatcattaggactctggaatatagctatcatagtggaaaccgaagaagcttgagaccttttttaatcttgttgagctgctaagagagtcgtttcaagttcaatactttactctgaaaaccttttataccaaggtgtaacgtactcaaagctctcttgtggaaaggactgctcagaaagagaagtgagctacctgcagtgtcctctgttttgtcgatgaaggatttttagattggtatgtgatgaagtacaacgagctgatgcctgcgttgatggctatcttcaccaaaagtcgtgtttgttatgaagcacaacgagctggtgcctacgttgatggctatattcaccaaaggtcgtgtttcatagatcagaaggcacacctacaacaatgagcagtgccaaggtttgttcttattttgttgttgtcagttttagatttctagatgaatcttatgatgtgataatgga

SEQ ID NO: 10022 - DNA, 577 bp, Arabidopsis thaliana columbia
cacagagttatatggtgagttccgctctggaaagactcagctgtgccatacactgtgtgtgacttgtcaagtaagaaccctgttcctataccactcagttattgttgcttatctagcagaaatcagtgatcttgtctttcttcttacaatttccaaacctgagaaagatattcacattaaggttcacgtttgaatgattagcttcccatggatcaaggaggtggagagggaaaggccatgtacattgatgctgagggaacattcaggccacaaagactcttacagatagctgacaggtatgttattcttgtaacacacatgagatcacaatagcgttcttgagacggaatcatctgtaagaaatcaaatgaaatgatgcaggtttggattaaatggagctgatgtactagaaaacgttgcctatgcgagggcgtataatacagatcatcagtcaaggcttttgcttgaagcagcatcaatgatgattgaaacaaggtgtgttgagtttattttggtgttcagttccgttatgtctatcatgagagtgctaacttttaaagttacgatgaccctattg

SEQ ID NO: 10023 - DNA, 530 bp, Arabidopsis thaliana columbia
gctttccaggtcaccttcgcgcgcatcatactcaaagttcccacagaagactggcttcatgcttcctgtatagacaaccacaatagtaaaaaagattcatgagacttccttaaatgataatttaaacacgaatatcacaactaatttgtcaccaagatgaaaacttttaacactaaaaactagagccctcacactaaatcgaattgttttgcagtaaattaggacttgaaactcatctattcgagctccaaatcagttaaatctaggaactgaactagacagtattagaatcaaaagtacaatgcaacagatctaatctaactacagttagatctgaatatcattcacaagatagagaaaacgagaacaatccacgaaagcatgaatctttcataccagaaaaacaaagaaggctctgatgagattcaacttataaaaaacgagatggaccaattctcttgttctacttttcaccaaccaagaaaaaaagaaggaagaaggagatgagaaccacgacgatatagagagtg

SEQ ID NO: 10024 - DNA, 564 bp, Arabidopsis thaliana columbia
taacacatacttaagaaatgaggtaacgaggtttgcatgtttagtcatccctggacaaactcttcttcttgtggttttgatattgttgttaacctttaagctttttaacagcttttggagatggagtcttctgttctgaactacttgaagttcgaattaacaactccaacagcaaaatgtttcttgaggtatcttcttgtcacattgatgttatcttcattcatcattttttgtggttccctgctgatctagactttaaaaatgtggttaggcgctttcttcgtgctgctcaaggcagaaaggaggtattctgttatatgaaaattaaaaatgagctctcaacgcaatgggtgatgtgttatatacgtttctgactagtagctggtttctattaggtaccatcactgctgtctgagtgtctggcctgctatctcaccgaattatcgctgttagattacgctatgcttcgatacgctccatcgcttgttgcagcctctgcagttttcttggcacaatacactctacacccttcaagaaaaccatgggtatgacacaagactgtat

SEQ ID NO: 10025 - DNA, 1455 bp, Arabidopsis thaliana
tgtctgcatacgtagagaacacttgctccttcttacaaggaaccgtcgtgtttcttggaattaacacagtcatgaccccacctgctgtctcaagtccaaggctaagcggacaacatcaagaagcagaagatcctggaccttttcacttccttcacctgtaagaatcgcagcctgaaccgcagctccataggtagcagcttcatcagggtttatgctcttgcataactccttcccattaaagaaatcttgcaaaagctgttgaattttcggaatcctcgtcgaccctccaaccagaacaacatcgtgcacactgctcttgtcgagcttggcgtctttaagaactttctccacaggatccatacatttcctgaacaaatccatgttcatctcctcaaaccttgcacgtgatatcgtcgcatagaagtcaataccctcgtgcagagaatcaatctcaatagtcgtctgagccgtggacgaaagtgttctctttgctctctcacaagctgtccttagcctcctaagacgtctcgcattcccagcaatatccttcttgtgtttcctcctaaactccgcaacgaaatggttcacaagtctgttgtcaaagtcttcaccaccaagatgagtatctccagcagtagctttcacttcaaagacaccttcttcaatcgtcaacagcgaaacatcaaaagttccaccaccgagatcgaaaatcaaaacgttcttctcaccggccttcgtacccttcttatccaaaccataagctatagctgcagcagtcggctcattgattatcctcaaaacattaagcccagagatagctccggcgtccttcgtagcctgtctctgcgaatcgttaaaatacgccggaaccgttacaacggcgtttttaactgtgcgacctaagaaagcctcagcgacttccttcatcttcaccaacaccatggaagatatttcctcaggagaaaactgcttctcttcattcttatacgaaacgactatcatcggcttctcaccggggccggaaacaaccttgaacggccagtggagtatgtcactctgaacagaaggatcagagaacttccttccgatgagacgtttcgcatcgaatacagtgttctgaggattcaaagccacttgattctttgccgcgtctccgatcagccgctcagtatcagtgaaggcgacgtacgacggcgtcgtacggtttccctgatcgttcggaatgatctccacacgatcattcatccaaactccgacacaactgtatgtagtgccgagatcgataccaatagctttctctgatttcgtcgccattgttgctaaaaaaaagcttcagtaattgaatgaaattggaagtgaggtttttcgatttcttttgtttgtttatctgtttgatgaagaatcggaaacgatggaagaagctatatatacgaatccgacgagaggaacgagaca

SEQ ID NO: 10026 - DNA, 435 bp, Arabidopsis thaliana columbia
ttctccgtacagatgcttatatcacggaccgtgacgttattacttgaataaaaccgaagtgcctatacttataattcacataagccaatcaataaacattttacgaatctgtagttaaaaaaaaaaaaattagtaacaatagacttaccgttggtttcattggtgggatatacttatttctcgtctgaaaaaaagaaagaaaaaccaataaatattttaaaatctcataatacaatttcgaaaaaatatcaaacgaacatataacaaaacattaatctttcaaagtacataacacataaaatcttgattgcaattataattataacaaagatcttaaactttcagtatagtgattggtagtattatactttgaattaagtccgtacctgagtttgataagtgtctacgtccaccagttatagcacgaccgttaag

SEQ ID NO: 10027 - DNA, 630 bp, Arabidopsis thaliana columbia
ccttattgtgtgtttagcttctctcttgcatataatattcgctgctaggatgggaaattcaaaaccactccctacaatttcttgtatttcagtttttgctctatatttttcattctacacaataacactaacttcttcaacctccctacaagatgatttcatcaaatgtctttaccgaaacacaaatgtccgttttacactcgacaaaacgttcttcactcctgaaagaaacgcttccatcttcacagaagttcttgaatcgacggctcagaatcaaagatacttgaccaagacaatgcctaaaccgggtttcatatttaaaccggttcacgaatctcacgtccaagcttccgtcatctgttccaagaaacttgagatacattttcgtgtcagaagcggcggtcatgattacgagggcgtgtcttatgtttcacagatcgaaaaaccttttgtattgatcgatttgtcgaaattgagacagatcaatgttgatattaaggacaccagtgcttgggttgaagctggtgctaccgttggtgagctttactacaggtaatatataagtcgtttgattgttatatatgatacttttttctatacaagtatcaactttccacattatggagtgag

SEQ ID NO: 10028 - DNA, 1237 bp, Arabidopsis thaliana
ccaatagaactcagccgggaacccatccggaccaggagccttgtttttaggcatagagaaaagggtctgagtgatttcctcgtctgatggaatggcaatgagcttttcagcaagagtagagtcacactaaaaggggtaaatttcccagagagtctccaccgagtaaggggtagaagttgagctctccgttcccaaaagatgggtgtaataagtcacaatcatgtccttaacatggtcaacattttccactctcaacccatcttccctcctaagataacgaatgatgtttctagcttggtgaggaaggacaactctatggaagaactgggtgttggcatccccttcttcgagccacttaattctggacttttgtctgaaaaaaagactccaataccttagcaaaaaaattccagtttttcctcgcaacgtgctcagccctgaagagcgaatcaaccggagcaaacaacaactaggactgaatctcttccaatttagcaagggcctctgtcgttctctattgtaagttactgaaaccttccctcttcaaaacccgataagctttctttgcaaccttaagatgttccccaagagaaaacatgtaagagccaactgtaatctcacctacccatgcagccaaaatacgagaaaaaaactgagagtggatagacagaaaggagaagtacttaaaggatttttttatctttccggctggacttcgatagaatgatacaaggaccatggtcagagtcccccggagggtcaaacactgccatagaactatggtaggaggccagccacaggtcattcacaattgctctctcgagtttcctgataataggattctcggcttgatgattgaaccacgtgtaaaacacccttttgcttggaagatcaatcaactgagtaatgctcacctatggaagcaatctgattgaaatctcctgccgcaatcaaggagaattactaagcggagacgaaatggcaagagtgcacaaatcagaccagagctctcttctttccacctcacagttgcgaccatacacgaacatagcaccagaagtctgattaatattgggaagctttatagcgcactaaaggggaagcagcaaagcagtttactcggccctttactctatcagcaccagaggggaagcagcacagcagtttactcgaccagtcactctatcaaggcagctacagaggcagcaacagacaaccactcgagcccctactcgat

SEQ ID NO: 10029 - DNA, 1167 bp, Arabidopsis thaliana
gaggatccccggttttccatggtgcgtctttcttacaaatagagtaataagactcaaataaacaagtgaggagagtaacagaataacaataataatgccgtgttcgctggaggtaacaatgcttctcttttcatactgacaaaaataaacaatggaagaagctcaggccttggatgtcaggatctcatgtactgcagtccaggtcccggtaatggctatcataacaccaatgaggaaaacgagaacgtctaccactattcttgtgatgctcaactcgtttttgaaagcctgcaagtgaaatagtgatggcaagacaaagcccagcaccacgcagacgctgctccccaccagagataagaagtctgcaaaatttgggacgagcagggccacgagcgtgaccaccagcacagtggcccagcgcacccatacagagtaacgggagctgcaaaggcggcgttccacgacctcgtagacaggttgcatcataagggggaatgtgaagaagaggttgattgctaagcccagctgcaccagagtgctcaccactcctgtccccaggttggtggtgatgatgtctttcgtctcctctccgtaagccatgtaccctagcagcccgaacgcaccgtacatgatcgagattaagcccatggctagccccagcgctctaccgaacttgtctttgtatttagcctctagttccagtggcagaacctgttcacatccaaccacaaatcaggattattagttttagcaccagatagagagacagtagaggaattagttggtctgcttaccattccgatcccttcaaatgcgtacaccgcaactcccaatccgtagaagaaaacagagacacctccaaagactctcaaaggaggtcttcgtttcaggaagatgaaaacatcctgcaccataaccactaaggtggcggctacgtccacgatatcggcgaatatactcaaaggggcgagatgggtgagcgatgggatggagttgagaccagctgaaaggggaaacatccccagaggtaaatggaagcagcatcgaggcctagaatatgttcggtgccgcggctgaggagattagccattgtggtggcgacgaagataaggtaactgacgcagaagccagattgggaaaggcaagcataacatcgcgacgagacga

SEQ ID NO: 10030 - DNA, 1090 bp, Arabidopsis thaliana
  unsure (1)..(1090): unsure at all n locations
atgaaatgtattaaaataaaaatcaaagatttgcggtattctaaatactagaattattaattttgttggcaaaaatcactcactatttacaacaataaatctcaatagagaacctaaacaatatataaacaaaacaattgataaataaatacttttacatgattctgaaaaaataaatctgaaagatatgataatgtaacaaaatttaatgtattaattataagatttacaaaaaataaatatgaattgttaactaaaattaagattaaccttatttttgaaatcaaattttaaatataaaaactaagcatgcagggtggctactaatctgatgggcttagcagggcgggtttggacatattatttctacatgcacttctggccaggccagtccgtcgcaatctcacaaaaaataatgcttatcacgggatggccagagtggatgctggccagtttgacacctctaatattatcattacgtacttttcgtataatacttatagttttaatataaaaacctcggatattgaaatagaaagttttgttttgttttttaacacaaagtaatatattccaacgtaacttttgcagacacataccattttaaaaatatactcacacgtttaaattcacaccataaacactcattgaaaatgttncntcctgtagcgcggatccgatcctagtttcgcattaaaaaaacagcatattattactaaagatactctcccaatattttagttatttttataaatacttaaaattttccctcacaataaaaaaaacattattaatcgtctagagagaaagccctagaatttcacaacaagctccatagagagaagcgatcgatcatgttaaggcaaacaactaaaagagcctttttagggctcgcttctcaaaatcccacaccgttccctgtcgtgtctcgattataccatccaaatgtcatcgaccattatgacaatccccgtaacgttggatcatttgataagaatgatcctaacgttggtacgggattggtcggagctcctcaatgtggagatgttatgaagcttcaggttaagtttgatggttctggtcaaatcat

SEQ ID NO: 10031 - DNA, 593 bp, Arabidopsis thaliana columbia
attcttacagatgcagccattacctgcaaggtctggtgatcatgagggtttttggaactcacatcctcttttgctggttgttgctggggatgaaacaaatggcactggtttgggtcacagtttttcccagaatggttcattagcaagagatggtagttcagactctaaagccggggatgccatcaattatcctaccactgttcgcttctactcccttaggtcccacagttatgtatatgtcctgagatttcggtcatctgtttgcatgattagatgcagctcccgagtagtcgctgttggccttgcgaatcaagtgagtattactgtggttcaataaattcagattctttattagaaaattcttccataccaatcgtactttatcttagatgattggcaagataagtgtttggtagttggtcttgagaccaaatgaaccttgcttgtattgaatgtagtttaactatgcgtagtgttattatacttaagtataagagattatcttttgttcttatgccatacactgacggtttccatttggtgtgtgcagatatattgtgttgacgcacttactctggaaaataagttcagtg

SEQ ID NO: 10032 - DNA, 467 bp, Arabidopsis thaliana columbia
gtttgactgcaacttgatcacttcttattattccactggtcattatctggaattaaacacattaatttagtaacataatggccaaaaatctgaaggaagaactacgacagatgtcatgctcacctttgtggccaattgtaacccagcttccagaagaacagggccagaatttgcatccaaggcagtacgaacagcagacagaagttgagcctaagtgtgaaaatagtcggtaactattatgttcattaaaaagtttaattagtctgtgttcgttgagatataattttgaatgggagcacctgatactgttccagaagaagatgtccaggaagttcagggtcggctactaatttaaactgcatcagtatcagacaattacaaatgatgtttactgcaaactaccacaccacatcaccaaggtgaatatgacaaggaggctagcaaaatattggcgagaaaccacatgt

SEQ ID NO: 10033 - DNA, 594 bp, Arabidopsis thaliana
gctcccaaggatttaagttttgttggctacacatacaagaactttgacgctgtaaaaggattgcgtcattcacttggtaaattcacatgaccctactattattaaattatttttaatcttgtaccttgactcgtgaattctcctagtcaataaacagtgcctgataatatgttttaagtaaacgagacgcaagaatttattgttgatgaagaccttaggaagaattgaccctttttttccaattctgtagagatggcaagaactatgtctctagatcgatcaccaggtaacttgtgtttcaacattgaaaacttccttgcttcgtttatttgcctttttgcgtgttcagatccataagcttctttcacagatatatatacatcctgagattagttttaagttcatgcggtgtatagtttataccactttgtattcaaaaagtgaactgatataatcaaaactttgatgcagctgaggcgatgctgtggagctgataagcggggaagcagcagaggcacagatggtatcatcgatggatgatcaatgataatttgaaagacctgacaaagatataagatcttcatcaggtttggg

SEQ ID NO: 10034 - DNA, 559 bp, Arabidopsis thaliana columbia
ctcaaactacaaacattcaacagagcttggttcagcgaaatttaaagttggttaggaacatgtaatgtaagcgaatacacttacctcaacaaagcaataacatggaggccgaggtggaaccttcaattcaatatcgacaatgcggccatactgcaaacaagagcattaaatatgaatacaaaagatgctcaagaatcttcactgtcttatagggataacgattcaagagaggacccgtaactgaatcaaacaaataaccaaaaactgaccttgtaaaagatatcttcaatctcatgttccctaatgtcaccgggcaagttaccaacatagattgaccgagaaaatcgcccactcattgtttgcaaaggttaaaaaggggaaactgcacatgagaataaaaaggaaacgaaataaataaaggatcaaaatttactgctatagacaaagaacctccactcaaacagctttcgacatagccccagcatcaaaatgagacgatgataagaaaagaaaaagaaaacatggtaagaccaaaatatatatgaagcaaacaagtgag

SEQ ID NO: 10035 - DNA, 558 bp, Arabidopsis thaliana columbia
atgggcctgaagacgatactgaacaacttccctattctgaagcattaatttcgtatcacaggagattgttgttaaaagcgttgttacgtgcaatatcccttggaacttatgctcctggtaacactaacctctacggttccgaggagagcttgttgcctgaatgcttatgcattatcttccggagggcaaaagattttgggggtggagtattctcgcttgctgccactgtcatgagtgatctcattcataaagatcccacttgtttcaatgctttagattcagctggtttaacttctgcctttcttgatgctatatctgatgaggtcatatgctctgcagaagctataacatgcattccgcagtgtctggatgctctgtgtctcaacaatagcggtcttcaagctgtgaaggaccgaaatgccttgaggtgttttgtgaaaatatttagttctcctcttatctgaaggctcttactagtgataccctggttctctgtcaagtgggcttgatgaactcttgagacatcaatcttcgttgcgcacttatggagttgatatg

SEQ ID NO: 10036 - DNA, 558 bp, Arabidopsis thaliana columbia
caaaccaatctccatgaacaaaagatcgatgccggttcaagagactgaatttagaaattggaaactaaaaagaagggaattcgatctcagctccacatttcccatgtgggaaaaccggacattcgattaaaccggaaccagaccggtcaacacaaagatagacttggtacaattggctattaccagaaccatctctgttacactcaacccaaggagtgaaaccaattgactcttttatcgaatctcttatgctctccaaagagtaagattttccatccggattaatccctattacataataaaccaatagttagaccaatgagatccaaaccgggaaaataaaaaggtactttgacatcaaaacgtaccggctttggttagagctccaaggagattggttttctgtttaaggttaagagcggtttggaaatattcatgttgatcgataaccgattcagagcaagtaccatgcttctcccattcgtgctcccaaaacgcttcacctgaaccgcttgggcaagccagtgttggccagctcttcttcattgaagtgagaag

SEQ ID NO: 10037 - DNA, 569 bp, Arabidopsis thaliana columbia
atataccatggtgaacaagaatgtgttggcaagatccagctctttattggtagcacaaccacgtccgatgaagactgtcacataaaggtatgttctttctccaacacaatctcccattatctgttttgttcagtgagttaacttatgttttgcatttctgtatattctagaacgcacctgttgtggagacactagcatatgatttgctactagaagcggctacacgtgcccaaaaattccatcctcaaaacttaaggctggatggatcttggaaatggctgttaagcgaattcgcagattattatggagtttctgattcatataccaagttgaggtattcataaagatatttcagttagatttccttgtatctattgtaattcgtctggaatttagctcaaatatgctgcaccaaacttttcagatatctctcacatgtaatgaatgtggcaactccaacaaaaacctgcttacaacttgttcatgagttacttgtgcccatcctaatggctcgaagtgagaagagtttaccagacaagaggtaattcgcattttggttgtaattgatg

SEQ ID NO: 10038 - DNA, 592 bp, Arabidopsis thaliana columbia
agcttggtgagagcagttggatacgatatggcgtatatgtttgcatacagcatgagagaaaagacacatgctcatcgcaactacacagacgacgttccagaggaggtgaaacagagacgtttaacagaactcatcgacgcattccgcgaaacaacaggtccgtgttatgactctcaggtaggatcaactcagttagttctcgtcgaaggaccaaacaagagagcgcctgagacagaactcattggaaaaactgataaaggacacagagtttcgtttgtcacgaagcctctgtttgataaagcgtgtcttcttgatggtgatgatctgaagaggaatcctggaattggggattttgttgaggttcagatagagaaatcaacgagggcatcgttgtttggggaagctctcgcgattagtaaaatgtccttgtttcacgatgttggtgtcgtcgatgctgttgttgcgtcttgtgcaagttaagttgaacttccgttttctttgtttcgaaagcctttatactttttcttctgtatactttcttcatagttaaccagataagttatttacagatgaattttattacttttttgaa

SEQ ID NO: 10039 - DNA, 493 bp, Arabidopsis thaliana
tcgtcggtaatataggaacagcacagaagtcaaagaactaagtccacaaatgagccaggaatttggataagtatgtaagctagtactggaagcacaaggtctttctttcaggggatgagtccgagttaaggaaaatcagggagttgctcaacaaaactagattgaagcccactaataacacaaatcctatagcattagcattaatggccaagaatctaaagaggacacaaattcttgattgtagaagcagtgagtaaattacatgccaagagattttcctacatagtgtagccgtcaaatggaaacagaactaagacattcacttacttttaccccaagtgtaggggccgtgtttgttattctggtttcctttgggttccttggagtactgttttttgaaccacgaggtttgcttccgggatgagggaccatcggcatcaaactcatcatgccagctctggaatcacataattagccacagctttgagagttt

SEQ ID NO: 10040 - DNA, 523 bp, Arabidopsis thaliana columbia
taccttgatatggtcacgagctgtggcatgtcaaatggagcctgcttccattgcgcaggtaatatatgtgctatttttcactttaaatcatgcatagtgtcaagtaggttcttattgaccagtgagagaaaaagaaaggaaagaagagagcatgtaactgatattgaatggttgaaggtttaacattaggaaatccaacatatttctccaattttttcctgactctttccttcctcagatacaacttgatattggcaatgcctctgaatccatcatcttcagatcatcatgctcaaaagttgaattccttgggtaccaggcagtttacgaggtacgacctatttcatattttcgctgattacctagcagttatattattaggcgggtttctaatgcactgatgactccctagatttagcctttggagcaattcttcgtaattatttgcttctctttgctgtgattgtcatctgcatgtttatattgactgcttttgccttttgtggatttaattttgttttat

SEQ ID NO: 10041 - DNA, 665 bp, Arabidopsis thaliana columbia
gggcgtgcaggtaaccggtttctaaaatgtcacgttatgggttacttagtgtggagggcagcttatccgtttgttcattgctaatatttctttatgccattagttatagacatggtcatctagtaagctgtgtgggagatgtgacctcttggaatgctgttttgatagagttgattgcgtagttaggcgtgtagtaacatttttttaactcacatctctaaaattgtggtgggggatcaaatgacttttattataacatggcattgatgtagattacctgttctgcattgagtttgatttcagaagctagtgtcaaaatgagccgaatatgtatggttttgaatttgcaggtgtatagtgaggagcaactatgggagacgatggagactttgaggaaagtagtaggatacagtgttgcaaggagtgccacatgtgcagaggagttaaaggctctctatgtcttcaccggtgtagtggagccacctcgctcaagcttaaaccaggacacttatgatattgcacatcttactattagacttcgcttcctcatgtctgttatcggaataaactagtttgatggtgtgtgttgtgtgctagattcacgagatgtgttgtgtagtctgaacccaactttgtatgacttttgttgcacttttggtctagtt

SEQ ID NO: 10042 - DNA, 557 bp, Arabidopsis thaliana columbia
aaactatatcgacccgactctttcatcatagaggccggacaaactccaacaaataccgggcgtcgtcattggggtgtatctaaatctctcttgtttgataagaagatgatcattaatataagatttggtgatcgtgaataatgatgtgtgaaatagatgagctggagaacaacgatgagtttggcatttcagagcctaggagtggtgtatggagatatcgggacatcgccattatatgtgtatgcaagtactttcactgatggcatcaatgacaaagatgatgtcgttggtgttctctcgctcataatctacactattactctcgtagcgctcctcaaatacgttttcattgttcttcaggctaacgataacggtgaaggtaccctttttttgcttttgatctttatttgtttgtttatataaataatataattcgtgtattaaaagacaatgaacaaacaacctcacttatttcctaagtaatgagtcaattatgaacaagggttgatggaataattaaattgtagacttatcatatactagcattatcattgatg

SEQ ID NO: 10043 - DNA, 593 bp, Arabidopsis thaliana columbia
tcggattggctcggcttatgcgtaataagcaaacaaacgagcttgtggctgtcaaattcatcgatcgaggctacaaggtccattttttttctttctgttttcttttagttttgtttgtttgttctttcctcttatactaagaactttcatgttgttaccaaactggttgcctgatgcagatagatgagaacgttgcaagagaaataatcaatcatagagctctcaaccatccgaatattgttcggtttaaagaggcaagttattaaggatgagcatcttaattagctcctttacttaaatttctgagttcatatattgaaaaaatttatctcctaaaatttatccatttttgactattcgatccaatgatttttttcgacatgttcaatattcaaaccatagtagtcggaaactacaccaaatttgacacttttgatgcgaataaaaaaatattgaaacttggtgtgttgatgatttaggttgtttaactccgacacatcttggaatagtaatggagtatgcagctggaggagaactgttcgagcggatatctagcgtgggtcgatttagcgacagtgaggtttggaaatgaa

SEQ ID NO: 10044 - DNA, 528 bp, Arabidopsis thaliana
cagtgtgctctaaagagttcaaaaattcgctgtggagcaggaagggaattaccgaatggaaagcgtagcacacgcaacaactgaaagcagtttggcagaaacaaaaaatccccggactcggggatttatgtacaagaggcagcccttaggatgagggtataaacgtacaggaaaggttaaaaatccgctggcgctttaaacgtcatactattgccatacgccggatgggtaatcgtcaacatctctgcatgtagcaacaaacgtggtgccatcgctctcgcttctggtgatgcataaaaacgatcgccgagaatcggatgacccagcgccagagtatgcacacgcaattgatgcgaacgcccggtaatcggttttaacaccactcttgccgtgttatccgccgcatactccaccacttcatattccgtctgcgcaggtttacccgtttcgtaacagactttctgtttcgggcggtttggccagtcgcaaatcagcggcagatcaccagaccttctgcgggggatggat

SEQ ID NO: 10045 - DNA, 559 bp, Arabidopsis thaliana columbia
tgcttaaaggaagaccatatttagagtaatggtaagttagaattataatccaatgtcaagattctgctcttaacttccaaaaagtttcaaactttatgtttcctattgagtcaattatcaaacttatgtatcaatccacataatcagatcagtcaaatactcaaattctactaaaagatagaaattttagactagtgtcaatggatctcaaatcttcagaaacaaaccctagacaatgaaaaaaagactgtaattccagagaaactactccgatcaaaatgagattcgaaaaaagctcacaaggaaaatagagtttctcagaaggatcaagcttcaatcttcgtttagtaggaagaaaagacttagcaacagatgaaactgaaggagaaggagtcggatgttgattttgacccgatccatcaccgtgaggaccgttataaccaagctgatgatggtgctgatggtgatgttgatgatgatgttgatgatggttatgtagatgagaagaagtagaagaagaagaagctccagatggacacggagaagtagcagcacttga

SEQ ID NO: 10046 - DNA, 626 bp, Arabidopsis thaliana columbia
ctgatatttgaggaggaaatgatgaagaaaaattgaaatctcgagcttagccagatcatttcccgggcatagatggcttccagcaccaaaaggaaggaacgcaccagcttttggtacgaaaccattctgaaaattttctccaaacattcaaaatgaattcagatttctatggttcgaacaatgtaagatgatataacacttaacttacatcccatctagcaggatcaaattttcttggatctggaaagacttcagggtcgatgtggacatccctaaaccatgtcaaaaccttccaaccttttgggatcaaatagcctgcaagatttatcaaatcatgctaaatatttaggtgcactttaagaaggtgttttgtatttcatataagtcatgtgtttacatgtatactaaccattcatttcaacgtcagtctttgcctctcgaaaagcagtgagtgagaatgttatgactcgaagtgtctcatcgacaacctagtgaagaaacacctctttcaaaatcaccaaaaacaaatcgcatacaaaatctctgttgcgctatactcataggtgccagaatctacctgcgataagaatccattttcagggttcttttagagatagactttttga

SEQ ID NO: 10047 - DNA, 340 bp, Arabidopsis thaliana columbia
tgaaataacacggacgttttccttcaagagctttgaccaataccgggtctgaccagaaagttcttgtgaaataatgggtgaagtttgcgtggcattgctcgggagcagccaccactttacctagcatctgcacatgacatatcatctcggatgtcatcgaccacgacgagggtctgagtctaagtagatgatcctgtcaactctgctagggatgatatccgcgaggtagattcttgcgtagttaagatgctgatctagggcttgcctgatggatctcgagatcttgctgcgtacgaggtttggatcagactgttacatcttgacgtttaggttaggaaag

SEQ ID NO: 10048 - DNA, 753 bp, Arabidopsis thaliana
ctttgcctctttaacgccacttatattgataaactctgttttttttttcagatacattacttcagattgtgacgcagtctcaatcatctacgatgctcaaggctacgctaaaagccctgaagacgctgttgctgatgtcctcaaagctggcatggacgtaaactgtggatcatacttacaaaaacacaccaaatcagctcttcaacagaagaaagtgtctgaaacagacattgacagagctctactcaatcttttctctgttaggattcgtctcggtctctttaacggcgatccaaccaaattaccttacggaaacattagtcctaacgaagtttgttcaccggctcatcaagctttagcacttgatgctgctcgtaatggtatagttctcttgaaaaacaatcttaaactccttcctttctccaaacgcagcgtttcgtctttagctgtgatcggtccaaacgctcacgtcgttaaaacgcttcttggaaactacgctggtccgccttgtaagactgtgactcctcttgatgccttacgtagttatgtcaaaaacgctgtttaccaccaaggatgtgattccgtggcttgctctaacgctgcgattgatcaagcggttgcaattgcaaaaaatgctgatcatgtggttttgattatgggactagaccagactcaagagaaagaagattttgaccgtgtggaccttagtcttcccgggaagcaacaagaactcataacaagcgttgcaaatgc

SEQ ID NO: 10049 - DNA, 609 bp, Arabidopsis thaliana
gtcatgtatttggctacgatatattctaaaccttgtgtttctatatgctcctgtttcagaatgattagaccaagacactggtggcattcttacaaccatgcgcaatcaatgcttcaatggttcatgtctttccaattggccagattcttcttgtccagtaagcttcttttagcattttcttgttgttttgatcttgtgcagtttttttcatgtatctatggggtgttgtttttgttctcaggattgccgatatagccaagcagcgggaaatctctgggcggggtttttgcctgctggaggtatggattgcactctcttgtaatcagcatggagacatgtttccgtctcgtctgttaaaggttaaccagttttgctttgtaattatcgtaggtacaaggaaggacgtgccagaaggcattgggaggagaaagggcatcgctatttacttgagcttgaaacaaagcgtgtttgggattatgctggcgacaaatatgttgaccgtagtccgagcaaggatgattgtggaagctgtgaatattctgacagtagaatggctgatgctctcgttaacagaaaattggacacggtagtccttatgtttcagggtag

SEQ ID NO: 10050 - DNA, 378 bp, Arabidopsis thaliana columbia
gacagctgtcggataagtaaaattagtacgagcctttgctccacgaaaggcacgagccgcagagtcgtaagcacaagcggcttgttccgccgtgtcaaatgttccgagccaacgtctctccttcgacattgggtcacgtatctccgccgcgtatcgtccccacggcctccggcgtacgccgcggtacctcgtcgtgctgctgccagctccggcgatggttacagtggtatcttttgaagacagtttgcggttgcgggtaacaggtgaggctgtaggttcagtgaagaattttgtgagaggattagggtctggtgagtgggtagattcggtgaagtttctcaaggctttttccattttggggttccagggttttggttt

SEQ ID NO: 10051 - DNA, 559 bp, Arabidopsis thaliana columbia
ctgcgatgtactctgtgaccggcttggtgtgccaaagatcccaggtaaagccattttttgggaatctggtgtgtgtgtgtgtgtgttttgtcttcaaggcttatgtgacggcttgggttctgtctcttaacaggttgggttaatcgctttgctaatgctggggacacagccttggaagtggcaggaaacacagcaatgcgggtgggttcccttttgtttagcttctctacaacgtaaatgcaacattatgggtgttcaaaacttgtaaattgggattttgcagatgaagcaagccaaaactgaacttgtgtcagctagtaaagtggcttatcgcttcctctcgaatgttacttcgaacgtaaccaatggctccaatggctctccacaacgacggggaactctcaacaattcagacagcgggaacttgagattgcaaggtagttggctcaaaggcttacttaacacagccaaaccgctcactagtacagagatagggaacaaagatgaagatgcgaatcatgcagtcaccaatcagaagaacaaagccgtgactctgatg

SEQ ID NO: 10052 - DNA, 554 bp, Arabidopsis thaliana columbia
cctccgtgcacagagttgtagtctcgagacctgaaaacctaagagcagaaacacacataaaccaaaatttcagaaaagtcacatcactgatggcacaagatcaaagacagaacaaattcaaaataaaacaatcggaaagtaagtttatttcagaagcagaccttggtgactaaattcccgttgcgagctaagaactcagtggctaatctaacagaatcaataaccaaagcgttctggctcatagcctcttgtgcccacgcaccaccaacatttggagacccatcgtgcagaaccaaattaaaagcactaacaccatgctgctccatcacttgcttgatcttcgatttacactcagtccttgtgatatcttgcgtcatagtaacacagccacgaacagggagaatcgggacaagatcgataccgagaacgaggctgccgacgggaactttctcgacggcgacttgcatccaaccaccaggggcggcgcagagatcgagaacggcatgagctgagtggagaagagagtacttggcgtcgagctgaagaagcttgta

SEQ ID NO: 10053 - DNA, 633 bp, Arabidopsis thaliana columbia
cagaaccttgttcatgacatccaagccctgagcaagtgcggtggacggatctgattgagacggtggcatgctgctaagagcttttctaaatagttaaacttgacgttcgcatttggccaaacttccaaagcttgtgaaagaaaatctaaagcttgtttgtacatagtgttggcttccctgtccttaggctcaattaccacagctacctgttcaagaaagagaaaggaaacttaaaacgacagtcataaagagaataatatcacgatcaaccaacataattcgagactagaggtggtcaataaggtgtagaacttaaccagatccaaaagaaaacctacaatccgcataatctcattatagattttcatacagaatactatactgctttaagactgctaccgccaaacatcatttctttagaatgcaaattactcagagaggacgggcctctgtaattttgtaactccccgcccaatagatcaaaccagcaagtattacatgcccaaggtagaaggtgggaggtgtaagccttctcttataagaaagttgatgattagttcttccattgcagcatttggcttgaattctcatcaggctgggtacagatcaggagtttctcatggggattgcgat

SEQ ID NO: 10054 - DNA, 1173 bp, Arabidopsis thaliana
taaagaacaagccttattagcgatagtatccgctgctgcattccgttctcaattaacatgtcgcaaagatatctgtggcagtttatccatccaaaaccgaatgtcaaagagaagggtatctatttcgttgtgatctcccattgtatttaccaactttattagttccaagttatctccttcaaacacaatacaccggaaaccatgagtccaaatcatctgtaaagcgtggagaaatcacagtgcctccgcgtgtatcgccgaatttgctgcctgaagttttgcccaaccaaatcgaataacttaaccactattgtctctgactatccatccagtatttgtaaatgaacgtccctgcacatagccgctatcaaaattacatttaacccattctgggagagggggtatccattgccgactacggaaatgctcatgtgagtgaccaaacggcgagagagaatcatgatttacttcagaacctatcccagtcgtatctatccattcctaaacttcatagaaaccttttcttgcttcacttgcaggatcatagtttttcttttgaaagaggaaagcattccttgatttccatatcctccacatcatccaaaaaggtagtaatcgattgctgagagggatattttgtaccttatgaagttcaaacagcttgttgaaattgtcttccaaattctcttggttttgaggtaagttatcataaaccaaaatcaaaccaacacattgaacaatcgaaagggaacaacggaaaagaagaattagaccaaaacagtaatataaaacagagaatcaaatgacatatattaacatacgattttaagaactaaaaaaattaatccaaaacagagaatttgtgacagatttctggactgttaatccaaaaaagagaatttgacatcagtaagttttactttttaccaatctacttttttttttgttataaaggtttgtttttaccaatttacaagtacaaattttgttgttataaaacacatccccccccatgtctgacacccacaaagaccacgagagacccgaaacaccacgtttcacgcatttctgcgattcagcttgacacagacatatctcgagaggctttgtaccgaacaactcgtcgtctctctctgatccaagtaaaagcttcaagtccaatactcatggaag

SEQ ID NO: 10055 - DNA, 275 bp, Arabidopsis thaliana columbia
ctagtaacggccgccagcgtgcgccttgcgttgtctaggatgtatgtggcaacttctagctcatcacctcggtgccattcatatcctatccacgagaatgtctcaagatctgacaacatacattcccgtgcacgagcaggtgggttccaccgcacgagcgtccggatgtgtgccgtgagcaggccctattccaggtatctatgcagtatgtagcgtcttgagcgacttcattacatgtgagtggagctgtggaacctggccactagtgggctggc

SEQ ID NO: 10056 - DNA, 500 bp, Arabidopsis thaliana columbia
gtttcttgaccttagctttggtgatccacactgctgtagtgatcctgctaattttctttgcgcgttttaagtaaacttttttctgattggatttgatgaatgtcgtattcttttagacatcttacttattaccatatgctcacaggtgagtgctgcattaccagctcttgcacaactcattcggttagacgacaaggaactcttggcttacacgtgttgggcgctggtgtatctttctgatggttcaaatgaaaaaatacaagccgtgattgaagccaatgtttgtgcgcgacttattggtctttcgatgtgagtgttcaggactttagctaaccaaaaaaatccagagtcatagattctgatggccgtttgctttctgaacagccaccgttcgccttcagttatcactcccgctcttcgcaccattggaaatattgtaactggaaacgatagtcaaactcaggtaaatatgcggccagagataaaatttagtattagta

SEQ ID NO: 10057 - DNA, 576 bp, Arabidopsis thaliana
taccagtcaacaaccaaagaagtagcacgcccagtagcaaaagacgtgagaacctagcaccaaaaacaccaaattcatgtagatagttagacatctgattacacaagagctgactggatatcaacattacagtgaacgtcatataataatctatcaaaaagaatgatgacccaagggagagggaatatacagggttcttagccataaacagtgccggaactttgtacttttcaaacattagctctgccgccctgtcaagcatatgatttgagaaaatcagtaacacaccaagataaagcaacagtggtaataaaggatatttcaaagcagataaatcatacttctctctctgctgttgagtgtttaaaggaggctcagctagcagcattggatgctccgtaggatcaatcatcagacaactccttaaaagacaaagtttttttagagatgaaatgcaaacaacaattaagagaaaatataatgctttacacatttacttgaaagcatgtcccatatattgtcaccaaatccagtcagaacgatgccacttttataggtgacaacctggtgagagaa

SEQ ID NO: 10058 - DNA, 359 bp, Arabidopsis thaliana columbia
tacttgctatatgcaggtcacgtttccgtatgaatgggactggaaaacgtccttgttgcttgggggactgttaagtgctactgatccggttgctgttgtggctttgctataggagcttggtgctagtaagaagctaagcagcataattgagggtgagtccctgatgaatgatgggtaaatgacgttatcttctgtcatggtttggttagttttgacatttatgctcagtcttcatgatttttaacaacaagtccaggacggcgattgtggtatccagtgattcgtaaagatggctatggggcaaaacgctgactggagttctataatctcatgtctgcgttaagtcgcacttggagcgt

SEQ ID NO: 10059 - DNA, 385 bp, Arabidopsis thaliana columbia
tcgaagcttttgcccttgacccactggccgccctgcctgttctgccagtctcgttcggagacgtcgttggccaccagatagcccgccacgtggtcgagcgcctgcccgggcggcacgctgcggcaggtgcggccgatcaccaggcccagttccacttcccagtcggtttgcccggagccggcggcacacgcatgtcgtcgtcggcgcccgacatcgacgtgatcgccttggtgaacacgatcggctgctgcggcaccgccatgcccgcctcggcgcatgctggcggtagttcaggccgatgcgacgaactggcggatccgccaccggcacgcccatgcgcgggttgccctcgaccagcgcgacgcgctcgacgtcgatggcgcgc

SEQ ID NO: 10060 - DNA, 514 bp, Arabidopsis thaliana columbia
taactttatacagaggttacatggctccagagtatgttgttagaggacagttaacggagaaagcagacgtttatagcttcggagttcttgttctcgagattgcttgtggaacaagaatcaatgctttcgtaccagagacaggtcacctcctacaaagagtaagaatccctacaaaactccgtcattgttatcaaagttttggggttgatatgaatctcaaatccaccattgtttcttctctctaggtctggaacctttatacactgaatagactggtcgaagctcttgacccatgtctaaaagatgagtttcttcaagtgcaaggcagcgaactgaagcttgtaaagttcttcgtgtgggattgttatgcacacaagcttctccgtcgctaagaccgtcgatggaagaagtgatccgtatgctaaccgagagagattaccgattccatctccaaccagtcctcccttcttgagggttactctctaactacagacctagagggcagtagtactat

SEQ ID NO: 10061 - DNA, 398 bp, Arabidopsis thaliana columbia
actctagagaagaatgcacagggctgtgaacgatactaatttttttgtttctttgtaattctattttcagagtaagaccaaggcagaaaaaaacaaagcaatggggtgctccatgtctgtgaattcttgtcagttatgtactgttgagtggcttgtatttgagccagtacctattgactgctcaccttgtgggaaacggctcgaggaaaatgccttgcactatagtattgcggttggtgatcaaggcactatgactgtgcaccttgctacaatgacgcgcgtgaaagattggtttttcttgatggaacttctataccgaaaacaaggcttcatgtaaagaaaaatgatgaacaagttccggaaggagtatgtatgcctcatgatttcggaaatttgtg

SEQ ID NO: 10062 - DNA, 764 bp, Arabidopsis thaliana
taaatccccacctaactccaaaaaactccttatcgtcgctatctccgccgtttcctccgctgctttagtcgctctacttatcgctttactctattggcgaagaagcaaacgtaaccaagatcttaacttctccgatgatagcaaaacatacaccaccgacagtagccgccgtgtctaccctcctcctccggcaacggcgcctccaacacgacgcaatgcggaggctagaagtaaacagaggaccaccacgagctccaccaataacaacagctctgagtttctttacttaggaacaatggtgaatcaaagaggaatcgatgaacaatctcttagtaataatggatcaagctcaagaaaacttgaatctccagatcttcaaccacttcctccattgatgaaacgaagtttccgtttaaatccagatgttggttcaatcggagaagaagatgaagaagatgagttttactctccacgtggctcacaaagcgggcgagaaccgttaaaccgggtcggacttccgggtcaaaatcctagatctgttaacaatgacactatctcttgctcatcttcaagctctggttcaccaggaagatcaacatttatcagtatctctccttcaatgagtcctaagagatctgaaccaaaaccgccggttatctccacaccagaaccggcggagttaaccgattatagatttgttcggtctccgtcactgtcgttagcttctttatcgtcgggattgaaaactccgatgaagtaggatt

SEQ ID NO: 10063 - DNA, 466 bp, Arabidopsis thaliana columbia
tgtctaaaatactataagatattagttaatttagaaaatagatactaaattaaatagagaaacctcacaaacaagagaacacaaacgtttataaacactaatcaaagatcacagtctctccatcgaacaaattccaaagttgctcaacgtcaaacgccaaagtgccctccttttctgttgccgccgcttctgtaaccagcacatctacctcttggccctcgtctagcaaacgctccaaccatatattatctccaaccataaaattatccacaaaatcatctttctcatcatctttgttacatgtgatactattttcacaaacattatcgttgtcgagtccaaggcatggaggaattacaccacttcagactgtccatcgagatggttgcagccggtttttatagagaagaatcgaggccgaggctaaaaaatatcggcttttggggccggtgtattaggaggggtt

SEQ ID NO: 10064 - DNA, 401 bp, Arabidopsis thaliana columbia
acgcgaactggcccgctcctaggcgtttctccaggttccagcctccacacgaaggtgctattgttaggcagactgcggtttacgtgttcggcgctctgtgattgcactgaagaccgggctcacgtgcatatctcacgcggacatttgcagttcaacgataagatggccaggacttgcagatagcatgggtcaattggttcagcttctcaagctatgcgctgcagctgcatcagttcgcatcgagctcgagtcgcaaaaacgtcgagcatcatcagttgcgaaaccacgagtatctacattgatctccgttagcaacgtcaacaagctttgactatgtgttgtgtcggatctttgtgtgtcgataactggtttggcatgcgatcccatctcaatcaattggt

SEQ ID NO: 10065 - DNA, 379 bp, Arabidopsis thaliana columbia
agaatccccaatcgtgacggtcaacggaaaattcccaggacctagagttaccgcaagagaaggagataatctacaaatcaaagttgttaatcatgtatccaataacatttctatacattggtataaagaaactcgtattatatatatcaatcttccacttcattctttaatatttatcacagattctataagttccttgagcctcattgaattgattagtgtataaatgtcggcatggtatccggcagctaaggagtggttgggcggatggaccgtcctatgtgacaccatgtccaattcggatgggacaaagttctgtttaccacttcacggtgactggacaaagaggcaccttgtggcagcatgctcatattcagtg

SEQ ID NO: 10066 - DNA, 1678 bp, Arabidopsis thaliana
gacgatttttagcttaacgtatggttggaaaaaaaaacactaatccttcattttttaagtttctaaaaataaccatttaccataatcggagtagtgatggacccaagattttttttactatgatcggaagtaaaattttagattttgtttaatgacatatatgacgagtttctcttttttttttttttaattttatattaaattaaattaaaaaagaacagccaatgttgttacaacaagtgctaactatagtttaaaggttataatctaaaaacagattctaagttatctctctctcaacccaaacatgtaaacctctgtcaaattttctatcaccattctgttttatggccatcaaatgatttcgaatgtgcttatctatccaactgataagccgacttgaagaattcggagaagctccatgtttgcgctcgtttcgctctcgccatagagtgtaaatcatcacctgcaaaatgcaacggactaggaaacctgcaatgcgatccggccagttgcgtgagacgttgttgatgatggtttgccagtccgtggaaaaacaagtgttgtagatggtcccgagattcaagcgcattgttacataggatacaagtcgcatccacccccatgttccaaagtgtcatcctgtctcccgtagagagcctattgtgaacggctaaccacatgcaaaaagcgtgtttaggaatggcttgagcaaaccaaacccctttataccaagccaccttatttgaaactgtgcgaatatgattccaagtatccttggtagagaagatgcttcgaaacctattctctttccctttccaaagtgcacagtcctcggcttggtttcgggagttccaggacagaacaagtcgctcctccactctgtttaagaagttagcgcggtgtcttcttcttctccggttaccccaagcttctaccacagttgcgtgcttatttatccccagatcaatggctcctcgatcccctgcactttcaatcaatcttcctaaatcactccaatcatcataccaaaaagaagtctgggcaccattgtttatttccactttacaaagagtcctcgctatgtcacgaaacttaaggatctttctccacatccatgagccgagacttgtattttcccttaccgcccaaaaaaaaactttcttaaggagagagctttgtatccacttgacccacaatgagtcagcatgagatataatgcgccagattagctttaaacaacaaacatcgttagcttcctttagagatcttaaacctagacccccctcttccttcggtttacacacaaacgcccatgtgatcttagcttttgatgtatttagctctcctcctgaccatagataagcagagcacatcttatcaatttccctgatacaatcccgaggcagacggaaagctcccatccagaaattacaaatactccaaagaactgagctgattaggttcaatcttccagcataagataaaaaacgagctgaccaagaacaaattttctgcctggaaaacattgtaacaatgttacaatgtgttacctagaaaacattgtaacaatgaagggccaacttagcataaagggggactaagacacgatgaggagcgtatttctctttggacatgggctatgcacacctctgtcgatataaaactcctaagtaag

SEQ ID NO: 10067 - DNA, 570 bp, Arabidopsis thaliana columbia
taatgtatggtagcataacatgaagagaaccataaaattaaatatagccagcgttaagaagcgaatacatgtagatgaaatgaattcagaacaaaacttaaaccacttacctaacaagtgaagagacatctgtgacttgcttactggtcatctcctttagagattcatgagttatcttgcagtgtttgaaagctgattccgcatgacccacactaacgcataaaaagataaagagaggttaaaatgcataactgaagatttgtatctcaaaggaattgcaaaacatagtaaggaacttacgattgctgaagcagtaactccattcgacaatgttttgcagccgagaaatcagcaccttctctggcttcattctcagcttgcatggaaaatgtctcccactttctttttgcgtctttcgtcagattattaacagcagagacatgttcgtccaagaaagttttgttggaagagacggcatctttaaagttatggagtcttgaatcaacctgccgagcaaaacatacagtttatgtgacacaaacgggagagagagagaacaaatgaaggagg

SEQ ID NO: 10068 - DNA, 974 bp, Arabidopsis thaliana
ttgataagagttattctttccaaagagttcattttagcttttttgatcttaagagttttcattcccacaaataaatatattcatgagtgtgcgaatccgacttccacattttggcgtcgtcagtggggacgggagattcttgagtcgtcaaatttcattacacacaagatttttaagcaaagtcacaatggccgacgatagctatatcaatgtaaccatgaccgatgcactaaaaaaactggaggaaacgatctcaggaatgacacaaaagttttcggatgtggagaaagcagtatgcgaactacaaacaacccaggtatctcttaacctaagtgttaatactatacaatctcatgtgcgaactttgagtgcaggaaatcctcggggagctcgacgaagcatgtttagtttgccagattcccaagcgtggaacgaggctggtaggcaaaacactccaagtgcaagcgagccccgatctcaaccggatgtcgtagaagttttagtcaatggtgaagagcaaagtggaaacctctatgagcagaaaaactatgacaaatatgaagctatggagaaagttagctgcgagctgaaaaaaatatatggagcctgacatcgatcgagtgatcgaagaaacaaggcaaacatctttcacctcgagaatcgccagtctaaggattctcagaaactcaacattgagccctaaaacgggctagaggaccaaaaaagttatctcgcagctttctttatagccgatggaagagtcgatatggaggaagttgatgaagatgtaggattttgcaaacttttctctgaaaaccttaccggacaagccctgatgtggttcactcactcgagctaggctatattagaaacttcaacaaattttataccacctttcagaagcaatattctatccttatggggaaaagcacttcggatgctgatctttagaacttgtcacaaggaccaaacga

SEQ ID NO: 10069 - DNA, 499 bp, Arabidopsis thaliana columbia
atcctctagtaactttgattagtgtgctctatttcctaagtactcaccggaatgatttgtgaccaagggctcgtaatagcaccctaacttgacatccacgagatcaacaatttcggttttgtcaccggcatcaacaagtaggaactcaaaatatgacaagttgggcagaaatgtgtatgatacattttctggtttgcaaagaggactcatattaataccaaacatagtttcagaagatacgtaactcgaggaaatcgatggcaacttgttagagtaaaactccaatgttgggatgtgttgagccatttgaccggttgcaatgcattctatgaatttggctttaggcagagtcttggaactataccttcccatgatttattgttgcattcattttctatgagatcagccaattcaggattaggctctccaagaatctttgaaacggagtctctacaactaatatcagtgatccactcgctaagatgaccataacggatat

SEQ ID NO: 10070 - DNA, 853 bp, Arabidopsis thaliana
tatttaaacttgattttatgaagagttgaatagctgaaccaggaagatatttaagaagcccgtacttcacgctttaactgtcaatcgatagatcataataaatgactatctatggataggaactataactgaattcagaaagaatctactactactataaatactaaaagagtattaatacaacggaaaaaacaaaacaaaaaaaagggggaacaagggagtttcatgttaaaaagaaatgaagctctcttgtttggtttttctcatagtatcgtctcttgtttcgagttctcttgccaccgctccgcccaacacatctatatatgaaagctttctccaatgtttcagcaatcaaacaggtgctcctcctgagaagttatgcgacgtcgttctgcctcaaagcagtgccagcttcactccaaccctacgtgcctacatccgtaacgctcgtttcaacacttccacgtcccccaaacctctgctcgttatcgcggcgcgttctgagtgccacgtccaggccaccgtcctctgcaccaaatctctcaacttccagctcaagactcgcagcggcggccatgactacgacggcgtttcctacatctctaaccgccctttcttcgtcctcgacatgtcctatctccgtaacattaccgtcgatatgtccgacgacggcggctctgcttgggttggagccggcgctactctcggcgaagtttattacaacatttggcagacagcaaaactcacggcactcacggatttccgccggtgtttgtccacagtaggcgctggaggtccattagcggcgggggtacggcaacatgatcagaaaatacggactttccgtggacta

SEQ ID NO: 10071 - DNA, 1083 bp, Arabidopsis thaliana
tgaccatggcttcttggtcttcaactggttcatggcgttcaagttcctggtagcttcttcctcgctctgtcctccagataagaagacaatggctggaacagctgctgggacggttctctgaagggcacggacggtgtgctcagcgatgacttcaggtgaaaccttggggctgtcagatccgggagtaaccatgttaggcttcaagagtgtaccctcgagcaagacgtggtggtcgctaagagccttgtagcaagctgcaaggacacgctcagtcacggcagcacacttctggatgtcatgggatccatcgactaggatctcaggctcgacaattggtacaagaccgttctcttggcagataacagcgtatctagctaatccgtaagcgttctcatgaatggaatgctcagatggctcgttctctccgatcttgaggactgcacgccacttggcgaaacgagcaccagcttcgtagtacttcttgcatctgtcaccgagaccgtcaagaccttgagtggtggtctcaccgtcggttccagctagctcaacggtacccttgtcaaccttgataccgggaagaactcctccttccttcaagatatcaacgaaaagcttacctgtacaaagaaaacatcatcatcaataaaaaacaatcacaaaaccacattacagagtaaaacattaagtaatagtattgatcaagttcataccatcggaactcttttggtacagagtctcttcgaaaaggatgacaccactgaggcatggaagagcaccaggggcggtgaagagaagctcacggaggttacgtctgttggtctcaacgttctcgacgttgatgctcgcaagacgctttccaatggtaccagtggactcatcagcagccaaaataccttttccaggtgtgccgatgtaggcagcgttggcgatcaactcatctatataggttcaaaaatggaaaaacttaaatcaatcaatcaccataagagaacaacaacagaaaaagtccagatcgtgaatactaattagatccgtattaaaactgatgagaacatagttagatctcgctagtttttacatagg

SEQ ID NO: 10072 - DNA, 516 bp, Arabidopsis thaliana columbia
tttgactaggaaacggtcaccaccagaaggtgactccacaaggtattccgtcctggaacatgaactcaaaagctcccactcggactgatccaacactggatggtctcgatagaacaactcatggagcccaggggagtcatctgatttgaagtggaggtcataggagaacaagtagttgcctccaggggcaggtaagtaaaatttttggtctcttttggaatacatgagacttgagttgtgtccaaacagttgaaaggggttacaatgttagtccactcaaggtcacaaccgggtctgcacagactcagctggatacccgaaaacttgatagccactacacagtcttcctcaccaagaggagaagaggaggacatggctacgttaaaaactttttcggtttggccagtgggcagagccgtaagcctaggcagaggaatcatgacagggtttgtcttggatgccaaaggattgaaaatgtcgctgatacgtacggaacgatcagtccggtcacagaaa

SEQ ID NO: 10073 - DNA, 598 bp, Arabidopsis thaliana
ggatgaattggcgagaggagacgttctcaaatcggtccaatgttacatgcatgagaccggagtttcggaggaagaggcacgcacacatgtgcagcagatgataagtcacacgtgggacgagatgaactatgaagcaagaacagcggcaccagttcttcgttactttctcgacgttttgttgaaactgcaatgaacctggcacgtatgtcgcagtgcatgtaccaacatggcgatggtcatggatgtcccgacaaagccaagatcgttgatcgtgtccaaaccttgctcgttgacccaatcccattagattaaaagacactaaaatatttcctaatagtaagaaaacaagttatattatactttgtgtgcgatgttggattacggaactgatttaaaataaaagtttcgatttccaaaattaagacttttgcaaagttaacaattaatttttaaacttaagcaaccatgggatactttcgcacaaaaaccagcaaaatcggctcagattttaaccaatgaattatatacgttctttacgatttctagtgggcttttaagaggcaagacaaagaagaaattaagagaaagtcgaatagag

SEQ ID NO: 10074 - DNA, 454 bp, Arabidopsis thaliana columbia
atatcgtatatcggtggtttgtatgaaagtctacccccaactggttctgatattcgagtccagtgtccctgaggtcgcagcaaaactcatatgagaaagaccccaaatacaaagaaaaaagcataccaaaaaagtgagatttaccctgtgaaggaatggaagtagaacaatcttcaacttgttcctcacatactggtcattcacttgaaaatagtattgaggatcggagaagtagcgacttatctgttaattttcaaccggttaaaacaaatgaaacgccaagtaatgaacagactggaaaaacctagagtgacagataggagtaacttacgttgctctgcacatactcagagctagaaccgaaaatcttctccccataagctcccaagccactccggataagtccagagccaggtccagagaacggattccaaatgggctaggctgaggattt

SEQ ID NO: 10075 - DNA, 662 bp, Arabidopsis thaliana
cttacacttcaaccaagacgatttacatctaatggaattggatcaacgagtaaggattggacacgatcaatggtcttggctttttcagggcatccatgaccatcaccatattgatacatgcattgcgacatgcgtgccagattcattgcagcttccttaaaacctctagaacgtgacgaagaattgcatgccgtttttgtttcggagttcatgtcgtcccacatgtcgctaatcatctgatgcacgtgatcacgtgccctttcctctgaagctccggtctcatgcatgtaacattggaccgatttgagaacgtctcctctcgccaattcagtctacattttaacaaacattcactcaatgttttaccaaaaaaaaaagaaaaacattcactcaattactcatatactatatatgcatgaattacatcaagttagaagatagatcacttactggcgaagttccaaggtcgttagctaaacgaagaacggtggctgagcatcggacgatgtgttgtcggtgttgagacaaagtctctaagttttgaactgagatttggtcagagaaaacgcagtaaaagtggatcaatattgttggggcagaaattgaaatccaagcattttgcatatattcttccaagcttggtttgtatcctcttttgtacc

SEQ ID NO: 10076 - DNA, 507 bp, Arabidopsis thaliana
ccaatcgtcttattgtcttctttatgctttcagggtctcttacactctgtgacagataaatgcggggatgcttgtgactgcatttcgcgggaagacaaaggtcgttcgctcatatcttgtccagtgaagaagttagaggttagagggtttcgtggaacaattcgagagaaagagatgataaggcatttcttggagtatttcccgtgtttggatgagatggagatagatgccgaagagaatgattctacaaactttgaagtgcctagaattttaaaagttgtcgcgtataggctccacgatgtggtctcgacagagatagttggacattggcagagttcggcacaatctgggggttggtccagacccagatggatgagatgtactatgaggtacactatttgatcaccgttttcaatcacataaattcatgacagctttgaataaactaactgtcttttcttttcttttacagttggctcccgcaataaagagcgtatctacgatatg

SEQ ID NO: 10077 - DNA, 662 bp, Arabidopsis thaliana
tgatcagaaaatacggactttccgtggactacgtcacggacgccaaaatcgtagacgtgaacggacggattctcgatcgtaaatcgatgggagaggatttgttttgggcgattggaggcggtggtggtgcgagcttcggcgtgatcttatctttcaagatcaaactcgtgcctgttcctccgagggtgactgttttcagagtggagaagaccctagtagaaaacgcacttgacatggtccataaatggcagtttgttgctcccaagaccagcccggatctcttcatgaggctaatgttgcagccagtgacccggaacacgactcagacggttcgcgcgtcggtagttgctctgttcttgggaaaacagagcgatctcatgtctctgctgaccaaggagttccccgagcttggtctgaagccggagaattgcacggagatgacgtggatacagtcggtgatgtggtgggccaacaacgacaacgccacggtgattaacccggagatcctgctggatcgaaatccggattcggcgtctttcttgaaaagaaaatcggattacgtggagaaagagatcagcaaagacggtttagatttcttgtgtaagaagttgatggaggctgggaagctagggctagtgttcaatccatacggagggaaaatg

SEQ ID NO: 10078 - DNA, 493 bp, Arabidopsis thaliana
ctcaacatagatgttcatctccttcagacacggaaagtagaccaagaaatgctttatcattgtcatctctttcattgttcctctaaaccctcgaatctctaacttcttcactggacaagatgtaagcgaacgacctttgtcttcccgagaaatgcaatcacaagcatccccacatttatccgtcatatagtgtaagagaccctgaaagcataaaggagacaataagattgttgagtaagaacaacatctttaacacatgttttccaagtagtttcatggtttataactggacctcaacgagtagaaattctacatatggacatttacttacaagaactggcatcgcttgccatcctcgtccctcctcactcgtgatacctaatgttttgaggttgttgaacagcggcaccgattcacagcacagagaaagcacctgaaaacaagaaaactagacattttgcaattaatgcttcacaactagacaaaagagaag

SEQ ID NO: 10079 - DNA, 568 bp, Arabidopsis thaliana
ttcactttgactgtgctttctctgaccatgtctcaatccaagtcttgaagtttatcacaacaccgtcaacaaatcctccgtctagttaatgacctcggaacttcgctaataaataaccaatcttcttacttctagtagtgttgagttataaaatcaatttaaataatcaacctactaacttctagttgtgagtgtttgattaggatgaattggcaagagacgttctaaaatccaatgttacatgcatgagaccggactactggagcatcacaggaaaaggcacgtaagtacgtgcagtagatgattagcaacccaagggactaggtgaactacgatacaaaaacggcatgcaactttctacaagttttgtggaagctgcaatggacctggcacgcatgttgcaatgaatgtatcaacatggcgatggtcatggctgtcccgacaaagccaagaccgttgatcatgtccaatccttcctcgttgatccaataccattatattgattcacacttttatagtacaacaccagtttattatatttctgtgatatgttggatttccaaacaag

SEQ ID NO: 10080 - DNA, 888 bp, Arabidopsis thaliana
tatttattctgaattttctttgtatataattacaattacataacattatatttaaaataatatagtatacgatgtaaattaagtgtgtttaatatatcccatattcacgttttaaaatatatttttaagtagtagtcgtttaaaagtatatataattaatcatattccacacaagttcacataaatatttttttcaattccatctttctattagtttttttttgtaaataaaaattataggaaaaatgatatgttgatgatagattattaggattttaatcagctatttttcatgatattcttagttttaaataataatgttatctaaaatatttatttgcagttgggatataaatcgtcttgatgagctccccgaatacatgaagttgtgttttcttacattgtttaatgaaatcaatgccatgggatgtgatgttctcaaatgtaaaaatattgacgtcattccttatttcaaaaaatcggtaagttcaaatttgtatttacacattatagttttattttttggataaaaataaataattattgattatatatgtttttgttcaaactatagtgggcagatttatgtaaagcatatctagttgaagcaaagtggtacaaaggaggatacaaaccaagcgtggaagaatacatgcaaaatgcttggatttcaatttctgctccaacaatgttaatccacttttactgtgctttctctggccaaatctcggttcaaattttggagtctttggtccacaacaacaagacgtcgtccgatgctctgccactgtgctccgtctagctaatgacttgcacttcgccggtaagtgtcgctcttgtacttcgcacttttatgtggttaaacgtgtatgagtattatacaaggat

SEQ ID NO: 10081 - DNA, 1228 bp, Arabidopsis thaliana columbia
gatttttgcatatatgtaaatctttttttctcctacagcagctactttatcactagggaaattatgatttcatgctttttaaattcccaagtgagtgagtgtatttttctattgtgatccaattactcagcacaactgtattttaaacctacggtgatttgagttttgatatcttattcttctttattcttttgcagcttcactatcttgagagagcattagatgcagaaaaacgttgtggagaaggtttgtcacgataatagtaaaagatatgaaataagaattggtagattatcaagattccaatttctgagctaatcaacaccccgacacaacaaggaaggcttctttagagctttgatcgtagtgtgcatgtgtgtgtatgtatattgtcgtaacgtatgataaaaacatatagcatatgtgtctcaacgagaggatttcatattacaaacttttgcatcaatctttattttagactcctaaggccaacattgccagcaaggaaagaccgagatttgcagcgttggcaacggttcctgaagcaggaggaggatgtgactgagctcctccagttgcattggaggcagccaagtttgcaactggaggcagaggcggatcaatcacgtctttggcctcaagaggcgggtttggggcactagctggtggttgtgcttccttgtctgccacgacgactagaccaccggcttctgctggtaagattgcatagggctgttctttgttcaaatctgagcatggactctctgcatttgcatcaaatataaatgatcagctttatctttgttttgtatatctattgttctttcatgaccttgtcgaggtttaaacttacttaagtatctggtagcggtggcagggaactccgtgatgactccatcaacgccactccctgaaatgaatgtggcaagctctattgtagggtcagagaagtagtcgaacgctacggagatgtactcgtttcttagcactgaaacataaacagagatattccctttgtgcatttcctccacaacgttagtcttccctgtggtaaaactttgggagacagtgactagggaagttctcaagagattgacagcttctgcgtacttcttgatttcatcgactgatggcttgggagccctccgatttccttgtcaatgctcaagactctcgtgtacggagggacagcctcaaaactggccaggacggaactgtcatctgactg

SEQ ID NO: 10082 - DNA, 584 bp, Arabidopsis thaliana columbia
tgtagatgagggtggtgaggaggtgatacttcctttcaagatcatggataagtagtacgttttttcactgcccatgttttttttacattcaatatatactctcgtaatgatatcactctaacaacattcagcaaaaaaactctaaattgtgatactgtggggaaaactgctattacatttgagaaatgttaccgacagttcggaagacctaacatcgttgtggcgctggggtggtggagggtggttaagttatcagcagtcgaaggaaatgttaagatcgtgagttatggaggcgtatcaactgtttaccccggaaccatccattgaagaagtggatgagattagaatggtaagtaaatttttataacatcaatacttttgagttatgttaaaaataaagaaatacctcatacacttaaatcaatttcataggttgtggagtgaagattaaggagtgaagattgggaaagttttttgaagtcttacaatgaactacttaagactatgaagtgaatgtttgtgattcggctattttaatttttttgttatgtactcttagtacagacttgatcacaactttacta

SEQ ID NO: 10083 - DNA, 591 bp, Arabidopsis thaliana columbia
tgtcaaacccgccggacataaaccggagtcttttgcaaacgtctccacaagctttggcaataggattctctgcttgcgtatgcttaagttcattcttatgtactcttctttcgacgtttcaagctcttgctggattcttttcggtgtatatacacgaacctggttgaaacaaagacgcagagacttgagttttaatagcattaaaggattttttgaagtgtttcacagatcaatggtaagtaccgcgggatcggagtggctgcctgaagtaagtgcaaaatgcaggagaggctcaggatgatcgattgcataagctaatctttcatcccctgctttgaatttcctcgaagcaaatagtagtctaagccactaagaaaaatgaaaagaacgaatcattattatcatgcttttgttctttgaagacaagtgtttcgaagttttatgatttatcttgtgtacctgtccaggatgagacattttgcacccaagaatcgaactttgtatcgcttcggcgctaattgtgtgtccacaatgttatatgcagcctgaaaaaatgtgaaagaacgataatttcagaatctagaaatgatg

SEQ ID NO: 10084 - DNA, 442 bp, Arabidopsis thaliana columbia
tttgcagtgtgtcacattgctcctcatgttattaatacagattgtgtgcttcgtttatagattgccaatgaagatcgacaacaatcaaagcctgaagagaaaactctgcaggaagacaactgttcagattgtttcactcatcagtatctctctgctgcatcctccatgaataaaagttgtatagagacatcaaacgcaagcactttccgcgagttcttgccttcacgggaagaggtaaaaaacaatctttcattgctatttgaggttttaagacgattagtacttttcatgaaactaaaaccgtgggggaataacagggaagtcagaataacagggtaagaaaggagtcaaactcagatttgaatgcaaaatctctggaaaacggtaatgagcaaggacctcagacttatccgatgcatatccctgtgctagtgccattggg

SEQ ID NO: 10085 - DNA, 614 bp, Arabidopsis thaliana columbia
ttttcccacaattttattaggaattttacaacggttgttatttcccggcaaaaatattaacgaccataagagttaatggaagaagcattgctaaaaatagagggaggatcgtcccacaccagtcaaacctatatgtcttctccgtcgtccactaaaatcttatttacccctcaaaaagacattcctccactacaaaaacttgagagcaaaacaaaacaggttatttgtttgacaagaaaacacaaaacattcattctttcgtttatatttgaatatctttccttctagggaatgctaatcaaggatttgttcggcagaaatggagcagaagagcgtgttgttttccgcgttaggggttggtgttgggttagggattggtctagcgtcgggtcagagtttgggtaaatgggcaaacgggtctatttctgcggaggatggactaaccggagaaaagattgagcaagagttggttaggcagatcgttgatggcagagagagtagtgtcactttcgacgagtttccttattacctaaggtacattgctcgacatatctttcttgcattttattactaaaagattgataacgttgcataaatgggacagtgttgtgtta

SEQ ID NO: 10086 - DNA, 499 bp, Arabidopsis thaliana columbia
cggttcaacatatttaaatgctttgtcatcccagtggaaatcaggtgtcaccgtgagctcaacctgcagaacagaacgagaaatcggctgaacatgtgctgcaagtttcagttttgggaactgatggatatacttgtgaagtggtctgcccatcttaggattacaaataagctctcctagctcctgtgaagatagatcatagtacctctcccacaccagatcgtttttcatccaacttcatcagaatctccttgggaattccaggaaactgccagaggggtgtctgaacactccacatcctcttccctaccatttaagacaagttgagagctttctgagacagttgagaccaccccctcttcaacacaatctcaagaatagctcgtaacaaacgtccagcactttgggtaatataaaccatgtcagatgtcaaagaaagaccctcgagctttagctttgaaatatgtacttgcagcaaaacgttgatctttgcactggg

SEQ ID NO: 10087 - DNA, 496 bp, Arabidopsis thaliana
taactcaaagccctccaccgccatcaccagtctactatccaccggtagcaaaaagccctccaccaccatcaccagtctactatccaccggtaacacaaagcccacctccaccgtcaacaccagttgagtaccatccaccggcaagcccaaaccagtctccaccaccggagtatcaatcaccaccaccaaagggatgcaacgacagtccaagtaacgaccatcactaccaaacaccaacaccaccttctctgccgcctccatattacgaagacacacctcttccgcctatccgcggtgtctcttatgcgtctcctcctccaccatcaatcccatactactaagtttaaaccatgcatgatcaaaattcttttggcatcaacctatttgtgtcttatggttgatacgagacattcgacttattttttttccgagtaatattttgttcttttatttcttgattaaacagagaatatggagtatatagtttcacttattt

SEQ ID NO: 10088 - DNA, 542 bp, Arabidopsis thaliana columbia
  unsure (1)..(542): unsure at all n locations
tggaaagttttaggtttttagttttttcatcccttgtctaagtaatcgctgttttacaactgatcaagtggcaagtacgttacttatgcaacttttgagatcagtccttacttgttagagtaaccacaattcatgtttcaatgttaccacatgcttcatggccatatctcttatcctagattatttccttgcttttccttacagatcttttgacgacctaagtttctgctgtgaattgttaaacagccatcagcctgggcttgattagccaaccctgttaaggcagggtttgaactaaaagtgagatagtgagatggatgtctcagcacttttaacgtctgctgggattaatatagcgatatgcgtagtgcttgtatcgctttattccattctacgaaagcagccagccaattattgtgtttactttggtcgattgctttctgacggaagagttaaacgtcatgatcctcgttggtatgagaggttcgcgccctctcctagttggctcgtgaaagnttgggaaaccactgaggaagagatgt

SEQ ID NO: 10089 - DNA, 558 bp, Arabidopsis thaliana columbia
tatgtagcagttctattttaagatagtatttttttattcatatactcatagtttgaaatattttatttgagagaacactgaaaattctagacaaacaaaaagaacgagacatgaccatactcaaacctctggctgataggagaagccattaacggtgagacctccatcaacacaaatagtctgaccagtaatataagaagctgcaggtagacacaagaaggccactagtgatgcaacttcatttggctctccaacacgaccaagtggagtcctactcaacaatgccttcttgaaactgacgtcctcaagatacttgcagaaacacaattaagagagggttagattaattcacataaaatcgttgttacattcacataaaaaaagaaaagaaaaagttgttagtttattacagattgagacagaggagtattgatgacattaggcgcaacagcgttggctcttatgcggtcttttgcccattcacatgccaaatttttagctagctgaatcaaagctcatggataataaacaacaaaacatagaacataaaagatttat

SEQ ID NO: 10090 - DNA, 488 bp, Arabidopsis thaliana columbia
  unsure (1)..(488): unsure at all n locations
gacgcataagtggttatgtatttcaagctttgcgantaaccaaaaggcatctaactgagataagtgatcctaaacctcaaagatttattgatcatttgcatcacaaaagtatcattcagcataatttgttccatccatctgatgtagctaactttcaaagtaacaaccatatctacgttctgctcaagattattccggcagccctatagcaacgaattatcctaacttccaaaacaactttgattttaaagatcacgtccatagttaaaaattaaaaccaccagcaagctgagcaacaaaaatacagttgtcgatctccggaaagaagaaaagatatcatagtaactaaccattggatcaaactgcttgccgactgtctccacatggataacaccaagtgatcccagaatttctacaaactgtttgtatatgctctgatagctattagtgactttctcttctccctcagtctccaccttaatttggga

SEQ ID NO: 10091 - DNA, 516 bp, Arabidopsis thaliana columbia
cactagagaaaaaaaacattacaagaagaaaaaagtggagtcagtgactcctacaaacgaggaaataatggaaagtggagaagatagcttcctcgacgagaggaagaccgtcgtctcttatttttgaaaactcaaacacttaaaagaaaaactgaaataattaaacggacaccaagaaaaccatgagacaaaattgtctccggttttggactctgcgtctgtttgatgttctgcgccttggtgcttcgattccatcaaacatcgataaagtttattttccagaaccagtgatcttttgcaaaacgtgataactcgtctcttcgatcattttgctatattttgccacatcatcaccaactgctttgatatcctctgttaattccacacgtcccccgtaagggtttccattacttgtttcgtgtccactcatttgctccatcctcagtagcatccttcacagcattcaacatagacgtgatcttgctttttagcgcgtggacttttccagatatggaa

SEQ ID NO: 10092 - DNA, 504 bp, Arabidopsis thaliana columbia
ctcaataaaactagtgaaccatatgctcttggttacttctgatgaagtttgcaagattatctgatgaaaaaatcaagtatcatgggtggatgaggatgaatgcgaggccaataagcttcgaaatgtacactatcgtattatatcatggcttacatatgaagtaccagttttcattgtgtaccgagagagtttgatagattagtagacaaaaaaggtctaaacccaaatgtcttagattttgaaatggtgtaacttaggagcatcgagcgtttttgagctgaagatggttgaaaattcggtgagggtgcagtctctatacttagcagggttttctgcagacaggagatctttgattggcccatatactcgagaatacgccctcatgaacgtgctgaaaacaattgccacggaagtccgcggttcagaagatccattggctatcaccctatgctccgcgcttatgaacttatcattggttataagctgcacacagtaaaaaagaag

SEQ ID NO: 10093 - DNA, 501 bp, Arabidopsis thaliana columbia
agactggaaacagttgaaatcccatgggcacctttgaaatattttagtgatggtatcttcaattctgaagaaacagaaactccgtgcagcatgtcctttgtcagaggaaagagtgtgatattgccacgtaaatctccacacagaatcacctacaagcaacaatctttcaatgcaaattactaacttaacaaggcttagacacaaaactcttggctgcaaactttttagacttgatatcttaagaaaatttatttcctagttttcgcttaaccaagaaagattggtgttcttttgctccacatttagttgaccatggtgataaattaatatgcatcaactagagagtataaagaaagcaatagaacacagaaacatgacaataattgaaacggatattacctcatcctctactgatgcgtcaacacacattattcgctttccaaaaccagaggagaattcagccaagagggagacatcataagtttcagcagcagattctaa

SEQ ID NO: 10094 - DNA, 437 bp, Arabidopsis thaliana columbia
tgagccgattggggctgcattccctgatcttgttccccgtcgtcgtctctaacttacacatttccattctccgaatctctatctctccttttgcttcatcggtgtgatctctgagacgaaagaagaagaagatggtggttattgagcagaagaaggaggtttgcttttgtttttagcgacgtgtgattcagagttcgtgaagaagacttacggtggttacttcaatgtcttcgtttcaactttcggcgaagaaggtgagcaatgggatctattccgagtcatcgacggacaatttcccgacgagaatgatttagacaagtacgacggtttcgttatcagtggtagtccacatgatgctttcggagacgccgattggattgttaagctttgcagagtttgtcagaaacttgatcacatgaagaagaaagttctcggca

SEQ ID NO: 10095 - DNA, 351 bp, Arabidopsis thaliana
gatcccctgcgtgggctgacacaagcggataataaacaagagtttcagatccagccgacgcaaacgcacttccggcgatcttaactttcccgagaaacgtgctccgttttcccgtcttcttatcgttgcaaagattgatctcaagaatctcttcccccatagtcgccacgtcgtgcacaaagaactcgagcttctcgtcccactgtggattcagatctcggaatttcggcttcgtccgtcgccgttggccgtcgaaatccacgattgcgtaacggctcgcggtgccttgaccatccttaggcatcagatttcttgcgcgacagatctcaacaatcagcttcctcagaacat

SEQ ID NO: 10096 - DNA, 586 bp, Arabidopsis thaliana columbia
aatacactagattctcctcctatcaaaacctaatgtctaagagaagtaaaagtctatagtgtgtgatcaattactttacaaagcaaactaaattatggttattgccaatttaaaatagttcaaatttcccaaactccatcaaaacttgggcttttctcggattaagttggttgaaccgttaagcggccctctaaactttggacaagggattgtagtggatttttgaaaaaaagaatcccggttaacgaccttaacaaatgaaatgatcgatcggttgttgacccagcttttgagccaccgccttaaccaaacaaagctgttaagatcgaaccagtcaattctcagctctgagcggtacggttaattcatttcttatctatcacacaaagttgaatcgtaaccctaagcgaattcaacaatcgagagagcgagagagatcaattaaccccagcgaatcgaatatgccgaagaagatgggtctgaacagcaaggcggaggtcgccaaatctcgtaagaacgccgcggaggctgagcagaaggatcgtcagactcgggagaaagaggaacaatactggcgcgagcggaa

SEQ ID NO: 10097 - DNA, 576 bp, Arabidopsis thaliana columbia
gttggcttcttaagagctccgggaactcagtgatgccgcatccagacaagtacaactgacttatcaattgcgtaggatgatgatctgcaactgaaattttggttgtggctgaaacatggttgcctgagagatccattgaatagattgagttgagatgcgaggaaaagagtgcattcaagtcaatcgtagtggtggtgttcaaatgagataggttaagaagttggagcgacttgagattcgtgaagatactaaagtcaactgggccttgggtgttgagatgagaaagatcaaggtcctgaaggtttataaatttggaaatggatttcgggattggccctatgaagttgttattgctaatgtctaacacagttagtgtagatggtgaagatatgttcccaaactcaagagtgccgttgagttggttatttctcaaattaatagacgtcaaagaagcaatagtgaagagagaagaagggagagtccagtaaaagcgttccccatgcctcaaagtctccaagttagagagtgactcatgttagaaggaaggtcatgtgaactgattgcgggagagtgata

SEQ ID NO: 10098 - DNA, 608 bp, Arabidopsis thaliana columbia
gaagatttgatctattttaaattggttaagaagtgaaatgattgattgtcaatgcaggctcttgttattgaaaatggcagattccaccaaagcagggttgaagaagccagctttcactaaggttgatcagctgcgtcctgggactagcggacacaatgtcaatgtgaagattgtcagcacgaaaatggtgttacagaaaggtcgtgctgatggtcctcaagctcgccagttgcggatttctgaatgcattgttggtgacgagacaggagtgatcgtctttaccgcaagaaatgaccaaggtactttacttcagtcaataaatcatttgaaaaacaaaacgttcatataacggtttgtgtacttgattctagtaatgttacagggtagctagtaatatcttgatttggttttgtgtgtagtggacttaatgaaagagggatcaactgtaactctacgcaatgcgaaaatcgacatgtataaaggatcaatgaggctagctgtagacaagtggggtcgtgttgaagtcacagagcctgcgagcttcaaagtgaaagaagcaccaacatgtcccttatcgagtatgagctcgtaaacgtcgttgaatgagt

SEQ ID NO: 10099 - DNA, 351 bp, Arabidopsis thaliana columbia
tgaacatatcttgcagaaccgcattggtgactgactcaggcaaattctagccaaataaagacaataacattaacaacagacattgagagtatcatccatctctttgggattaagagtactaccttaacaacgacgtttccaaccccatttctcctaggatcaggtgctcgaacagaccacattactcgaatcaattttccattcaacagactgttgtatgatatcccgatggcaaggctagctgccaagttgaagtaaaagatactatcacgcacactgtcactaacatctttagacatcaaccacaggattctttaaactaaatagctctaatcatacgtagatctcagt

SEQ ID NO: 10100 - DNA, 513 bp, Arabidopsis thaliana columbia
ttcaatttagttattatttcaaaccgaaattttgattgcttagttcaaacccgtgtaatatttccaatctctcaaaatccaatcaaccgcaaatcatctttattgttatctatggaaacacatatcgccaatctaattacatacacacaaacccaatctcaacaatttttttagatttcacacgacttcgattcatccaccagaattaacacagtaatcctcggctggggagatggttactacaaaggagtagaagataaagagacgaagaagaacaacacgaacacggggggacgaaagagcatcgcgaagagagtatctccggcggaatttgagtttccgatgaatccaaccgatgaagaagttaccaattactgaatggttcttcttagttttgatgactcaagcttcgttaacggtgtacagtaaaccgattgatgaacttaattaggtttaactgattaaatcattggtttggtatacattaaactggtaaaaccagtgctatggggt

SEQ ID NO: 10101 - DNA, 518 bp, Arabidopsis thaliana columbia
cgatgaaccactaatttatatgtattttcaaccaatcaattatcatagcctagactacacatgcatattccttcaactagctacggttcactattctaggctatgataaattactatatcggcctaaagcataagtttgtgcacaaaaataaaattaataataattaacttgtgacctaaaaagcatataagtataactactatatttagctttatgaaccggccgggcctcccatctaatgtcgccttcaaagtttcatttgtggaagctcacatgttttctgatcactgtagccaccgaagtcttaggctcagagtctttccaacgttataaatcgatcatcagcttcggtgattcgatttcggacaccggaaactttcttcatctctccgacccaaatcatcttccccgatggccgcctcattatcgacttcattggtatgaacttctttttacacatcccatattcgcagtttaaatcaaaacttcagaaatatttttcagttttagtatgaat

SEQ ID NO: 10102 - DNA, 547 bp, Arabidopsis thaliana columbia
tctcattaatctccaggaactgtatcttagtgaatgctcaagcctagtagagcttccttcatctattgggaatctcattaatctcaagaaattggatctaagtggatgctcaagcttagtggagcttcctttatctattggaaatctcattaatctcaagacattgaatctaagtgaatgctcaagcctagtagagcttccttcatctattgggaatctcattaatctccaggaactgtatcttagtgaatgctcaagcctagtagagcttccttcatctattgggaatctcattaatctcaagaaattggatctaagtggatgctcaagcttagtggagcttcctttatctattggaaatctcattaatctcaagacattgaatctaagtggatgctcaagcttagtggagcttccttcatctattgggaatctcaatctcaagaaattggatctaagtggatgctcaagcttagtggagcttcttcatctattgggaactcattaacgcaagaaattggatctaagtggatggcaagcttagtgg

SEQ ID NO: 10103 - DNA, 567 bp, Arabidopsis thaliana
tgttctcttgcctttagttaaaccacacgatctaaaaatcccttctctctttctttctttctttttttctctccctctcttctcaggcgagtatgcaaagcaagaacatgatcgtggcttcatctcatcagcagcaacaacaacagcaaccgcagcagccacaaccgcaacttaaatgccctcgttgcgattcttccaacacaaagttctgctactacaacaactacagcctctctcaaccacggcacttttgcaaggcttgcaagaggtactggacgagaggtgggactctcaggaacgttcccgtagggggtagctaccggaagaacaaacgtgtaaagcggccatcaaccgcaaccacaaccactgcctccaccgtctcgacgactaattcttcatcccctaataaccctcatcagatctctcatttctcttccatgaatcatcatcctttgttctatggtttatcagatcatatgagcagttgtaataataatcttccaatgatcccaagcgcgtttcagtgattcttcaaagacttgttcatcaagtggtttagagagtgag

SEQ ID NO: 10104 - DNA, 606 bp, Arabidopsis thaliana columbia
caatggtgaagatatacttcttcttagacaccatgtacccaaagcatcgacaagcagaatccttaaacgagatacaagaagccttaggtccgaggattcggttaatgtcgttcctgttgtagagctcgtagtcgtaaccttcagggacatggatcttcttcgatggatctccgtcctggacgatgatcagatggtaaggctgaagaaaaggcctccacatctcgaggaaatcgaggtttctgatagtcggaatcacgatatcgagctcatctttcagcaacggagttgggttcaccggaagaccaacagtattcgccggctcaaccatggtttcgaaatgagagagatgagatcggatcgcgtcggtgagttttgaaaagagagatgaaacgcgtaggtttgatttatacagatctcgcacgtgttttagtggacggcatgtgccagggttacacgtgtcagatgaagacttattcaactccaatcgaaaaagctgtatggtaaagaaaggaacttgagttttctacttttttattcgcccgtacaattagggattgtaataatgctattaattaattgatttaaaattaatttttgactgtagat

SEQ ID NO: 10105 - DNA, 558 bp, Arabidopsis thaliana columbia
ttcgtcgatggtgcattggaatccagtatatgtcgtggtactgaatgcatacatgttcttcttcgcctcttccatgctggaaaatagacacaagtacatataataagcaaacacgatgaactggttatgctggaaaatggacacaagtacattaattggttatcacatcagcaggatagtgtaaaccggaatcaaagttctctaaaatagagagtagcaccaaataaactaaagttttagtcattagttgtgtaacacaaactcgttccctgccataccaagaaatttctagtcaggagtcccaatctaatgctctgcacaattgtacactccttttacatacattactagcttacactgtccacatcaagtttttaacaaacagaaaccatgcacaatcacctacaatttatacatagcttgaagaaaatatgcaaaaatagatgcttctattcttccccctaatttcattcataattacgctaaagagcacaaagttttagatatcaaatcagacaccaatgttttgtgttcaatatgcagcaatgttcaataagt

SEQ ID NO: 10106 - DNA, 513 bp, Arabidopsis thaliana columbia
tgcgagaaacctttagcaacaagtctagccttgtatctctgtttctcaactcctggtatgcctggctttaatttaaaaatccacttgcatccaatcagcttctgcttttctggtttctcaattaaatcccaagtgtgactctttttatgagaatccatctcctctttcattgcattttcccactgctttctcttactacttttcaatgcttcttcataagacttaggctcttcttcttccaagtcttctgctgttgccaatgcataagctacgaaatcttcgtcttcaaatctggaaggaggcctgatattacttcttcgtttcatgtccctcgccaataagtaatcatccagagactgctcattttcagatccaacaacttcctcattcatttctgattcctctaagttttctgaactttctgatgaagatgaggaggtttcccaccttgagaagatgagtcatcaaatcacagcagctagttgaaggacctctgagaagatcatggctgaa

SEQ ID NO: 10107 - DNA, 546 bp, Arabidopsis thaliana columbia
gtggaagaaattctctgtagccaaaaaacttccttgaagattaggtgtgaatattgatccaatagaacaacgcttataagtacatttccctgtatacaaaagtgccaaaactgcacccataagaaaattgtacacaggaacgatattcacctataccaacaatgatgctcttacctttttcttcctgcaacatggcaaatgcagcagatcgacactctgagaaattaccagcagcttgaagggtggctgtaaatttgcctttatcagccaagaatccaggtaagtccttttgtaaatttgtttcaaggatataccctttaggaatacaagggtcaggaactattccttcccctgtagagtttgcagctgctaggattgaaacactgtatgagttttgagggaagagaagtttatttcaactgcttgaactccaaagagcaattattttaaggatttgtcaaaaattaacctgagttgtatagtgattccgataacttttcttgtgctgcatcatgcagaggcgactaaacataatagctttttgaa

SEQ ID NO: 10108 - DNA, 594 bp, Arabidopsis thaliana columbia
tgacttacgaccgagcggacatggctttcgctcactacggaccgttttggagacagatgagaaaagtgtgtgtcatgaaggtgtttagccgtaaaagagctgagtcatgggcttcagttcgtgatgaagtggacaaaatggtccggtcggtctcttgtaacgttggtaagctacttcacatattcaccactcttgctatatatatgtgcaattaaacaaatatgtaaaaagtgaaagtactcatttcttctttctttagtatgtactttaacatttaaccaaaacaattgtaggtaagcctataaacgtcggggagcaaatttatgcactgacccgcaacataacttaccgggcagcgtttgggtcagcctgcgagaagggacaagacgagttcataagaatcattcaagagttctctaagctttttggagccttcaacgtagcggatttcaatccatatttagggtggatcgatccgcataggataaacaagcggctcgtgaaggccgtaatgatctagacggctttattgacgatcttactgatgaacatatgaagaagaaggtgaacaaaacgctgtggatgatggggatg

SEQ ID NO: 10109 - DNA, 574 bp, Arabidopsis thaliana columbia
gacatatctccttgcaagcctcgcaacaaatcttacttttccctttctcggatgtggatataaataggggatgttcatgagctgtatgggtgaaaaaatctggaactaagatacatctaacatctatctgaacgttatcgagaagcacacatttctctatggagcacttgtacctgaaaccagtagattttctcgaacaacccaaacaaccattttgattatagtgtcgttgaggagaagggtctaggacaagagggtgaacgtgcaacgcatgatccaattttctaagtagaccagcacatacctcgtggaggaaaaaatcacattccatgcagttatagaagaagtcgtgagagttgataggaaggatgcatgcttggcattgcttctctgcatctcgaacacggtcatacttttctagcttcagaagatgatgttcatgagagaaatgcttgatcatatcattactaaccttctcaaatgggacgatatcttcaatgttgtcgggttcttctggttcctcttcgagttctttcccatccatacattctcatgtgttcacatttggaatgga

SEQ ID NO: 10110 - DNA, 890 bp, Arabidopsis thaliana
ttcttcgagagtgaagatagagaaacgcgagtcctcaatccgctcgattccggcaacacagagaacatctgtcgagtagagaaggaacccgtcggcgaggaagcgattctcatctctgaccggatagaaatcggcggacgggaagtacacgtgtaagcagccattgttgtgtagcgagagaagagatagagagaagcaatctacacacacgatagattcgatttcttcttgagtcccaaatgtaataatatccaaacgaagaagataacaagaacaaaacccacgagaatgagagataggagaagattaagaggagtgactgattttttaggaatccttttttctttagagctactattgtttaattttatccgattaaataaattccctattattcaagctctaagactattgggccgcagtttcattaaagcccattaatatttctcgttttcggaaaaacaaaaaattatcgaaccaattaacttgaagtgtatcaatcaaggttaaagctcactgggccttagtttcattaaagcccaatagtattcacttaccccgtaaaattaaattattattcctcgagaagcccaaacagtaaaaacgatgcgttgtatcgctggagcatccgtagccgatttctctccgtcgctactgtttcaccgccgtaatctcgtagctgttggccagagattgcttatgacttcctcgattttgcgttctcatacgagggaattcgacgtttgcgatgaaggaatcatctcggtagaggagtggcggaaatggggtccggtgtctccatttccatccgcggtcaaacagattgtggatgatttgaaagttctggagtgcaaattggattctccgatagattttggtggtaatggtgg

SEQ ID NO: 10111 - DNA, 565 bp, Arabidopsis thaliana
  unsure (1)..(565): unsure at all n locations
gactctagagcagtgtgctctaaagcaggtgaaggaacgccatgagcaaaaagcagagttccaccccacacgatgcgctgttcaaactctttttacgccaaccggacacggctcgtgattttcttgcgtttcatttaccggcacccattcacgcgctttgtgatatgaaaaccctcaagctggagtcgagcagctttattgatgacgatctgcgtgaaagctattccgatgtgctgtggtcggtgaaaacggaacaaggaccaggatacatctattgtctgattgaacatcaaagcacctcaaacaaactgatcgcatttcgcatgatgcgttacgctattgccgcaatgcaaaatcaccttgatgctggatacaaaacgttgccgatggtggtgccattgttgttttaccacggtattgaaagccctatccctattcgctgtgttggctggattgtttcgccgatcccaaactggcaaggcagctttatgcctcgcatttccgctgattgatgtcacgtcatcctgatgatganacatgcagcacgacgtatgcgctctggagt

SEQ ID NO: 10112 - DNA, 389 bp, Arabidopsis thaliana columbia
cacggtctgaaatggttgattttctggctgtgcatattactagaggtccctaacattgcagcaattctaatgatcccaaacacaaggtgagtagcaagaattttttgtcgtctgctcgaggttagcgagaggcaagcattcacttctcctcctgagaggttgtgtgaccatgtcatgactgcaactcgagcgactgttttcaaatcacttcatgtgtagagaaaatattgaagaaaagatgttatggttcgttctacttaattgttttgttctttgtaagatattggatcacatttaaggcacccattttggtctgggatctgtaactctggcttttccgagacacgccatggaccttgtgagagattgttctcacttatggtgtagta

SEQ ID NO: 10113 - DNA, 518 bp, Arabidopsis thaliana columbia
agatttcactgaaacttttgagcaatctttatcatcaatctgactcttcacactatcttgtttctcaagaatagcttcttttgctttctcctctgtttcactcttcttcactttgagactctcatcatcaccatcaccattattgctcagagcttctttctgactaaaattttggatagcgagtcgctttacatcgataggactcagctttacaagcgcttgcattctcacatttctaggaagatttgacacagagattgaaaagtctccatggactttactcggtggactcagcagcgtttttggcctgatcggttgcttcgccaatgattctgatcggtcatttgatgttttagtactccgcggactaacctttttcttcatttccacattgccgttctctgtcgtattaagcctctcgttcatccccttaatcagtccatctaatgcagctaacaccttttccactacaagaacaatgcatagagatcttgttacaataatgttgtgatatataa

SEQ ID NO: 10114 - DNA, 965 bp, Arabidopsis thaliana
ttaatatatttattaactttttcattaacatcttaaatataattatcattttattatgttatttagttttaaacatatcaaataacaattaaaacaatatttatttaatattttgcatttactttaattaatatatactaaaataatgttaatatataattaaaacttatacataatggagttaaatataaagataattttattttatgatttataaaaaaatacaaaagaggaatatataaactatcaaattggtgtattggaataaaggtaataaaatttagaatttgtaaaaattaaatagaaaccacattaaaaatacatgagtcgtggatctatcaaataagaaactttacattgggttatcaccattttaaattatataatattattatcatttttcttacatattatattgtatattcaatatcattaaaatgcgtaatattttagtgttaataaagatatacttagaattgagagttttttattagtatataaagccacttttttttagcaaagtcgatttgggaataaccaagattcgggaagagaaagttggccaacactattgagtatgacaactaggtggggttgaaaatggagatatagaaacgtttttgggaaaatagggaaataccgtgatagaattcagttcgtcaaagatatagcagcggaggtcaaaaaagcttttaatgttacaagaagcagcacaaacaggggatgtcgggttgagaggttgatcggttggaaaaggccgggtgaaggctaggttaaggtgtccacggacggggcttcacatggaaacccaggaccaaccacagctggagacgtaatgcaggatatactaaagatgaaaagctaaaaacaatcaaactttataactaaactttataaaacattttaaacatttatgatattcaatttttatgaagtttcaaatattagaaatatttaaaatttat

SEQ ID NO: 10115 - DNA, 381 bp, Arabidopsis thaliana columbia
caacccaaagccggaactttggttaggggtcagcatgtagtcattgggtgtcagtggggaagactcagggctattcgggacatgatcggtaagacaacagaccgagcaacaccagcgatgcccgtcgagattgaagggcttaaaggtcttccaatggctggcgacgatgtgattgtggtggaatcagaggaacgcgcaagaatgctgagcgaagggaggaaaagaaaatatgagacagatcggttgttgaaagcagaggaagcgagattagaggaagcagcagcgagattggaaacagagtctgaagaagggtttgttcgggttgaattaccgatagtagtgaaatcagatgtgcaagggactgcacaggctgttgctgat

SEQ ID NO: 10116 - DNA, 496 bp, Arabidopsis thaliana columbia
tagacgaccaagcatggtgatcctgaagtccacaatctagatgacgagaaaaatagtcgatcggataatgcaccaacccattgtgctcaaaactatttggtcaaccccctttgtcccaacaagaaagcatgggagaccatcctcctccacttattcaaattgacatcaaagataaggctttcaccctcttttctttttctgttttgggggcacctaaccatcatctctctcactcgattcctttagcaaaatcattcccaaaatttcaatcttcagttttcttcaagaatcactcatccccatttcactcgaccaaacccacaagatttttcttcttgtttttgactcacctattaatcttcggttttggtttctaagagttcagtaacaccgtgagttcaaacagcaacgaatcttcaatggatgccgatttcaacgtagatgaagctgaatcttggtcaactaggcctgagagggagatggatagtacaggcgg

SEQ ID NO: 10117 - DNA, 534 bp, Arabidopsis thaliana columbia
tcatatccaagtttacagaccatgatcttgatgttgtccaaaacccaacaagcccttctcaagactcatcttctttagctctacgaaaaacccaaggcagaagaaagtttcaaacttcatcatcactattacctcaaaccctaactccacataaccttttaaccattgacaaatcacttgaacctttttctactaaaaccctaaaacccaaaaaccaaaacccaaaacctccaaaaagcgatgataaaagtgatcttggcaagagatggccaaaggatgaagtgttggctctgatcaacattagaagaagtatcagtaacatgaatgatgatgatcataaagatgagaactcattatcaacatcttcaaaagctgttccattatgggaaagaatatccaagaaaatgttggagattgggtacaagagaagtgccaaaagatgcaaagagaaatgggaaaacatcaacaagtattttaggaagacaaaagatgttaacaagaagagaccacttgactcaaggacttgtcgttatt

SEQ ID NO: 10118 - DNA, 628 bp, Arabidopsis thaliana columbia
actcttctgctacaataccctcttcttctacacaaccaagcatgattgcagttagcattaatttccctgcctcagcgaaatctttatgactcatcaaaacgtcctctacagaagaagttgaatcctcagggttctctcttctcagaggaaggacttgtgcaaagtcaccatcaaaagtgttgactcgggttggtccgtaacaccttttggaagcctggaaaagggccgtgttccttagattctgtaatgtttcttcctcgctccaaccttcattagtagaggcttgatgatgcctgtcccagtcgtcttgatccgcagcatttctccagcattcttccaaaagactcctatgattctcacggaacgaagagctcgtccatgcaaatacttcgaaagcctttatagctgtccatcgaccctggatattgagacaggtttcaatgagctcctctggtcggaagagccggtttctagcttctccatttggcaaagcttttgttatttcttcctgcaagatataacacggtaacaccggttatagagagtatttacgtagctgagtttacatcagggtatacaggataaatattacacagctgagaatatactgcagcttcagtaagttgag

SEQ ID NO: 10119 - DNA, 561 bp, Arabidopsis thaliana columbia
tatttcattgaggttgatacctccctgttttcatgcctcaggtctatgggctaccgactgatcgaatctacgctacatattttggcggtgatgagaaagctggccttcaacctgataatgaggctaggtttatatggttgaaggttcttccatctggacgtgtgctgccatttggttgcaaagtatgtattgattatttaagataataacttttaatctgttacctaatttttttgaatccactactcattgatttcctctctcctgaggttacttcacaagtacttcagctaagttgcctttgtattgtcaccattgtttcttgtatatattgacacatctgtttgtcaatgctaacgacaaccaactgtaagcttgaatgcattttggctaggaatacgctatcatgtttggtagttggcaggctttaaaaaccattgtttatgatttacagtcaaaatcttgtacaaaatgtaaaccttaagggtttttaaatgctgtttttctttcatttaacttttgattaaactgcaggacaatttctgggaaatgggcgacaca

SEQ ID NO: 10120 - DNA, 920 bp, Arabidopsis thaliana
ataattacgatgtggaatcttgcatggtatagttttatacaaatcgaaaactataaatgatagaattcaaaatatatatttgaatgaagatacggaccactattagtgaaaatgaacctaccacgatagttgaattggacctcttccttgataagtcttgttagggaaacaaggccactgtgtatcagaagaatcacaataagtgctttgtggactcacttcttctttaaagcataatccccaagcgtacggtccgtctggtgccgttgcccatcctccggtcgtctcgtgtgaaatctgagccaaaaatgcagccacttcgagtcgttgtgtcacggggcttcctacgctcccgaatctcggaaaccgcctcgtcgcttggacaaatgattcgtaagtgtagaaaccatttgcgggacaagcggtattgtccttgtggatgaaaattttgttgtagaggtctcttggcactaatctctcgattgaggtggcttcggtttgggcggaagatagtaaataagagattgagaggaagaagcataagaggagaaaagagtgttgttgagccatttttagagagggatcgatcttgatggttttggtgtaagaagatgagtttgttatatagatgtgtaaatgatcaacgcgttgacttttgactttaacggtggacttttttttcattggtctgaaggttcgtttatacatgctctcatgtgttttcattcatcaaacgatgcttctttcacgttaagtgaaactttttctatagtttttggtataatttttcatatagtttacaccttaattagattagatatcaagacaacaacaaaaagcgaatacgtgaaggggaaaaaaacaacaaaagcaattattttttattgtagagaaaaaaacaaataacggcttttcactaa

SEQ ID NO: 10121 - DNA, 560 bp, Arabidopsis thaliana columbia
ttggagaaattgtaatagacagaaacagagcaccaaattattcttttagcccaaaattttccaaaagtacaacaacaaatccggcaaaaacacatacagaaaccaatttttgatttaccgacgaaaatttcaaatcagaaaaccggatttgatccaagtgggtccctaaaccgacggtttaaaacaattttttcaacgatgagcttttttcaagtcaaactagcgaaacagctatcagacctagacaaaacattagaaacacaatcatgatgatgatcttggtcgtctttagatggactattaggcatagatctaagcattcttggtgaatctaagctttttctcaagatctgtctcatggcagagatcaaatgtcctgtcggattcggtggtgggcttgaggatttgaacttattacacatgttcatgtgtctggccatagcttcctctgtcgttaacaatcttttcgttctcatgacttcatacttcacagcttcagaacaaagtccacagatccatttccccatgtacgctctctgaccatctctatgtacgattgg

SEQ ID NO: 10122 - DNA, 524 bp, Arabidopsis thaliana columbia
  unsure (1)..(524): unsure at all n locations
cacttgcaaagtggaaaattaagattgagaaaccagaatcatgtaccttggataccacatgaaatgtgtcgagcaataattcgagaacctccctggcagcagcagcatcagaacgctgctgcaatccattccttagtgcaaaaagtgctgcctccacagatccacgaaatcccagtgatcttctcacggagctcaaggagcggacancgcatacgaaccacagctgcatcgatatctacgagcttagtgcttaaattgacgaaatcggcataatctcgattgatgagatcgacaagttctcggttgagggatgcaaggtgtgaccggagctcagatcggagagtgtcaaagggaacaaatgtacggagctctgagatgtaggactcggagtcgaagttaggggagaggaagagggaaggcttgaaccatagaggatgagagtcgtaaggatcggagaagaagtctgtggcggatctcggcgctgacgacggcgacggcgacgtccgtgaccagatctgacattt

SEQ ID NO: 10123 - DNA, 530 bp, Arabidopsis thaliana columbia
ttcactggcttagaattacacagcaacgaatcccatagtaataattgcgtctatcaatacattaaacaaaacttaatcacttaagggtctattttgatatattcggagacattcttttggtacctatcatctgttatctgatcaacgaacaaggaatagaaaattcaccttgatacaatgttggctgaatgaaatatatccccatgccggatttctgctataactcttagacgactgtgaataaagagtgcaattaaaaccccaactaattcgaaaacactctttatgtacggctagaccgattgaaaagggatagtcactcctctacctgtagcgagtgaaggtagtcaacacagattgaaaatctgcaaggccgttgctatagccttccctccgtactacactcttatcattttcttgtttactatttggttggtctgcgaaatgacgccgcttttggaggtaacattcttgtacatcattgaactacaagacaagacactttaacagaattaggcaatctgtgcata

SEQ ID NO: 10124 - DNA, 575 bp, Arabidopsis thaliana columbia
tgactagttatgctcttggtatgctacaatgcgatggaacggaagaactcttggagaagataagagttatacaatcagattcattgagcatggtccaaggaaatttcacaggaggtagcacaacatccgagggaagctgcgcacgtgttcgtctctgctgcgaaaccttagtcgaaagattgaaacctttaatggaaagatcagatggtccaatcacctggaatgagttgatttctcaggtattcttccttgatttgctgcttattgttggtgtcaacgaattaaagattgagcttcttcattctgattcaagattttaatgtccaaactcaggcttatgcacaatccgtgaacttatcagctagtgacttgtatactccaaaagacactcccatgcagtacctgaactatggtactgcggtcagcgaggcaagctcttttttcctttctcaaaaatctgaaattggagtggagaaatgaagtaactttggtgttttcatggtgttaataggttgaagtagaccttgtgacgggacaaaccacagttctacagacagatatcttatatgactgtg

SEQ ID NO: 10125 - DNA, 401 bp, Arabidopsis thaliana columbia
aaaggaaaattcgacaaggcttcctttaaaaatagcccgtgacaaactcgattccacaaaatgacaagtcgtcctcgtgatgatgaattattagattttgtttttatctaaagacgcatgttaaattaaaataagggataaaagaaagagacagacctggaaagtgagagatgagagtggggttcgcttgagaaaagtggtcttagtgtttggaaccgacgaatgtatcatacatgccaacgattcccacatgtttagactcagtgagtcacccacgaacatcactcgtttccctctccatatcttcaaaaacgctatcccatcaaaccttcatgtacattttacacacatgaccaccattatcatgctcaatctatgtataatatgttgaaattgatgtt

SEQ ID NO: 10126 - DNA, 527 bp, Arabidopsis thaliana columbia
gccaaatgagctcaagctcacgagcgaactccttctgcctcccaacaacaatggtgatgtggtctttgtcggggacgacgtggatccttgcacgtggcactttcctcttgacgccgtagctgcactccacggggatcagctcgtccctaccgccgtggaagactgcgacctcacagtccacgttgtcacggacatggtccaaataagcctctactttgctccccgatccgaaaatgatgttgtgtagtgtgtgccatgacgcgttatgtgtgtgacacaagaacccttctatcaagtacgttcgcatcctgcatgcgtgatgaatacatcattccagttattcacctttttcattgcatctactactattaccggtgaaagtagattaattatatacacataaattggattttaagtatataccaacatcgcattatgtcacattaatttcccacatctcaatctcaggatgaggaagagatttaaaggtgtctggctacattaattgttctacgtctaataaattt

SEQ ID NO: 10127 - DNA, 575 bp, Arabidopsis thaliana columbia
tatctagatttgcctaccgctagactgtggagtaggcttatagaaaactaagaatgctgaaagaaaatagaaagcaaatttgtaaaaggtttaccttaagacgagcaacaagaggttcctcctttggtgtctcttcagccttggcaactattacttcttcatgtccattcacgagttgcctctctttcaagattgcattttgttcattcttattatctaactctgtcacttcatcttcctttgcaggctctgcttcgtcactcttttgtattgacaaggcgccactattggctttcttcaacttggcaacaagcacccacatgttggctaaatcgttttcaagggcctcttctcttctctttgcttcttcagcttttttcctaaactcttcttctatgtattctttctcagctagtgcagcctcaagtactgcttctcgctgtttccttgcctgcaattccattgtgagattttcttggttgaggttccatgagtctgagatccttgcctttctccctggccttgttccattacggttcgctgcgctgttcatggagttgttgttacgcttctga

SEQ ID NO: 10128 - DNA, 543 bp, Arabidopsis thaliana columbia
ctcttccaatctgttgaacttcctttctccatgatcttacaaagaactgagtacgcattcagagtcttcccagctcctaaaagcgcatccaacactttgtcgtagctcgaaaactctaagctgagatctctctccaacccgaaatctaacagcttcaatgctgcaatcgtcttccctttctcgcttaagacagataagaggctgtccagatcagctgtgtgtccgttttggttcagaagatctatacgccccagggcttcttctacgtgtcctctcattaagagggcttccaagatcttggcaatcaaatccatgttgtcttcgataccaacgtttttatctatcatgatcatcatcacacggcttgctgtctgcaccctaccatcctcgaacaaactctcaatcactgacctgaaaagcgatgagtctgggacatgcccgtcttcgaccatgctgtccagtgcggttttcgcgtctccaggctcacctttgctcatgtagctcttgatgagcagctcatatgcgtttgattctctagggaca

SEQ ID NO: 10129 - DNA, 597 bp, Arabidopsis thaliana columbia
  unsure (1)..(597): unsure at all n locations
catatttgttttggtgatgtgattggttaagggaggacttcctggtggtgagactcttaagaattgtaaacctttagagaagatggtgaagaagcaagacactgatggacgacttaacgctgctatctgttgtgcgccggcgttggcgtttggtacttggggactactagagggtaaaacagtatgtgtgtagtgagtgatcagtatccaagacgtcttctctcctctcgagtctgtatttcggtgtataactcacatacgttgcttgcaggctacatgtcacccggttctcatggagaaactagcggcttgtgcgacacgtgttgagtcaagagtggaaattgatgggaagatagtgaccagtagagggcctggaactaccatggaattctctgtcacgcttgtggagcaacttcttgggacagagaaagctgttgaagtctctggccccttggtatgtcttatccctgactcttctatcaaccttaatttggtctcaaataatcgacagatcttagaggccagtctctgttgagaagatggntctccgaaagcaggatatattcagctagtgattcgaggggagacttatttgat

SEQ ID NO: 10130 - DNA, 198 bp, Arabidopsis thaliana columbia
atatgctgacggcgaaatcgtcgccagaattcatgccacggtgtacgtacctggtcaggtttgaccagtggcatggcgtttaacaccgcctgacgtcgccagttaaatagtcgcatccttacttgtacctgatagccgggttaatggcggcgtaaagcacatccaccactaagttgataagaataaattccagcgaga

SEQ ID NO: 10131 - DNA, 673 bp, Arabidopsis thaliana columbia
  unsure (1)..(673): unsure at all n locations
ctccccggtccttcgtgagcatcgccacgtggcccgtccacaaagattacatcccaatcaacatcgtagacatgattaggcaaatcattgagacctaatttacaatctgagaagagaagattttgcacaggacgacactcgtttcccgcggcttctttagccgcggtgacgagctctccagcttcgtgagcttttgtcgtgtattgaacgtcgaaaacgtcgatctccgggtggatttcttcgaagtaagccgcgtagtaacgattctcctcgatgaacactgttctaccgttgtggtttaacgacttccaaaggagagtctcgtgtgtgatgtcgaaaacgagaagattacacggtggagcgccgacnggcaggacgtcagagattgatttcatctctccgtaagacatgtggaaactatcgttggatcttgacgcgtagtgaagcaaagcgttgattgcactagttggtaagttggagttggagatgggagatgatgctgaaggtgtggatctccggtgacgactgcagctacggctgcggcgacggaggtgtttttggaagggattgtgctctagtgtagagaagagtgatgagancactatggtgaagaagagacgaacgagaagcataacgagtcgtctcgtttgttttgatgtaagatgagagatag

SEQ ID NO: 10132 - DNA, 802 bp, Arabidopsis thaliana columbia
caggctaatttcggcaaaactcttacctgcaaaccattatttggtatatgtgagtgtacataaattgtcaccggaattaaaccatcagataacttgtcacaagcactttttctgcatatccgaattttatgatgtgaagaaaatggttgtaccaattttcaattgcacatatgtctgtcattttcagattatgttacatgtaaaaaccaagtatggttattatattttgttttcaaaatgagaatcaaaataatagaaatcagtaagtatttcttatcatggtagtttactttgattggttatcttattctgtgtaagctctcgacgattttattcatattttgaaatactatacaaaagtcatgatgtgtgtacattttccattaggactttctagacttgagcattattttccttgatagcttcatcgacgtttaggccctgaaatccaaataaacaaactcataattaaaatcctgcttttctaaagtaacaaagaatattaagtgataaagattgggagaaataattacggaaaataatcaatgttaataatcccagcgacaggattagcgatctgagcaaaagcttctcgagaaagatcgagcgtagaagcacagccactgggacaatggtcaacgatcttgaccttcacggatttccccgtgcaagggtgaggcacggcgttacgaggtccgctgcatttcacggtgaacattttgccacaaactcgaccattgtcccataatgtatcactcgctgcagcatcatcactccttcttgagtacctctgtaacatgct

SEQ ID NO: 10133 - DNA, 494 bp, Arabidopsis thaliana columbia
taatcaggatttgtgtgtttggttgacattatttggtttctagaatgcagcacaactgcttcatctgatggtaaacaagagtttgaggatgtgtctgaggaagatgaaccttccttccacgacacataggagttctttaacgaacctaacattggttctgaatcaaatttagctatttctggacacacggatatcaagagaagaacaaaacttcctgatccagctgaaaaagagaaaggtgttagtctttggtctatgatcaaagacaacgttggaaaggatctcacccgagtttgcctccctgtgtatttcaatgaaccaatatcatccctccaaaaatgttttgaagacttggagtattcgtatcttttggaccgagcatatgaacatggaaaatctgtaagtgacaccaaagtctcttacttatcttgtacattactacattctgtttatcttatattgacttaaagcctattggataatcaggggaatgg

SEQ ID NO: 10134 - DNA, 555 bp, Arabidopsis thaliana columbia
tttaactcgaaagatcatgatggaccccgatgccccgagtcctagtaatccttatatgcgtgaatatctgcattggtaagtcgattgaagatatcacattacttctcatatattacaacaacaatgtataatatgtattctttatgttctcatcaaattcaggatggtgacagatattcccgggacaaccgatgcttcttttggtaagaatacatcacatcataacacatttacatagactttttcacccaccacatctttggttgtaaacacattcccaagcaaacacatttttggaagaggaagagaaatagggatgtatgtatgtatgtatgtatgttgatgaagataagatcatgaatggatttattgattgcagggagagagatagtgagatatgagacgcctaaaccggtggcgggaatacacagatacgtctttgcgctattcaaacagagagggaggcaagctgtgaaggcagcgcgggaaactagagagtgtttcacacaaacgctttctcttcttactttggtcttctcaacctgttgctgctgt

SEQ ID NO: 10135 - DNA, 610 bp, Arabidopsis thaliana columbia
atggccatgattgtttcaacacactcatagagtaccgcattccctgcgtttttgtttgattcagtttttgttgccacctacaatagcatgaaaccaacgagaataaatatcaaagaaccaggataacaaagtatccgacagtagatccctgactttgaactcaaaagatttccaaaacaaagcatgtaacagacgcaggatgcattcatcatggtgagatagaaaaggattggcgcacgtacagatttatatgtccgtccacaaatcaacacttactatgacaacaaagaccggtatcaaaagagggagaattcaagtacggcaaaaactcagtaaccaataagtcttctatctaccaaagagaataatagcccatgaaccctatcaacgaaatgaaattctttctccattatgctatatttaacagaatcagttccagcacatgagagagcatagctatcttacaacatttttccgaaaaaatatatgtaaggtaactggaacaaaaaccataaaccgttgatgtttacaaaggaattacatcgcaaatgtgaagatggtcaccatatccagaatcacttgctagactatgactaacctgtgcaagtat

SEQ ID NO: 10136 - DNA, 613 bp, Arabidopsis thaliana columbia
tctctggagagataatgttgtgtattcgagtaagattcagactaggctattgaatacgcttcttgatttagttcataaggaacggactggtgaagttatagatagggtgttgatgaggaatgtgattaagatgtttatggatttaggtgaatctgtttatcaagatgattttgagaagccgtttttggaagcttctgctgagttttataaggttgagtcaatggagtttattgagtcttgtgattgtggtgagtatttgaagaaagctgagaagcctttagtggaagaagtcgaaagggttgtgaattatttggatgctaagagcgaacgtatgattactagtgtggttgaaagagagatgattgctaaccatgtgcagagactagttcatatggagaattcaggtttggttaatatgcttttgaatgataagtatgaggatatgggtagaatgtatagtttgttccgtagggttgctaatggtcttgtaacggttagagatgttatgactttgcatcttagggaaatgggaaaacagttggttactgatccagagaaatcaaaggatccggttgaatttgtgcagcgtctataggatgagcgggataagtat

SEQ ID NO: 10137 - DNA, 1195 bp, Arabidopsis thaliana
tgttattaaatttcattaggattttagtaatccgttcgatctattcgactcattattcgaaggcttcggtggtgggatgggtagaggttcaagaagcagactgtggatggtcaagacgagtattacacgctaatcttaaacttcaaagaagcggttttcggaatggagaaagaaatagagatatcccggctcgagagctgtgggacatgtgaaggttcaggtgcaaaacctggaaccaaaccgaccaaatgcaccacgtgtggcggacaaggccaagtggtttcagcagctagaactcctctgggcgtgttccaacaagtcatgacttgctcgtcctgtaatggcactggagagatctcgacgccgtgtggtacttgctctggagacggacgcgtgaggaagacaaaacggataagtctcaaagtaccagccggggttgattcaggtagccggttgagagtgagaggagaaggcaatgccgggaagagaggcggatcaccaggcgatctgtttgttgttatagaagttatcccagacccgattttgaaacgagacgatacaaatattctctacacttgcaagatatcgtatatcgatgcgattttagggacgacactgaaagtaccaacagtggatgggacagtagatttgaaagttccagctgggacacaacctagcacgacgcttgtgatggcgaaaaaaggagttccggtattgaacaagagtaatatgagaggagatcagttggtgagagtacaagtggagatacctaagagattgagcaaagaggagaaaaaacttattgaagagcttgctgatatgagcaagaacaagactgctaatagcaccagtagatgattagaaacacgaaaattttgacattgaaattatgaatctctctatacatatacatttttctactctggcttgtgatatttagaatggctcttgaaaaaagaagaagcaagtggaggaagatgattattgttgtggaaatggaagaattttagaattcatttttttgtggttcaaatttttaatatgttaggttttaataggctttcaaattggaatttattagtgattgaatgataaataaaatagtatgtaattccacaaagacattcacattattttaatcatgttcgaagcttcataaactatcaatctactgacaagtgacaacaatgaaaca

SEQ ID NO: 10138 - DNA, 626 bp, Arabidopsis thaliana columbia
taatttggaaaaatgagtctttacctatagaatctgataaatatgtctcttacataattgattaaggtcaagtaatggaggtgaatgatggtgaaagagtggtaatagcaaaaccagttgcctcaagaccttcttcaagttctggcttcaggacattcactgagcttcttactgattcagttaccgtatctccgcaaacgacttgccacgagattgtagacgctgctataagaccaaagactttgagattcaatcagccagtagcagcttcggtctcatgtccacgggtatcgagttgtctatttaattcttcgcattgttatcttctttccgcatcctctagtcttgactcaactatttctgataatgataggctgaagtaaaaggtattggaaatggaatgtcttgtgatgatgattcagatagcagaaactacgtcgtttataaaccgaaagcaaagcttgtctccaaagcaaccgtctctgcattggctaatatggtaagttgattttaaagctaacaaggtcactgactttcgaatgttgtttaattctgttttctttagcttcaggggaatcgtcacaaacttggagacaaagcgacgagtatcgtatgggaagagtgtg

SEQ ID NO: 10139 - DNA, 703 bp, Arabidopsis thaliana
agccctattacaaatgcctgcctttcagggccgggtacgttcaaatgagaaagtccacatgcatctttgtttactctttatgaatgataatttagagtaacatgtagagctctaatctcttttttgcagatcgatgttctgaagaacattgggtgtatagatgatgacctcgtcgtccaaatcaaaggtcgtgtcgcttgcgagatgaattctggggaagaattgatttgcacagtgtgtctgttcgagaatcaattcgaagaattagaaccagaagaagcagtggctataatgtctgcctttgtcttccaacagaaaaacacttcagcgcctacactaactcctaagctggctaaggctaaacaaaggtttgtttcgatcactctctgtcccttctcataattactaacagtaattgatctgacctgatcaatctaataattgatcctcttttgcatagactctatgatacagcaatcagacttggtgaacttcaagctcagtacaatttacaaatagaccctgaagaatatgctcaggagaatctcaaatttggtctggtcgaagtcgtctatgagtgggcaaaggtttgttgtaccagagagcaatctttcttaacacttcacgattcagacatctttttgatcatatatgcttgatttttgcaggggactcatttgcagagatatgtgaactgacagat

SEQ ID NO: 10140 - DNA, 642 bp, Arabidopsis thaliana
cctccaactcgttttccgggtcattacccgactcagtaactcgactcaactcactcgaatccattgacatatctcacaactctctcaccgggccgcttccaaaaacaatgaactcgctttcaaatctccgacaactcgatcttagctacaacaagctcaccggagccatcccaaagcttccgaaaaacctcatcgatttagctttaaaggcgaatactttatcaggacccatctcaaaagactcattcaccgagtcaactcagctcgaaatcgtcgaaatcgctgagaactcattcaccggaacactcggagcttggttcttcctacttgaatcaatccaacaagtcgatctagcgaacaacactctcacaggcatcgaagtcctccctccaaacctcgccggagaaaacaacctcgtagctgtagagctaggattcaaccaaatcagaggaaacgctccggcgagtttcgcggcgtatccaagactttcttcactatctatgagatacaacgtgcttcacggtgttataccgtcggaatacgaacggagcaagacattaagacggctttacttagacgggaacttcttgacgggaaaacctccggcgagatttgtgagacagacgcagaagtaatgggaag

SEQ ID NO: 10141 - DNA, 522 bp, Arabidopsis thaliana columbia
ggcatggtggatgaaggattaaggatattctatgttatgaaacccgactacggggttgaaccaagctcagatcattatgcttgtgttgtagatttgcttggaagggctggtagaattaaagaagcatatcaactcatgaatatgatgcctcgtgatttcaacaaagctggagcatggagtagcctccttggtgccagtcggattcacaataacctagaaattggagaaattgctgctcaaaatctcattcaactggaaccaaatgtagctagtcactatgtgttacttgccaatatttattcatcagcaggcctctgggataaagcaacagaggtaagaagaaatatgaaagagcaaggcgtgagaaaagaacctggatgtagctggattgagcatggcgatgaagtacataaatttgtagccggtgactcatctcacccgcaaagcgaaaagctcagtggatatctcgagacattgtgggagagaatgagaaaagaaggatatgtcctgacacatcttgtg

SEQ ID NO: 10142 - DNA, 584 bp, Arabidopsis thaliana columbia
  unsure (1)..(584): unsure at all n locations
gtttttaccaaaaacgagtatgcaaatacgggctcttacaaaccagaggttgatatttatgaattaaagtctaattcttggaaaacttttaaagtttctttggattggcatgtggttttgcgttgtaaaggtttgtcactcaaaggaaacatgtattggattgctaaatggaaccgtaaacccgacatcttcatccaaagctttaacttctctacagagacatttgagcccttgtgctctcttcccgttaggtatgatgtacataatgttgtagctttatcagctttcaaaggagacaatctttctttgttacaccaaagcaaagaaacatcaaagatcgatgtatgggttactaacaaggttaagaacggagtgangtatcttatggaccaagttatttagtgtgacaagacctgatctcccggtattgctggcttttgagaatctttcttatccggtgcatttcattgataagaataataggatcgtagtatgttgtgaggaagtattggcagataaaagaaacgtagccgtcaacatctacgttattggagaggatgagacaaaagcgaagatgagataga

SEQ ID NO: 10143 - DNA, 537 bp, Arabidopsis thaliana columbia
tgctgcatatcgtagcggtttggatattgatacttatgtgagtaaagaagttgctgagaatggccttgttgaagtcttgcgaggtaagatggttgtgcttggtctatcaagaagtaacatagttgttgtctgatcaccttaaaatctaatattgctgcagctggaaagcctgtccgcataggaaacaagggcttgattgactacatccttaccattagtttggaggtcgctgtgcgtcgcgacttgcccttgcagattcacaccgggtatgcaagatttgatcaactatatgattgatgttagtaaagtctgatctttttatcaaacaaaccttacacagaaacagaaactcatgctcagaggtttgtagtaatgaaaattctccttttcttttgttgtttgagccagttttggtgacaaggatttggatttgaggttgtcgaatcctcttcaccttagaacccttcttgaagacaaaagatttggaaagtgtcgtatagttcttcttcatgcagcttatccattctcaaaggaagc

SEQ ID NO: 10144 - DNA, 527 bp, Arabidopsis thaliana columbia
atggaagattactccaagtatactcatagtcctgctcatttagctgttgtgcttcgggatcatgctgctcttaggcgaattgtttcggatcttcctcggttagctaaggctggtgaagttactactgaggctgagtctatggagtctgagtctcgtgctgattctgtttcagctgtcattgatcgccgtgatgttcctggtcgtgaaactccattgcatctcgctgttcgtcttagagatcctgtctctgctgagattttgatgtctgctggtgccgattggagtctacagaacgagaatggttggagtgcgttacaagaagcggtttgcacaagagaagaggccatcgccatgataattgctcggcattaccagcctcttgcttgggctaaatggtgtaggagacttcctcggatcattgcgtcacatcgcgggatccgtgatttttacatggagatcacttttcattttgagagctcggtcattccgtttattggccgcattgctccttccgatacttacaggat

SEQ ID NO: 10145 - DNA, 453 bp, Arabidopsis thaliana columbia
gtacacaatgtgacttaaagatttgtgatatcggactcgctcgtgcaactcctgagagtaatttaatgactgagtatgttgtcataagatggtaccgtgcacctgagcttccgtcggcctcttctgactataccgcagcaatagatgtatggtctgttggctgtattttcatcgaaataaaggaacggtgaaccgctcttcccgggggaaagatcaagctaatcagcttcgtctgcttctggaggaagtaaagtacaaccccatgttgtgccaagatcatattcgctctgtgagattcatgattagcttaaaaagtctcgggacattgttttgcagctcattggcactccatctgaagaagagcttggatcgttgagtgaatacgctaagcgatacataaggcagcttcctacgcgtcctcgacaatctttcactgagaaattcccgaacgtg

SEQ ID NO: 10146 - DNA, 1017 bp, Arabidopsis thaliana
actaaaaatatatatagatataagagttgtacatttaaaaaatacaaaacattaaatcatattttattaaacaaattaaacttttattttttttttaaaaatagtcctgcggtatatcgcgggttaaaaaaaaatcgaattttacataatacagtttatcatgcttttattagatacactatacattttaaccgtaatcctaactaaaattctaaaaaaaatacatattataaccgttaactcaaatacataatctattattcaactatacgaattttacttaatatataaattttatttagaaaaaataaatctgcggtataccgcgggtcaaaatctagttttgtatacataactttaactttagtaaccaaaaaagtgaaatttttgaaaagcaattattgcgtgtgaatatgaacatctttttttgggtttggtgttgacgattatgaatatatgcaatctatgcattagaatctaaatcgcacaaatacaatattttaattagcctacgcatttaatgattacagttttaataattgcaccgccgcataatttacatttaacatttacatcgtcactaaaagtgaaaaaaatttagtagaatttagttagacattatcataaacagaggattttaatttttaacattattattttaacactcatcgtagtctgagagtcgaacactcgagaaggaggacgatctccgaccaccaccactaccaccggagaacaaagcaacccaaatctctgaaaacgctcttacaatcgcgcggtggtggcgtttcgcgtttagcgataggaagcaactaagaagctgttcaagctcagctacttcaaacatcttcttctctactatcatctccatcattgatcctttaaaatcttcgtatggatcctccgatttcttcaccaccgccactccttccaccataaccgccgccgccatcgtacacggcattaatctctgcacaaacgaagacagtctcgccggagacggtggcggtgatgatg

SEQ ID NO: 10147 - DNA, 600 bp, Arabidopsis thaliana columbia
ccggacaaggaagagatgcagcaggaccaacatttgctagtctaatctctggcacaaacctaactgatgttgttatcaccggtaaggttaaccaaattaataatacaacaatttaatgaattagtagcaacagtttggtgctttaacgaccaagaatcaatgatataagatcttaagaatgtattttacgtataaagactagaattaatggaatttatttggttaggtaacaacggaacgatcaacgggcaaggaaagtactggtgggtgaagtatcgcagtggtggatttaaggggatcacaagaccttacacaatcgagatcatcttctctcaaaacgttcagatctcgaacatcacaatcatcgattcgcctgcatggaatattcatcctgtatattgcaacaatgtcatcgtcaaaggcgttaccattcttgctcctatcgattctcctaataccgatggaatcaaccctggtaagtccatatcccacgccacattatatcaaaacgctctgattttttgtttgtgttctaatcacatattggctttatatttcacatggcattgtcattttgttttgcacacttttttctcttta

SEQ ID NO: 10148 - DNA, 545 bp, Arabidopsis thaliana
cataccgaccccgattctttgtagaatgctaatgcctctttcgtttcctgtggcacgtctcaaaagaggaacgaggagtttctcgtagattgttacggtgatgattatggagagagctatgagagagaacaatgaagctggaggaactatgaagcttgtccctgtgatgtgtcggtccattattatggcttgtttgataaagagtgttgagctttgagtggcgcatactccaaaggctaatgtaaagaaccagattggaatcatgttgatgagtagcttaacttcttccactttcgtaaccgttgcgagtcgccatggactctgcttctcggctttagtgttctcgtttcggtcctcaataactgctgctttgtctagaaatctgcaaacagaatcggaatcacttacatgcatgtttggatactataatatgctttaaacggattcaaaacttatgtaattttttttttttgttgaatatttgatcaagactaattttaaaccctgaccgaaattgtacaaatcgaccatattatttggatata

SEQ ID NO: 10149 - DNA, 568 bp, Arabidopsis thaliana columbia
tcatgattcttagctaccacacgctcatccgcccagaaaacataccatttcgcccaatctacaatcttgtcgtaaggcggctcgatcaattttctgttgaatgtgtaatccatgaggagatagatcaaggagactgaaaatgggattcttaaaaacttttaggtgaaataaattaccccatgaagctaatgagagagcctcctgataacacaatgcagaaagcaccatgttctttaattgatgcttctgatatctcagctatataatcaaccaagtctatgcttagttcctccaaattctcatgaaccctaatttctcccctgtctttatgagtccaagtaagtgccatattgcttcctctgttgtttcaccgatttttcagaaactctacagttaaacaaagaatgagatttaagaatctttacaccaaaaaaaagagatcagatatggagtgagaggaagaaatggttcacattttgcacattgaaaaaacagagataagatcatattctgactctcaacagtgttccaatttgactacaaatccaagaatcagcatttgaatata

SEQ ID NO: 10150 - DNA, 684 bp, Arabidopsis thaliana
acaaaacagcgtcctagcatattgagtggtatttaagcccagaaaaagctgattggaaccaaaaaaagaaaaacaattacgcaggccctattaagtaatgggcttggttttttggtaaagataatatatttagattatttcttttatttctattggtcttcgtaccttcacgcggatcagtgttagaaaagaatgaaatctgtccgtagaattgtattaatctacggttgctgtgatttcacgcggatcgtgatagaaacctcttatatccgttgattaaaaaccaatgaacgatccagatctaatcccgctgaaaaagaaaagcgaaatattttccctcccacttcttgtaatttccagacgataaatatccccttcctcaatcgaaacaaactatccagatctcaactttctctcatcttcaaattaaaatcaaacagtttcttaataacattttacttcatggctcgtaccaagcagacggctaggaaatcaaccggaggaaaggctccaaggaagcagctggcgacaaaagcggcgaggaaatctgctccggccaccggaggagtgaagaagccacacagattcagacccggaactgttgctttaagagaaatcaggaagtaccagaagagcactgagcttcttatccgtaaactccctttccagaggcttgtcagagag

SEQ ID NO: 10151 - DNA, 1067 bp, Arabidopsis thaliana
tcttatccgaaactccctttccagaggcttgtcagagagatcgctcaggacttcaaaaccgatcttcgtttccagagcagtgccgtcgccgctcttcaggaagctgctgaagcttacctcgtcggactcttcgaagacaccaatctctgcgccattcacgccaagagggtcacgatcatgcccaaggacatccagctcgcgagaagaatcagaggagaacgagcttagatctaagtattctggttactcttgtgttttgattagaaccataagattgtaaaatttcaagttaaatccaagggttataatattaattccaagcaattatcttttgttctatcaaagtattgactttttagttgactttattaatcactaattgtttggttaatttgtgctagttcacaactcattatagtctcacaaattaatcagctttgacgctgaaattgttgtgaagatcattgttaattagttgtgattcgatcgaagatgaactccaatctgctatcgaatcctatatcatcggaggtcttcacctccattgatttgggaacaaattctttcaagcttctaatagtccaagctgagccttccggtagatctttcgttccaatcgagagactcaaagagccagtggtgttgtctcgtgaatctccaacctcaatttcgtctcaatctcaggctcgcgcgcttcaatctctacggaaattcaaaagtttaattctctcgcaccacgtctctggtgataggatccgatgcgttgcaacggaagccttacggcgagccgagaatcaggaagagttcgtggatgcggtttttgaggatgttgggcttaaggtcgatgtgctttctggtgaagaggaagccaggttagtttatttaggcgtgcttcagtttttacgtgtgtttgagaaatgagtgttgtgtgttgatattggaggtggtctactgaatttgtggttggtaagtgtggtgatgtcaagcttgctgtttctttaaagctaggtcacgtgaatttgacgcagatgtttatgagaaatggtattggattgaaggaaatgaga

SEQ ID NO: 10152 - DNA, 589 bp, Arabidopsis thaliana
ctagatagatccccaggacgtctccccaacagtttagcgcatcgtcataccatctgatccttccgtcaaaagctaagtagataacattgtgtatctggcaataagaatcattaaacatggacatagccatcttcgtttgaaccggttcccatctactttccttggaattgtaagcaaccacccctctatgaatccaaggtttcacgaggaactttccgtcaataaatgcggttctgcagtttaaaaacttgtcttttgtctcgctgcaattgaagggctgaggatcccaagtgtgtgtttctgtgtccaacacctcaaagaagtcgttcttggattcagattcttcatcatctgcgtacattcctactacaaatatctttcgatcaaggacgctagcagaaactgaggttagctccacgcccaatctcggagcctcgcgccacgtgtttgaccggcaatccagaatcgagacgttagaggaggcgtgcgaaccggcaatgttgtagatatcagaacaactgtgacgagactcgagaagtagacaggatgagaactggatctgggactggacccaataataccatttgat

SEQ ID NO: 10153 - DNA, 433 bp, Arabidopsis thaliana columbia
tcatttttctatgtcgtttctttctcttttctcttgttaactccgatggcgattgaacaatcccttgatcatcaattcgtgaaaaatcaaaatgtgatccacaatgataccaaggagacttccatctctggaaaaagtccaaacccaatttccgaatctattgttttgtcgctgcattctccactcgtttatttagtacacacaacatgttcaacgatagtcttcaccgagatagggaatcttggattttagtttcttctgtaagcctttaattttgttttctttaagttttttttgtgcttttaagtaatgatatatattaccaatttaaaaattccaattaagtttaaggtttaatcaattaaattattaaaaaattattttggttttaaaaaccttactaaaggactcacctaattggtattaaaaattt

SEQ ID NO: 10154 - DNA, 646 bp, Arabidopsis thaliana
gttggttctgatatctacaacattggtggatccatttacctaggaccctcctcgtctagtgtctcgattctggattcccagtctcacatgtggcgcgaggctccaagcttgcgggtggagctgatgtcacattctgctagcgtccttgacagaaagatatatgtagcaggaagctacaaagatggcaatggcgattccaactcctgtaagaacttgttcgaggtgttcgacacaaaaacacaagtgtggcatcctgagcccatcccatgcagcaagacaaaaggcattttttactccaaaagcgcatgtattgatggaaagtttcacgtggagacgactcacggagtggtgtatgcttacaaggaaggtagatgggacaaggctataccaacgatgtttggtatgagggcttcatattctttttgcgagataaataatgttttgttctatattcatcgcggagtgttcagatggtatgatactaagttaagaatgtggagaatattgaaaggtttgttaggactacctagtttacatgagaatatgtttgttagattggctgattatggtggaaagatggcggttttatgggaagaggatcgcccctcttgtgggcgtggtgcagagatgagatgatgatttggtg

SEQ ID NO: 10155 - DNA, 547 bp, Arabidopsis thaliana columbia
gtacgagctcacgttactaatcatggtcaaatggccccagaacaccttttggccacattcgccaagttatgtgcagagatcctcgcagctgcttctgatggaatgctcaacatagaagatgtcactggtcaatcagttctacaggtaacttccaaaatggctacagagcctttgttcttcctggtgattgccgatttttaactcgttttgtctcggtgtaggatgcgtttcagatcttggcgtgcaaagagatccgtttatcagtttccagaggagcatcgtcggagcagcagatatagaggaagaaggtggagatgcagcaactgcaaaaggaagggccataacgcacgctgttagaaaaggtttgattcagaacacgattccaatcttcattgagctcaagaggctattggagagcaagaacagtcctctcacaggttcgctcatggactgcctccgtgtcctcctcaaagactactagaacgagatcgatgaaatgcttgtcgctgacaaacagcttcagaaagagcttgtttacgatatgcag

SEQ ID NO: 10156 - DNA, 137 bp, Arabidopsis thaliana columbia
aggatgtctatctcggcggaattgataacccaacatcgcggcgttatgccgtcatcaccgcctataacggcggcgcaggcagcgtgctgcgagtcttttcgaatgataagattcaggctgccaatattattaacacc

SEQ ID NO: 10157 - DNA, 548 bp, Arabidopsis thaliana columbia
agttgagacagctctcacaatgtaatccctttttttggagatcttattttggttcaagacagaaacagtgtcaagaatacgatataatgctcatcattgttaatgaggaacaaatgtttgcgtattgtgttcgaaaatgcactaattaaatctgcgaagagccgtttttctgttaagtccgttaaaagtgatttgtcaagaaattctggggaaaaagataccacaaaaaactcatgggctcggaaaaatttggaaatggctaaaactttctattatagttacatttacccgattgaagttgaccaagaacaccctctgaaatctaaaaatgaacatttacataaacataattaagaataagcttcgtctggtcagttttacaggaattagttttagtgttttcttcttctataggctcgatcatcttatcaatgtagcaagcaacaagcagttagttcccatcttcctgagctcatctacatcgttctgaagagtgttgacttgatgtgaatctatgaaccgttgacacaaacaccataatctgacac

SEQ ID NO: 10158 - DNA, 595 bp, Arabidopsis thaliana columbia
ttttttgtagggcaagagaactgttttattatctgaaaggtgggttagttgattatggtgaagaacacagtaaagcttgtgggcactctcaatttggtcgtttttatgaaaaaggtttagtcttttatgtgttctcttaattcagtcttttgagtagcttttgatggactcttgtgctgatgaaatgggtgattttacttcaggggaataccaagaatgggatgaagatcatcctattcactttgttggtcactctgctggtgctcaagttgttcgtgtcttgcagcaaatgcttgctgataaggtaaattgtcttcgttaggaagaaaccaaatcgatagagcataggatttggttgtgttgttgttgaaacttagttgccgtgttgtgttattttcagatgtttgagggttatgagaacacgaatgagaactgggtgttgagtctaacgtcattgtcaggagcgttaaacgggactactcgaacctacatcgatggaattcagtgagtttctcttccttctcgtgaccttttagctaaataacaaagagcttataattcaaaatgtatatcattgtcaggcctgaagatggga

SEQ ID NO: 10159 - DNA, 559 bp, Arabidopsis thaliana columbia
agatcggtgggttcattgaagagtggagatacgcgattgctttagctgtttgagtagcaacagtgagacgcaaggtccatggaagaccactccctctatctctttgtagatgttcagatagagttccattcggcatgtactcataaacgagaactggatcgccttgttctatacaacatcctaagagacggacaagattcgggtgactcacagaggaaagaagcttgatctcattcatgacttggtcaagactttctgaatctctatgtctaagtcttttgatagcaacccattcatcattttggagctttcctctatagaccgtaccatatgcacctattcctaacttctgcttttcagagaaaccatctgtcgctttctcgatttccttgtaagggaaaaaggcgacactcgagttccctgcagcttcagacaaaagacgctttgcgcttaaatgacttctcaaaggagtagaccgtctccgcttacaaaagaagaaaaaagccaaggcagctagtaaaaacgctccaccaacagttcctatatatagcaaatgaat

SEQ ID NO: 10160 - DNA, 639 bp, Arabidopsis thaliana
ataaaggacgccagcagaagcatcatagagctccaccggaaagcttgcagcttcgcgccacgtgtgagaccggcaatccagaatcgagacgctcgaggagcaagctcttaacttgaacctatcttggcttaccccattgttgtagatatcagagccaaccgcacgagactcgaaaatcgtacattaggagaatgcgggattgggactctagccaaagcataaccactctccttaccggttatggttttatcaagtttccggcagagggtgaaccagtttagaccattttccatatcgaagcaaacatagagacaactctctgtgcggcccaactgtgaccttaccttgtaaagctctggtgaagctaggagagatcgaaagctcttggagacgagtgagagactcatagtacaatcttgggatgcatgcgacgatgtgcattagaaaatcatagggaattgacggattatgagtcaattccggcgtcgacgacagctgcttctgcttcttcttcgtaatcgtcttcttcatctttccggcgttgacattgacacacaggagacaaataaaatcagggagattagttacatatttggcggtggcggacaacgcattaattttaaacttgttgggctttat

SEQ ID NO: 10161 - DNA, 462 bp, Arabidopsis thaliana columbia
taacccgagaagcctctctgcggtatcttcttcaagtaagtaaaatgcgcacctgaaagtcgtccgctgaggtcttgttgaagaaactccaaccattgggaagctacggtagcagctaaaaagcaaagaaacattttccttttaagcatttctttccgtttccacttctgcatatgaattaatcattatgcacaaaaacagacatacctaacatttatatttctatcacttctagactttactttattcagaaaccctaaatcgttaattgacacagaagtcttcatttttacgccataagacttgccacttattacttcagacacatactcagaagatccaagaaacagttaactaagggtaatctgaaacaagataaaaggcactgaccttcaacagcaagagatgtggcttgttcaggatttgtaatggaaatggcattatcagacaccccggtggatg

SEQ ID NO: 10162 - DNA, 584 bp, Arabidopsis thaliana
tacactgtttgctttcctctcgatgtttgacatttgcaccatctctggccatggcggttccattgaatctgacctgaaattattatggcttcctactatgtccatctttcgagtgtaatcgtcaatgcgtgtatccgattcgttgtcttcttcttcgttagagacttggaatttgagagttagctcctgcatctttttcgcaaactcttcctcggaaaacggatcgacgtttgcgctaaaagctctgcgaatcaactgtgttttaggtcgttttgttgattcccagagctcacaggacttggagtgacggagatttgtcgaagaagtgccgaagggagaagaaggattaagcctctggctctgcatcacggaacgacaagacagagaagaacgtccgtcgtttccgatgatccgtcgtcttgaaggagaagaaacggcggaggaagctagggtttgagaaagggaagaggaatgatgaactataggatgagccacccattgatggaaggtggagcttgttgctactttcactcccattttcttgaaaatatcttcaaatgttggcctcaacaacaaacaaatct

SEQ ID NO: 10163 - DNA, 531 bp, Arabidopsis thaliana columbia
tcgagtttatcagtccttttgtcgctaaaacttctccatatcttctacattccacaaagagctcattcaacagctgcatacagacatcaaagtcaagaacgacaaaagattgatttttcacattaggtttggtgaatataaagtgtgggcttacatcgagaggcttaatatcaatcatagggactctgactgatcctcctctcatcgatgacgcgttcttgacagagcctagtcttggtacaggaccagaaaaaggcgttggttcctcgtcctttcttcgatatttcggccttggaaaacaagaaccttcaggcaagtcaagtatatcggtgctatactcgtcgtaaatggagacagaggcaactatatagcagagtccatagtaaaaagatgattcttgatatgagactactcctgcataagcaccaaggaagatactagagataactgatccaataaccgcgccctgtgacagccaaagcgcagagtaagattgcgaggcctgctatggggacacacattgtctcaaga

SEQ ID NO: 10164 - DNA, 498 bp, Arabidopsis thaliana columbia
caaattttgattatattaaactgtgtattattattattattttattttttaggacttcttaccaagattttcgtaggtctgagactcgatccaataatcaggcgcactcgacaacaccatcaccatcgtccgttcccgagtcgcagcagtctgcggctcgtccaccaatgacagttgaggagctagtacaacaaccggggcgaacacttctccgacgactccatccaaaaaggcgtgaaaaagggagcacatggtaagtaaattttgttctctgtatctaatatatacagattttatagtataaattatattatttatcactatatgtaggtttggttattctaacaatggcatatccaaatcgattttacggatgttgcatggaatgctcaaacatctgtatccgaagtacaatgatatgcttcgcgatgatcaagagctttggtctagaacttttgcggtaatgaacttattattacgtaccaatattctgtttgt

SEQ ID NO: 10165 - DNA, 559 bp, Arabidopsis thaliana columbia
gatattaccgctagctcgaagtcaccagacatgcccatggacagttcaaattgatcctcagccattccaagtgccttgcatacatcagctctacagtttgaaagtgtctgtcccggtttatggggaaaagaataaaccttggtaagtaaaacttgtaggaataacccgagaacacgtaaaacaagtatccaatcaagtagtagaataccctgaagttctctggggtagacgtataatcaggcatcccaatagtcattaatccggagaataccagatttggacagtgatgtttcacatgtcttgctagctctacaacgctagaaggttcgattccagatttagctgcatccataatcaatcagtcagccaactgaagaggctggacaaggaaatcagcatagaggtaaaatactcacaaacttctccgcttgtgttcacttggaccaaaacctttagtggatgtctccaagatttgaaacagctcgatctagatgatttgctacctgtgaaatcaatcccaagtgattgtataccaaaataactcctagtaaagtgaatt

SEQ ID NO: 10166 - DNA, 611 bp, Arabidopsis thaliana columbia
  unsure (1)..(611): unsure at all n locations
nnnnnnnnnnnnnnnnnnnnctaaagacgcttatgacgaagaaaaaagcacataaacctggttcagcgaccatcgcgcttaacaagcgcgcccgtcacgaatactttatcgaagaagagttcgaagcgggacttgccctgcaaggctgggaagttaaatccctgcgcgcaggaaaagccaatatcagcgacactancgtccttctgcgtgacggagaggcatttctgtttggcgctaacatcacgccaatggccgtggctccacgcatgtggtgtgcgatcctacccgtacccgcaagttacttctcaaccagcgcgaactggactcattgtacggtcgcgtcaatcgagaaggctataccgtagtggcgctctccctgtactggaaaaatgcctggtgcaaagtgaaaatcggcgtcgccaaaggtaagaaacagcacgataaacgttcagatatcaaagagcgcgaatggcaggtggataaagcacgtatcatgaaaaacgcccaccgttaaacctgcactccaattattgaccagttcctcaccgcgcctccctctccggcggcgcgaatgaacatcttattggctatcacatccgacacaaatgttg

SEQ ID NO: 10167 - DNA, 647 bp, Arabidopsis thaliana
gtgtataggcatggctgctgtatttctggaaaagagctaaaattcatggcgtggaaagtgatattgcggaagagcgtcttcagttctggatcaaccgactcgggcaacattcatcttcacatgatgcaattgatggtatatttattacttgaagctaaatcagttaaagtaaagaatctgattccttttgtgtttgctgggacagtggaaagaggaatgagggagctaaggaagcttggaatagaacaacaattgtgggaaacatctcgtaaagaactcatcgactcctcttttcttccttcttattccgtttctgactacaatgacgagtgaccacctctacgtctctctttgcctccaattttctttattcacgacacacgctcacataaacatacacatacacacacaaaggtaatcaaaatcattttttcctgctcgacaaagcttagaagaaacacaaaagaattcatactacatctgttttgctttcagactgtgttccaattgttgatatatgtttggcttccatgttgttacttgtataatactcttcgttacctacccaaataaccaaatacaggttttttgagaacaaaagctgaatttcatatagttaggggcaaaatataatttatatagttgag

SEQ ID NO: 10168 - DNA, 566 bp, Arabidopsis thaliana columbia
aaagagaatatatgatttttcaaaaaatttatgtgcttgattatttatttgtaagcagctcaaaggaataaatgtatgatgccctctttgtgtgtttcttgagctgcaaaagcaatagaaacaaagatcaataagactatgttaaataggtctagcgatactccttgcctatcagtaggtgtaagattgcaccaaagtgatcaaacaaaccagagtagaaggcgaaaaacttacgggtctttgggttaagatgaagaacaagaaaactgagttcttgaagaagagtgttgtttagaagagattgacagacattttgagcttgttttgtttccatttaggcagtttgtagaactcattctttgtcatctcaaacttctccttgaactctactgaagtcaagtatgcctgcaaaataccaagctgaactcatgaaacacaaacttaataaacgaatgttataatatgtgttgagagttttgaagaatctgacctctcttctagtgaggtcgacatctgaaacaggatcctctgagtcggttttaggcgttcatatgggaaagtaggga

SEQ ID NO: 10169 - DNA, 544 bp, Arabidopsis thaliana columbia
  unsure (1)..(544): unsure at all n locations
ctagaggatctntaaaatgtgtctgttcttttatgggacaactttttctgccataaatgcgttattggtgaaactgtttagtgattttactgaaatgttggattatggttcttgtaacagtggtcagggtacaattgcattggaactgctggagcaaatccaagagattgatgctatagttgtgccgataagcgggggtggtttgatatctggtgtggcgcttgctgccaaatctattaagcctagtatccggattatagccgctgaaccaaaaggagctgatgatgcggctcagtctaaggtcgctggtaaaatcatcactttacctgtgactaatactatagctgatggccttcgagcttctcttggagatttaacctggtaatctacttcttactcgtatatagggatcatgtctatgaagcagatatagaacagaaaatttctcaaactctgtatcattccttctctaaacattttttttttgctatcaggccggtggtgagggacttggtagatgatgttgtcacttggaagagtgtga

SEQ ID NO: 10170 - DNA, 485 bp, Arabidopsis thaliana columbia
tacgtgagacccacggaacttatgcggatggggatagggctgatcatgggggataatggcaatggtagctgcaggattaacagatatccaacggctgaaacgagtagtcccggggcaaaaggagagtgagctcaccattttatggcaaattccacagtacgtgcttgtgggagcaagtgaggtgttcatgtacgttggacagttagagttcttcaacggacaagcaccagacgggttaaagaacttaggaagctcgttgtgtatggcttcgatggctttaggtaactacgtgagcagtttgatggttaatattgttatggccataaccaaaagaggtgagaatagccccgggtggataccggaaaatctcaacgaaggtcatatggatcggttttattttctgattgccgcgttagagctatcgattttgtggtttatttgatatttgcaaagtggtaccacccataagtcatgatgaagatagt

SEQ ID NO: 10171 - DNA, 498 bp, Arabidopsis thaliana columbia
cttcttgctatcaaagaaggattattggtaccattggttttaacgttcttttttcgttacaaataagtaactaaaaaatcggagtttttgataaacgcgatcattcatctggcaggttggaatatcctctggagcctcagctgcggctgcgttaaaggttgcaaagcggcctgaaaacgtagggaaactcattgtggtaagcttagtctttgacttaagagtgaccataagctttgaagtaaccgaaatcaaacctggtttattaaatatcgcgatcattgtatggtttgtaggttatttttcctagtggaggagaacgttatttatcgactgaattgttcgagtcagtcagatatgaagctgagaatttgccagttgaatgagtagtagtaacgtaggattcaataagagatgttggtaccaaggttacattttgattattgtaggtcattgtaaaatcaataagagttacatattccttgatgatcaattataagt

SEQ ID NO: 10172 - DNA, 480 bp, Arabidopsis thaliana columbia
agcctacgataaggccggtcaagccaaggacatggcctacgacaaggcgggtcaagctaaagacatggcctacgacaaggtgggatcagcctacgacaaggcgggtcaagccaaggacatggcctacgacaaagcaggatcagcatctgagaaggctggtcaagctacagactttgcctatgacaaggcagctcacgcaaaagacgctgcctataacaaagcagaggatgtgattaagatggctacggatacgagtggtgaagctaaagatagtgcgtatggaacatacgaaagattcaaagaaggatctaagaatgctaaagacattgcatcggataaagctcacgatgttagagaaacacgcaggcgagcaggtggactatgctatagacaaagcacatgatgcatacgaatcggggagcgacgagcccggaagattcgacgaggcaatgcataaggttggggagaggtatggtgcag

SEQ ID NO: 10173 - DNA, 535 bp, Arabidopsis thaliana columbia
  unsure (1)..(535): unsure at all n locations
nnnnnnnnnnnnnnnnnnnnnnctaaagtgcggcattattccggcagtactggcttattacgataagttccgtcgtccggtaaacgagcggtcaattgcccgctattttctggccgcgggggctattggcgcgctgtataaaatgaacgcctccatctctggcgcggaagtcggctgtcagggggagattggcgtggcctgttcaatggcggcggcagggttaactgaactactgggcggcagtccggcgcaggtatgcaatgcggcggaaatcgcgatggagcataaccttgggctgacctgcgatccggttgccggacaggtacaaatcccgtgcattgaacgtaatgccattaatgccgtgaaagcagtaaacgccgcgcggatggcgatgcgccgcacctcggcaccgcgtgtttcactcgataaagtgatcgagacgatgtatgaaaccggcaaagatatgaacgataaataccgcgaaacatcacgcggaggactggccataaagtggcagcggctgacattgctgtca

SEQ ID NO: 10174 - DNA, 1731 bp, Arabidopsis thaliana
ttaatttataattccaactggtcctgaacatcatacactggtgagatactatgttacttgagatctcagagcatccgacctagctcatggtttcacagggtcaataccacgaaagggtgactcgaagtcatgaactgttgaaaagaggaatgcttgaaggctgtgtacgtcaaagggtaacatgctcacctgatttgtgctggcgaaagatgattcatgctatttctttcaaagaactggcgctcttctgctcccagatcgcagaccttcttgaagaagcatgtcaggttctttgtgattcatataaatctgaaacggatcagttggagactacactgtataatccaaggttgaatccacttgaatgaagtcagaagctgctaataagcctaagagcttgactcttttacaggaactatgaagcaactcctgcattgtcaaacactgttattcggtgcaaacaacaaaagaatgattagtcgacaggttcacagacgtaggaaatggcattcgaaggtagtgtatagcgaatggggttgggaagatttgtttagtctgcaaaatttcttaagaatatcaccataccacactggctagttcactgtgttagcgctttgtacataacaccatatctatagttatgaaacttggttctttttttccttcattcaatttgttgtcctattttgttaatcatatctgatcaatggagacatatattctttaacagccagttactcttaactgtttgtgcaaatatctctctagccgatgataacaggagaagattgaaagataagactacaaaaggatcattcacatttccttgatgaatcacatggtttctagatcaacatcatccttactgatgattgcaagaagaaaggttaggagtacaaaatataagtgagaagctaaagctattcaatcacaatctctttcaaggttccaacgccatgagcccttgtgtggtggtgatcgtgactgcaactctctttagcgtagctcctacaacagttgctgccatggtggcacctctctctgctgctacagttagacttgcaatggctatcgctcttcactttcaagctagttatcgcgagatcagcaggacttgaacaaaaaccattgaccaagactttcagttcctctttcgcatccccctccagattgaccaatgttgaagaaccttcgtgttttgggccagttccaatgtccaggccagatggcttgtcatgacagctttgttgcaactcgtgttggtgtggctgttgactcttgccaccacaacaccctgagtccaggccagatggcttgttatgacagctttgttgcacttgcacctcgtgttggtgtggttgttgactcttgtcaccacaacaccctgagtcatggccatgtcctaaatcaacaggttctgcacaacagctctttttcacaaccgttacattgtctttctgtttcgtctcacaacaaccagagtgactatggtccgaactggctttagctggtttcatcgctttctcttgagtcttcgttccacaacagcccggcttgcaatgcttatcactgatctttggtaataagcctgcttccatgtccccagcagcatcaccttcaagtttctccgcgattaaaaccgaggaagaagaagactccctataacatttgtttccagttttatgtttatcactgagcaacaacatgctattaaggatacaagcagacaag

SEQ ID NO: 10175 - DNA, 616 bp, Arabidopsis thaliana columbia
aaaaatctcagcaaatatagaggatttacgttttagtgtatccgattatggttcgacagagagcatataaacaaaagtttcctccgacttgttggttatcagacaaagacaaatatacctccgccgttgtcgatgatgtgtagattactgaggctgatcggtgaatctgcatccgggcgattctctgcggatcgcgtcatctttacgagttttgtgggggaatgaaatttcgacggctacggtaacgatatgcctgagacattgctgaggttgacggagttgctgggttatgagaaggaagaagacgggcgccggaatgaatgcagccaagaaaatcgcggcggaattgaatcgtccgaaacagatgagtatacgcgggctttcatgacgcttgcggatgtctcgagcttgatcagttgaacgagtttcttttttctacgaagctcaatccccctgatcgggtgaccaggtgaatctcttttagttttgaccggaattgacttaataagtccttaggttcctctagttgattctgctatatctcgagtcttggctattcatttcagcctattgcaaattcaattttggcttcctacgtgatgtggtttcctcttgt

SEQ ID NO: 10176 - DNA, 518 bp, Arabidopsis thaliana columbia
catctttgaggaacaccaggtgcattagggattccattgaagaagctcatcgatatcctctaactgaagaataacaggattaaaaagtctcctctcatccacacgacgagcatcctcataacgaaccacaggttgctctggcacagctacagcaatagcattcacatcttcattatcatcatcaacccattcctcttcttgaaacggagcaccatactgttcaccattcttaggaccagccccacttttcttgaacaacttataaagagcatagtactcctgagggttcttacatctccctagttcatcttcatccatcgtatactcatgcatcacccaatcagtccgctcaccactaggagtccgtgctctatagaaaacaagagtctttttaagtcccaccgatctagaattatactcaatgactcgatccttccctgtagccttccaatacccattttcagttcctctattagacctagctgcgtttggatattcctacccttggagtgaaatag

SEQ ID NO: 10177 - DNA, 585 bp, Arabidopsis thaliana columbia
cgacctcgattcgctgtgcaagttacgatggaggcgatcgatgagttgtctcagctttcggattcgatgagacaagcggcgtctctgctcgctgacgaagatcccgatgagacctcttcttctagacggccagctacttctctcaacgtcgttgccctagggaatgtggtgggttttccctcgctttttctgtttctgagatgtgactgtatttggcgtttgttgtaagttttatactgtgatcgagtgtagatttttgttgccatatcgtggatcttgtggatctcgatgaggtgttttcgaaatggtcccgtaacctaggagtttggtaggatgttttgtattcttcatctcttcgttcgtagcttgttttgttgcgtttctctctttattagggattatttgattctatgagattcaaacctgggaggtattactatagtagagaaggttgatgcgtttgttatttgaaactatgagaaatctattttagaaagtgtatacagaacgaaaagtgtatgtgattactctgttcctaaacacttatctgttggaagcagaaaaatatgctatgtgttgtgattg

SEQ ID NO: 10178 - DNA, 423 bp, Arabidopsis thaliana columbia
gaggatcacgatcaccgttaaaagaaaatttgaacaatttcggaaaaaagtacataaaggttatcaatatattgaagctcagaccaaccagctgtgacaaatactctcactcccagatgtttagctatctgaatagcaaatgtcccaatcccacttgaacctccatgaatctaaaatttcagatactatcaaaccataagcaaggacatagacaagaaagaaaacaaaacagcccaagagagaagacaaatgcaaagcaaagtaatagataaaagcctctagaattgaccgtaaaaggattggcttttaccagaccatagaaactgtttttatacataaaaagagaagagaagttgaaataccaagaatgattcaccaacagagagacggcccatcatgaagacagtagaccatacagtgcat

SEQ ID NO: 10179 - DNA, 514 bp, Arabidopsis thaliana columbia
atatcagtattggaactaaggtctctaccaaataatacttacatcacagaatcaggttctttgaagtctatactaagatcatacctaagtgtatcaacaaaagttataaggtaagtcaactatttgatattaaagttttttcttacccatttactttttttttagtcattgcaaattgtttgtagataatgatgtacaagattgtggttaccgcagtacccagatgatttttatgatcgaaaatgggttccatactttgagtcagaatggaggcaaatatccaccattctcaaagtgaacaacaccattaatggttttcttgcgccgcaagaggtgctcatgactgccgcggtaccttccaatgctagtgtgccattgagtttcacaaggatcttgaattcccaaagataaactttacttctacttccacttctctgagatccacctttacaagccaatcagagtagagagtttagtattttgtggaacggagaaattattattccactttgag

SEQ ID NO: 10180 - DNA, 534 bp, Arabidopsis thaliana columbia
cttttgtgaattacacgaggaagaatccaaatccataaaactgtacaacattacagaagatcacttccatcagaaatcatcaactgctacagccgatgaaggcagctcacgctcatcttccttttccatctccaattccggttcgaactctgtcaaatcggtatcagcaagtttcttcaaatcgataatcgataactcgtctagtcttcttaccaccagctcagctgcaccaagctcataaatcgggtgtttactcgccacagccacacatttcatcctcccatcgtgagctgcctctatggtctggtttgagtttccaaatacaatgcaacgttccggtatgaaatcaagaagctgtgctgcgtaaatgaacatctcaggatctggtttacctctgtaaacatcttccgatgcaactatcacactgaagaactttctgatacctatcgatccaactgcattctccaatgtttcccgaggacgagtcgataccaaagccatagggatcttattattcatcaagacattgacaaa

SEQ ID NO: 10181 - DNA, 477 bp, Arabidopsis thaliana columbia
atgtctccactgcacttcccattccaagctatgtcaccggccattaaaaaaacaaagattagattctgaagaccaaagagaagactttattttttttggtatgaaatagaagactttattcattttaaagattagactagattctgaagaacataaacatcaacttgtatttgatcatttcatcggatccgtttagtagtatttgtgttttatggatatttttgatgtgatttgaagttttgtatagctgaaattagtttttttaagagaaatgaaaatgtaaagtaccatgagaccaagagtgaacatattgaaaccgctgtttcctagagaagcggcacgaacgttgcatacttcccaaacgaccagcgaagatacgagtgagcatagacatgccattgttgatgacgtagacaaagatcgccggagccgccaagtggaaaaggtacttcatctcgatcaacgacgcaaggtaga

SEQ ID NO: 10182 - DNA, 595 bp, Arabidopsis thaliana columbia
tttctagatgagaaaaaggacttacaaagttcacaaaaacagctaggataatacacacttgataacttttatgtgataatccggttacttgaaatcaacttagacagacatagcatgcaaaactaacagactaacaataactccaaggcaagaaacaaaagaccaggatcacttacaggactcgtcagaagctcatccttgtagtgcttgtattgggatctcttttgtttcaactcagttgaccagagtgaacgttcaggtggcaagtaaccaagcaaaagctgcaaagagaatcatatttcaatgaccaagtaaggtttatcagactctcagacacagttctatgcattgttgcattactacgatatagattcttcaaagtgaaaacaaaccaaaatcatgattcttgaaatgcataccttccagacagtagaacggatcccgggagaatccggcaaactttgtaaagctagactcctcaattccttcatattgatcaccttcttcgacaactatagaaaaaccaataaagaagaagtaacaataacattcagaaactgagcaattagacacaaaacgctggtggaagaatttg

SEQ ID NO: 10183 - DNA, 336 bp, Arabidopsis thaliana columbia
caaagaacggcgaagatggcacacagaccgacacaagataaactttcgaagaagagcccgaagcacatggtaacgcgatcccattataagtattactggtctgcaaaaatctcggcgaagcccacacgtgggcgcggagatcgacggaacaatcgatggatgccgaacagggaaaccctgaacaggctgtgatttataaatagcttcggcacaaaataagaaacggtctctccaacgcataaagaagtgacagtacaccaacgatcctcagtggtacaatcaagtccagcacgtagtcattcataaactgctctaccatagtttttcgcggataac

SEQ ID NO: 10184 - DNA, 481 bp, Arabidopsis thaliana columbia
ctgtttcagtgggctcgaagtccggggaaaaagggttctcattaccatccagacagtgacttgttcctccctaaagagagaaaggatgtcctcacttctactgcttgttggactgcaatggctgctctgcttgtttgtctcaacttcacaatcggtccaattcaaatgctcaaactttatggaattccttactgggtaatgcgccgctgttactcccctgtttcagcctgagcaatttgtgtattatttcctctgccttactcaaaaaggtttttatgtcaaatacagataaatgtaatgtggttggactttgtgacttacctgcatcaccatggtcatgaagataagcttccttggtaccgtggcaaggtaaaatacatattctctgcttccactgttctttgactacatcgctctttcttttaaggttaaagccaactggtgtgtaaatctcatgattctcgcaaaacaggagtggagt

SEQ ID NO: 10185 - DNA, 474 bp, Arabidopsis thaliana columbia
ggataagctgaagtgggattttcttaggacaaacaagtccatatgattcttcaagatcaacatctgctaccttcattccttctggaagcttccaatcgaatcgataaagaagattgataagagtcaagtgaaccaaggccatacccattccaataccagggcatattctccttccgctaccaaacggcaacaactcaaagttcaaccctttatagtcaatctggctatccataaacctctcgggaatgaaagcttctggatctttccaaacgtttggattcctatgaatagcccatatattaacatggatccatgttttctttggaatattataacctccgatctttacatcttttgaagcctctcttggaattagaagtggcacaagtgggtttatcctaaacgtttctttaattaccattttcagatattggagtcgttctatatcttcttctatgatatcatctttgtgtt

SEQ ID NO: 10186 - DNA, 579 bp, Arabidopsis thaliana columbia
ctgtcagccttcaggtactttgacaaagatgggagcggttacatcactatcgatgagctacagcacgcatgtctgagacagggaatgagtgatgtctttctagaagatgtgatcaaggaagtcgaccaagacaatgtgagtgacttatgcatacatatcctctggcttggagagtacatggtcaaaggccagggatcatttttttcttcttgtttcaggatggaaggattgactacggggagtttgtagctatgatgcagaaaggcattgttggaagaacaatgaggaaaagcataaacatgagcatcaggaacaatgccgtctcgcagtgagaagcaagcaatctcacgattatgtacaggttaagcctttctcactttttcaaggtaaattccatcaaattctttcccaaactgacaagtctatacatcggtgtacgtgaaacagtcgtttttgatagagctgaacgaagatatgcaaaagctacaaagctctgcagaaatatggttccatggtctggatccttccggtaaagattgaatcacaaaggctctgcattctaaaacgaactgatatgta

SEQ ID NO: 10187 - DNA, 573 bp, Arabidopsis thaliana columbia
tgcgatggagcaggatagcaagatgaggaagagggtgatggagatgaaggataagctccacgtggcgttggtggacggtggatcttcgaactgtgctctaaagaagtttgttcaagacgtggtcgataatgttccataatccataggaacgtgctcgataatgtaccataggaacatggttgggtgttttgtgatagaataatgggaatcttttaaaaggactatgatgacatgattgaaaacaaccagtctgaaagtataataatagttacgtgtacttttgtctattaagcaaaataatgcaatttacgtttcggtaagattgtaagaaaagaaatgcagtttatgtctaaacaatctatttatattttgttatctgcaaagaataatcacactatgtgcacgaattatctggatttatcaaactatttatgatctaacagtgacttattgagatagaacttcaatatttcaacacaagatttagtcttatgaatctataagttgttccaatatctaaaaatttagggaagtgaaggattctgttcacgacttgaaagtgctttagttgca

SEQ ID NO: 10188 - DNA, 566 bp, Arabidopsis thaliana columbia
tttttcttggggccttactttgcaattgacatgtgcgtggggagttttattttgtttgtctgggagaggttagatgcgccaaaggtgaagcatttgcaacagcagtggcttctggtttgatatgtggagatggaatctggactttgccaagttcagtgcttgctatagctggagttaaacctcctatttgcatgaagtttctttcagctgcaactaatcacagagtcgacaagttcctgcaaggatcctcttagtttttttttaagctaaatgagatggatctgttgagaagtaaagtgttagtttttttaaagctcaatgagatggatctgttgaagaagtaaagtgtaatgatgattcagttttgaaaacaatgataagaggtatattgcgttagtcactcgtgtagatagatggagacagtttgttgtattaaaaagagcagagatgatttatacatagctcgatgaacacaaactatcgaataagcataatgaatacattatccaactgcatgatgaatacatcagtcttgtagcaattcgcacacaaacatacctaaaaga

SEQ ID NO: 10189 - DNA, 612 bp, Arabidopsis thaliana columbia
gtttttgggttggattgttatcaaaatcactaaacctccttcgcatctccgtggcatcatcgttggttgttgtgctgctggtaactttaatatcatcttacaaaagctgttttcattttcttagattcagtgatgagattgtgtaatccaacagggaatttggggaatatgccactcattatcatcccagctatatgtaatgaaaagggaagtccttttggagatcctgagtcttgtgagaaatttggacttggttatattgcactctctatggcggtatgtcaccatttcttaactacttcttatgcttctctactaaagtttttttttaatgccaatacaagtcaaaaacgttttgtgatgtatatcagattggagccatttacatatggacttatgtatacaatcttatgcggatgctagcgaatcctgctggagaaaccgcaataaacagtacctgcgctacaatgccactgattcgtgcaaagtcgaagttgcggaacaggtattagtctaaacgtttccttcttatattcttgttagcaacttactgattttgagagaatgtatatgtgacaaggttgggacttggggcaaggcaaacaaagagtg

SEQ ID NO: 10190 - DNA, 533 bp, Arabidopsis thaliana columbia
aaatgttatctctaagaatatggtccgtgatcaataatacagatctaaaattcaccaacttatatgcaaattgcaaaatgcaataaataaatcttgaccatatgttacaaatctaccagatcattatgtacagagagcactgcgagtcttgatcacacatttcaccagaaaagtaaaaccaatacaacaccataaatgtttcttctcctaccgatttcaagaaagacactaataattactcaaagaagctttaaatgttaaatctctttcaccggagaaagaagattcttagctgaaaataatgacgcaagaaagattcaagaacaaccttaacgccgtcgtgatatcattcttcttcttcttcctctgttccacgtcggatttgctccttccacgttcaccgttagctattctcaccggcgggaggtgggatcttctgcagccgagtgtaggtatatcgcaatgcacatgcagcttctacacaacaacaaagtcgtcatctttgaccgtacggattatggaccttcgaatgt

SEQ ID NO: 10191 - DNA, 580 bp, Arabidopsis thaliana
aacgaaactagaggcttcacctatggaggcaatctaataaaattagattcatctacggattagcggagatgttgatcctgagcctgaggatggtaagggccttctcacaaatggatggttcagtagctcagttgcagttggacgctcttccgggttcaatttgagacacttaagtatgaaatgccgagcgtctagtgataaagtatcaggtacttccggaagcgtaccccttctgatcctaaacagggcttcaacctgcgcgtttgcacaaattctgacctttaactcataaaatcccattaagtagacccttcaatgtcgtttaagattataagacagttcaaaagtttgaaaatcctgaagacttacgggttctagatcagagtatgggatctgaccagtacacatttccagcacagtgcacccgaggctccatatatcagctggacttctgtaaccatcattatccttccggttaataacctgatcaaattattatgttccatttaggaaaaactgtaacatataacctgatcaagtatagcctaaactacaatgaaagtggaaggaattcaaatat

SEQ ID NO: 10192 - DNA, 464 bp, Arabidopsis thaliana columbia
gcaagttagcagaatctgcaatggtgtgcagaacccatctcttatctccaatctctcgaaatccagtcaacgcaaatctcccttatcggtttctctgaagacgcagcagcatccacgagcttatccgatttcgtcgtcgtggggattgaagaagagtgggatgacgttaattggctctgagcttcgtcctcttaaggtcatgtcttctgtttccacggcgtgcatgcttcacggtgcaagcagccggcccgcaaccgtccgcaaatcctctggcctttccggaaccgtccgcattcccggcgacaagtcgatctcccaccggtccttcatgttcggcggtctcgcgagcggtgaaacgcgcatcaccggccttctggaaggcgaggacgtcatcaatacgggcaaggccatgcaggcgatgggcgccgcatccgtaagaaggcgaacctggatcatcgatggcg

SEQ ID NO: 10193 - DNA, 1377 bp, Arabidopsis thaliana
acgtttttccctctttatttgaaggtccaattttatcactttgttcaaccacaaattaagtaaaagaaaaaaataatcccagatacaatataaaacaatcaaaacatacaagattccacagatttatactcaagattttgaataatttgaagggcaaaaattatatataaaagcaaaacaggattgtaaaaatttatttcacttttatcagatcatcaaactattcactaatgttactattgtttctcttcattgcttgcttgttattatgcatccaaaccttaaaaacttgtctcctcagattcaccatcctacaaaacttatcaatctcttcttcatctttcttctgcatcctccaccctaatctctctgcaaattccttcatcttctccttttgttcttcattgatctttgtcctcactctcttcttcatcctcatcatcatcatcatcaaacttttcccatcaacgttttggttacgatgactcagaatcttcttcatatcctcgcttgaagatgaagtcctccgtccaatctcacccgttggatgcattacacgtggcttgtacgagctgttactgctgtaaaacgccggagttatcatcagctgatgatcttgtttactgttcctgtgtccgtacacttctttccggtggaagctccggtgacagttacaggcggcgcattttaaagcaccgagtgtaccatcttctccgccggccatgaactcgcagcatccgtccaccacgtgccctccggttgaggccgcgtggttcttctgacattcccggtacttagctccttggtcgacacgtgtctttggtttttggttttctttcttgatcgggaataaagccatggatggatctgattcgggtttggcttctggttccggatccgtatgtggctttacttctgttgagatcattgttgtggttgtaattgcattgcattttcctccaagctccattgtgaatctgacccaaaacaacaaaactttgttaaatattaatacttataaatcattcaataatgcatgcaaaaatctctcctttaataattaatagacgacttttggactcaccttagggattatagagatgctgcttattgttagaggggaggagtagtggaagatgagattgatattgatgatgaagaagaaggagaaatagaaattaaggatgatgatgacgtatgtgtgtttgtttcctatcacccatcaagttttatttcacatgagaatccaacaaaaatattgattttaaaaacacaaacctactagagagagagagtgtgtgtgtatgtgtggtggtgcctcttaatttcgagacattgtcatatgtttgttatctttcaccacctgcacctttggtc

SEQ ID NO: 10194 - DNA, 800 bp, Arabidopsis thaliana
gtttggtcctgttcttttcattgtcgatgcgttacgacccaaaattataactgacttgagacattaacagatacctccctcatatccaaataggtgcaaattaagttatatttatgaatcttaatcttaattagtctagacttttcagattaagtttggaagaaatattatgttcactatatttgatgtgtattggaatgagcaagaaagagatggacaactttgttggcttcagcaaaaaaaaagaaacaaaagacataaaaaaaattgtgatttgtcaacgtgaagtatggaacagaagattcaaacgattttagtgcaaagcatattagggcatatgttagaatatatatacaacttttgattctaatatattctcatgacaacaaagcccaaagtttcacctatcgaaggcaatcttctaaaattagcctcatccacggaggagcgaagatactgaacctgagcccgaggatggtaatggcatattcacaaatggatggttaacgagctcagctgcagttggccgctcttccgggttcactttgagacacgtaagtatgaaatcccgggcgtctagcgatagaatatcaggtattttcggaagcttacccgttccaatgttatacaaggctgtaccctgcacgtttacacaaattatgacctttaattattacttcaaaatcccataaaaataaaataaaagttcaaaacaattgaaggtgcaaaacaaaatcacttgttgagaagtacaaatttaaactgtgccaaatgctttgttcatttacttttacagctaa

SEQ ID NO: 10195 - DNA, 407 bp, Arabidopsis thaliana columbia
ccttctccatcttcacattctccaatcaccgttttcgcatctttcgctctaaccgcaagagcagaacaagttgcaacaaccgtttcatagtccacacaagcagctttcttcacgtttgaaaactcagagctcaatccaccaacaactggtaaaccaagcttcaagtactctttctcttgctcttctttcgacataacctgaagactactattaccaccattgtagttactactaccgcttcgtgttaagctatggcttcttctattcataacacaacgttttccttccgatctaacaacttcctccactacaaagttaagcaaagaagtcttcccatcaacgcttttaacatccgaaagcttcaaaagcgcggttagattaaacgcttgagcgtttcctctcgcggt

SEQ ID NO: 10196 - DNA, 601 bp, Arabidopsis thaliana
tttttaacgtaaaattctaattatttgttgttgtggttgtttgaagcggtgaatggggactatttcatggcaaaggatatagggttcgagaacacggcaggagctgcacgccatcaagcagtcgcactccgagtttcagccgactttgctgtgttcttcaactgtcatatgaatggttaccaagacacgctttacgtccatactcatcgtcaattctaccgtaactgccgtgtctcaggcacgatcgatttcgtcttcggtgacgccaaggccgtttttcagaactgcgaattcgttatccgccgtcccatggaacaccaacagtgcatcgtcacagcacaaggacgaaaagaccggcgtgagacaactgggattgttatcacaatagccgtataaccggtgatgcatcatatcttcccgtgaaagccaagtaatgataattactataaactttggataagtactagctagatatcactttagttaatgctcattatatatatggacttctatatatacaggaacagagcatttttgggacggccatggaaagagttttcgaggacaattataatgaacacagagattgatgatgtgatag

SEQ ID NO: 10197 - DNA, 456 bp, Arabidopsis thaliana columbia
ccaaccgcaaagaataacaaacagtgtgttcttcttatacaaccttggaattttaaggctaaaccaaaaaactgtctggtccagaacatggatgtctcgaccagattccttgttaaaaacttcctgctctttgatgttatcagaacgggactgtgtaaggtaaggcgtagacatcagcttctggtaaaaggcgagcacatggccaccccattgtattgcctacttgcttgatctcattctctctattaagttgtttgcatatttctgtggtgctacttggcggcttcttcatggaccaccaacattcttcatcttcagagttaatgaggtctactcttctctcgatcgtgttagggacccaattctcaactacgtccaagaattgcaacaccatggatggagggcaattgcataggcttttaggaggttgataagttctcgagtagaggatgagga

SEQ ID NO: 10198 - DNA, 591 bp, Arabidopsis thaliana
tgggattttatgagttaaaagtcagaatttgtgcaaacgcgcaggttcaagccctgtttaggatcggaaggggtactcttccggaagtacctgatacgttatcactagatgctcggcttttcatacttaagtgtcttaaagtgaacccggaagagcggccaactgcagctgaactgctgaaccatccatttgtgagaagacccttaccatccgtgggttcaggaggctcgggatcagcatctccccttctccgtagatgaggctaattttagtaaatttcctcaataggtgaagtatttagttgcttttttcatgaggatattatcagaatcaacaaaagctatatattcttctaacattgatgtcctaatgtacaaaagcaggcataacccgaagatttatgagagattagatcccagagagactattgggagacacgagacatgattcttcgacacacacacacgtgcggtcgggttgcgcacgagagccaaacttacttagtttctgtgtcattcgttggttatttgttgcaagttatgtgttgggcttgattttaaaactgaagagccttatttttctaggaattag

SEQ ID NO: 10199 - DNA, 542 bp, Arabidopsis thaliana columbia
ctcacaggccttggctaaaatcacaggagcctccgcagagatcatcctcacatcttcatcagctttcatgatcttcttgatgcgggctaggggaagggtgtggttcttgaaatcagtggtatgctcgatctcttgcatttggttagcccagaacatctgaagctgctgctgttgttgctgctgatggtggtggtggaagtggtgagcttgttggaatgccatatgggaagctgcatttactggcccactctgataagcatgaggaggtacataatccatcactccctgttgctgttgctgttgaccctcttctgactgctccattgctaagctatctctgttaatataaaattgtagattgacagttaatccaaagttaagggatttagaaccaaagtctaaaaaaaatcagaaaaaaagaagcgcatgcatgctcgaattaagctcagatatgctggtttcaaatccggatttgggagtcacgcccaagcagacacgattccaacatggccaaagatgatacttttgatctttactacggt

SEQ ID NO: 10200 - DNA, 625 bp, Arabidopsis thaliana columbia
aatgcagtctcatttgaaaattttgcttttgtgtatgtatatattcagactattcataaagtctgcttttagtaggtttatggattttatgatgagtgtttgcgtaaatatggctcttcaaatgtctggagatactgcaccgacatttttgactacatgaggtattcaaagcagcattcactttctttatattcagtttttgacttgtctttggaatattccgactctttaatctgtcttttcttatagtctttcagctgttgtggagaacaagatattctgtgttcatggtggtctttctccagctattatgactcttgatcaggttgatataagagctctctctactgataattacaagtttccaactagaattagttaactgacggaaccatacctttatggcagattaggacaattgaccggaagcaagaagtaccacactgatggtgccatgtgtgatctcctatggtctgatcctgaagatattgttgatggctggggattgagccgtcgtggtgccggattcctttttggtggcagtgttgcacgtcttttaaccactcaacacatagactacatagccgtgccatcactagttatggagggtacaaatggatgtttg

SEQ ID NO: 10201 - DNA, 531 bp, Arabidopsis thaliana columbia
aatattggtcgtcagtttatattttcaagtgtgaatatatagatagatagatagatgtaaacctttgcttgatagttctggtcgtagtagatgcaagtgccaaagtgtttgaacatcaaatccttatcatcgtacggcaatcttggaacaatgtcgttattataaacaaatctataatactttatattatatttttctaatttcttctccataaattcaccaaacttggaatctccaaccctaggctgtccataagtatacaccccttgaatcctctccaacaactcggtctcgtggtgaatcacaagcacagccgtgaacaatatcgcgagggctcctcctaagctatgaccggtcagaacaaacttggtgtttttgttttgagcgatcagagttttcaaagagtctcttattgagtagtaagctaaaggggattttcgatcagggtttgagagaggttctttaggccaactacaattgttttgaagcctagagctttcatgaaacaccatggatattccaatgtttggg

SEQ ID NO: 10202 - DNA, 905 bp, Arabidopsis thaliana columbia
attcaaaggcataatgagttctcaatgttatcaagaggacaccaccagctgaaattggtgaacttgttgctaggcgtcgtaaagatttcacaaacgagttttttgagcatttgcatactgttgctgaatcctactatgacaatccggatgagcaaaatggtaaaactttatatgccctgtcagtgaaataagttaagggattgaacaatactgatattgttcaatgataacttttcttattggtaagctcttgcgtcacttgggaagttgtctatagctgctgtacaagcttatgacacttcaacagaaagcattgatgcgctaaatgctgcggaaatgaagcttcaggacattatcaactctccttcgcttgatgctgcctgtagaaagattgatagtttggctgagaagaatcaacttgattctgcgttggttcttatgatcactaaagcttggtcggctgctaaggaatccaacatgatgaaagaagaggtactaaactcataaaaccgttatcttaggaatcgttaacattatcgttgtataacattgaattcatacaacttaggaatctacttagtccttagaacccactacatagcttctttgatccattctggtgttggttcttgacaggtaaaagacatattgtatcacttgtacgtaacagcaagagggaatctgcagaggctgatgccgaaagaggtgagaatacttaagtatctactatcaatagaggatcccaagaacagataagcgctctacaagatgcttttaccctggggacgagctcgaagggactgatgtagactacttatacacgtaagaatgagaaacctagacctggtcatcttatatatacacatttatgtagatatggaaccttaaggtgtgtgtacaatgga

SEQ ID NO: 10203 - DNA, 603 bp, Arabidopsis thaliana
  unsure (1)..(603): unsure at all n locations
cccctgcaatcaacaaaaacctcaatgacctcgaagttgacttgttccacacgctaactaaatcccctggcccaaacacaacaacatggtgggccgatattgcggaagagttcaaggaaccgaaaacaccttcatcgccttctataatgtaagcgaaacggntccatgattctggaacggtttggtgggtttgagatcctggcttgagggtaaagtcaaggaacattgttggtgttcttgtgtagactggagatttgattcccattgaatctccggctatgactttgacctcaactccgttttcttctgctcgaggaatgtctaaactcgatagttccttatattttggttcagtcctgtcaaaatcaaggaacagagagattcaagactggaactctttctgagaagagatgatactaaagattgatcttatacattttttcagtggaagggagattgatccaaagctgtaaaccattgtttacttcttcttccggaaattcggaatgaatgatcctcttcctgctgtcaccactgtcaatcaaagtcaaaattgagtgaacaagaaactcagagagtatcgagtgtctttgtttgtgtctg

SEQ ID NO: 10204 - DNA, 402 bp, Arabidopsis thaliana columbia
ggatacttccttaccggtaatgtctttagaaacgctccagacgctaaagccatgcaaagaacattgtcctaggaaactggtactaactcgataatggtaatgcaaaatcttatccccccagccgcgatgaggttttccggagttcagataagaaatgtacttgtgaatatatcaggactgcagagtagccttttggctctagcgcttgctactaagttctttcaagatcctcttgtggggattcctcctgctatatctgtaagtctcatatccttttgacatagcataatcttttattgatgatgattatagagatttttgttttgttttgcagaccgtggtaatgtcattgatggggttcactctcgttttgatctggtctaaggaaaagagtaacacatt

SEQ ID NO: 10205 - DNA, 583 bp, Arabidopsis thaliana columbia
cagaaaccctttgctatagataagctaaaggagacttattctactttatagcttaataaacaccattttttttttgtcaaaggaaaactttcattcaactaaaacctcgtaagaggtgagttcatacaactgaaatttaaaacactacatgaaagataagggtagaggttccatgagttttccaagatgcaaagcttcaagaagatagcaaaggttggaagatctgttggagccttcaaggattcaaatttgaagactagcttcacgaaatctcggatcagcttgtgatcataataagctcgtacgattaacgccaaagagctttcgaaaaggtgttccatggaggaggttgcgggcggaggcttttcctcgctgccaaagtaaggttccaaagatggtatctccatagaggagtaagtttgctggattcgccaagggaattcacaagtccaatacacaaagaatgcagcggacgtcggatggagttttctttgaggcggttttaccaaaaagtttgagaaggttgggatgctcacccattaggcttggggtgacatggttaggcttgctagtgggaatatag

SEQ ID NO: 10206 - DNA, 467 bp, Arabidopsis thaliana columbia
atggtggtggtgtcaggtgggaggatggacagaggtatatgaggggcttacctttgcgacgataagaggggcgggccacgaagtgccggtgttgcaacccgagcgtgctctcactcttttaagatcgttcttggccggcaaagagcttccaagatcttattagtcacacacataagatagaaggctccctccaaaacccgagttaactcggtgttttcttttgaaatttttatgtttcaaatcaacttgatttcataagacactaaaagcattcttgtattcgaagaagatatatgttgatactagaacaattgtgttgataccttgggaataaaattgcagaaaaccaaaagtttcaaatcttttatatataattccataagagtagagtacaaagctctttgcttctgcctgactgatatcaaacagacaaaaaaagccgacctctcatacgtgaaagttgaaat

SEQ ID NO: 10207 - DNA, 514 bp, Arabidopsis thaliana columbia
ggcgaaatcatcaaccccatctccgacaacgcacctaacttctccggcgatgcaacgattcttctccgtgaagccaccttcgaacacaacctcatcaaaaactgtttcctctccggaatgggctcattcgccaccgaaacaacaatcgtcaccgtacgaaaaatcttaacgcagagattaatcacaacgaaagctaaattcgctgtgttcaagcttttcacagaagctatgaagaggaagaacaacggttacgcgaatattaggtacggttggtactctggttctaaagaagagatcgatcgtgttattacgtatgggtttagtaatagagagatcaagaaagtcgaaaacgacgtcggatctcacggtgttggaattcatcttgttcatcatcgttactctctcgctgcgtaagtgttatgttttttctcagttgtctaagttcttagtttgtgattttgatgatgaaaagtgaaaattgatgatggttcagggctttagtggtgaagtgatg

SEQ ID NO: 10208 - DNA, 472 bp, Arabidopsis thaliana columbia
tgtggtcgtgactatgttctgtcataaacccaatctccaacagcttttgctattgtctgcaaattaagaagaaataatgaatcatgaaaacacaatgtaacattgattctaatgacattttgtttgacaagaatttggagaatgtttgcttcttttttgtaccgttcggtttagaattggagaatcttgccagaaccatgaagtttgtgtctcggtttggcagtgagtgtagcaagaatctatgaacatccctcttgatgaagatctccctaaacctatcactgcactcaagaactctaacctgaaatctaaaaggacgcaaacccgaaaattgtttagacccttttcatgcattgatgttaagaaatgatccagcaaaatcatatcataatttttgcttctatactaaccttgcataactttgatctgacttggatggcaattcttgatgtctagttgacaactttgccat

SEQ ID NO: 10209 - DNA, 571 bp, Arabidopsis thaliana columbia
gcatcaaggggaagcatttagatgctgctaaacgcttagaggaaggactttttaaaatggctatgacaaaggtacatcaattatatttacttgattagttataagcatttaggatttgatttactgagaatttctaagttctaactaaacaagactggttgatgccttctgacatgttgtcactgaatccagcttgtttgctatatgtcctcccttataaatattttcgtttctgacacttttaacttcaaaactcacaggaggaatacttgaacccgtcaactcttgaatctcgcttgacaagcttaataaaaggcaggcaattgaataagtacaagcaccaacatgctgattcttctacgcttggaacaaccataacacctactccaggagtctctgctgaacccacaatggtacattacatacatcgaattattcacgagctttaattaagaggcgtataattcgaaatgtaatattataaacattctgaactttgtgatgtccaaatttttttggtttggagcaggataatgagaacagagatcagtgcgagacagagattgctgag

SEQ ID NO: 10210 - DNA, 804 bp, Arabidopsis thaliana
ttgttctgctgcttcctcagctgtgattgtctctgaaacctcttcattcccatctcctccttgcttctttctcctctttgaaacttcctctttcttgttcgagttcgggttttttaaatcatccatcctctgctcttcaagcttctcccacatctctgtagcatctttcatcttcgcctctgcactgtcaaagagatttagggtttccgacggatcccaacctgagatatcgatcttctgagctagcaagtaagaccagtgtagcttcgccatttcaaattgctgctgtcctaacgcaagcaaaccttcgtaaaaatctggtttgatcgagagagcctgttcatatttctcctttgccaatgtgtatctctctttcacccactcgtaagcggtttgaagttgtgcagcaaccacttcttttcccgcagattcgtctaaaggaatcctctttctagcggcacacatgtgaacatttccccagttaaagaaagctaaagcagcgacttcttggaatttcgcagaagctttatcgaatagtggttgagctttctcgcttgtcacagtttcttcaagcgcctctgagcaaagctccattcccaactcatgtaaatcaatatgagcatcagggtcaataccgacatgagtacggaacagatgagcaaaatcaaacaaccagtcgtccatctccaattccttggtctcaggatcttcagaagaacttgctttctccttttcaacttccttatctgtcttctcagtgttgatctctgtttccgatagtgattctgtaggagatgatatgac

SEQ ID NO: 10211 - DNA, 515 bp, Arabidopsis thaliana columbia
tgtgctctaaaggcctaacgccgcgcatcttgcctggctaaactgcaagacgccctcgcgatcgctttttgctggtgacgcagaatatcgacaacctgcatgaacgcgcaggtaataccaatgtgattcatatgcatggggaactgctgaaagtgcgttgttcacaaagtggtcaggttctcgactggacaggagacgttaccccagaagataaatgccattgttgccagtttccggcacccttgcgcccgcacgtagtgtggtttggcgaaatgccactcggcatggatgaaatttagatggcgttgtcgatggccgatattttcattgccatgggcacatccgggcatgtttatccagcggctgggtttggtcacgaagcgaaactgcatggcgcgcacaccgtggaactgaatcttgaaccgagtcaggttggtaatgaatttgccgagaaatattacggcccggcaagccaggtggtgcctgagtttgttgaatagttgctgaagggatta

SEQ ID NO: 10212 - DNA, 353 bp, Arabidopsis thaliana columbia
cattagtgagactaacctcatcataaaatcaagccaagcttgaggattcttacgaagagcattaactacaggtgaatattcatgtggctctatcccgtactgtgccagaatctctgccacttcagctgcctctgttttaaatccatatcgtaattaaaatgtgttaaaccggataattttcttatatatggatggcttagattgagtgtaatttggtcttaccagtttcaggaacggccacgatctcttcttgttctcgtttcatctccctcgcgtaatgatcttcttcgctctttgccgctaaatacctaaatttgttatccagtttttaatcttgcattgaactcatatag

SEQ ID NO: 10213 - DNA, 786 bp, Arabidopsis thaliana
aaaacgggtggcaaaaatgtgtaaaaagagaggaagaatcaatcaattaaaagacacaaagcagacagtagacactcttgtcttcaccaccgccacgatcgcgaccaaatggctctctttatattttatcacaattttcttatccgtttgttacaatctctctttgaaaagtcaaaccttttcatacgtctcacgtgttcttttttcttcacccaactcatcagcgaaaataaaaggtcaaatctatgttcctcgttcgttccttctatgagtaaataatactaataaactttattaaataggggcagattttttctttttttagcatatagttatagggacagctttacaaagagtgtgtaataactaataatatttgtattttccgtgttttgacttttttaataattgtgaatttttgacatctcctttatatttaaacccaacctcctttctctcttcctcctaacttattcaaaccaattcacatcttcccaaacccaactactacaacttgtattaagaaaaagatatattcccttagcttctttgatcaatatattcgtcagggttctcgtcaaagtcctcagcatcttcatcatatgtccggaggagtaatggatgaagagatcgagattcctccgttcttcctttgtcctatctctttggagatcatgaaagatccagtgatagtctctaccggaataacctacgacagagacagcatcgagaaatggctatttgcaggcaagaaaaactcgtgtccggtcagcaaacaagacataa

SEQ ID NO: 10214 - DNA, 560 bp, Arabidopsis thaliana columbia
gaaattttggatttaacaaacaacaatgtttgccctcacacacatgttcgctagacgaccatgcagggacacaattgtgcaacttaaagatagccagtgcatagaattccgtggtttgacatttatggctatcctgaacagatactgtgttgagtaggacactaatttggtcactgaaactacaagatgaggaacttggaaaaactacgggttcaggtcgaagttcgtctccaataggttctggattttggacaaggaatcaaccttaaaatcaggttgcagaccggaaacagaaaaatcgtctggtccataccttccggtttcatctagcaagcaagtgaaggctccagctcgtttcccacatgctatctgcagaatcgagaaaagaaagatcgattaccagttgtaatcttcagtaaagatgtgagaaaaatagtctgaaaagttggtaggcatcctttccacatagagcatctttaagcaatggcatgagaagatcattgtttaagcttctttcattgcattgcttatcgatttgctatggagaaagggttgaccaa

SEQ ID NO: 10215 - DNA, 501 bp, Arabidopsis thaliana
  unsure (1)..(501): unsure at all n locations
atttggttttcatgtttttcttgagatttaaaaatctgcatgactaggctcaacatagatctttttggaatcgggggaaatgcagaattgtggacaataaggctatgtctagtagtaggtattacttagtgttcttttcaggatattgaatgatgtgggtgttttatgcaaatggaacgtctattagggggaaaattgcatctttttgcattccagtttgttgtgcacgaagatgtctggaagtccataactgtagcatcttctatagtctgttgattttactccttgttgattagtcttacttgctagctcaacaataatgtagttactctgctgcaatatttttaattttgcctaacgtaaacacttgttttctacccttgcaattcagccacctctatgggaaaaatatcaaagggagctcaaagactgggagttggttatgagcanacaaacactccaaattcctgtgggtcgcagaagaaacagtcacctactgag

SEQ ID NO: 10216 - DNA, 507 bp, Arabidopsis thaliana
ctcgtattcctcttcccattgattctttgcgacttgttttggtgattcctatgatatccatttccaccgctcgagaaatatcccatgcctaggtcacgaggggaatatgttcctggatgtacagaaaattcattcgagtgctcatagctttgatttgaatataaaaacctctcgtcgccagagacaaaaccaacaggtcttcttcctgctagagaaatggaaaagttggattaaacacagacttcattttgaaaaatcagagtcaatagaggatttatagaatatcaagcaggtaaaaacgagttacctgatgaattacagccatcataatctcccaaagcagaactatgttgagcataaactgagagtttcttctgtgacctgtgttttgtcccctgtgtttgactccaaacctcgaggcttaaaacagacagcaaacatcgctggcttctcagtaggtgactgtttcttctgcgccctcaggaatttggagtgtttgctttgctc

SEQ ID NO: 10217 - DNA, 900 bp, Arabidopsis thaliana
gctctcaaactccggccagctcaacgggaccctcacgctctgaccttcacctctctccgtcgccgaatacttagttatcgtcttcttcctctaaaaactcttcttcctcatctacctcttagcccactactccacataaaaatggattgacacccacaatccagcaaattcctccacgtattgagcccaatgttccaccccaacatgagttacgagtcataactcagccacaaccaccaacagatgcaacaacatcacaccaagtcgtgtctcatcaatcacataaccaaaacgatcaaccttcagaaaatgtccccaacatgaaaacttgagccaaaaataacataaccaaaccaatccaaaaatttaatctcattgtttcaggtccaccatcgaaggaacctacaacaatcaagcaagctctcaaagaccaaaactggagtcgtgggtgctcatccgaatttgatgctctaacaatacaccaaacatgggatttggtacctccagcctctacacaaaacatcgttggatgtaaatcgtgtcttcacgacaaaatatttctccaatggcgtcttggagagatataaagtgcgccttgttgccaaggtttccaccaacaatactggaaagactatgctgaaacattcagtccggtaattaagtccacaaccatccgtcttgttctcgatgtcgcaactgcaaaagcatggcaacttaaacagttggatgtcaacaatgcttttctccaaggcaaactcaccgaagaagtatatatgtcacaaccacctgggtttattgacattgataggccctcatacgtttgccgattgaagaaacaatatatgggcttaaacaagcacaaagggcatggtatacgactttgaaacaatatttactatg

SEQ ID NO: 10218 - DNA, 494 bp, Arabidopsis thaliana columbia
gctcacgacgtggaaaaggagaagaagaatgtaagacggaaagttactttcgctgatgatctgaaaagtgatggaacaataagtgatcatacaaaaagtgatgatgtagaatttatggagacaagagaatccatcctaaacagtgacgttttggtgaaggctgaagatgtaccttacaaccctttggagaaggttgacgaagcaaaattcgagaagttatgcagtatcatgaagggagagaaaatgtatgcacttgtgcatttaaacaattttatgttccctttttcaatcatatgaaattctaactatttgcatacgtcttacaaaatatcaggtgccataatctttttgcatttcgcaaagttgacaacagttttttcacaactctaactgaactaaatgattggatcacttataccgaaagtgaccgttgcatacgtacacaattttcctgacgtacagaatatagattatgaggacgtatattccaagtg

SEQ ID NO: 10219 - DNA, 544 bp, Arabidopsis thaliana columbia
ccctaattaagcgtgcttcgttggaaagcatggatccgcctaggctgtcccgagtgtgagcactaactagaccaccaggactcatcgtgaaagaccaagactcttctccagtcctctttgcagtgaccggaagcgacatcgacactacaagcagtcgtggccttgccatttttctttctctctatcagtattccttctaaaaaagctatgagaagaatggtctcgtctttcttctaattttataagaaacttaacgctcgacttttggcagggtgcgggataataattaagaatttagctagtctttccttttggtgaggtgaaaaactttctctagttagctttagattattttcacttttgctgatttttttcctagaatagtcctgaaaatatatacgtacatgcttctgtttttttctttctttatttctgtcgtgtatcagatcccattaatatattagataaagtgaggataaaatctcaaactcgttaaaacacttggctaaagacagagttttcaattcaatattaccttttgaat

SEQ ID NO: 10220 - DNA, 562 bp, Arabidopsis thaliana columbia
ttttgagacagggaacacagcttctggtgattcatcaaatcaaatgtctgatccgcacaagggaattatcagacataaaggttataaagaatttgagtcagatgatgaggtttcagaccgttcacttggggaagagtatactgtacgggcatgtgcagcttcagagagctcaatggagaatggctctcagcattcaatgtatgaccatgatgatgatgatgatgatatcgacaggcagcctagggggattccaaggagccaacagacaagagtttttaggaatccagtttcatatgagtcagaagataatggcgtttatcagcaaagcggaagaatatccataagtaataggcaagctaatcgaatggttggtgaatatgattcagcagagaattctttggaggaacgaggcttttgcagtacagggaaaaggcaaaccaggtcaacagccaaacgaatagcaaaaaccaagacagttcagagttcgagagacacaaaaggtcgctttttgcaagaatttgcatctggaaagaagaatgaagaattggattcatcatggagg

SEQ ID NO: 10221 - DNA, 1154 bp, Arabidopsis thaliana
gatacaaagagaccagttgagaaccggttttaatataatggatttcagtttttggattacatactgttttaacttggattcagattcaatttttaatcagaaatagcattatgttcgaaatccaattttgtttgtttgttttggttctgttttaaaccatactgagatctgtttaccggattaaacacatgtttttgggtcacattggtagatttggcttgatcatgaagtgaactagacaaatgttccttttgtttcataacagactgaagtatggaatgtgtaagaaaaaagaaactaaagcgggtcccacttttccgaattatggtatttaaaacccaagtatcataaggccttaataacagtccaattcaggcccaatggataaaatcctatgtcaaataaaagagctcatcattttccaccgataacttttctcagctccgacaaaaatggctgcaatcaccatttcttcctccttgcacgcctcagcctctccgcgtgttgttcgtccacatgtttctcgaaatacccctgtgatcaccctctattcacgcttcacaccatccttctccttcccatctctctccttcacactccgtgacacagctccgtctcgtcgtcgttccttctttatcgcctccgccgtcaaatctctaacggagacggagctgcttccaatcacagaggctgattcaatcccgtccgcttccggtgtatacgctgtatacgataagagcgacgagcttcagttcgtcggaatttctcggaacatcgctgcgagtgtctctgctcatctcaaatctgtgccggagctttgtggctccgttaaggtacttatccatgatttcatatagaggagtagcatgtctgttactataacgaaggattctttgttttgttgtggttgacttttgtttattactgttcatagatttgggaagtgttttggtaaatgaatactacaaaagttcatcactttagttccagagatagtatttcatatcattaggatcactattgtttgcaaaactagagctaatgaagttcttggttctgttgttggtaagagttcttttaacaacacttaccacacattatgattaggagatgcatcaatagtcattttgtatatgttacttaggagttaggac

SEQ ID NO: 10222 - DNA, 771 bp, Arabidopsis thaliana
tccctttttctccttttctcctttttcccagacaaggtttgcctaggatttggaaaagttatcattatcctcaaactaatctaaccttatataaacctagctttgacgctctttgtctttacgactccaaaccaagcaaaatctctctggtgctcaaaacttttcgtctcttctttttagctaaagctttttttgctctgtgataatggctggtaagggagaaggtccagcgatcggaatcgatcttgtgtactacgtactcttgcgtcggagtatggcaacacgaccgtgttgagatcattgctaatgatcaaggtaacagaaccactccctcgtacgttgctttcactgactccgagaggttgatcggtgatgctgctaagaaccaagtcgccatgaaccctgttaacactgttttcggtatgtaaatctcatctttatgctctgtttattcgtatttgagttaaagtacgaatttatagggtttggttaatctcatcttatgctctgttgattcgtatttgagttgaagtaagagtttttagggtttataggatgatcttaattgcttagaagtttttgaatcacttgtttgcgttatattatgaactcttcctgtgaatttaggatttttcattagtttgaacaaagaattttagttgaagttgatgttttgttttgggattgtttggttgactaaactctattttgtttgctaattgtgacagatgcaaagaggttgattggtcgtagattcagtgacgcatctgt

SEQ ID NO: 10223 - DNA, 584 bp, Arabidopsis thaliana
ggaaaaggaaaagtaggagaaaagaatcattcctggaccgtcagatccaactccaaaagatcgtgcggttacatagcgagccatcgaaccttctcgaaactcgagtacaagactctatatagacttctccttcgacctgatattttggaaaaaagaaaacaaacctagccgcaattcacaattcctctttcacaatctttctttcgattttttagcttaatcctgagtagcgttaacaatggctggtaaaggagaaggtccagcgattggtatcgatctcggtaccacttactcttgcgttggagtttggcaacacgaccgtgttgagatcattgctaatgatcaaggtaacagaaccacaccgtcttacgtcgccttcactgatagcgaacggttgattggtgacgccgcaaagaatcaggtcgccatgaacccgattaacactgttttcggtacgtttcactcgtttcctcttgctaaatttgtctttcgaacttggattataagtagatctgtaatcggtagatccatagcgatgatttaggggttcataagaatgtttaacattgctggagctagtgaga

SEQ ID NO: 10224 - DNA, 481 bp, Arabidopsis thaliana
ggttggcgagtgtgctctaaagttaccaaaggctggcgtctggtgatgcgtgtgaaagtgaaagatgccaagaaaaccactgaaatgcgtgctgcgctggtgaatgccgatcagacgttgagtgaaacctggagctaccagttacctgccaatgaataagacaactgagtacattgacgcaatgcccatcgccgcaagcgagaaagcggcattgccgaagactgatatccgcgccgttcatcaggcgctggatgccgaacaccgcacctgggcgcgggaggatgattcccgcaaggctcggtaaaggcgcgtctggaacaagcctggccagattcagttgctgatggacagttaattaaagacgacgaagggcgcgatcagctgaaggcgatgccagaagctaaacgctcctcgatgtttcgcgaccagtggcgtaccaaccgggtaggccgtttctgggatcgcctgcgtggacgcgatg

SEQ ID NO: 10225 - DNA, 178 bp, Arabidopsis thaliana
cgacagtttgcgcgacgtcaggatcaacagaatgtaacggcggatggtaccgacggtacgccacttttgctcgctctcctgctcttctttggtcaaacgagccagatagcgcggcgtgacatcgcgtccacgcaggcgatcccagaaacggcctaccgggttggtacgccacgggtcg

SEQ ID NO: 10226 - DNA, 1122 bp, Arabidopsis thaliana
acatagtgcgagtaagttgagctgcaaccccaaagtcacctgaaaagataaggtagcgaactttggaatcagcatgcagctgtaaagcaatataaaaaaaatctaactaaaaaccgataaggctaaggaagattcgaagctttaaaacataaaatccagcatgtgtaatagaaataacataagtaaagcccactcttcaaataggtggttatataactccccaagctaacttacccaacttgacctctccttgttcagttaacaagatatttccacctttaatgtctctatggactttatatattgagtgcaagtatgcaaggccctacaaaatagatacaaacagaagtataaggcctataacatgttgaagcagatgagtgcaaacaaagacggaaccatcaaatacaggaaagcagacatcatttttcttcttcatgcttctagccattctagaaagtgaaaaagtttacagaaattgtgtgcataccttcaacgcctcccgacatatatatgctatctgatactcctctaacgcctcctcagtaacattcataagatcagcaacacttccacctccacaatactccatcactatctgtcagaagacataaatcaataactagagagaccgtatacataaactataatatataaacgaagaaaaaaaactgattgcaaacagtaagagctgctatatccaacaaagctaaccaagcccagatgctcacccaaagataatcttctccttggtaactccctaggtagcggacaacattaggatgattacattgctgcagcatctcaatttctccccggatctcttcatacccctcctcctaataaaagtagaacttgaatcacatagagtgctttacaactatgacatttgaacttatgttaaaggacaagcttttaatacccttcagtaagtgatatgactttcacagcaacaatctctgatgttttcaaatctcttgccttgtatacagatccatatgatcctttccctgccaatccagataccaaatttgatatagtaagcaagaaattgaaacaagtactaagggatattgatggctgatcatgattatagcaacataatggagcaaatccgataga

SEQ ID NO: 10227 - DNA, 598 bp, Arabidopsis thaliana
tgttagtgggggttcacatataagtctatcctcgtccggtagtcaattaatatagatgatcagttctttgtcttgtgctggcagtattatttggaaccaaagtagtacttttgtactgtgctgtcgtatttcttttgctagtgtcacatcaattgcaagacgttagtattctgaaaaatgcaaagaatggagatctgttatatatggaagatttcatgtatgccttatctgactaaatcgttggtattttctacacaaatttttgggaatcatcaaatcattatgttttttccctgcaggttgagtcagaaatattttgccttcatggtggattatctccatctatcgagacccttgacaacataaggaattttgatcgagttcaagaagtgccccatgaagggccgatgtgtgacttattatggtctgaccccgatgaccgatgtggttggggcatctctcctcggggtgccggatatacatttggtcaggtaattacaagtcttacgtctcagaaacagtcctgattctctctgtttttaaagcaagtgtcgaattgacttttctctttgttcattttgttccataggatatactg

SEQ ID NO: 10228 - DNA, 629 bp, Arabidopsis thaliana columbia
  unsure (1)..(629): unsure at all n locations
atataaaatactttcagttattcccccctcattagccaaattttaatacccattagagtgagttataccaatagatttcattcttactatcttctacacctaattgaaaagttaatcataatcaatggcatatgtagaaatattccattcgtcgattcaatcagaaccggtttaaccaaatgccggaaccaaaccaaaataaaatcaaaccgatcacatggttgagctttcgttaatgatccgataattaatcggttgttgtgtctcggttaacaggatccaagagaaaagccaaacccatggttttccggccggtttatgctcaagccttggcatcggtggccacttagtcggtggagcgtacggttccatgatgaggaagttcggtctcggcgctgacaatgtcctcgacgccagaatcgtcgacgccaacggcgaaatcctcgatcgcgcggcaatgggagaagacgtcttctgggcgattccggcgcggcggtggtagctcggcgtgatattgcctggaagattaactcgtcccgttcggcgaccgttcggtatcacagtccgaaacgcttgacaagacggactanagtttatcaaatgggacaaacgctgataacttgcgatga

SEQ ID NO: 10229 - DNA, 608 bp, Arabidopsis thaliana columbia
taaacagggcaagcttgtttgtcctgtttgtaattccatctggaaagacgcttctctccttgttcctcataagaatgcaactgaatctcccctggacgactctgtttccgtaatccaggagaagcgcgttgttgtcacgtcttctcccagagcaaaaccaaggccaaagcagagtgattattcgagattttacgacgatgatgagcctttgctttcgccgaggtttgtcactatacctgaagctgatgagaattgtggaggggaagaggaggatgacgtgcctcagttcaagggatttgtggtggatccgaacccttcttttgctgtcaaaactaatgagattccggtcaatggtcgagattttggaaacgttcaggtgagtttgttgcctgaagcggcggttgtctctgttgggtgtggttacgagactcgtgcagtggctttgcgggtgaaggcgccaccacctctaacagcaagaggcggtgtagggcgtaggcttttagatccgtcgcagcgtgcaccgggtggacttggtggttgtagttgacgtaggtggaacaatgaacggtgcgaactacaaatggtcaaacgagccatgaggcttgtga

SEQ ID NO: 10230 - DNA, 489 bp, Arabidopsis thaliana columbia
atttctgtagtttatgcagactatacagcaacaataaaaagaactctcaaaactcatttcaggtcacctaatcgattttgcatacgcatcaatcaaaagcttcttgaatctatggagatctaacctcactttctggtcgttcaggtatatcacctttgtgaattgccatcctttcttagtgatgctgtttggatcttttagaattggatcatctttatcatatttttcatacaatgagctctctcttggaagaatcttataaccattgtagtctagaccgagcttctttgccggttctccataatatgtctctgctgcccaatctgttcccagtggaatgatctgaataaagatacttccaggtttcatgaacagaaaatgggtcatggctgctccatgtaccccaaccatgactttgcttgagtttaacactctgtaaatctttgccagttccgttgtgctgtcaggtctcaaaacctcgatgtcaaa

SEQ ID NO: 10231 - DNA, 944 bp, Arabidopsis thaliana
ctaaagagaacacgaccgatgcggactctgcagggctggttgttgccggtgtttatgttgcctatgcacgtatatgcacaagaggcaacggtgaaagaggtgcatgacgcgccacgtgcgtggcagtattatcgccaatatgctgcaggagcatgacaatccgttcacgctctatccttatgacaccaactacctcatttacacccaaaccagcgatctgaataaagaagcgattgccagttacgactgggcggaaaatgcgcgtaaggatgaagtaaagtttcagttgagcctggcatttccgctgtggcgtgggattttaggcccgaactcggtgttgggtgcgtcttatacgcaaaaatcctggtggcaactgtccaatagcgaagagtcttcaccgtttcgtgaaaccaactacgaaccgcaattgttcctcggttttgccaccgattaccgttttgcaggttggacgctgcgcgatgtggagatggggtataccacgactctaacgggcgttccgacccgaccctcccgcagctggaaccgcctttatactcgcctgatggcagaaaacggtaactggctggtagaagtgaagccgtggtatgtggtgggtaatactgacgataacccggatatcaccaaatatatgggttactaccagcttaaaatcggctatcacctcggtgatgcggtgctcagtgcgaaaggacagtacaactggaacaccggctacggcggcgcggagttaggcttaagttacccgatcaccaaacatgtgcgcctttatactcaggtttacagcggctatggcgaatcgctcatcgactataacttcaaccagacccgtgtcggtgtgggggttatgctaaacgatttgttttgatgaacggttgagtggttggcaaatctggaatccagcatcgaggattacctctcagaga

SEQ ID NO: 10232 - DNA, 604 bp, Arabidopsis thaliana
ggttatgctggtgtctgttgtttctcatttcactttctttgcaaataaggaacacttgatacctctgcttttgaatcgatttgatcttgcatgtgaggatatcgccttctttcagctggtccgccaagtcaacaatatctctcccatcatctgagaaatcttccttcataagcatcccagttaacccagaatctaatacacatatggctcttccattctgcaatctccgaacactggcctggacaattctgccctccgctatggtgtcctcagtttcacctgaaatcatgtaaaattcttcatctggacttggctctttaaatggtatccgccaatcctggaaaccacaacttaattctcttatgatattgctataagtttccttcttattctcccgtttcttgctggcaagatattcatcaaggacaacttttctcaaagaagctggccgatctctcacatgctcaatagccatttctatcgcatcctcatcatcatttgaatcacctctgacatcctcatcatatatatctttcgccaattcttgagcaagactatacgactctggatggattctggtgtcatcaataagtcaataaattga

SEQ ID NO: 10233 - DNA, 518 bp, Arabidopsis thaliana
taactgagtagctggtgaaacttatctgtgctgcatctttgtctgcttcaaacactaacccaaacttctcaccagagccagtcccattactctccaatgtgaagttttgagttacggagccagcttgagcacccaccacgaaatgtcctctgcacgcatcgttagcaatcgcctaaggtaaatgtgaggttgtatcttgaaccttcacttgtgccttttgttgctgtctgtatgccagatggagctgtgttagacagaatttctattgcagctttgccttctgggacatggaagtgctccgagtctatgtatctgactgttcctatgacagaccactgccttaatggtgattgaatcaggcttggaaccgcgtcaatcagaactccatcggttgagttgggcaagaaaccaggtccagactcaaatccaccattgattaagaggttacctacaccaacaaaatcagaatatgagtctatgcagctagatttacaagacatcgacttatatgaaccaga

SEQ ID NO: 10234 - DNA, 521 bp, Arabidopsis thaliana columbia
aagaactgaaaaagttatggttctttttgtcaaattgtttttatttatatataacaaaaaaggggaagggaggaaaaaaatcatgaccggttgatttggttggattatggaatcatcttaaccatcgcctataatcgctagtagaagcaggtgatatctctccaccaccaccaagagactcagtacaacaagaagagtaatttgattgttgttccaatgcacccaattgtgagccacctatactcttgaaacttggactccttaaactctgaccatccatttgctgcggcacggctggaactggaaacgaaagccgttttctagctgaactgatacgttctttctcgggtgttgaaggccgttgccttggtgcactctgagaccggattctagccttagcagattccgtaatcgccatgtagtttggcaatgcagcatttgtagcagtagtagtagtggtacaacactataacacttcttgctgtgaactatagttagactcgagctaggtgtgttgatgt

SEQ ID NO: 10235 - DNA, 486 bp, Arabidopsis thaliana columbia
aagccgggtcgagctaacagtcggttcttggagtaataacaatcaccggcgtatctggacttacggtcccagttaagggcatcgtaaccaacctgagacatctcgccgtagtgaatgatgtagcggcgaagatccgggtcaagtggatcaagcaggcctttccatttgttttggccacttagcaccttccatctctttggtatgccctccaccatgtttgcctttgtttttttttcacaaacctttttcttcttgttcttgatgtttggagagtaacattgctccttgtgtgaaagaattggataatgcgtgaaggaaatggtccttaatgtatggcccttcacataaatagtgccggtttaagtttattttaagtgtacgtttattacaaatttgtaggattcacatcactttttttaacggttaatcaacgcttaaaacatgtactattgttagttacatcgaaattaaattaattaaagacta

SEQ ID NO: 10236 - DNA, 599 bp, Arabidopsis thaliana
ctagaaagaaaaaacttacagaagcacacacgctatatgatcaacaaatagcttgtatggaaagaatgtttttgtgcagtttcttaacttctctgtggtagcagatcatgcaacagtggaatcaccttttgcgctggcttcaccttcttcaaacgagctgaaaaaattggcaagtttctgagaaacggtttgttgagcctcgggtaatgtattttctctgccttccaaatcatcatccccctcgtaaacgagatgaatgccatgcatctttagctcaacgccttgtttgattggtgggtttcgtttgatcacctgtatggtgtacccgtctttcaacatcgtaaccagtgggtgaaaagctgagtatcggcagatgtgaagctgatcgttatttgttctaggcactccggagagatgcaatgtgttggtgcatttgtgatgatcaagtttatgaatttgggcttgaacctccatcacatcaggcagctgatagtcgtcatcttcggtttcatcattaagagccacaacaacagcaatgattacacctctgagctctctgttcggttgagctgagaatgtgacagggccttgcgagaacc

SEQ ID NO: 10237 - DNA, 458 bp, Arabidopsis thaliana columbia
tccatttgtatttcagccttcttcccaatcgacgtcgtcttcctcttcttcttcttcaccacccgaagcttctgcttccacattcaagtccaccttatagtttccattagctgcaagaatcgtaaaatgttaagttaccaaatcgagcatatcataatctttttacatcatataaccatgacagacctgtgtaatctaacttaattatgagcatgtcttaacaagtatcttcttgttgaagctctgcgatttcaatatatactactaaacaaggttccttttattctaactaactagtgtgtcgtttcatttgatcaacgagtatgcgaaatggaaatgaagtaaataaactcaaactgaccagtaacaggagccttttcttcccattctacttcttcttcatcttcgtcttcatcctcttcacgtttggccttcatactaacctgacgacctgagta

SEQ ID NO: 10238 - DNA, 482 bp, Arabidopsis thaliana columbia
gactcgatcccctctataaaaaaaatttgtgttaagagtgtacatgttaggtaagaaagagcgaacgaatttttaaggcttcaaagtagcatttcaaaaacaccattcttcccatttctacattcatggaagagataataaacaagagaaagaataacgttaacaaaaatgtataatccttaacaatcctgcaactatgaagggagtaaatctcttggacttagctactacatagtcaataaatctcttggacttagagctactacatagaatttttccttacctctcataaacgacaatgacgaaccgggattggtaccaatggttggagaaacaaggccttgcagagaattagaataattttgttgtgtaacagagctccattttcagtggaataagaatccccccaacaaccctaactctaagagagaaaatgtgaacagtcccttgtcacttgataccgcagccactgcacatttggt

SEQ ID NO: 10239 - DNA, 738 bp, Arabidopsis thaliana
cagaaagtttcggaaacctctcaaatttaatggtactggaaatgctgaagaagcctctttttagaatttctgagagtaatgttccaggtacaagcgaagaacctcgttttgtagaagtaccaaactctttctcaaagctcttgaagcttgaggaactagatgcttgcagctggagaatatcgggtaaaatccctgatgatcttgagaagctttcgtgtttgatgaaactgaatctggggaataattattttcatagtcttccgtctagcctcgtaaagttatcaaatctccaagaactttcattacgtgactgccgagagctcaagcgtcttccccctcttccatgtaaactggagcagctaaacctagcaaactgtttctcattggagagtgtatccgacctttcagagttaacgatcttgacggatctcaatctcacaaactgtgcgaaagtggttgatattccaggcctagagcacttgacggctctgaaaagattatacatgaccggatgtaactccaactactcccttgcagtaaagaaaagactttccaaggtgattccaaaaactccacagaatctcatcatggcctatttaaaaaactttcttacaccacttttgatttgttactgcaggcttctttgaagatgatgcggaatctgagcttgcctggaaacagggtcccggactggttctcgcaaggccctgtcacattctcagctcaaccgaacagggg

SEQ ID NO: 10240 - DNA, 645 bp, Arabidopsis thaliana
cggattcacagtacatggatcatcatcatcatcatccaggttcaagaagacaatcacgagactccgaaacaagttcctattacgcaaaacctggtgcagaaaacagaggaatgggtaggagacacagctacaacaatccgggtattaatgaatctgactacgaggaagagtataccaataccgaagcagaagcaaaagaaacaatgaggaggagacacagctacaaccctcgatcagttcctcctcctgcaacttctgagatcaagtttgatgagtcagactactacgaggaagagacagagccagatgaaccatcacagggtcgtgtttcttctctcccgccaaaccgagcaccgcctcaggctcctcagtccggtgagtccagacaggactcgagcggtcaccaggttcacccaaaactgcctgactatgatattttggctgcacgttttgaagcaatcagacacagtaaagggccattgatctgaagccaataacttccactactgctatatacatagaaagaaatcatgtacgggataatgcaactatcatgtttagttttgtttatgaagaggaagaagaaagatgcattttttgtttactgagtactttactatatataacggttcggttttgttatga

SEQ ID NO: 10241 - DNA, 526 bp, Arabidopsis thaliana columbia
cccgatcccgtgggtatgattgatcttacttggcaggatcccagaggagaagaaagcttggatttcctttatgatatgtggccccattgtagcccaatttgcttgaaagaagcttgcagagaaaccttcaggtccaggggctttatccggatggatggcgaaacaagcattcttcatttctttttgagtaggtgcatggataagggatgcattcacctctggggaaatacatggagaaatagattcctgaacagtggtggttctatcgccctgttgggaagtgaatagagattgatagtaagttgagatttctttttctattccttcctcttcaaaaatagtatctcctttatcatcttctaggactgaaatattgtttatagcttttctccccttagtagctacatggaaatagcctgaattttttactccaagggctagccatagttgtctacttctttgtttccaaaactctttcatcagtttgataggccagtagcagttcgctattaatattggagatttg

SEQ ID NO: 10242 - DNA, 447 bp, Arabidopsis thaliana columbia
  unsure (1)..(447): unsure at all n locations
tatgaatcgaatccacctccctggtgataactggagctttgaggttcattatacaacaatccgttatccaatttgaatcgatcatagctgtaaccttcctctgatttcactgctgggttcactatttcattatcagtcataggattctgagtcttgtcatggccaagctcaatagcgtcttcattgtagactacatagtcttttccaccttccgtttcaatcacgccattaccggctttgttagtttccaaccaatagcctcccgaactttccgcctcctcgtccttcttccttcccccacccaaatcttccgggaaatttaacctggcatagggtccgtacatgacactagcagctctgtcgtaagccaaagcagcttcagctcgagtagcaaacgtgccaagccanagccgtttactacgactagagtttgcaccacggtgactc

SEQ ID NO: 10243 - DNA, 484 bp, Arabidopsis thaliana columbia
tgtagggattcttctgcctaaacctcgactacatgctgttttttgcaccagtgaaataagcgaaactacatagaaagaaacaagtcttacttccacagaggaaagtttagagaagtagaaaagccacaaagcaacaccagcaaatacatatagcttaagctgctcagacacaattcaacgagacacttagtgagagagtagcaaatgacttactcttcctgggacggcaaatttagcttcaactttcagacatcattggtctttgcaatcttcacaatctcctcagcttcttctctcttagaccctttcaccaattcatcaactaactgctgcaacgttgtttgaccgacaagataccgcttactgaatgtctccttgaagagctcaatcgcagactcaaagtcacctgctttacacatagcaggaagcaataaagcaaaggtagctttatcaggacgataaccatgcttcacaatttctttgt

SEQ ID NO: 10244 - DNA, 500 bp, Arabidopsis thaliana columbia
ctcacagggacaccgtcatcataccaaaacattgggctcgaagagaacatatttccgttgattgtcacaaatcgcgggtagaagatctctttacttaagtatatacctcttgacttgtcgatgattttcaatcacggtaacacacaagtccaaggacacaaaagccccatctaagacttctaaatgcaaagccatccccgacatgggttatgttagcttgtcctttatgcatcagatcaaagacacccaaaacccctaatcatcaacaaaaagacacacaagtgtggtcatttattgagcttaactatcatacctatcaatcaacggaagtatggtgtaaggcacctgtgacaccgcaaaatggaagatgttaagatatagtaagcctatgagaagacgaccataaatctaattgaattgtgactggacactacgagaaggaaagcatgttgcgaatcttgggtgcagcaggcatgtccattaatagtgaatttgaaaag

SEQ ID NO: 10245 - DNA, 623 bp, Arabidopsis thaliana
tattatgaaggatcatgaactattctaagactgagctaacacgtgttacttgcttaatccttacactcaaaaagtctaaatgttaatggtattaaaaattattcaccttgtttgttattcttatttctgcaaaaccagacaacaattcagtaatcaaaaggacacatacgtaagttgaaattggaaagagttcttcaccaaagctaacttgatcctcacgaacgtctcctaaaatagcaatcttcagctgaagaacaacacacgcctcctaataaactcgttgtctttctcacatacacaaaaccaaatttagcaaaatggttattattacctttctccctcctttcggaaattgccaccaccaatcaaacaatctaccttcttcttcattcatcattcacttctcagaattttgagaattttgaattgagaattgcgagagagatctcattctccctctcgcaattctccgtcccctcgaatccaacaaaaagattttaatgtaaaatcactctattgatccacaatgtcgatgatgtcccatcgtttcagttgctagaacttaacataatatcagctcaggacttggctcccgtcgcacgcaagacaaagacttatgcggt

SEQ ID NO: 10246 - DNA, 507 bp, Arabidopsis thaliana columbia
gatacagaagacacgagaagggagaagagatcgatgattttgagaagcgaattagatgcatgaggttggttttccgttggatctctctgtcttcactcgccttatagcgactctatttttcctcgccgttggtgttttttactttctcaaaaacaccgccgctaagtacttcgacatcggagccgccgccgccggaggtttcgacagggacttcatggcggttgatgctgaggattgctctgtctgtgggaatttttccaccaagaaatgctcccgctgcaaatccgttcgatactggtatgccctcaaattcagtctctttgttgggatcatctcgagcttagcgtaattgaaagattgatttagtttgcttgctttgagcttgcgatgtgtaattcttttcaattttcaaagtcttgagcttttcaatagaagaatcatgggtttggaagttgttgcttagatacttttgtgaacttaatttgtatgagctcagatagtttggat

SEQ ID NO: 10247 - DNA, 572 bp, Arabidopsis thaliana
gctagtttctttatctgaaactataatagatttgaacatgacaagcataaggaaacaaacatgtaacatgtataacaatcagatgatatggatttggagatctacatgtaaaagtagagtgaatacgtggcaataactcattggctatcttaaatttccttgtggtatggctaatctagtggttcttgtccaagtaactatcgcatcacagtgacgagtttttttcctagagacctctgctgcaatggcggggatcataagccctagccctacggctctttatttcaccaggtaatactagttccctcaactgaaagttgactcctttgtataattcgccaagttgtttaatcttggcgagttctcgtccaaaacaagataaagttaacagtttcgatttctgatgcagtaatgtcggtgggaggcgactgaaagcagtgagctgggcgggaaagagtgtctccgggaacgttatccgccggagaagcttgagaattgctgcggcgtgaaattcgtgaatgcagaagaagcaaaacagttaatagctgaagaaggttactcggtggtggatg

SEQ ID NO: 10248 - DNA, 988 bp, Arabidopsis thaliana
tgtggaagctctagatacaacaggaacaaactctttgaagagcttggtttaaccagacatggttacaaggtaacgaaatacatctacgcgatgtctcgtgtcgacgttcctcagtggttcttaagctcggctttgggagagacatggagcaaagattccaactggatgggctttgtagctgtgagtggagacagagagtcgttgaggattggtcggagagacattgttgtggcgtggcgtggaacggtgactcccacggaatggttcatggatcttaggacgagtatggagccgttcgattgtgaaggaaaacatggcaagaccgtggttaaggtgcaaagtgggtttttaagtatctacaactcgaaaagcgaactcacacggtacaacaaagaaagtgcatctgagcagacgatggatgaagtgaagcggctagtgaatttttttaaggatagaggcgaagaggtaagcctaaccattaccgggcatagcctcggaggtgcgctggcgcttatgaacgcttacgaggcggctagagatgttccagcgttatctggtaacatttcagtgatctcgtttggtgcgccgagggtaggtaacttggcattcaaggaaaagctaaacagtttaggagttaaggtgttacgtgtggtgaacaagcaagacattgtacctaagctacctggtatcgtgttcaacaaggtacttaacaaacttaatccgataacttcaaggctcaattgggtctacaggcatgtcggaacgcagcttaaactcgatgtcttcagttcgccttacgtaaaacgtgattcagacttagggagggctcataatctagaggtgtatctccatgttttggatggcttccacgcaagaaatctgggtttagggttaacgctaggagagacgttgcttcggtgaacaagagcacagatatgttgttggatcatctaagaatacctgagttttggtacaagtggcacataag

SEQ ID NO: 10249 - DNA, 539 bp, Arabidopsis thaliana
tattaagcattggataatcttaaacatttatttagatatagtttgaacttgtaaacttacacgatttttaaagttcgtaattgaaaaaggagtatacgtccaattgaaaaaacgaaccgaccttctgaaaaaaaaaaaatatatatatatatatatatatatatatatatatatatatatcgtgtgatgcaactaccacataaaattactcagattacaaaagaaaaaaagaagacaaaaaacctaaagaagatcgaatacgtaagatggagaaacttggcagagatgatgaattgattgtggacgagtcttcgttgaaatccttctctcttgcatgaaaaaagtaacttcagttacgtctgtctcatgaaggactccaaatctcgacgttgcgcaaagaagtcatcgccgatgcagcacaaacagattctcgagaaggaactccggatcatgcatcgtttccgtgaccatcatcgcatcgtccaagcctcaaacaagtttccatacaaatcaaccctctgaatgctcatctatatgga

SEQ ID NO: 10250 - DNA, 685 bp, Arabidopsis thaliana
cgttggacttcttgtagtgtgaagctcgtatcttgtctcaggtatcacagctacaacaccatcttcttcctcaagcctctctgcttcttcttgagtaagctgagctgctaaaccgtggaaagcagtctggtaagtgtagagtatcctgttgttattaccttcttcttcttgagatttatgttgcgttacagagtttatctttgaagagtaccattgtaggtgattagtgtaaggtaaaggcatggcagatttatccatgtggataacataagtcttcttggtagagatttgagtagttgtttctgcttgaagaaagatgagattgattgataagattatgaaaagaaagggtttttgaagtgggtttttgttagccattgttggagctagagtataggagatgattcttctctctatctctatggagaagaagagataaagagagtgttgttgttactttggcggaagtaataaaggtgaagtaagaggtggttttcatagatgttctgtgtgcacaattactaacaagttggttggtaatggcagagaagagtaattaatgtgctcatggttccttctcctacttctatgtaagtattagtaccgttaggtttgagaatttatgactcatctcgagcttcaatgtttattgcttagtttaagcaatgagattatgaggcatgag

SEQ ID NO: 10251 - DNA, 520 bp, Arabidopsis thaliana columbia
tgatttaatttctgtccaattataaacacacatatacacatagtttctcagagaaactattctcaatctctctcttatctctctcctactttattattattttatattttttagttaatgagaaattatgttaaagactactgatggagatgctctaactttggctttctacatttagaaaagttgagaccaaatcaaaagaaattgtctttctcaaaactaaaattactttaattcccatctttatctagtccaaactcatgatgtgacaattctgatcatacatataacaacttaaggagacatgtaatatatattatacccttttctgatcacaattcgtccttcgagtcactttggctactctttgtcgtgctatcgggtgattctttggtctcggtagtttctacttttggtgtggactctgcagttttaggtgattcggttgatgcaggtttctccagtttgaatgggatcgttgcgtgtttccttaagaacttgtaaaatgcaaccacagtgc

SEQ ID NO: 10252 - DNA, 563 bp, Arabidopsis thaliana
taaaatctaaaatctcttgctgtgttccgtatttgctgatttttcgttgtcctttctcttagcctgaggactgggatgatgaagaagatggtgagtggactgccccaacaatccccaaccctgagtacatgggtgaatggaagcctaaggtttgtcaatttctattccaaaaagtatctatatcctggtcaacgtttttcttcctctcaaggctgtcaaatatttttgtagcaaatcaagaaccccaactacaagggcaagtgggaggctccattgattgacaaccctggtacattactactctctgtggccatattatccatgttgcatgtaatttgtggttcaacttctgttctttgttgtttgatggtcgtttctggtatgcctaaatcttctccagttagatttctgttgactaagtagaaggactatctaagtctaaggcctaagggttcatttaaactcaaatgctgaagtaatcctttacttccaaaaggtttattggcgtctctatgtttagtggtttacctattacatagacacatgtttgcaactacctggtt

SEQ ID NO: 10253 - DNA, 554 bp, Arabidopsis thaliana columbia
aaaaatattagttatttctagaataaataattaaaaatatatagataatagtaatttccgagaatattcaaagaaaaataaccgaatgtataataaatttcaaaactgaaagaaccggaaccgaacaaaaatttcaaaataactgaatgatactaaactttataaccgaagaagtaaataaccgaatgagtacttaccgaaactgaacagataaccgaatgcccatgactaagaaaacttatctaagggcctgactggttgaaacgcagcggttacggttgtgattgcgagagtttacggaatcagagggttgcggttttaagcgttataaatttgaacgacttgtttagcagttaaaaattggtgcatttgcgggacgtttatgactggttaacggaattacatttatagtagaaaaattacgggtgtacttttttgcggaaaaattacgggcttacgttttttgcgtaaaaattacgggtttacgttttttttgcgggaaaattatgggtttacttttttggcaggaaaattacggatttacgtgttttggc

SEQ ID NO: 10254 - DNA, 652 bp, Arabidopsis thaliana
tgcattgatgcaaaaccaaatctgatttatcgtctcgaggttttgattttgatcctttgtttatagcctgaggactgggatgatgaagaagatggtgagtggactgcccctaccattcccaaccccgagtacaatggtgaatggaagcccaaggtttgttggttttgctcttgaacagagtatttaagatggtcattttatcttcattcctctcacggttgttgtattgttctgtagaaaattaagaaccccgcttacaagggcaagtggaaggctccaatgatcgacaaccctggtaatttaggaatccgtatttatattcacctgaaatagagtttgagattctgatagttatggatgtaacagtagtatttattgtaagatttttgtttccctgagataatatctgataagtagtaagtctaagtatatcaatttgacacagaattcaaggatgacccagaactctatgtcttccccaaattgaagtatgttggagttgagttgtggcaggtaataagaatatcttatcactgaaacatttttgtctttcataatggtatatgtttgaaactaaacacatgattgttttggtaggtgaaatctggttccttgttcgacaatgtcttggtcagcgatgacccagagtacg

SEQ ID NO: 10255 - DNA, 492 bp, Arabidopsis thaliana columbia
ggatgaatttggtccgcccacaattgcgccggtatgcacattcgggtttggtgtatcaaaattgtagtatgaaaatcctccattacagtcgattttctctggtttagattggattgacggtaatgacgagcctctatgatgaggttgtgtaggatactttgttccaaatccaaccatgtaagacattttcaatggattatttccaagaatgtaatcaacctgaatatcaaaccggttggttaaaaacatggtattggtatatagaaccagactagcgggataatttaatttctttacctgtgacttggcaaaatttcgaatttgagatacggtgaactgagtcgacccacactggattgaaccaaccccggctttggttagagtttttgagtaatagaataatatagttgtagccgttgttacatactgtaagttgctactgtctctaataaacaaaatgccacctgaataaacaaaaatcacaaacaaatg

SEQ ID NO: 10256 - DNA, 445 bp, Arabidopsis thaliana columbia
agagatttttccgggatctttctttttttttttctttctctgtcaaaattttcgttataaagtttttgtattgattcactcttttaactctccgattccatttctcttttttttttcccaatctgcaatctccattagattccccagtcacattatcttgtctttttcgaaattttctcgaggaaagtttgatactttcgaggaaagtcatgagcttttgaacaaaagaaactgtttggacttccgttactatctccggcggtttctgaaaaaacttcaatgattcgttgaataagtagcttactttaagggttttgtgttatcttcatctctctctcagtgatgggttgtgcttattccaaaacttgcattggtcagatttgtgctacgaaagagaatagtatcaggcaaacgcatcaacaagctccgtccagaggtggcacga

SEQ ID NO: 10257 - DNA, 431 bp, Arabidopsis thaliana
ctctagacgatgtaacgtccgccagtgtgctgtaaagtagcataagggcataactgctaatgtgatcgtaatcacagtgtgatattcgtattgtcaaataattttaaaaagcagaagcgtgattactctcacacaacacctctgctttccatgttatttattatttcaattactagagacctgagaaaagtaatccacctgaaagggcggcttacttttctctttgttttgtctattacaaatgggaatacgatatgcaacacaactcatatcgccgttggataaccctcgcgataattagttttagcggcggcgttagtttcgacctggcttatttacgttatatttatcaaattcccatggcgaaatttatgggattcagcaataccgagataggtttaataatgagtacctttggtattgcggccatt

SEQ ID NO: 10258 - DNA, 588 bp, Arabidopsis thaliana
tagtaacgtccgccagtgtgctttaaaggaagaagatgtgagcgataacccattttattttcgtagttacctcatggagatatggaatgtttaggttgaaccctttcgtacgggtcgggctgtgtttgtccgctatttcttgtgcatggcctgtgttagcggtcgatgatgatggcgaaacgatggttgtcactgcatcttccgtggaacaaaatcttaaagatgcacctgccagtatcagcgtcattacccaggaagacctgcagcgaaaaccggtacagaatctgaaggatgtcctcaaagaagtgcctggcgtacaactgacgaacgaaggggataaccgtaagggcgttagtattcgtggtctggacagcagctataccctgattctcgtcgacggtaaacgcgtgaactcccgcaatgccgtcttccgccacaatgatttcgatctgaactggatcccggtcgattccatcgaacgtattgaagtggtccgtggcccgatgtcgtcgctgtacggttccgatgcgctcggcggtgtagtgaatatcatcccaaaaaaatcggtcagaaatggtcgggtacgtt

SEQ ID NO: 10259 - DNA, 225 bp, Arabidopsis thaliana
  unsure (1)..(225): unsure at all n locations
nnnnnnnnnnnnnnnnnnnnnnctaaagcagaggaatctaaaacaaatgtgttccttaagcaaactgatgcagccactgttgatagccgctaccagcgacagcatgttaagctcaacggacatcagtagcatcaagatctatcgtgaaactgacccagtgtaacagttgcgctattacggcagtaacgccctgatgtacgcgactgatctggacaagctgctggt

SEQ ID NO: 10260 - DNA, 555 bp, Arabidopsis thaliana columbia
caattcaattaaaacattagttttcaaagtttccaacagatatatatggtatggaaattatgacgatataaaactaactttattattaaagttttgctggcaaccttattaaggcttctttaatttaatagtgttaaacattgttataaaagaatgaaggaccaaatgtaacagctcacgatcagaataaaaaaattgtaacgcagacgttttgagatatttcaatggcgaagaaagctgtgttgattggaatcaattaccctggaaccaaggcggacgtacggggatgcgtcaacgatgtccggagagtgcacaaatctctcgtggatcggtttggattctccgagagaaacatcactgagctgattgatactgacgagtcttccaccaaacctacagggaagaatattcgaagggcattgttgaatctagttgaatccgctaaaccgggtgatgttcttgtcgtccattacagtggacacgggacgaggttgccggcggagactggagaagacgatgatactggttatgatgagtgtattgttcatgtgatat

SEQ ID NO: 10261 - DNA, 686 bp, Arabidopsis thaliana
gtccaatataaataattaacttgctatagcaaaatttatttcagacataaggttgacatcctttttaaagacaataattagttcatacataatcttgacttctttaagaacataattagttcattcatagttcagacataatcttaaagaaataccttcgcctgctgttcttcagagctttgttctattggcagatctatatcagaatgtgatgcaggctccctgtccaatgagtcctgaaagtaattgtcaaataaatctgttgtgttaaagataaagagaggaaaatagaatatgtattttcgatggttaaagaaaggctttggctttgatttgttgtgtttgtatttataaaagtacctgcattttgccatcaacatctgtttcattggcattcgtttccagttcttcagagttgtgttcttttggcagatctaaaccagaatgtgtggtaggaactctctccgatgcgtcctgcaagtaattgtagaatggatttggttaaaaaaaaacataaccattggtctgcgcagtaggtccaacaaatactatattatcttacatccataatatgatcttggtggagagggagtagtttttcgacgcttgggtctgaccttggatcaacctgtttggcgattacaatagtcaatgtcgcttatatatatatataacgcattatgggt

SEQ ID NO: 10262 - DNA, 520 bp, Arabidopsis thaliana columbia
ttaggttcattgggtttggatagtttaagttccttaaacacactgagagcagaggaaaaacgggatgctattaagcgcgggaaactacccttgtttttagatatgccgttacctcagatgcttgattcaagcaacaacgtattcttgggaagatcagccaatccatctttccttcacccaaatcgagggttgaatccctccaatcccatggggagagacataatgggaattagctcttcagagaacaagctacctcattggttacggaatgttgtgactgttcctaccgtgaagtcacctgaaccacccactctacctccaactgtgtcagctatagctcaatcagtccgcgttttatatggtgaagactctacaaccattccacggtttgtgataccagagccgccacctcctgctcccagagatccaagacacagtctgcgtaagaaaaggaaacgtaaattgcattcatcgagtcaaaagactacagacattggtagtagcagcacaatgctgtaga

SEQ ID NO: 10263 - DNA, 580 bp, Arabidopsis thaliana
cttaagcagctttctccatatccatgatcctgaacttgaatgctttatggaccaaaaagatctccgttttagtaagttagcctcaatccatttaccccacaaagaattaccatgagagacaattttccaaatcaacttcagacaacaaacatcattcgcctcttttaagcaccttagtcccagtccaccctcttgccttggtttacaaaccacctcccaaaccacctttgccttctttcgattcatatccggacccgaccacaggaacgacgaacacagtttatttatttctcgaatacactctcgtggaagccgaaaagcagccagccagaaattacacaacctccacaaaactgaactaataaggttaaaccgacctacaaaggagagaaatcttgcagtccaagtgccaatacgtttcctgattttctcaaggagtggagagtaatctgcggctgaaagacgtttcgtaacaagcggaagaccgagataacgaacaggaagagacccacttcaaaaggaaaattctctgcaatttgttgatgaccgtttgctggagagctgctaaaaacagagtaga

SEQ ID NO: 10264 - DNA, 139 bp, Arabidopsis thaliana columbia
tgttccttatttgtatggtaaaggaattgataaaatgttaattactcatgttgcgggcagactcccatgcttgtatatactttgttcatatctttgcatatgtccaaaccttgaaccaacgcagttccagatgtttggt

SEQ ID NO: 10265 - DNA, 472 bp, Arabidopsis thaliana
actcataagggtgggttgtttctggacctctacacacgcaaccatcatccattgtgcactccgaatgtgacatgagtacttgtgagcatagttcttcgaggacccccacaagtttaacccgccgtacaataatagtaaatttagactgactggtaagccagcaagcatagtatttaaaatgcaccaatctgcttacactgctacattggttaaggggagtcacggaaagtttgggatcagtgtcacgatcagttcctttgtcaaatcatcctgccgcttctcgagcgcttcccgcgtgacataaatgtagcacgaataggatgaatcctagaacaaaatgtgaggtagatatcgactacgcggagagacatagttgactgcattgatctcagtagctacgcccctacagagtttaacgaacctacaggagcatgagtcatatattctgccgaacgtcgttcttgccaaggtt

SEQ ID NO: 10266 - DNA, 482 bp, Arabidopsis thaliana
gtgtgctctaaagggtgtagagattaaagtggtcgatgacgcacgcaagaccttaccgccagttgcgaaggtgaagaagcctcgcgtggccccaatgtgtttatggggtattttgatgaacctgaattaaccgcccgtgccctggatgaagaaggctggtattacagcggcgatctctgccgtatggatgaggctggctatataaaaattaccggacgcaaaaaagatattattgtccgcggcggcgaaaatattagcagccgtgaagtggaagatattttattgcagcatcctaaaattcacgatgcctgtgtggttgcaatgtccgatgaacgtttaggtgaacgatcatgcgcttatgtcgtgctgaaagcgccgcatcattcattatcgctggaagaggtagtggctttttttagccgtaaacgggtcgcaaaatataaatatcctgaacatatcgtggtaatcgaaaaactttagag

SEQ ID NO: 10267 - DNA, 612 bp, Arabidopsis thaliana columbia
cattctgtggacagactttccagagctctgaattctttccgacactaaaatcggctgaacatgccgctgcaaaaattgcagttgcttctttgacgccacaaagtccagaggctagttcctcacactctttttggactacaagttatgtgctttttcaacatttgtttaaattttgattttcaaatttttgttgtttcagggaattgatgttgcctacaagaacctgttacaagaaattgcacagaaagagagttctctgttaccattttatgcaactgctacatctggtccatcgcatgcgcctacttttacttcaactgttgagtttgctggtaaagttttcagtggagaagaggcgaaaaccaaaaagttggctgaaatgagcgctgctaaagttgcattcatgagtatcaaaaatgggaactcgaaccagaccggatcgcctactttgcctagtgagagacaagaagatgtaaattcaaatgtgaagagcagtccacaagagatccattctcaaccttcttccaaggtggtgatgacccctgatacccatcaaaggggattaaagtgaatgaagatggttagtttctttgaatactaactacatgaata

SEQ ID NO: 10268 - DNA, 578 bp, Arabidopsis thaliana
cgtctccttattgaaaatttgttgttagccacggagttagtgaaggattatcacaaggacaccatttcagctcgttgtgctataaaagttgatatttcgaaagcgtttgactctgttcaatgctcaatcctacagaatacgcttagtgctatgaatttctccccgatcttcattcactggatcaccttgtgtatcactactgcttctttttcggttcaagtaaatggcgaactagcgggctattttaatagcactcgtggtctccggcagggttgttctctatcaccatacttatttgctattagtatggatgtcctctctaaaatgttggacaaggcagcaggcgtaaaacagtttggttaccatcctggttgcaagaacattggactaacgcatttaagttttgcagatgatcctaactgatggcaagattcgatcaattgagggtgtggttaaagttttcaatgagtttgctgtttggtccggtgtaaaaattagtatggagaaatctactctgtttttagccggctctcgagcaaacggtcatcaacaaattgcagagaatttccttttgaagt

SEQ ID NO: 10269 - DNA, 190 bp, Arabidopsis thaliana
cctcaacatttagttctaacacaatttatagatagcgcagaggttatgagaaaatgtaaaggaacgtactcatggctgctcatgacatgcaatggcgcattaagtttccggaggtcaaacaaagcaacagtggagtctgaggaagctgtggccaatacccattcgttgaacggattgaaagatagatagg

SEQ ID NO: 10270 - DNA, 419 bp, Arabidopsis thaliana
gtcgactctagaccgtcagacttgggtaattgaagaactggaagagctggagcaaccggtctagcttacaccttctttggagaccaagatgcaaaacatgcttcagatctgatcaagatcttggaaggagcaaaccagaaagttcctccacaggtccgcgaaatggctacacgtggtggtggtggaatgaacaaatttcgtcgctggggtacaccttccagtggtggtggtggcggccgtggtggctatggtgattctggttatggtggtcgtggtgagtctggctatggtagtcgtggtgattctggttatggtggtcgtggtgattctggtggtagaggaagctgggctccttcacgtgacaggtaaattaaagataaacgactcagctagatctcttgattctttttctcattatt

SEQ ID NO: 10271 - DNA, 509 bp, Arabidopsis thaliana
tcactaaaaggtttcgtaagatccaagttgattgtattagtaacagttgaaggaaaatctgcaaaatcaattggggaaacttgtactccatttgtgttgtagatagttgtgaagaaatcttgggcgtgacgaccaatctctttgtctcccgtgtatatgtgtccttgatcatcactaattgagtttatcctgttctgtgaaattcgaacctttgcacaagcatgaaagtaacctgtgttacgatcaccctccttcatccattggttacggctcttttgtttccaatatttttcctcatcactataagcctttgtcaacgactcttgtatttggggtatatgttgcctttcaactctaaccgtactctccatcgctctgtttaaacgttcatgaagtgtctttatgtgcagatccgaatttaaatttgatcgatgtttcagttttgccatagcttgacgacagcatcagattcgttctgtaatggcaattgattgagaattgtgagaagt

SEQ ID NO: 10272 - DNA, 1027 bp, Arabidopsis thaliana
gggccgaaattgggctgaagccattatatgaagaccagcaacacaaaagcagaaagagaagcgtggttggatttgtgtgtgctgtgccacactctccactctttagggttgcgacggagtcttcaatggggagaatagggagtccacttggtaagaacgagttcagttgggtaatcaaggatttctcctctttgggagtgagggcaatttattctgacgaatttgtgatcggtggctgcaaatggtaagaaaccactctgtctttttttctgatgttttccggtgaattttagctagggtttcatgtgacacatattcatttgttttgcttacaggcgtcttatagcctatcccatgggaaataggattaaaaagtatatgtctttgtatgtggaagttgctgattctaaacatttgccttctggatggagtataaacacagaattgcgcatggaagttgtaaatcacaatttgtataagccctcccaacagaaatgtgagtttttctactgcactggacaaaaaagtgtagatttttatgattctgtgtctgtatttctgtttatcattgtgtgatgcttgactagtgttgtttgtttcgtgaaatttcagatagaaaaaatttgtggtttgatcagaagactccttcctgggttataaaaccatgattcgtcattctaaactttctggtgaagaagggtttttggtaagtggagaagtcacaattgtagtcaagatagacgtttatagagtttttggcaaagtagctgcaatagagatttctgaagagggatctaaagagggatatgaatatgaatctgaagaggtatataaaaaggaatctgaagagggatataaatatgaatctgaagaggattacgaaaagagacctatagagagatttgaatatgaatctgaagcggaatctaaaaaggactacgaagagagaactagagggggatttgaatatgaatctgaaccggtatctaaaaaggattacgaagagagacctagagagagttttgaa

SEQ ID NO: 10273 - DNA, 1032 bp, Arabidopsis thaliana
ctcgtggtctggacgttaaggacatcaggtatttatataatccaaatcctcccagtcctgtaaaacaaatgattaaattatgtgacttgatgattatattagctaatacgatttgagatcacagggcggtcgtaaactatgatttccccaatggagtggaagactatgttcatagaatcggaagaacaggaagagctggagcgactggtcaggcattcacattctttggtgatcaagattcgaaacatgcttcggatctgatcaagattttggaaggagcaaaccagcgagttcctcctcagatccgcgaaatggctacacgtggtggtgggggaatgaacaaattcagtcgttggggacctccttccggcggccgtggtcgtggtggcgactctggttatggtggcagaggtagctttgcttcccgtgacaggtaaaattaacataggacctcatcttcgtaaatttatctctgtatgccactgaaaatatgattgtgagtttgagattgtataaatttttgatgtaaagtagaagcagcaatggatggggaagagagcgagaaaggagccgtagccctgagagattcaacagagctccaccaccgtcttccaccggatctcctcctcgcagcttccacgagacgatgatgatgaaacacgagatgaaaagagagatacaaagttctgataaagccaagtgacagaagattgtgttgtgggggatttcccttatcattgtgacattatatattttttggccgatgaagaaacaacagaaacaaaaacaagaccaagaagactgttccctcccattggaaatttacgctcaaaactacaattgatatcttacagtttgtatttcatcttattcattattgcagctcagagattggtaagaatgtttcattagatacgaacgactttcttctaatactgtgggattctctagcatttaaattacaaatcaatttggtaatattatgatttcggtttagtattgttagatttggtttagtgtagttcgatttga

SEQ ID NO: 10274 - DNA, 631 bp, Arabidopsis thaliana columbia
gaatttgaagataaagaactaggagaagctgtctccatttcaggtttgctcttagtcctttcactcttgaaccttccagaacccgattgacccatcaatccaactacagttggaaagaaacctgttgatggtgaggagaaaaagcatgatttagagaaaggcgatgaactaatgacagaaacaacaccagacgagagcaagaaacaagctgaattagaacaaaacgaagagagcaaacagccattgccaagcaaaattaccacggatggtaaggaaaaagagcatattatgcagaaaaccgatgatgaagtaatgacagaaacaagacatgaggaagagaatcagccattacagagcaaagttaacacaccggtctcaaataaaccagcaaggaaacgcatcacacccatggctattgacccctgatgtcgtcattttccatcagtgttttttttttaactctgatacaaatagctttctcataggctacatttagacatcaaaatgaatcgtattgacggccatgttggaaatggacttgtttctttagtcatacgtctcgtctctaaaggcaatgtacatatagacacatgtatgaacgttcacatgagatggttttgcgtacattgtg

SEQ ID NO: 10275 - DNA, 804 bp, Arabidopsis thaliana
tatgtaatgttgttatcgtagtttctttttgttcgtaggtggcgtgggaatagtgaatatgatcggcaaaatccaacggcatgagtacatgggtttcgagaacctttgcaagtacggtggctgacgttgtacttagcatgtagcttgttaagtgttaaacttataaagcttcattcttgatggcaagacttatggtcttttgattgtgtcttgtgtcattttttaaatttgaaaatcgaattgtataattactacttacttagtagtagtggtactaatttttttcttttcttttttggctgaattatggttggaaatctaatctatgtcaatataagtgattgatcaatttgttagcaactttgttcgtagatggcgtgggaaaacaactttgttcaatatagacgctttcatatgatttgcaagtaaaaaaaaaaaaacgtgggtaacggaataataattaaaactataatcatatattaccccgtgatagttgggccgggtattggatccaaaaaccggcccaataaacttcccaatccagatggagacgaacctggaaaacgcggaggtggcgaaaggggactctctctactggcgggtaaacgaaactctgagagaaatggacgacgagaggattcgagagcgagagagacttcagatcgagcagattcgtgagcttgatttcgaggaattacaagtcgaagaagtcgatgaccttcacgattccgattccgatgataataatgatgatctctcttcatttcctttctctcccacgctcaagcttcgtgagccaatctc

SEQ ID NO: 10276 - DNA, 827 bp, Arabidopsis thaliana
tgcataatatgtgatcacaaactaaccaaaaagaatgaaaaaactcaaaatttgaagtttcatacgtcaaacaattgaaagattggagggcaaggattactcacttcactattcaatgccgaggtagaagttcctcgatcagcagggtctatagtgagaagtgtctcaactagatgcacagaggatggagtgaaaccattgaaggcttcagcacacaacgtttgtacggatgttgcggcttaaaaagagttgcgtttggcagtctgtacttcttccagtacgaatctgaaggggagccacataatttgaatatcttatgaagttgttcgacctacaaagaacaaattaggtaggaaaaacagtaaacaacaatgttattaatttttggttgtacattcatttgtggtccaacatcatacagttggttttcaaagataaatcaccaagaagtattaattgctctctataatgcaagctcaaataacagggcctacacatttgtatcatctaatagaaactaaagattcctaagcagactaaataaaacaagataaagacgattttgtttacctcggttcttcccggcataacgggcttgccagcaagtaactcagccataatacaaccagcactccaaagatcaacaccagttccataactggtagctccaagaagaagctcgggaggacggtaccaaagtgtgacaacacgactagtcattgtttgcttttgctttgggtcataaaacgtagccaacccgaaatcagcaatcttcagtattccatcattatctataagaagattagaacctttgatatcccgatgta

SEQ ID NO: 10277 - DNA, 578 bp, Arabidopsis thaliana
tagtaacgtccgccagtgtgctctaaagagtggcaaaatcaaacatcagacccggtcgctcattactgagccacgcccgggtatatagcagacgcttcaggcggaaagaccatggaaaatcaccaaattcatgatagccgtaatattccttaattaatgcagtatgttctctaagggtagtgtcccgttcagcatagcgggagagaacttctggacggtggatattaagctgtaccgcgacaaaatgttgaacaccaggcagaacctgagttaaatccgtcagaaatgttcccagaaaacgggctgtggtgagctgaagcgcaatgcccagcctattatgtttgccccgtcgttggttaatgaaggccagatcccgttcatcaagatgaaaatagcgcgccagttgcacgtcattaggttctgcagcataacacacgtaattctgtatttggtcagaggttagaaagtcgacaggcatatcaggctccctacctgacagttattcattaacaattttgcaaccgtccgaaatattataaattatcgcacacataaaaacagtgctgttaatgtgtcta

SEQ ID NO: 10278 - DNA, 564 bp, Arabidopsis thaliana columbia
tttgatttgtggtgaagcaaaccttctctgtcacaactagctccattagaagccattctgtttgatgttgatggaacactctgtgactcagatcccatccaccttattgccttccaagaactgcttcaagaggttccttgctttttttaatgtcattataacttccaaatttacaacaagactttagaaaactgtgaataatatgctatggaaccttgctattactcagtttcaagctctcgtgtcaatcaattttgtttctttctatcattcgcagattggttttaacaatggtgtcccaatcgatgagaaattctttgttgagaacattgctggaaaacacaattctgaaattgctctacttctgttccctgatgatgtttcaagagggttaaaattctgtgatgaaaaggaagctctttaccgcaagtaagctatttttctgtgtttccccattcttttaatgtccaaactcttttcaggtctgagttcatttggagtaactttgttttgttcttttttcttgatgattagaattgttgcagagaagataaagcacttgat

SEQ ID NO: 10279 - DNA, 479 bp, Arabidopsis thaliana columbia
gataagcatcgtcttgaaaacttgaaacaactcctgtcaaaagagaaagacaaagatctcaagttgatgtttcctgagattgagaaagagtggtgtgatttccacaatattgcccagtcctcgttctatcatgtgtctgagctgtgtaagttcattgcttcctcgacccttttaatatggcctttcaattttaaggcgctaaaagcctccctttcctttttttccccaacttccttctgcctttaattggaattttccgccgggtttacggtggaggttccacttagctaattcaatggtttagaacttaattcaacaagtcctccggattctaaacaaccctattacaatccatatgaatttgatcaaaaatggcaaaatggagtgcaaccctctgaggataattatctacactctgaggacgtagataacaatcaaccacctcctgaagtaagaaaatgtgtatcagtgcggtttgt

SEQ ID NO: 10280 - DNA, 446 bp, Arabidopsis thaliana columbia
atcattggtggacggtctgatggattcatctgtatacaccatagagcaaccaataccaatttctttgcaattttctcttcttcatcagttatactatctccaaaaatccttgtgatttctcccttctcaaaatctttatagacccattctggaaagtacattgaaccattgttagatccagaatattcaaccttttctatattctttgctccaatcatctcaagaactaccatcccataactataaacatctgacttatgcgaaactgctccaaaattcttggaaaacatttcaggggcaatgtatccaaaggtccctctcatgtgtagcattgatatgatgctcttcttatttttgcagagtttagcaagaccaaaatctgaaatcttaggacaaagattttcgtccatcagtatgttctgcggctttatgtcgaaatggacaat

SEQ ID NO: 10281 - DNA, 502 bp, Arabidopsis thaliana columbia
cgccagtgtgtgaaacgacatcgtatggagaggggtccaaaacggtgcgttggaagttggagaatgggcatggataatggcgggaataacctaggagatatggcgggaaaggcccaactatacacacttgacattgcccttaattcgtgtttgagcaaagactcaatctttcatctctagattcttggcgattctcgctacatagtactttggtaaagagtgaaatcaaaggttggttttgagatatgggaggaccagcttacgattgtctgaccaaccctttaggagccgtccgattctccttcgtaaatgctctgtcttcaggctacgatccggcttcgtctgtcggaaaagactggggtgtcgttgatttgttccgtcactacttctccgacgaatctgctatctcccaggtttgccctaaaacctttactctgtttctattgatatttgggtctagggcaattgagcatgccttgattaattactaccaattagcata

SEQ ID NO: 10282 - DNA, 477 bp, Arabidopsis thaliana
cttgacgatcttaggctatcctatttgaccaccactacgattgacttgaacgatatcttaccatatttcaagacgctccgttcattggatatctcaggcaaccttgtttcagccacaaacaagtcttcagtttcttcagatcctccttcgcaatcgatacaatctttgtacttgtcaggatgcggtatcaccgattttccagagatcctaagaacacaacacgaattggggtttctagacgtttccaacaacaaaatcaaaggtcaagttcctggctggttatggacgctaccaaacttgttctacttgaatctttccaacaacactttcatcagttttgaaagctcgtcgaagaaacatggactctcctctgtccggacaacatctatgattcacttgtttgcctccaacaacaacttcacgggcaagattccttctttcatatgcgggttgcgttctctaaacactctggattta

SEQ ID NO: 10283 - DNA, 482 bp, Arabidopsis thaliana columbia
cgtatttggcactgaagctatgaatatgatttcctcgcatcattataaccagaattaagattacctgttactttggtcagaccaaaatctgccgtgcttgtgtcaggagtgtcttttccttcaaacagaagaggggcaccttcttcatgaattgtagtttctactttcaatccgtcgggtccgttagtcactgtgtttagtatactcatgccatgagatggttgaattggggagagacgtcctttgtctgacgtgtgattcccgtctgctgtactagaatcatcattgtcaatcttttgctgtgtttgctcctccaccataggagccagaaacttttgcccgtctccaacaatagctccattgtttacaatttcgcttgtatcgtttgattttgcaactgccatcatattaagaaaatagtgctggagtctttaaaagtcaaacgagagacgcaaaagctaaataagagaagaagtattggc

SEQ ID NO: 10284 - DNA, 532 bp, Arabidopsis thaliana
gcttacatgtatagagcttgaagtagattcagaagttgtggtggggtttctaaagacagggattggggcggcccatccgttgtctttcctggtacgcatgtgccatggctttctcgtaagggactggattgtccgtatttctcatgtgtatagggaagctaatcgtcttgtagatgggttggctaactatgcgttttctttaccgttaggttttcatgtttttgatgttttaccgagctctttagtctcggtgtttagagaggatgagtctggaacagagtgtccaagacaagttcggttgtaatctttaatttttctgtaataaatcacgggagggcttacctcccgtttcctaccaaaaaaaaaaagatagcttcttttttttttcagtttttcatattccagtgatagactcttttacaaaagttaaatattaatacaaaattttttatttcatacaacttaataattattacaaagtataaaacattagacatcattattttgaaatattttaaaatagatgtgaaaa

SEQ ID NO: 10285 - DNA, 428 bp, Arabidopsis thaliana columbia
gcaaactttaatagagcactcagaacatctatcaatctttcttttcactgtatccaatgaccgttgatatcttgcagcaatatctcgaacagtcttatcctagccaaccacctcgagaaacatggcaacagattcctcaaggtaaacattttcagactcttctaatccatatttcctagttagcatcttacataaagtttcaaatgttctttggttcattcagagaatgtcataacattgttgatctgatccatgcataagttgttgaacatgacaccaacctgctcctcaatctgttctatgatttaatctctccctagctagtaagtgaatcaagcaaaccatcatcatcaccatcatcatcatcatcatcacccaacatccatcttctaaccatctgcaaaaaaagtaactcccaatcaaaatag

SEQ ID NO: 10286 - DNA, 896 bp, Arabidopsis thaliana
cttttctggaaagctcatctagtggtggaagtattagctcttgtaaaaactttatcgatacaaaaatcattgcaaaacgcagaagcttcttttccacatttttatatgggaacctgaccatcaaaaacgcctagagttatggaaccatttgaaaaattatgtgaacgatagagaagaaccgtggcttatctctggagattttaatgaaataatcaacaactaagagaaaactggaggtccacaaagagctgaaggctccttcacagatttacgctctttcatgtcgtcttgtgatctatttgaccttaaacatacaagtaacttcctatcttggagaggtaaaagacatacccatcttgttaggtgcagattggacagagcgatggctaatagtgaatgggcaattgcctacccatctggtaggagtgaatatcttcgctttgaaggttttgatcatcgtcccattgttatctcctttgaccctattaagaaaaagaggaacaacatcttcagatatcataggcgcttacgagataatgaagaagttaaacacctggtcctagaggcctggaactccgacttgtctgattcagttgatggcagacttagtaaatgcagaagagctatctctacctggagcaaagttcaacatatcaatagacaagctgaaatagatgacctcagacaaaagctggaaacaatgctttgccttgacactgataaccatgaggagatccatactttgaaccagaagctcctgctggcttacaaaagagaagaggagttttggaaacagagaagccgtcaactgtggcttacacttggagataagaactctggcttcttccatgcggctacaaaaaccagacaagcttgcttctctattcacccggata

SEQ ID NO: 10287 - DNA, 771 bp, Arabidopsis thaliana
tgtaaattcttgtgtaatcactcttctcatatactgtaactgcattcatgactctaatttaaatgatatatatttgaaacataaatcaaacttatgtaaccaaatagtaatcttgtcattaaaactgtacatggttatgttcttcgaagagagagtaagagaggagaggttatgttcttgtcaaatgactaaaagcttttttctctatcttgttccgaggctctcgtataacaagatgtagccatgatcagtattacttgagtactcttgcgatgaaccgaagaatgtttgaacagcagattcttcaattatttcgacactctcatcatcaaagaagagccagtggttatgggatttcacgaggctaacataatgaccgtggttaggtccacttccgacatgaaccacgactgcaaagagagagtactcaatgtccacatattcatccactgtgttgctgagtttcagttccagagggaagacgactctgtacgatagcttcttgtagcggcccaactgttccatgtatttgaaccgtttcagatgtataactaagatgtgtggcggtttcttaatcttcattctcttctgcgcttcttgtaaactgcacaaaatagcattaaggatcaaggaaagttaggaattaaagaatgaaaagcgaagggtgcggattaagaaatagcagtttcatacctgcagcatttgtcacagaaaaacttgtcttctgcatgtagagtctctgtggagctgaagtttttcaaactagctagt

SEQ ID NO: 10288 - DNA, 1131 bp, Arabidopsis thaliana
actgtgactgctgcgtaatcgataccatcttcttccttgaacttcacgcttccgtctgaaccaacctgatcaaatgacaacaattcaattgacttgttatcagtttcttgcggtagaagcaacaactggaaactgagattgaactaagtgattgaagaaaaacctcgaagggtccttcgatctcatcgagtgtgtaagtgagacgggtcatgagcttggtgttttggaaatccggcggtgcattcttgctgacgctatctgccttgacggtgaaggaagtgggctcgaagcagaacttcttgcctgtgtacttaccagctttgaacgagaatgtctcagagccaccatcgatagttggacactggtttgccgtaccggtaccctttacctccatgtaagtcttgctctgtatctcgtcgtacgttagcctctttggtgctccctccgcaccggcccccttcattacccaaaacataggttaaaaatactagactttgcaaataaacatgcaatgtaatctacatatattactgtgacataacaaaacctctatacactaagctattagccctagccaacacaacttcttaagtttgttttcttcaataaacacaaggcctataaattttgttaagtttgtgagatgaatgagaatatgaagttataccgagacaacgagagcagaggtggctagagcaaaaccggcgatcttggcggcgtcggagcattttccagcgaagtctttgaggtcagagtggagagagcacgtgagcctagcttgtgaagagtctaacccaaaggacttgcccacggtttggtttgatcggagatggacattacgagaaggagaagcggcaatcttcgccggttgaagaaaagttgcggcggcttggagagaagttgccatgatgacaagactcagatgtcaatatgtttgtttgagtgataatgcgaagttgagtagtaataatcagaggagagattttgtttcgctaagataaggtcggataagttttgaaaattttccattggattgtttcatgactatatggtcgatcaatagccacgtgtctaaagctgatgtggaaatagagatactgtccccaatcagtatgatgacgtgattataat

SEQ ID NO: 10289 - DNA, 804 bp, Arabidopsis thaliana
tacctagttgtcactaaaacttgtacatctaaaatagttgatttttctttaccattttcttctatcttttctcctatataaccttaaccttatcacatttcacttaccaaaaaaaatcaccaactctctcttctgatcacataaaccctaatttttattcttctacaaaactatggaaattgaagctactactgttcagaaaagaagaagcttaccaacaatagccatgcacaaacagtcaagaacactcaccaaatctaaacctaagatccgaatcattcacatattcgcaccggagatcattaagaccgatgtcgccaacttccgggaaatcgtccagaatctcaccgggaaacaagatcatcatcaccacgatctcccccaccaaaagggtctcaaaagaaaccctagatctagaagaagtcatgatcatcatgaagtccatgacatgaacaagagccatggattttgcataaactcagatgaagaggaagaagggatggtgtcgatgacgtggaacggaaatggtgacgagagctccggtgggttcttgaacgggttaggagatctcgacggcttcattcaggagctaggtgaatttccttatttacccttcaccattgaccctgccgttgcttcttcctcccacttacatggcaacgttttcgcagaacctcaccattacgcctaaaacgtctcaagcggaagaatcttttaaacattttatttctttaaaataggttaaacttttaataattttttgtttcttcttttatatctttctagaagctaatttttgttttt

SEQ ID NO: 10290 - DNA, 921 bp, Arabidopsis thaliana
tcaacaaaacggttcttgctttctgtaatcaaacagtcttcgtcttcgtcttcttcatctccgccatcggaagtttcattcaagcttacatcttccattgcttcctcggaagaaatcgctcctgttcctgtgttttcgcctaattcatctccttggaacgtgaaccagttcgagttggtgaataaattgctgcatcaagaaaaaaacatttcattggtttttggagccctttgttcttttctacctaatacatggatttgataaactagccctgaaagcttacttcgcttgttcatcaccaagccttagagatgatataacaacttcagcagattcatcatcaaaatagacatcctacagaatatgttacagtcaggtctgttgtagacgatgttttctataaacgtagaacataatatataactataatgaatacctcttcatctctgtcattagaaccatgctcctggaacgagaaacatggaatttagattcagccaaaattttaagaaataaatcagagagattaacaactacctctccagcaccattgttctcttgcatgttgtatctgaactggttcaagttattagctaaaccagcaagatcataatccctatcatggacttcgtcatcatcactgtccctagtcctatcatgtaatgcagtcgggcgtctgcatgcgatataaagtgaattatcattaagagacaaaatcggaactagatactgtgccaactattgtcaaacctgaaagtgtttggaccaagtttcctattatatttctatgcttttactaagacaacctagcaaatatattctgacagtgtaaatactcgactgatagttgcatcaatagtgtgacaagaagccataaatgtttgatcagaggtgtaccgcaaacccagcgatacacattct

SEQ ID NO: 10291 - DNA, 1235 bp, Arabidopsis thaliana columbia
tgtcgattgcagcaattgctagaagaaaaaagctgctggatgatgatgtgattatctgtttggctgacagttcctgggaaattctagatgttagcggttcagatgttacgaattttggcttagctaaagtggcagaaatctgcaaatctctccgagctgtggacattaggtattatagttgcttgctaagaatttagtatgctttctctatgttttctgtataagctgtttcctttgagatgggaacaagataagctagccacacatatgtctgattgtgttgggtatcgtttgagttttgcaacctgggatagtttatttacttgtagctctggtcttgctggttctttagtttggggcttctgttggataagtggtgctcgttagctctcaagtatcatataatttgccttattttgttatgcagccggtgcaacaaaatctcatccatgggcgtcttagagcttgtacaacactgcagatcattggagactcttagatgcgggtatattttacttctctagctaactgcagtgaactggcttttagtgtgttgttgttggggtggcttgtctttttgtttatgacttagtaagtgatcatttgggtaaagtaagatagaattgaacccagtgtgtgggtttgcctagggctaccaaactttataaaacaggcaatgagagaaaatttaatattgcaggggatgcccaagcagtgagtccacggcacgcagatctttgagtatttttaagccaaacttgagtaatgttgaaggagaaacatgggaagaaatagacacttcagagattggccatggtggtcaatcattgcgttggcttgtttgggtatgtactcgtccctctgacagactgactaataagctaccagtaaacaaaagaatctactttctccatctgtgtctcttgccactcagtgtactcatttaatttgctttttctgcagccacgaattgataaggattcactggagatgttatcctcggagtgtccaagaatagtggtaaatcccaagccatcacttgtcgcgtacagagcagacgaggttcctcgagaagcactaccagatgttgcactggacgaaccatttgtcaaagatattgatcctaagacgtgggttgttactggagttgtgcagaagcccacatctttcccgttaagcaatgaactgtcaatagcagagaagttcagactagcatttgcagagagagatgcaag

SEQ ID NO: 10292 - DNA, 1540 bp, Arabidopsis thaliana
tctacttgtatcctcttcccacaatgtaaagatcgtaagaattgtatcttccagttctaaaatcgctgtgatcgtttcttggccattcttaaccactttctctacataagtcactgatggatcattcatagtcttgaagttaaactcgtagtggactcttcatcgacatgtttatccttctcgtactcgtccgcggcttccccggctgagactaaagcttcctggcttgggacgaatctaacgaccgtgagttgaaccatttcttgtcccaccatcctccaagcgtaagccaaagcctctctgtcgtctcgacctcctaggaatagcatggcgatttctttctttgtggtttcgccttggaacataaaagattcaaaccggacagtcgtcatgccacggtcaaccaaaatcccaaccgaacaaggcgcgtggctcataacgttttggttgatttcagcgtgcactgcgttaccttcatttaaccgaccgtctgacgtcatattcttgtggtaaggcaataaaatgaagcaggcttgtttatcctcggccaacaaacaaatatcttcgtccatcgttgcgtaaggtgaaaccgcggtaatggtctgaaccattaccccgtcgttgttcacttcgagagctgtgaacatctcagcgatctggtcagattccgctctaactcggtcagcaaagttagctttcggtttggcctcatcgttcataatgagcaacgaagccgtggtgcgacccgttagctcgactaggtggatagcaaaaacgttaagaggagatttcttggtcgggttagagagttgtaatagattggttatgccagagacgttagggaggacatggacgcatgtcaatacacaaagctctgactctcctttgtgtttttgaatggttcggtttttatagaaaatcaacttcttctttggtttgtaagcaatggctaatagtggctgcaccaccattgacatcactagaaacgccaacgtcagatgagtgtacataataacgtccaatgccttggtgtctcgtccagcattgagaatgactagtgccattgttcccttggtattcataagtgcaccaatggctaaaccatcacgcaaaggtatacgcaagaaaatggagcaaaacatcgttgacaaaatcttcaccataaccgacgcagaagtcacaaccgccatcattccaacgctcacggtcctgttcatgtaaccaatatcagctcttaaaccgcagatgatgtagaaaagaggcattagcattcccgagaggaaatcgtggagcttctcttcgatcatttttcgaatgatgtggtcatgagggatcgatagaccgaacaagaatgctccggtaattgagtgaaccccacatacttcggtgattaagctgcaaataatgactccagcgagagtgtaccatacgtgagtgtctccacttgacctccttcgacggtgttgttgaagatccaagcactccaggttggatacaaagtagcagagaagacaaaagctatggttatgctaatgagtat

SEQ ID NO: 10293 - DNA, 540 bp, Arabidopsis thaliana columbia
tactcaatgttcagcccattcctgactcagagaacaaagagcaagtttgtgatgtccaaagaaggcaatgcagcagaaacactctacaagtataacttaaaactctaaccattctattttctttttggcttattttaacctttttggttaaatatatacatatacaattgttgctatttcaggttcattaggccagaagatattccggtgcaatacggtggtcttagccgtcctactgattcgcaaaacggaccgccaaaaccggcgtctgaattctccatcaagggtggtgagaaagttaacattcagattgaaggcattgaggtaatatcagttataagcattttacagaaagccaagtgagtgaaaaatgatttgatgaattctgaaaaatgtgtttgtgtgtggttgtaacattacagggtggagcaaccataacatgggatatagtagttggaggatgggatttagagtacagtgcagagtttgtccaaacgctgaagagagttcgcgatcgttgtcgagaaaccgatgaagatg

SEQ ID NO: 10294 - DNA, 541 bp, Arabidopsis thaliana
  unsure (1)..(541): unsure at all n locations
tctagtaacccccgccagtgtgctctaaagggtgactatttatctgcctggcgaacaacagacactttccgttggccccgtggaaaatgttgtccagttggtgacacaaccgcaactgcgcgatcgcctctggtggcctggtgccttgctgaccgactctgcggcgaaactaaagcgcttaaagactaccaacatgtcatggcacagcttgcttcctgggaagcagaagctgacgacgatgtggcggcaacgattaaatccgtgcgccacangttactcaatctcaatatcactggtcgcttaccggtcaaactggaccctgattttgtacgagtggatgagaacagcaatcccccgttggtcggggactatacgctctataccgtacagcgtccggtgactattactctgctgggtgcggtttctggggccgggcaattgccctggcaggcaggccgtagcgttaccgattatctgcaagatcaccccgccttgcagcgcggacaagaataacgttatggtgattacgcctgagggtgag

SEQ ID NO: 10295 - DNA, 582 bp, Arabidopsis thaliana
catctagtgtaatagcatttggaagcgatggtgacaacttctctttatcaacaggaggcaattgaagtagaatcttatccattatacccatgcaatactcctcatgaatatcctgttttgactatcgagatattggacaaagaacttttggtgtgaagacttgtccagtaactggtggagattcaaggaagatatgtgtagtgtgagtccagtgtcgatcgacactaggtgagtgttggtcgacactattgtctggcaccgatcctacactgtcaaacgtcaacactagctcgtttgtttcgtgctggtgtccatcaacacccaggtgctgtcggtcgacactgtcgaggtcgagtctggtagatatgactttttcacagcgtgacttctcctatatagttgttggtgtcgagcgataccagtggttggtatcggccgacactacctctacagtgtcaaaatgaacctgattcttttcaacttgcaccaactcatcttcacaatccagcaaaacgacatgataagcaattgtaaggctgctctcagtccatctcggagaggttttccgaagaggtgttgttg

SEQ ID NO: 10296 - DNA, 517 bp, Arabidopsis thaliana columbia
agatatgttcccaatgatctgtaccccaatcaaagagaaatcaaatacaaatttgtaacataaacttgcgtaatttccgagctctatcgctcctaaatcctcgaaaatcgttaccttaatgatcaaagtgcgaagtgagaatatctctggagcatcaacaccattcaaataagccttaacttccggtataccggaacctgccgcagcaggagcaacaaaagcggtaatcaccgacgcaaagagagtaagaatcaaatttgtaacagagaaaacaacaaaacccatagcaaacctgagaaacaatatcaacactctattcaaaatccaatcatcaacattacaaggtaagaaaatcgtaaaaatgcgaaagactcaccttccggctatcatcatgctagaagtaacaacaaacttaacaccggcgagattctcaacggcgaggttattagcgaatccgatgagactaacaataatgccgatacaaaaacaaagcagccacttcataaacacgtattgg

SEQ ID NO: 10297 - DNA, 513 bp, Arabidopsis thaliana columbia
gctccctctttcatgaatccgattatggattctgaacctgtgatagatagcgttagagattcttctgcacataactttgagtttggagaagctacagctgatgtgatacgtaggaaaagatccataagaagtgaatctagtacaagaaatagcgcattacgcataaggttgggctctggatctgtagacaaaataaagaaacaagggattccttccacaagcgtgtatgatgatgcatcacttgaagaatggccttctacctcaaaagctgggtccaggtctagatctgcaagcgtcacaaaccaagtcttcatactgggataaggttgaatagtgtctcaggaaaaatctcatggttattgttgtctgaacacgaggaaggctgccgttatatacctcagctaggggatgaagttatttacttcaagcaggtacgtcctcttggctgctaattcgttgttcacttccttgtattaatttgccagctgtgatattaataaactttccttgact

SEQ ID NO: 10298 - DNA, 542 bp, Arabidopsis thaliana
gaagttgttcaccgaatggttgaagttcttcagagacgaggaggcggtcatacagagccgcaattccgggatctcctttggcgaaaaccatttcgactagatcaattgtgacacggaagaatggccattggttgtacatctctttgagcatgttgagattcttactgtccttctgtatcacgcgtttgaatgctcctccaaagccaagccacacgggtaagtgaaacctcgtctgagtccacgcaaagatccacgggattgcacgcagcgactcgattcctccgcttggtttacgttttgatggtcggcttcctatgttcatccttccatactcgagctctggtgttgcctataatacaaacccaaacctgaacttagactctcttttttaactacaatttgtttaagagaggagtaattgagctggttaagaacttaccagacggaagtactcaacaaaacggggctccttgaagacaacagaacggtattcttcagtggcaattatagccatttcatccatgaggacacgcgactcaggc

SEQ ID NO: 10299 - DNA, 602 bp, Arabidopsis thaliana
tagtaacggtccgccagtgtgctctaaagttattcaggaaacggaactctacgccgtcgtgcaacgcttcttcatactcttcgcgccatgcgggcatctcttgtagtgaacgacggtaaacgatcgttgctttttctacgcctggaacgcgtaacgccgcacgagcgcagtccattgcggtgttacccgccccgacaacgaccacatgtttgcccagcttgagcgctgtacccttgttgtattcacgcaggaaggggagtgatttccagacattttggttgtcgcccgccagtttcacaccgctatttttatcagtgccggtggaatcagaacatagtggaagccctgattttttaactgctcaatggttaaatcgggtgagcagccatactcaaatttcacgccgtgacggcaacaaaatcgatatcgtgctgaattaactctgcaggaatacggaactgaggaatgatatttttcaccacgccgcccgcattggcttcgcgttcaaacagcgtaaccggatggcccgctctggcaaggaagtaactgctgccagaccgccggacctgcaccaatcacggcaaccggatggcgtgaaccag

SEQ ID NO: 10300 - DNA, 633 bp, Arabidopsis thaliana
ctagtaacgtgcgccagtgtgctctaaaggtgactcaagatgaagtacctgcacacgcgtgtgaatgagacgctccagatcttccctccgcgctcagccgtattcccccgccgagtccctctagggggtgattggatccttggtggtaccaaagtgggaagcgtgcactgctgcatcagttgttgccgctggaactttgtcgatccagacaagttcattcctgaacgatggcttagtgcccccgcgtactagaacgacgatcgccgcgccatgcaggcgtttaaatcctcaagcctgcatttctcgtaatctctccggctgaagatgcgtctcgtcctggctcggctgatctgcgagtttgatttggagttagctcctggatcggagtgatgggaaggggcgttggtcttcaatgtctggggtacgaagccattcaagatcaattcaccccagtattatgctgaagtgaggagatagcaaaagggcgaggcaatttaactgttcattgacatggtcttgtctttacatcccagtaatattgtatcatgtttgctttgtgtgtacgtatcagaaccctacatagttctaagattcgtactgtacgctaggatatgacgatgtccgatacaggat

SEQ ID NO: 10301 - DNA, 562 bp, Arabidopsis thaliana columbia
ccctaccctaacttaacaacattggacatgcaacttcttccctcttgggggtttatgaaaaaaactaatccagttgcataacacatatctttagatgggccagtcacataccgtcttagagatgttgctaggtcttgggaaaactccccatgtagaaactttgggtttatacacatcagagtttccatctccttcttgctcaacctcctttactttctccgcaaatcttgttttatcaccaacaataaactccacctcaggtaagtctccttcaggaagatagtcaacaacaggaacaagtcccgctggaagcccctcgtgctcttcttatcagcaaagccaagccccatgaaatcaatgctggagactttcaattctttcttcttaacatcattatcttcaacaaccttatttgctaatctaacgaaactttgatctgtattacctgaaacccatgagaacaattctccattaatacagctaaaaatcaaggctttactcctaaatctaatcaaaaaccaatcttttcaaggaacaggccacgaaaaacacatgaatgatg

SEQ ID NO: 10302 - DNA, 723 bp, Arabidopsis thaliana
ctcatcaatataaagagaagagagtggtagagttatatattacacacataaacttagatatagtagtgttatattcttgattaagtaataaagatgaaaggtggaagcatggagaaaattaagccgatattggcgataatttcactgcaatttgggtatgcaggcatgtacatcatcaccatggtctcgttcaaacatggcatggaccattgggttcttgctacataccgtcatgtcgtagccacggttgtcatggctccctttgctctcatgttcgagaggtacaactacaaacacatattatccacatctatgtacatgcatgcatagatatgagaatacttattttaataattgtatgtttgcaggaaaattaggcccaagatgacactagcaatattctggaggcttcttgctcttggaatattagagtaagtctctttcattagaaaaccatcttttctgctttacaattagaaagttcggttcatacaacttttaaaggttttcgtaatatttatcaaacaaaaaaatttggatatagtaaggctttgtatatagaaaacattgttttcgtacatgaagaaatcttataactaattaataataaatacggtgtaaaaatcaaaagttactttttatagttgtgatggcaaattcatgtgttcgggtacgttactttatcatgctaattcgggtacgttacttatggagatggaatac

SEQ ID NO: 10303 - DNA, 448 bp, Arabidopsis thaliana columbia
gaactcaggcctgtagcatcatggtgattctaaacgacaacttaaagaggcaaacatggaactatgaatgtgtatatatcttagattaataatgcacactgcaagctgattaactgcaactccaactatctatctactacttacttcatttaactgataacttaccaacttaagatatacaggatctgatgtccttagttggagacgtggtttcacagcaagtaaccaagcaggaaagcctcccaaatcccattctgtcatggagatgggaacatgtatcagaactttttccgttgtataagcaaatcttccacataatgtggtaaaaaacattggtatcaactcaataagaatcacaacaacacagacctccacagatataaggtccagcacgtagcataaccagaaaatctagtttctcacacagcttgagaaaggagacaagatc

SEQ ID NO: 10304 - DNA, 646 bp, Arabidopsis thaliana columbia
tccctttcgtttttgtttacctgaatgtgcgttgttgttgtcatgttgtctgattctctgtttggtatcaaatcttttctttcttcctctttaatcaagaatgctttatttgatcagcatgattttgatgatactgatttatctcttgtttagctgttccgagcctattagattgttggatccaaagaagtttgcaggttcagttgtaagtttcttcctctttctcttaagttctaatgaaaattgtcctctttaatctgtgtagtaagttttaattattttgatatcttcgttgttagtataggtgtacatatctgaaaatctagctcttttttttactggaacatgtaacatttaacattcttgttgtatagctagccttaaaatctgttactaatctattctgggtgttaatgtatttcagagctttggtgtgtgcgtgtatgtgtaagacgtggtgggtgcaagaggcgagacgcctaagggttgatggtgcaccaatgtggagagcgaattctgaagttacgttcatagctgatgcagtaggatccacaattgtttgctaatgacaagattgtattcatgtgaaccatttgggttttataagtacttagaacatcttatcttggtgtgtaatatgtagaac

SEQ ID NO: 10305 - DNA, 525 bp, Arabidopsis thaliana
tagtaacggtccgccagtgtgctttaaagctccaccatcagttgtgaagaagcgaatttccctgtgccggtaaacagatgtgaatcaaacgttttgtccgcaatacgtaacatttcaaccccctgcaataacctgaaaaagcaggatctggtcgccatcctgcacgatatgttgcgcccactgctcacgcgggacgatttgctgattaatcgccagagccgcgcccgcttgtcgttggtcgagttgctccagtagttcgtgaacagtttgcccggcggcgcactgcatcgcttgatcgttaaacaggatctgcattgcttcctccgcataccgggcaaccactggcgcggcgcaacgccaggctgcgccactggctcgatttaccgtcgaacagtcggagttctcccgcacgtgtctctataccgcttaataacttaatggcttccagtgcctgcaaagtgcccataaccccgaccaccgggccaaccacgcccgccgtgcggcagttgcgttctggctcctggt

SEQ ID NO: 10306 - DNA, 574 bp, Arabidopsis thaliana
  unsure (1)..(574): unsure at all n locations
agtaacgtccgccagtgtgctctaaagagtcgggtgggcggatcagttaactgaatcgatccattgcacactgtcggcggtgacgtaaagggagtaggggtgcagatcgcaaggcttaaattttcaagctgacaatggctgactgacagcgaggagtgataggtgctgtctacgctgacgatttgccaggcgctgcgccacgctgtttaacgatggcttctttgcgcgtccagatgcgccagaacatttccagttgctgatcaggatgcacggcgtccatctcagcgtgttccccgaggctgaatacggcgttcgcagccagcgccagttggcgcngggcgaatcacttcgatatcgcagccgacttcgccttcatcactcaacagcagggcgatatcgtcaccgctatggcttaagttgaaccatagcggcatttccggcgcaaatgcaggtttgccttgttcgccatagatgatctccggtagcggggaaagcgtgtgcgaaacaatgcacgcccgccagccagcgttccgtcgtggacttgcggtcttgccgcgtaaaccggtggcagtgg

SEQ ID NO: 10307 - DNA, 583 bp, Arabidopsis thaliana
  unsure (1)..(583): unsure at all n locations
tagtaacgtccgccagtgtgctctaaagcacaaactatcatcgctgtgcagaacacattgccactcgcccagccagccatcgccgtgtagatagtgcgcatcccactcaacattcggttgcagttgatactcacgcccctgccagacaaaacgattgccgctcacccggtttgcaaatggcacagcagcgtggacaatcaatggcgcaaatggcgttaagctggttgctgaaagatgatcgcgtgacgtcggtattgattggtgccagccgcgcggacgaactagaggagaacgtgcaggcgctgaataatctgacatttagcaccaaggagctggcgcagattgatcagcatatcgccgatggcgagctgaatctgtggcaggcgtcttccgataaatgacctgttaataacgggcgcgcgaaccgcgganantcagatcagtgattatgacgagtcagtcggtcaagatagcccatcacaaatgcagaaagcacaaacgtcagatggataatgacgtccacatcagtttgttatcgggacattttcgcatcgataagacgcgcagtaagtgaatggaagaa

SEQ ID NO: 10308 - DNA, 564 bp, Arabidopsis thaliana
aacgtctaacggccgccagtgtgctctaaaggggctcctgagttccatcattacagcatggacgccctcaaccaggcgtcagactccactaccactgactcgtcgccagatcataacagcagcagctcccgcacaaaccacagctccgagagcaattccccacgacatccatttgccctcgacgtcttcctcgctccgagggaatgctgtactcggttccattgcggcttctgcgatgtgcacaaacacctcttgaatggaactccaggtaacgctcacatgaagcggcggaccaggcatattcaatagagctgtgtattcatgaggctgatgttcagcgcgctgggttgtacggtctaggtcagccttgagtgcgatgtacacactcggaagctcctccaggtgtggatacttcgccctgagagcgggtatatatgcgaatgaatcggggtctgacgagtcatatgtgtatacgatcacatcacactgatcgagtagcttcgcttgattttcaagaatcgcaggttctaactcggcgagctcaatcatgatcaggtaacattg

SEQ ID NO: 10309 - DNA, 622 bp, Arabidopsis thaliana
tgttttatgaacattgggtttcatttattatttacataataataagaagtaatcggaagttgttgatgattgattgtgttgtggtgtggttttgctgtatcaaactcttaggtttcttctgtacaagtagtaacaacaacacatagataacgattgagatgggtaaagttgggtggtctgatttacatgaagatctcatagatttgttagccaataatttatcttccaacatcaatctcctccgtttccgtagcatctgtaaaccctggcgttccacggttgcgaccaagaagcgtctccataaccactttgaacgtaaccttcctactttcaagaagaaaaagactgttgtctctccctccactttcttccgtgtaactctcccttctccatgtcgtaacaaaggatggctgattaaaaacagacaagtctctgaatctagtaaaaataatctcttgtctcctctttctggcaaaaccataaccccttccgacaaaaccctagaccttttgaaggtcgagtgtttcagagattcgtcaatcttacaacgttgaatagttgacagaggtacaaatcattattagggtagagatgttatcgtaggtcatacggtatttaagag

SEQ ID NO: 10310 - DNA, 501 bp, Arabidopsis thaliana
tagtaacggaccgccagtgtgctctaaaggttagtggggataaaccgcctggtagccaggtttgcaatgctgaaccgagagttccccgcgccacagggataaaccggcaacgacggtgagatttcacgcctgacgctggtgttccccgcatcagcggagtgaaaccgggcgcactggatgcgatgatggatatcacttggagttcccccgcctctgctggtagaactcccagctcccattttcaaacccatcaagacgccttcgccaactccttcaccagaggtagcattatccgcataacgtcacggcagcgacgttctattcttccaggaagagccttatcaatatgttggtgattatccagtcttacgtcatgccagctatttcccgccgggaaggcaggtgtttttgcgcgttgctgataaccatccttattcccaagattccagttagtcgcttccaccgaaagtacagcaaatgcccgctttgtcgaactttaga

SEQ ID NO: 10311 - DNA, 1097 bp, Arabidopsis thaliana
cctctagtaacgtccgtataagcaacgtggcaaagaagctataatggcaaataacgttttcttctacattacctacgaggggactgttgatattgataagatcacggacccggtaaggcaatttttctgtactgctggggttgctcagttttagtattaacatgctgacatgacttgcccgtgaatgtttgatgaaggtacaacaacgtgccacacaagaccagatagcttattttgggcaaacaccatcccagctgttgacagttcctcacatgaagaggatgccgttgaaagatgtcctacatatgcagactatttttcgaaatccaaaagaaataaaaccatatactgttcaaaccccagagcgctgcaacttaccagcctcagccattcaggcatcttcagatagtgttgtgattgtggacatgaatgtgccagcagctcgtgttgcacagcacaagtggcaaccaaacactcctgatggccaaggtactcctttcctcttccatcacgggaaggcaacaacaacttcaactagtggatcattgatgcgcatgttcaagggtccagctagttctggaactggtgactggcaatttcctcaggcacaagcatttgcctcatcaggaatcagaagttcgtccgtgattgctattactagcgatggggaaataatcacaggtaataagcaagcaattatacgatcccaagtttgttggtaatatatatttatgggactcatgtgtttaattataggtggacatgcggataatagtatcaagctagtctcatctgatggggcaaaaactctggaaacagcttttgggcactgtgcccctgttacatgtctggctctttctccagacaacaacttccttgtgacgggttcacgggacagtactgttttgctatggagaattcacaaggcgtttacttctcgaacaagcgtgtctgagccatcaactggctctggagcgccttcctccacaagcaacacgaatctggccaatacgttggcaaacaaaggcaaaaaatgtcgccttgaagggcctatacaagtgctctgaggccatcgaagagaattagtttgttgttgt

SEQ ID NO: 10312 - DNA, 1313 bp, Arabidopsis thaliana
ttgtaggctcactggcgatgcacttcaagctattgacaagctaaacatctagcagcatgatgatttgcatgagacccatcgagcgatcggtcctttaaagtttgtttctcacttgtttttaatttgttgaataaaacatctcaagtttaagataaagatgtatttgtgattatggttacaaaagtatcttctgtgttttcggatttgaataaaatggagatttcttcaaactatttataagccatgtttaaaagaagttttcaaggtgtatttaatgtgaataaataaaatttttaaattattgacctcaatttatatagagactgcactgttttttttttaaccggacagcgttctacttacacatgctaaagtacgggccttgtcaaaaagacatagaagtggtaattaaacagataaattggaaacatacaattccacttaaatatatatatggatcattaaaatcttagtattgtaataaaattaagaaaaacatatctcaaatgatgattacatgataatcaaatttatacggtattaagataaaaaaaaaagtgaaaatttatcagttgacgaggcgacaatttttacgaatctcaccaccttgatctccaagagtaaggactttgatggaactcatctttatcatggaccgaccaaactgagcaagaaaagcgccggagttttggaaaacactagcaatgtgagcggcggagggatcagtcaacaaggcggcgtcggaggtgaagagtcctttgttcttgagtagagagacgaagtagccactgtcaaaggcgagaggaccagtagggtccattccgaccactgcggaagggttgagtcttaaagatttgtcggagcattcggatttgaggaaggaggcgtaactagggtttagggaaggatctgtgtccccttttccggtgaagttcaagagccttctgccaaacacaccgcaatgtgctattcctatcgtgtgtgctcctatttttcatacaatttcgtttctttttaatatataatcgaaaaattaggtgattaaatgaatgatttatatgaaaatattagtgtatcattcctaagaagattaattgacttttgaataattatcacgtgcaacgccttttccaagattatcctcaaatatttgatggtatatatacgatcggatattatactttctcttgaagattggaggaaattaatttgtagcatcccatacacttcctaacatggacatgcacgtggtctgatatcccgcgattttcttatagttttatgcgttctttagttttattatttgtcccaat

SEQ ID NO: 10313 - DNA, 613 bp, Arabidopsis thaliana
ccccagaaaaaggttctctttgaattcaaactatgattcagatgacaatcttttcatgatattgcgaaactgaaaacttggcctttgcaggaaccgatcatccaattccacatctgtacgatgtaaacacatatcagtgctttcttccttcaaacttccctgacagtggagtaagtggagccattaatcaggtacgtcacacgttatctgataaatgttaattgtgcgttctataaacatctcttaagatgatcaaggattcatggctgtgagattcatggtttttttaggtgagatattcttccacgggatccatctacattacagcctcaaaggatggagctattcgactctttgacggggttagcgcaaagtgtgttcgctccattggcaatgcacatggaaaatcagaggtcacaagcgcagtgttcactaaagatcaaaggtaaaatgcagactcaatcaattatctctgagaatcactagttttcccaatagttcatggcagaacaattgattgatcatatggcttttgttaggtttgtctctcatccggtaaggattccacagttaagttatgggaaataggctcaggtcgaatggtaaaggaata

SEQ ID NO: 10314 - DNA, 632 bp, Arabidopsis thaliana
tatcgaaagaaagaaaagtgaaatctttttttgaccgttaaaccgtgatctttttgtgaccgttaaactgtgattttgtgaccgttaattgtgattatcaattaccttttcttgtgcttacaaataagagtctcaacgcttcttctaatcaaagccgatggtgataataaccgatggtgatgatctctgaaacaaccgtaattgatcggagcgaaatcacatcatcatcgtttcgtgattgaatgagaagttacaaacgttgcactgtaagcaccttacacattttaactaattaagctttttcactattgtaatgtgttcataacattataacaacagaacagaaaagaacttagaaaaaattgtcaaaatagccaaatcatttgaatgtcagatacatattgtcagaaaataaaaatatcttgctaccaaaattctcaaatttgtatctagacatatccatcaaatacaagcaattgattgatctgatcattagacaatggcattggcagcactagcaatccttggccaaagatcagcacactctttcccaataggaccagtaattgcagaacctttcatttctccttggggttgacaatgactccagcattatctgtgcgacaaaaaac

SEQ ID NO: 10315 - DNA, 434 bp, Arabidopsis thaliana
cctgcaggtcgagtaacgtccgccagtgtgctctaaaggccgcttatcaagcggtctattagcttcaggttaattgcaacgtggtaagcattaaccttttagtggggtgttaaatggatgaattcaaaccagaagacgagctgaaacccgatcccagcgatcgtcgtactggtcgtcctcgtcaatctcctgaccgttctgagcgtactgcacgtggcgaaccgcagatcaattttcatgatattgaacttgatgacactgacgatcgccgtccgactcgtgcgcaaaaagagcgcaatgaggaactggaaatcgaagaagaaattgacgaatccgaagatgaaaccgtggatgaagagcgcgtagagcgtcgtccgtgtaacgcaaaacagcagccagtaaacccgcttctcgtcagtatatgatgatgggcg

SEQ ID NO: 10316 - DNA, 561 bp, Arabidopsis thaliana
tagtaacgtccgccagtgtgctctaaagaataactgatctgaaaataggttgcgggttttccctctcactacccctctccccaaagggacgaggggaccgtccggtgcagtttttgggtttgacatcaggctcacgggaggctgtacgtcgttaattaaggtgccttgtatgcaaatcaccaatatgcattgcagtggacagaccgtttcacttgccgcgggggattatcacgcgaccattgtgaccgtcggtgctggtctggctgaattaacctttcagggttgtcatttagtcatcccgcacgaacccgaagagatgccgctggcgcatctgggtaaagtgcttattccgtggccgaaccggatcgccaacggctgttaccgctatcaggggcaggaatatcagttacccattaatgaacatagttcaaaagccgctattcacgggctgcttgcctggcgagactggcaaattagtgaattaacgccaccagcgttaccctgacagcttttctggcgccagttacggctatccgtttatgctggctcacaagttgttta

SEQ ID NO: 10317 - DNA, 1085 bp, Arabidopsis thaliana
tgatcccaagctggagtagctcagttggttagagcgtgtggctgttaaccacaaggtcagaggttcgacccctctctctagcgtttttataaagtgttttttatgctgcttccgtcctactcttgttttgtattttctatttttctccaatcaattgatgatattcatacaaattagcacaaagaaaaaggatacactcacatcaaacaagcaaatatttaaaacaacacaagaaaaccaaatattaaaaacattcataatgaaaagatattttaagcagaggaaataagaggaatgcgttatgatttgacggtttcgggcttggatttggtgataaaagcgttggagtagataacgtcagcaagtccaccaccaataagtgtgccaatccaataaacctaatgtcctgaaaaatttccaacggcaagagatgatccaaaagaacgtccagggttcattggaccaccagagaatgggccggctgcaagaatgttagcaccaacgatgagtctgatagcaagtggagcgatggttccgagagtgccattgttggagtcaatggctgtggcgtaaacagtgtagaccaatgcgaatgtgattatgatctccatcactactctttgtgttgatcctactctaaccgcaacgctgtggattggaatcgcctgcgtttaaaagaatttttgcgttttgttaataatattaagaaaccaatcctttatggtataatacttacaaaaacattatatgttaatatgaaagtggtaaagtatatatggacaatacaaaccacttggtaaaacatatatcttcacaaatgataattacggtgattacacctatgtgtatgagaaaacattcaaagctagattacacctatgtgtatgagaaaaatgtgacaatcgtcgatgttgcttacaaaaaggttgattttattcaaattaacctaaaaggcctacacctactatattttagatgggatgaggcccaatacgatttaaatgcaacatatctttttagtcattcacgttcactaacttaagcaactctcaactctatatttgctctacctaacgcttcatcag

SEQ ID NO: 10318 - DNA, 556 bp, Arabidopsis thaliana
ctaagctaaaaacatgagagctacggagagtttagagagacgtaccgatagatagaggagattgttaacgtcacggccatgagacatgaaaaggtcaaaagacatttgattcaaagtcccgattaacactccggcaagccgactggcctgaaccgatcctggtcggtccaatctcatgttcctgatttttcatagccatcatgcaattttatattacagatattttcaaaaaataaaataaataaacaatatagacaaatgaatcaattagctgattctaccagagctttctttcttctataacttgacttcccttcagttttcatttttcaaagattatatatatcacacacataaatctcaaattttaccttttgtctgcttctaacaaagatattgtccttttgtttgtttgctgtatatgaactttcatgtcttacagttcggtttcgagatgtattttgctttgttgtcatacacgtcacaaattctgatcgttgtgaaatgtgaactgatctctaattttaaccaataaaaaatataataatatatatat

SEQ ID NO: 10319 - DNA, 966 bp, Arabidopsis thaliana
cataacaatctagtagctagtcatagatacaagtgattgctatacatataacaaacacaagaaaacaccaaaagaccacatatccttccaatggccccccttcaacgcaccatcgtcggatgatttcacaccaaatttcaatagacaacactctaacaaaagaaccatctccaaccgcaaccgcaacaactttgttatccttatcagcgatatccgaagtggaagatgcaaagtgtgagtgttgtggcatgtctgaagagtgcacgccggagtacatacaccgtgtgcgttcaaaattctcagggaagctgatttgcgggctgtgcgaaaaagcggtggagggggagatggagaagatgaacaacagtgaagtgctgatggagaagcggcgagaagaggcagtgaaggtacacatgagcgcatgttcccggttcaacaggctaggccggagttatccagtgttgtccaagcagaagcggttaaggaaatgctgaaaaagaggtctaagaagatggttggagccaccaagcctgaaaaaggtggcctcgctaggagctctagctgcatgccggctttagctaaggagcttaaagatcgtaccttggttaattagcttatttgtatactcacgtacacgtatgttatgttcatatatagatttgaatttacatgcagacggagatgtgtattaagtgagttatatatgtagttaaaaaccgatggaagttttacgtgtgtaaattgtaatgtataatattttttcgtcaagtttattatcaatcaaacgtccgttttctcactattatatgtatatgttgatcaatcatcgtcatgtaaaagatttgagactttgacatcaaactataagaatatcgaaccttaatatatacttatttaaattcttgtatacatgattgacataagtcggtaaacagctgttttcttatagtaacataggtcgatgaa

SEQ ID NO: 10320 - DNA, 1058 bp, Arabidopsis thaliana
aatatataagtcaaattcaactccacttagtatggcctttttgggaaggagtagggttgaccactttcccaaaacagacaatatcacaatatcatactaattgggagttaacttggtcgtggagagctcaacgtaaccatacagtttaaagcttttgtactctggttggttacatataatatactgaagaaagttttgttattcatataacggccatcccactaaaccgttggtttgtggtttcgatggcacagcggtgatacagacggatgtattcctgtactcggaactcggtatagcttaaatgcactcggattacccatcaaaacagcttggaggccatggtaccatgagaaacaggtcaatacatgattacatatggatctatttaacgggttattttagattcttatttgagtttgattagtcctatttgatgattcttatatttaaaacaacaggtaagtggatgggttcaagaatacgatggtctaacatttgctacttttagaggagctggacatacagtgcctagctttaaaccaagcagctctctcgcttttatctctgcgtttgtcaaaggtgttcctctgtcgtcatcgagggtagagactaattaaatcaagaattaagaagatgctttggtaatctaatatttgagtgtttaagttttcagaaagtttgtgagattgtgggttttgttacgttaaaaataaggatctcattgtaagagagatgatgtgtgttaactatgttttctcttttcttttctaaaaagtgtgttactatgtcactttctagtaatgatccaacataaccttaaagctgtttggttctatcttccaccagatctgatctatgtttcaccaacagatccaatctctgtattagcttttttgcattttcaaaatctcaagaatgtacgtttagtgaatcataagcatatcatctctcatttacactcagcttccttcaagttaaaattgagtctttttgcctatccataaatttcactttgatcttctctttagtttgcaccacatcccatttttggcatg

SEQ ID NO: 10321 - DNA, 250 bp, Arabidopsis thaliana
tcgtgatccgcctgcctcggcctcccaaagtgctgggattacaggtgtaagccaccgcacccggcccggattataatttattttatcagagacatgggaagactgaagtttgagaaaaagagaaaatctcattggtgttagctaccaatgaaaagtgtttagaaaaaggcacttttactactatactgaaataaggataaaattttcccatacaaagaaatttaggacaaaagtaagaaagtaaaaagta

SEQ ID NO: 10322 - DNA, 579 bp, Arabidopsis thaliana
catttttccttttcttcttttaggaatattaatttgagtatgtactatcattcttctcgagaaggatcttgaagcatgagaagttattcaaagcatgtcttgttgttgttgttaagatcgctctcttcttcttcctccttttgtctttctcacaagcttcattccttcaactcaaaactttacttgctcatgtcatggccgtcccaatacttcaacgtttgacagtaacattactttctctcctccatctcccacctacgtcttctttcccgggacctggtcagttctctctcttacttcctcctttggacccatttccaaagactttaccttttaagagattcaagatctgggttctattgtgtgacattacgtgtaaagatcaccgagctagtttgcatacaaattgcgtgttgggacgctttgcagggctcatgccaaaaagcgcaatatctctttccagcagatcatatgaggtggtgctaaattatagtatatctcgtccattttgcgtgatgatgatgttgatgcactttgttgtatttgtatgctacacttttcagtggagttgaagaggtt

SEQ ID NO: 10323 - DNA, 454 bp, Arabidopsis thaliana columbia
acacattagtgtcgattgacacaaggcaattcgatctagggacgaatcagctgacgagacagtgtcaaataggaacataaaggatcgttcatcacccgacactaacgagcgacactcatctagtgtcgatcaacactaaccagaacagacacaacatgaggagctagtaccaatttattttccagaaattttaaccactccaaggcgtcattctaagcaggagctcaacagtaagaagtgcattgctgagatggacaagcgattgacaaccattcgttgtttggaaagaatccacatatctattgtctgaatagaaacaaatggtttgtcaagaagggatattgtagagtacatctatactatcactccgactcggagatccctgaagctcctcgagtcacgttggtaaagagatccatagttcgacgctatggacatagcaacatatagttag

SEQ ID NO: 10324 - DNA, 602 bp, Arabidopsis thaliana
aggctggagtgtagtggcgcgatctcggctcactgcaagctccgcctcccaggttcacgccattctcctgcctcagcctcccatgtagctggggctacaggcacccgccaccacgcctggctaattttttgtatttttagtagagacgggggtttcactgtgttagccaggatggtgtcgatctcctgacctcgtgatccacccgtctcggcctcccaaagtgctgagattacaggcataagccaccacacccggcctcttaatatactatattttaaaacaataggcatggagtagtgagttggataatcaggtaggacgccttgtgaaagggacaaatactcaaagactctagagagaagtaaggattcctgtggacaactgggggaagaacatctagggagagggaccagctcactcaaacaccccatggtggtttatgcctgctgagtctgaagaatagtgaggaggacaatatgacaggctgagtaagcagaagaacagaatgttaagagggcttaaggagctaaatggggctagacgaggtgaaactttgtagttcactggaaagactttgaccttttacttcccaagagtgaaag

SEQ ID NO: 10325 - DNA, 546 bp, Arabidopsis thaliana
tagtaacgtgcgccagtgtgctctaaagtagcgttgccgaataatcggcccaattttttcaaacgtccctggagagataatatccacatgcgcacaatcctgacgatagatatccagctccgctatccacggcgaccaggcgcgttcgggactcataccttcctgaagtgtgcgttcagcaacaaacagcgtcgctttaccgtcaaacggtacgctatgagcagtcgtcagcaggcgcacagcatcagcgtagttgccttcaatggtggtaaacaactccgttgaagtacttccctgctgtgctgccaggaaggcctcgcgttcgcggttaatctccgccagcacttccgggtccagaccattagcttctttttcctgccagttttgcgtttctggcggccaggtatccagcaagccaagaaatgccacctgttcgccacgggcacgcagtcgcgccgcaataccctgcgccacgtaccgccaagggaataccccagcaggtaataagggctatgcggttgttgttcaagtaacgttgccagatgc

SEQ ID NO: 10326 - DNA, 549 bp, Arabidopsis thaliana columbia
cgaacgatgaaactgaaaatccggtttaaagatctggtttagtagtaagtaccaggacgttgagaatccggaacagcggagataaaggacatgagaccagcacggccgaagaatttagcgacgaagacggtggcgtggccttgagcatcggcggtttcaatccattgaatacatggccggagatacaattctcgctgcaacctttccggagaacacggcaaccattgcagctcatcttttcagattcaagttttaagttatttcctccggtgaatttggagtttgtattgttttaatttaaggttttaatctcctgaatcttgctgatgtctgggagaagaagaagaagaaagtgatatatttgcacagacaaaaaaaagagaagagagattaaaatgttttatgaagatagacaagaccacatatatatatatatatatatacacacacattattagtatatatctaagatcagattggaatatttttgagttttttttaaaaaaatataggaataatagaataatgaagagacatagagaaaaagga

SEQ ID NO: 10327 - DNA, 711 bp, Arabidopsis thaliana
caccttacacatctttacggtcaatcataaaatccctaattcaattatcatcctgtctctttcgcttctcaatttctgatcaaacccaattcccttctcgaaatctagtttctctacagtgcgaaaatcgaggttaattgtgttcgtcggaaacgatggcggtgagtttgacggagggagtggtaatgaagatgttgaacggagaagtgacgagcgagacagatatgatgccagtgctacaagtaacggaattgaagctgattcagagcaagcttcatcaaaatcaggaatctagcaatcgatataagtttttattatcagatgggactgacttggcagcaggaatgcttaatacttcattgaacagtttagtgaatcaaggaactattcaattgggttcggttataagactcactcactacatctgcaatctcatccagactcgaaggtaatattgcaatctcttaaccctagattcataattgtctaaagaaccaatcttttttatttttaaagtagttctgatgatgatgagttacaggattgttgttattatgcaattggaggttattgtggagaaatgtaatataattggaaatcctaaagaacctgggcatagctcgattaatccacaacgtggtggagttacacacaaagcaatggtggttctgagcagcaacaagctagaaggagtgatgtgaatggtgggag

SEQ ID NO: 10328 - DNA, 882 bp, Arabidopsis thaliana
caaaagttcaaacacactctaagttaacttgggatcaaaatctcaagcagcagagtgcaatcacatacctgattgtttgacaggttctggaaagcgacaaagccagtgttgggtgggacaagaggaccccagaacgaagcaaggcagtgcatgtgttctggagtatacttgagcattcgatgcctgccattgcgatcttcaatggcaaatacaggaatagtctgatagcgtctccatccaatagacacaataataggatctcttgtctttagtactttcttatgccacctatgtttcttcaaccgggcctaagtagaaagatacatgtgatacgataagcatctatcaaataaaatatcatctttcaattacctttaaataagaaaaagatatttcatcttttaagctgaaaagagcagtgtgcccatttggaccttcatttgggccagaagaaaagaaaatctttgtagcttacctgcatatatccaacattgtcctcgccgaaaccaatacctccaactagaattggatgacaaggatcaaagaattcaaccatctcataaggaacattgtgaatctccagcctcaagtatgttccagtccggaatcctgctaactcaattcgagtttcctcgtcaagatcattgtattctaactcattcctctgttttgtaatttcctgcgcttccttcaactgcaaagcaaatagtgagttttaaaacagtggatatatatcttagctgcctgcagcaaaatctacttactttatcagcgtatcctggttcatcggcttgactacgaggattgttcccatcacctttatcattgtcatcctcctctaactcggatttattgcttgtacaacgaagttaaggttgaacc

SEQ ID NO: 10329 - DNA, 528 bp, Arabidopsis thaliana
  unsure (1)..(528): unsure at all n locations
ctnnnnnnnnnnnnnnnnnnnnnnnctaaagctgtaacgactgcgcacgatcttttcactcaccccaccgattttgcgccgcaggtcgctaaagcgatgagtaccttcgcgtaggcaccagaatcaacaccccccaacggctggtgacgtgtttcaacacctcgcgcgacgggcacctgttccgcaaagagattaccctctttcagttgttgcgacaggctaacctgactcatttcatacttacctttttgtacgtacttactaaaagtaagtttaggtgttagcgtatttaaacacaagacaaaacgatggagacttcccatgatcgctattactggtgccactggccaacttggtcactatgttattgaatccttgatgaaaacggttcctgccagccaaatagtggctatcgttcgtaatccggcaaaagcccaagccctggcagcacaaggcattaccgtgcgtcaggctgactacggcgatgaaccgcactgacatctgcacttcagggagtggaaaactact

SEQ ID NO: 10330 - DNA, 483 bp, Arabidopsis thaliana
  unsure (1)..(483): unsure at all n locations
tagtaacgtccgccagtgtgctctaaagtaccctgcacgttggcgcataactcaccatcaagtagcaggtaatctgccatattcgctttcagcgagttgaagatttgcagatcgcggcccacctggctgagcactatccgacatcccgccagccgcagtttttgcacgctttctgcgtgatctaaaatcgcttcagccggaataatcagatgtaataaccgtggtggtagagggctattttccagctgctcaagcagatcattcaccagcgtggcgctactcaaaccggcaacggaaagggggagggagatgcttatgcctttactggcaaccgcttttgcgctctgctggataaaattcgtggaatacccggcggtcaagagcatggctaagcgccggatcgctgaagctacgacgaaatgtctttagagnnnnnnnnnnnnnnnnnnnnnnnnnnnnnnnnnnnnnnnnnnnnnnnnnnnn

SEQ ID NO: 10331 - DNA, 444 bp, Arabidopsis thaliana
caacagcttcaaaattctggctcttcaactgaaaaatgagaagaagatgggaattaagcaaatcagaagtgatcgaggaggagagtttatgaacgaagcattcaacagtttttgtgagtctcaaggaatctttcatcaatactcagcacctagaactccacagtcaaacggagttgttgagagaaagaaccggacacttcaagaaatggccagagccatgattcatggaaatggagttcctgagaaattttgggctgaggctattagtacagcatgttacgtgataaatcgagtctacgtaaggttgggatctgacaagacaccatacgaaatttggaagggtaagaagccaaatctgagctacttcagagtatttggatgtgtctgttacatcatgaacgacaaagaccagctgggaaaatttgattctcgcagtgaagaagg

SEQ ID NO: 10332 - DNA, 555 bp, Arabidopsis thaliana columbia
tatttagtttaaaacatctcagatatatctacattattagctttttacctaatatatttcttattccctgatcttgcaattccattgatgaaatttacttggttagatgcaatatatctcatagtgtgcatttcaagatatgataacaatacacatgaacacaaatacaagaccaactatttttcccaacagagtacacaattaccacaaagtcttgtgcaagaaagttaaatccaatgttaggaattgaacaaagaagaaatgtcacgtcagaagagtttccgttggaatcctggatcgatgtttcttgataacttggtaagcttcatgggagctccagggcaagctgcagagacaggtgtgtgagaaccataaccagattcctctgtttgaaggcagagaacaatactaaagatgttttgatacaaagactcaatgatttcttcatcggaacaagtagtaagagaatcaatcctcatgtgattattgtagtggtcacagagtggagaaattgcaatgattcactgtctcctttagagatcataggagtatggg

SEQ ID NO: 10333 - DNA, 570 bp, Arabidopsis thaliana
tgaagcaaagtcacacaagatatagtgcatatatatatatatatatgtatatataaatatagtctatacaatggtaatattaaagatttaaaggataaaaattggtgaacaaaaagacaaaaagaaatacgaacctggagacttcaggcatgagcattcgccagtaaaacgttaacgctgcgggaagagctccgatcataagaatcaacctccacgctatatccgattccggcggacataagtctctaaccccgccacgttcgtcttctccgaactcccctctccagcgttcttgaacgccaagcacacaaccatagtcacagcagagctcatcaaaatccctaacccttgcatcgagaacacggcagcgataaaagctccacgcgtccttttgttagcaaactccgacataatcgtggccgaaagaggataatctccaccgattccaagtccaagaacgaatctaaagaatccaagactaaccataacacaagaacgtcgagtcgtgcaaacagagaagcccaaccaaaggagctaaacaccatgatcaagagactaagtccatagact

SEQ ID NO: 10334 - DNA, 283 bp, Arabidopsis thaliana
  unsure (1)..(283): unsure at all n locations
gctttaaaggttgctggagctgaggaagaaaaacaagaactagttgaagttgttggagttgtagaatacttaaaaggtaccaccagatctcgagccttggtgcccgtattcctgctggtgtacttatggcggggcatacgggggacggtgcgtcttagcttagctcgtcngatactaggggtgccagtgttcagtactttagtgtctcaggttctagaaatgtaggtctgattgtcagcgatggggcttgtcgcgttcgctcactatttgaggaagccagcac

SEQ ID NO: 10335 - DNA, 350 bp, Arabidopsis thaliana columbia
ccaaaaccaagtcaaaggcccaagcagaacgccaagccaagagggcaggcccgacaaaaccccggaggaaagcccaacacgcagaaggccacaaacacggaacagcacgtcccgacaaagggggggaggacacccagagacaaagagaagcacgtcagcacacccgacaaaccagcacgacagctcacccgaccgaagcgcctcgacagccggaccgactcaagaagcacgtcagcacacccgtccaaccagcacgtcagctcacccgtccgaagcgtctcgtcagccggtccgactcaagcagctcgtcagcacacccgtcaaaccagctcgacagccaacccgcccga

SEQ ID NO: 10336 - DNA, 973 bp, Arabidopsis thaliana
gacattggactcgcagataacctgagtagtctcgtggttcaatatttccgaagttttcagattcacggcctgcaacacaagagaaaacaacaatgtcacgggaagatcaaaggaaactgataaagaaccctaaaaaaagaaggagaaaacaagggcaaacctcaagcgctttacaaactttttcaacctcaggagcatagttaatcttcggagaagtcataataagctcgacaactcctacacagagttgcctggatggttcaaaaacaggcaaagcaaagttccctgaacattatagtgcaaggcgtgaccaagccttgaaaactctttgctggagtaatactgcacattaggagtccactcaggtaactttttcctgaaaacgcgaccaggaagcccgagctctccgtcccgttcaccatcaagggaaaacatatacgtcaatgaaaccatcctgtattgattaaggccattactattgggaccaagaacaaatggctgtcctgaagttgtaagaacatatcgaccacggtttttgacaggcgcccaaacctgagcaagaacatgttgttgtccagtagattccttgaagtatctaagcgcttgagtcatcttggctttgatggcacagtaactatctggattctccaaaggcattataccccatgacggagaaggaacctgattattctccttggtcgtggtttcagattcagaacctgcatttcatttgattctataaattccagatctaaattctactaatccgtgaagttccaataagattccaatgaaggagaatattactatccagagattgaagcatattcactacattatctgaattggattctagaatctaaactttgcatgaagacttactagcgagtaagacggaataatcggtgaagcgagtgggagctactgcggcggagtaaagctcgccgccgacatctccagaccatcaacaaca

SEQ ID NO: 10337 - DNA, 500 bp, Arabidopsis thaliana
taccctaaacttaaatttgactgataaaaacaaaagtcttcattcctcacacaaatatgttttatcttacatggcttacctctgctttttcatggaggtctttcaaggccgcatgcagaggagtatctccatctatgtccttcagaacatatatattcagtctatccctatcttcttcaggcactctaggtgaaaaatataatacagaagcaacaagagccttcacaactgctgaacggccagcacgagcggccacatgaagcggaatctgatacttcgagtttggctccaataaaagacaaggacattcagtgattatgttcttcactagttcaagatgacccgaagcagcagcaaggtgaagaacagaatctccgccatcgctcttaagacatgccattggcgtttcgtagcttttcaacttttccagaagctctatgttcccgctctcattgcgctaaagatctcaggattcatcggcacatattcaccagggaggt

SEQ ID NO: 10338 - DNA, 524 bp, Arabidopsis thaliana
ccccgggtaccgagctcaatgcgctaaagatctcaggattcatcggcacatattcaccagggaggttgaaaagatccgaaaatctgagactggtaaggaactctggaacagattcggtgtcaagacacacaaccgttgacctatgtacctggattgtatctagacgtgcttcacaataatccatctcaaactttaatcgtgacacaaattgtttgaaaagaggattttacttttcagttcccccaccaagagaaaagtaaatgattccaagaagagtggccaaagagagacttaccaagtgaaagaatgggataagacaagaggatttgcttaagcttgtagggagagagagataatataaattgattcatctatatgaaaaccctttgtttggagatcactgtgagtgtgatggtcacctatagattagtggaaggtctttcgaattgtttaagaggaaatagtacacgcaggaatggaggtaaagtcattttcaaagaagcctcaaacctgagtacctgact

SEQ ID NO: 10339 - DNA, 536 bp, Arabidopsis thaliana
tggtttccgtaatattataccgaatgtaaaccaggcaatgaaacagtcggtgcagtctgatctccggcatcaagtttccttactagttcgtccaatgcaacaggttagcttccttccaattcatagatagttttattacatcatgtcttggtgaagtcttattttttccactcgcattgtatcgatccaatttaaccagcaaaaccagacattgcgttgtaatccagtttatgaattgaaatctgagtgatattaacccgttttctccaccaggctcttgatgctgcgttccaacactacgaatcggacttgcagagaagaaccgctaagattacatagagaacgttttgtacttggaaagaaagagatttccttcgacaaaaaattaaacattggactgaacatttagattttgtagtgtaatagataagattcttaaagaacttgagtgagaagcatcattagcgggatttggccaagaatgttgcttgtgctacaaggaacctctcaataccccaattgttttttttttgggt

SEQ ID NO: 10340 - DNA, 724 bp, Arabidopsis thaliana
ccctcatgatgcttatggcttatctttcatatatgcttgctgaggttagttttgtgaaattttataccactgtcataatttaggcatggagacaatcagttgtatcttaagaatcctttattgataatatattgtttgggttgcagctattcgccttgagtggtatcctaactgtatttttctgtgggattgtgatgtcccattacacttggcacaatgtcaccgagagctcaagaattactaccaagtaatatgacctccattttctcttgaaaacaaattcaaatgttttccatcttcaatacttacttactttctatgcatttacgatgagacaggcatgcctttgctactttgtcgtttctcgctgagacttttattttcctctacgttggaatggatgcattggacatagagaaatggagattcgtgagtgacaggtatggtcactcagtagaaacataaactctctttttgttcattggctatatacataatcttcttatgtttccattgtttggttttggacagcccggggacatcagttgcagtgagctcaattctaatgggtctagtcatgcttggaagagcagcttttgtctttcctctttccttcttatcagacttagccaagaagcatcagagcgagaaaatcagcatcaagcagcaagtacgaacaatctactttgtctattgaattcaaatttgctgaggattgttgata

SEQ ID NO: 10341 - DNA, 526 bp, Arabidopsis thaliana
tagtaacgtgcgccagtgtgctctaaagccggggaatgggttatctatcaatcatttttcaaactgagcaatagtggcgcgtttgttgcccgtctgctggggccgctgctcgctgtggggctggcaattaccggtgcgctggcggtgatgtgtatggcgaaagtctatggcgtcacgttcctcggcgcgccgcgaccaaagaagccgaaaacgccacctgtgcgccgctcctgatgagcgtaacgtagtggcactggcgatttgctgcgtaattggcggtgttgctgcgccgtggctactgccgatgctctctgctgctgtacctctgccgctggagcctgctaacaccaccgtttctcaaccgatgatcacgttgctgctgattgcctgcccgctgctgccattcatcattatggcgatttgcaaaggcgatctgtttgccatcgcagttccgcggtgcgccctgggtgtgcggttacgacacgaaaaatcaatggtgattacgctcacggttttgcatgccggt

SEQ ID NO: 10342 - DNA, 658 bp, Arabidopsis thaliana
  unsure (1)..(658): unsure at all n locations
tactatgcgtccggtcgatgtctcgttacgtgcgttcacgcgcggtgcaaaatccacgggatctggcccgatttgcgctcaaagccagcctatatagagctaagtacacaaaggcgttcttgttaaaagaggttaagaacttggagacgacgttgaggccccaatactacgcgtcggttcacgactgcttggaccaaataagagacagcgtgaaccagttgagtctagccatagcggacgtagacagagtcagcaggagacagggaaagagccaaggggatctacactggcatataaataacctgcagacgtggacaagcacagctcttacagacgccgagacttgcgtgacgcagttcccgggacgtaggatgagcaaacttaaggctacgattaaaggaaaagtgaagaatgtggaggaaacaactagtaatgcccttgccttcatcgagcactacgctgctgctaggtaccgagccagacgtccttaagctgagcctgtgtgtgtgttttgatcattttgccttaaatttcttcttacttcttgatatttgtgtgtgtaattgttaccagtcgtgtaaaccaaaagttcatatatgaccgtagattgatataattcaataacaaggaaagttctaagcctanaacaagcaagaaa

SEQ ID NO: 10343 - DNA, 496 bp, Arabidopsis thaliana
  unsure (1)..(496): unsure at all n locations
nnnnnnnnnnnnnnnnnnnnnnnctaaagaggcctgataagcacttgtgcgcatccggcaatcaatgcctgatgcgacgctgtccgtcgttatcaggcctacaactgttgccgacctgtaggccggataaggcacttgtgcgcatccgcaatcaatgcctgatgcgacgctgtccgtcnttatcaggcctacaactattgccgacctgtaggccggataaggcacttgtgcagcatccggcaatcaatgcctgatgcgacgctgtcgcgtcttatcaggcctacaactgttgccgacccgtaggccggataaggcgctcgccgctantccgtgcagtgtttacccgcggcgactcaaaatttctttctcataagcccgcacgctctccagccattcgctacctgctggcgtatcgtgacgttggcaatacatttcccagaccgcctgccacggcaacgatttctgctcttccagcagtgccagacgcgcagtgtaa

SEQ ID NO: 10344 - DNA, 939 bp, Arabidopsis thaliana
  unsure (1)..(939): unsure at all n locations
ccgttgtatacatagatgcaacgtaccagacatttttcgagttgaatctcaagctaaaagaaacgatcttacctttttgttcgagtcaaactcaaatgatgtcaaaaccgttccttttataaattttacgcctttagccctgtagtagtcttcatacaaacttgcaatcttgggcgtaaagagacgtgccactgtcataagaaactaaaaaggtcaagctaaatacacaacctttctctcgtacacgtaagtttagtaataatcgagagaacttactgcagtgagcctctgggaaaaccatcgtcacattgattttgttgatcactaaagatgcagcacactccataccgatatagccaccgccgataacaaccgcattcccgttggagcttgattgaatcacagtggcaagcctatttgcatcagctagatctcgtaagtaacaaacattttcagcatctgagccttccaccccaaattcttcaagcttcaacgcctagttgcacgagccaaatgtgacaagaataaggccacaactttagcagtttaatgttctatgttttaaaatagcacaaattcctttggcaattttcaggagtgagcagatttgcctacaacaatgttcacaacatctactagacattcaactattacaaaaacccattgtcttcagccaattaattacaaaatcataaagaggataatacgttgttaaaaaccagtgatttatcgtttatgctaatagtcaccggaacacactcttactttggataaacgaaaacataaatattattgtgcaagccatacccgggcacctgttgcaatgatcaagaatttgtaacttatagtctcccctgtgctcgataaaagagtcttcctcctcacatcaacggacttaacacgagtaccaagtacgaattcaattcctgacaanagtat

SEQ ID NO: 10345 - DNA, 906 bp, Arabidopsis thaliana
cgcaatataataaagataaccacttctacagaacaagtgaataaactccatcatgaagccataaaccctaaatttctacctcatctaaagctaactactttcagcacaagtgaaaacttaagttcaaaactcttaaatctccaacaagaagcagatgaaagttatcaaaaccccatcaaggtcatcacaaatgtactaactagtgacaagctatactaaacagataagctacttcaagaacccaagatctcctccttaatcttaaagtacctaaaggtttaacttttaagccaagtataagacttaataccttccccatctcaagataaacagcagcacgattcgtcaaatacgaaatatcctcatcatcgagctccatggccttagtataatgttcaacagctctcccaaaatccttcttcttataagcaacatttccttcccctttctccttcaaagccttctcctttctctccttcttctgcctctcctcctccgtcaactccataggttccatctccggttcaggctctttcctctcatcagcctccttcatctcagtatcttcaccactagatccaccaaacttcacattcaacaaaacccctaaagccttcataactctcttatccttcatatacaaattaagattattagggttcctctgaatctccttcatcgtcttaacaaaatcatcctgctccaaataaaccctagtccccggatccgccgtcaacttctcccacatctccttcccttgaaacgcatcaacaaaaggattcgactttgacgaaaccctagatctcgaagcatcagctaatcccgatttaagcatctcattactcggatcaatctctaatcctttcttatacgaatcaaccgcttcatcaaacttggacaatcaat

SEQ ID NO: 10346 - DNA, 710 bp, Arabidopsis thaliana
actacggaactacaaagaaacatgaattcgacgttgagaacaaggtctcgatggaccggatagtttctctaggaccaagcataggaatggttagagttccaggaataggactggtctattcgaatcttgtgacgggagttccagctgttttcggacatttcgtgacgaatctgcctgcgtttcacaagattctagtgtttgtatgtgtgaagtcagttcaggttccttatgttggagaagaagagaggtttgtgataagcagagtagggccaaaagagtatggaatgtttagaagtgtggttaggtatggatacagagatgttcctagagaaatgtatgacttcgaaagccggttagtatctgcaatagtcgaattcgttgaaaccgaaccgggacttgaagaagaagaaatgtcgagtgttcggagaaagaaagaggaatgtatggagataatggaagcgaaagaagctggagtagcgtatatactgggacattcatacgcaaaggcgaacgaatcatcgtcggtgttgaagaaactagcagtgaatgttgtatttgcgttcatgagcacgaattgcagaggaacagatgttgtgcttaatgtcctcacacttctctgcttgaagttggaatggtttattacgtctaacagagtaatcttagctttacataagatcagtacagttttagtagtagtcagtatataagag

SEQ ID NO: 10347 - DNA, 804 bp, Arabidopsis thaliana
ctaaagacgggcaggatcgctgatgtgctggcgcaggttgagcgcaccatgcggtcgtctttgttatagctgtcaatgcccgtacaggtggagagcgcaatcacctgatacccttcatcgagaatgcgattgaccaccccggcaaaggctttttcatacgcttgttgagtggtgccgagacgtttgtcaaacggtgccagttcgcgcagggtaatggccaccgttttctgttgtgcggcaacgtccagccagtgttgaacggcatagctggcggtgaagtcttctgtgtggtgatcgacagccacgcggtatcgacgccatgttccacttttgcggtggtgatattgctgcgtttcatcagatcaaagctgaccgattcgcgcaggatcagcgcgtcgcagtgaccaaaaacgtagttcgccagttggttaaattgctcatcctggaacgggccaacactgtgaccaatcataaacagcggctttttcgccataaacgtgcaaagtgcatgttcaaactgcggcacgccatagagatcgacaaaaaacgatccgccgacctggataatggcgtcgtaacctgacagcaggcgcacgaagtcggtgaatccctgggcgatggcgatattgcgcagcttgccagtgtcggtgacgcgtgagagcaatacctgatgctggtagcggcgacggaggacttttttaacgcgcccgacaacgcccgccgcgctgttgtgttgtttcatttgcaggaacagcggatcgcccattaccgggcggttgagcagccaggaagaactgaccggat

SEQ ID NO: 10348 - DNA, 579 bp, Arabidopsis thaliana
  unsure (1)..(579): unsure at all n locations
tagtaacgtccgccagtgtgctctaaaggaagcccaaatcataaaaatcaaatgctgcggatcaatcggcgcgagtttgccgcttttgacccaaccggcaatcagcgccgatttctcatcaattaatgccttcaaatcgcccgtcagttcatccattaacagcggcgcgcctgccagcatctccatacagaacaggcgcgaacgctgcggataatcgcgtgagacttccagcttcagacggatgtactctttgatcgccgccagcggggcgaagatcttcacgaaacgcttttaacggtgccagccagatatcgagaatctgccgcagcacggcaatatacagcgcctcttttgacggaaagtaatacagcagattggtttttgaaacacccgccaactctgcgatctgctccagccttgtgccgtgaaaaccgaattgtgaaaaagtgtccagtgctgcgctaagaatcgcttttttcttcgcgcttactgccgcngaacagtttacccgttgttttcactgcgccttgcgtcatgcgctctcccgctcttgtagattggcaacaggatagcaaaacc

SEQ ID NO: 10349 - DNA, 580 bp, Arabidopsis thaliana
tagtaacgtccgccagtgtgctctaaagccagtagtagtaaagcgatattgtgccggtaaatttctttttccccgcatttaaaacaaatcttgcgtcatcggcaacctgaatattgtgccggttaagtgctggatcattgagcatcttaacgatgtcatcggcaccatcagtgataaggtaatccagcgattcccctacaaaaacatagccttttgttccattactatcttttgcctgcgatagcacagtgatggtgtctgactgcgattgatactttcctgaactaccctttgcggtatgggaaaccagagcatacgagatacagcctgaaagcatcagcgccagtgggaataaaccggcagccttaaaaaatcccttaaaattcaacttcatgattaatcctttaaacgagtagctaagccgttgaaagcatactcttctttccctccatgtttagcgcctgatatcccttttcagatttctgcccgacgcatgtcatttttttatgcattgttctttttgtgatctaaattgtagtacaacaatataagtttgtactacattacacgcacggcaaac

SEQ ID NO: 10350 - DNA, 523 bp, Arabidopsis thaliana columbia
catttctatttattcctccattttccttttcactctttataatgattgaagaacacaaaagtatccactctcgcataagaagatgacttacattccacagcctatcgccaccgacatcgtccgccgtgttggccactctggctttggttttctcagacctttcattgctgctgtgccattttggcatgccacaactctctcacccgaagtgttttttgatgttgatattgatgagtttgttttcaatagtcgcctgggtaatgaaggttcaccatttcggcccttcctgcttcaatgtttgcagctaggtcaccatactgcatagtattttgaaggcctccatcttttggttcaggaaaccctcacgcaagcttcactagacatgcttgagactgcaggaccacatagcatgtacgctcggtttgcttttgcaatcttcctcctatgctgcggtgtgtgtgtacaataactttctcaataaggtattgataagtgtgtattttgcatgttttgagcaccattt

SEQ ID NO: 10351 - DNA, 132 bp, Arabidopsis thaliana
ttattctgtcactcaggctggagtgcagtggtatgatctcggctcactgtagcctcagcctcccaggctcaagtgatcctcctgcctcagcctcccgagtagctgggaccacagatgcacaccaccatgcct

SEQ ID NO: 10352 - DNA, 500 bp, Arabidopsis thaliana
cctcaaaccgccaccgtcttctctaaattcgccgagtgaacaaggctcggtactagcatcgctgtagcatcaacataaccggaactctcgactctgattacacttgaaatcattgatacttcacttaaaacgatcttcttcttgtttcaaaatagacctactctgggaagctagttccttctctaaggtaaagccaatcagttgtgaattcattttgtatatagtaataattttcagttaccaagctttttttctggcacgacagtgttaaagttataagttcctttaaccattcaatttcaaatcaaataccaaatattaaacaaatctcttgaaccattccaaactcagtttgaatacatatcggcaacaaaagtaaccgagcaaagattcaaccacttcaatttcattcttttaattataagatagaaaaactaatcccaacaaaggaaattgaaacgaactgtacattatttgagtgatcctatattctttgtttg

SEQ ID NO: 10353 - DNA, 659 bp, Arabidopsis thaliana
atctccaacttcaaaaatcttccaccgtctttctttatcagcttgcttagcatagcgtttggtcttttcttctatgtttctcctcgtattctcatggatctgttgcactagctcggcattctttttaccatcaatactaactctttcactcaaaggcaaagggattggatccaaaggtgagatggggttaaaactcatacaaaattttaaaaggagaatacctagaaacagaatgcacgacattatcatatgcaaattcaatatgtggtaagcattctttacaagttttaaggttctttttaatcaacacacgcaagagagtacctaaggttctattaaccacttcagtttgaccatcggtttgcggatgagatgtagtagagaacaatggcctagttcctgatattggatcaaattaccctagactactctatcaaattaagaggccagttgcagcacttagggatcgaattaaaaaagctcttttgttcacacaataggtataagtatcgagattaagcaaaacaagtaacaagaaatataaaaagaaacaaaaacaagcaaatagcatattagatggatgtaattcagaagataaaacgttaggcttagggtattctcaataacatatgattagtagatctattatgactaggatg

SEQ ID NO: 10354 - DNA, 1056 bp, Arabidopsis thaliana
tccccacgagaagttgatttctaaagcatcctacacaacaatcatccagaactgtctcttcaacaatgtatactaatatcagacaaagtgaaagagaatctaaccacaaggaagaataagaatctgtgttttagggaaaactcacaacaccagtttgctcaacaccggtcgataagctcttcccaagcagttttgttatattcctccatgactgaagcaatcagaatccgatcaggatactcttttttcaaccgctcaaactctttgagcatggtttcaagaggtctgtcactgatgagttctatgttctgccacccaattacatctgttttggctgagccattggatccggttcgtagccgagcatatctaggtgtcacgttgataactttggatgcatctaaagatacctaaatcatccaatcacagattcagacgaaactcaatatcatcatcatcatacacaaacacaaccaaatcctatgttccaacatagtcaacgcaaaacagactcaatcatcatctactctaaaattgaaaaagtcaaatctcaagagcttacggttttggcgatgacggccccccaaccttcatcaaaggctctcttcatgacggtgtagttggtacccggtggacccgacccgatcacgaaaggattgggcattttcaggccatttacagtgacactgagatcaggctccgattcggcggcggaagagatcttaagtccgactctagtcggcggtagaaaactccggcgagaggatggatcgaagtcagctgataaggtggttttagaggagagtccagagaagcgattcaaggcgaaactcatggaagccctcattagtgaggtccgtgtggtggatttacaacaatagataaaatctttagacataaaattctagtattatgatagagataatacgtcacgctactacgtgtggcgctttcgatttgtatgagtgttcatcatcatttcgtggaacgccagtggggcgttgctacggtgcgcattctgagagaatgaaatttgctctgtttcgtctagagtcg

SEQ ID NO: 10355 - DNA, 193 bp, Arabidopsis thaliana
acctcctgggttcaagcgattattctgctgggactataggcacacaccaccatacctggctaattttagtgtttttggtagagacagggtttcaccatgttggccaggctggtctcgaactcctgacctctggtgaggtcacttctccacccaccttggcctcccaaagtgctgggactgggattacaggcgt

SEQ ID NO: 10356 - DNA, 1062 bp, Arabidopsis thaliana
tagcaacgtcacgttcgtgctccatgaagctttggctttctacaaaaagtctagaggtcatatgaaaaagagtaagaaaacttacacatacattcatgtatacataattaaataaaatgatacaataaatcgctctgttttatcactaaataacgattgtagactccaagataagtgtaaatttttgtttgagatatcatggtttatctattatggatctctaataacatttggtagggctgcatggaccagcgagacagggccatggaccaacgagaccaaaacatagaccaacgagaccaaatcatggaccaggaagatccaccatggaccatcaagaccaaaccaaaacggtggaatgttagtgtcatggaatccaacaagttcaagggcagatttcgtggtggctcgggacggttcggcgactcatcggacgataaaccaagcattagccgccgtttcaagaatgggtaaaagtcggttgaatagagtgataatatacataaaagctggtgtttataacgaaaaaatcgaaatagatagacacatgaaaaacatcatgctagttggtgatggtatggaccgtacaattgtcaccaataaccgaaacgtcccggacggttccacgacttatggatcagcgacattcggtataaaatatttaaaattctactattaatcttcatacatagatcatgcatgttgaataattactgcgcttactcgttatataggagtgtccggggatggattttgggcacgggacataacgttcgagaatactgcaggaccacataaacatcaagctgtggcgttgagagtgagctcagacttgtctttattctatcggtgtagtttcaaaggatatcaagatactcttctcacgcactcacttcgtcgattctaccgcgatggtcatatttatggtattatttttaatctatgtaccatttgtttaaactcgtatggaagctagtcatgatcatacatggattaagaatttttgggaaattttggaataggtacgattgatttcatatttggagatgcggcactcgtttt

SEQ ID NO: 10357 - DNA, 649 bp, Arabidopsis thaliana columbia
gcgtgtactctctccccatcatccaactgccctttaccactgctactcccaaactcgtggaccacctgtctagagcaatcatgatccggatcacctaagtattgaatctcaacatcttgaagacgatccgacaaagaggtattagtaggaggagggggtggtaaaagctccgggagggagtgaccaattctctctaaagcaggtcttctagacctaggagtactggtttctcctctatccttagacccgaagagccttgatcttgcatcagtagctaagagaggaggttgcatgggaggttgcatatagaggtcagctctagagactgaactttgagtcactctgtttccctacagaagatccctagacgagggtaaatgttgacttcttctcccagagactaagttatgagagctggactgaatttcctcatcacaagctattctcctagggtgagaacgatcatgaggatgcaaatcaaaccctgatcttactgagtctctcctgaagttataagaagcaggcctactgtaatctcttctagaacaatcttggggactgaaatccctgcgaggttccctatgccggtgagagtaagctgagggataatcactcttctccctatggtctcaccggtcagccatacggg

SEQ ID NO: 10358 - DNA, 900 bp, Arabidopsis thaliana
cccaatacgtccaccatggggctccaccagaacctccgttggaccagagcttaatcactgctcataatcaatcaaaaatacttcagttccatttattcgtctgttataaacttataattctaaggaataaacaatgaagatgccctactcacttatataagaccaaaccaagcagattacattctgagccaaattcagaaatgcaagatgctcgaatctcttcccatcttcaccaaatttcttcgtcgacctaattcgaaaatgttagagttctatcagctacatttctataaatttccaataattgcaaacgcatcaccaaccaggattccgagaatagaaacaatctcgaacaaacagaatcgagcaatgtcgagagagaataatcaacgagctaaaataagattgatcgatttcgaccctaacgagttttacttacaaggtctcttgaagaatgccttggtatatgtaagctgcccagatcccagcgacacagaacgacaataacagaactcgccggagaccggaaccgtgagattccatcgccgcacgtcgcttattgttttatccgacggagctccggcgaaaatttgaatttcaattttacgctatttgatcagttttgcgatcaaattatgagatcggtctgaagtggaaacgaaagttattagagagagtgtaggaggcgcgagaaagacgtagattttccacgtgtaactgtgtcattggcttaataatctgacatgacacttctgattggctataggacgtggatttatttctggaatccaagtcatatgcacattcatgtctgagataggaatgggaactatgtgccgttttattgtcatgaaaacgtcacgcagtttcctagaacttgtaaacggagctctagagtgt

SEQ ID NO: 10359 - DNA, 611 bp, Arabidopsis thaliana
caatgattatttatgttttgataataaatgagaaatttttaatcttgggaaatgattttggccatatttgagacccttgttagatcatactagttgtttcgtttgatatatgattcatgtgagagtatttttgatctctggttgggctttgtttaccttcgaatgtatacaattttctttcccatgattccggaatttggtgtctatgtttatttctttgcttgattttccatttttctgagtgctactgtagagatatcaacttaagattggaacatgtgttttttgcatttatgcatttgtcaccttatatctcttttgatacgcagagactcttgatccggaagtgaggattgatagcctcgccatcatatctcctggaagacccgacattgttctcttggttcctgagaatggaaatccaaagggcatgtggtttactttgaaagaagggagcaagtacaacttgaaattcacttttcatgttaacaacaacattgtctctggtcttaggtacccaatacagtttggaagaccggtgtcaaaggtaaaacaatagaccacaagtttgtttttaattaattggtctctcgatggttgagagcaatgtg

SEQ ID NO: 10360 - DNA, 865 bp, Arabidopsis thaliana
gcgccatattaaccgaaaagcataaacccttgaaacctctttaagtctccgcaaacctaaaccacccactgatttgggcctgcaaatctcctcccaagagaccttggagccagtggttatatttgggttcccattccatagtaatgcactacggagtttctcaatttcatcgaaacagcgagccagtaaccggaaaacagaacaccagaagctagtaatgctagtgataaccgaggaaagaagttggagtctttccgcataagaaagatacttactcgtccaagataaaaaccgtgtgcgtatcttgtatataaggggcttgtaatcatgagccgtcatagacttagtggttaaaggaagtccccaatagctgatgggaagcgtttccacttgtatcccaacttgaggcgcagttgctacagtgacttgttacccacgtcctcccactaacatcgatgatttatttgtatttatacgcaaccccgatatctttgagaagtcatcaaagacctggattgtttgaagaatagagctcggagaaccatccgtaaagaccaaaatgtcatccgcaaagcttaagtaagtgacacaacgagggtgtttaccaattcgtccattgttagctgcccgattcagaagacaggagagaacattttgaaccatgacaaacaaataaggagagagagcagccttggcgaatacccctgctactcccgaagaaaccttccagctctctattgatcatcactgagaaataagctgtagatatacaagtgtaaatccagtgtatgaacaaatccggaacccaaaagctttaaacaccgacaagatgaaagaccattgagctgtgtcgacaactttgaga

SEQ ID NO: 10361 - DNA, 570 bp, Arabidopsis thaliana columbia
tgtgtgaacaagagctttgtagaattcgaccataagtactaaagacgatctcttttttttggggagtaagctttaaggacagtttgatctatactagttgtcatccaacgtccaggcccgagaaaaagatcaaccgcatggttctcgaggtaaggtttgtttcataacatacactcatgtacaagaaattctgtcaaactggggtcgtgtggtaggtgtaggtagtctcaactaaagcacaaaatatttttatgccggcccatcacgggattttgatatctttgcagagcttgaggagaaagacaaggggatcttagctttgaaggagaaaaacatgaagattcttgacttcatgtgttcaaaattttctgattttcttgatgatctataaatgcttttgaataaatttaattttgttgttttgtcaaataattttattttcttttgtaagataatatatgcacttttaaaatagcttatcttcttgtagtgtataaggttgtctcaataaaagtgggatatatgttggaaaaggctacttatgtgatggtcttatcaaatagcatgttg

SEQ ID NO: 10362 - DNA, 663 bp, Arabidopsis thaliana
atcccctaactttagagcgggccgtgcggtatatctgcaattacttaaccgccagcaggagttgagtatttcgaaatccagtgccattggtaacgtgcggattatcgacccggcagtcactcagccgcagccagtgaaaccgaaaaaagcgttgaacgtggtgcttggttttattcttggcctgtttatttctgtgggtgccgtgctggcgcgtgcgatgttgcgtcgtggtgtagaagccccggaacaactggaagagcacggcatcagcgtttatgccactatcccaatgtccgagtggctggataaacgcacccgtctgcgtaagaaaaatttattttctaatcagcagcgccatcgtactaaaaatatccccttcctggcggtggataacccggcggattctgctgtggaagccgtacgtgcgctacgaaccagtctgcatttcgctatgatggagacggagaataacattctaatgatcaccggtgcgacgccagacagtggtaaaacgtttgtcagttcaactctggcagcggtgatcgcccagtccgatcaaaaagtgttatttattgatgccgacttacgccgtggttattcgcataacctgtttaccgtgagtaatgaacatggcttctttagagcacactggcggagcgttac

SEQ ID NO: 10363 - DNA, 494 bp, Arabidopsis thaliana
ctaaagaaacccgctgaataatttttagcgagtatacctgtaaacgccgtaggtgtattggggtgaagtccctttcgcccctgcctaataaggcacgtcaggcatcggcgcacggctgtattcgtgatctccggctcatcaaaataaacaccgccaacccagcaacaagaatacccggtgcagaagcggccattacgccgaccgtgccagtgcctaatgccagcattttcccggccagtaacggaccgctcatagcccccagacgccctaccgccacggctgttcccacacctgttgcgcggatctgcgaactgtaaaacaacggtgccagggcatacaaaacgctttgcccacctgtcgcaaacaaccccgcgacaaatcccgccagcaacataccgttaaatgacgacaccgttccaagcgccacgagcgaacgtaacatgccgctataaatcagtagcgacatggttactggacgcagcttatccatcaat

SEQ ID NO: 10364 - DNA, 293 bp, Arabidopsis thaliana
aaatctttgcaggtaacagttggaactccggctacttgtgccagagttagtgatctgacatggaaaacacgctcatgttatctttttgaggaggtgctcacatcaggttgcattggtttcatgtacattcttggtagggggtacaaaggtcttttccaggatgcagacctcttacgcgtttgtgcctaatcaggcttgtggtgggggcaacatggctatcctggacgcattaggcactgacatgacttcatcggcgaatggacaaaagtttgatgggagcaataggcaaggtg

SEQ ID NO: 10365 - DNA, 457 bp, Arabidopsis thaliana
gttgtccatagtaagccgaatgctcttgctggactctttcaggctagcgttgcttatgtttacattgatggaaaactaaggcacatgggtaaactggggtattctccttcacctgttggaaaatctttgcaagtaataattggaacttcagccacttgtgctagggttagcgatttgacatgggaaatacgctcatgttatctttttgaggaggggctcacgtcaggctgcattggtttcatgtacattcttggtagagggtatacaggtctttttcaggatgcatatctcttacgtttcgtacctgatcaggcttgtggtggggacagcatggctatcctcgacttgttagacactgacatgtcgtctggtatccagaactgtgaagacagtaatagacgaggcgattccaaggcacattgtagtgcgattgtatgggatctcgataggttaggga

SEQ ID NO: 10366 - DNA, 646 bp, Arabidopsis thaliana
atatccagaacgaaatatataaatcaatttgggcaatagtttctgaaaaatttgaacaaaatctaaaatcaaatcgaaatacaacttaaggaatgtaaaataaataggaagtcagtccaataacacaaattattatgtaacacattattgggccgcggccagctcaatatctacttaacattactaaacaagtaattgtaattgagaggtgtttcgtcttggaggaagcggccattgaagcgccacgaagtctcattcttctttctccaataataacagagagcgattctttttactattccaatttcattttcaatgttaccaacacgagctcagattttcatacaccaatttttctatatgcatcgttatacacagaagcagtcgcggatctcaatttcaggtgtttgcgattccgatttaggtttgatcggttgaaattttttccgatggtggatcattaccaagttctaggcgttacgagaaacgcgacgaagaaggaggttaaagatgcgtttaggagattggcgattaagtatcatccggataagcacgctcagtctccggagcatgttcgtcataacgccaccgtgcggtttaagcttgtatcggaggcgtacgaagttttgaatgatgatccacactg

SEQ ID NO: 10367 - DNA, 838 bp, Arabidopsis thaliana
cggacgtacaggcttctggtagtagtggaaaagagaaggtccgagaaacttcttccgtttctgtaaaacctcatcggcggaaggacctttatacggccgtggctggtgaacgaacggcggaatgtgcggcggagatcagcaatcgaaggagaagtagagaaatcagtacggaggagagagatcgcacggcggtgatagatatcggaagtagctctcttcaggagttgcctttgtaacgccatttattagatagagataatgatgacaagttgggcaaatcacactagtactatatatatatagtgtgattaagactagagtttagtgagggattgattagtgctacttaagtaggaggatcaaaagatttttaagaaatgatgacgtgtcaaatatgattcttaggaaaaagattcctacatgtattaagattccatttgaatgagattgctgattaagcaaccgacagtgacactgtaacaaatctcttccgattatcgtctgctaattatatgacgtgtcactgactagaggcggagtatccaaggtttggactttggagtattaatcctccaaatctttttttttaattttaattttgcatgtgcaccatgattagttgttaagttagaagattgtattattttagtaattagacttagttagtggacctaactccgagctaattaacattgtatataaaatatgaaatagtactatataggtttcaagattatcacaattttcacatttggtcttagacgtgtacatgactatcacttgacgaaggatcatcaagtcatgctaattaattatgctaatagagctgtcgtccata

SEQ ID NO: 10368 - DNA, 903 bp, Arabidopsis thaliana
cgaaaccgcagaactcgaatcagagagtgactttgacgcaattgagacagaagcatcggaaaggtgagccgataactatggtcaccgcctacgattacccttctgccgttcacatcgatacagctggaatcgatgtttgtctcgtcggagattcagctgccatggttgtccatggctatgacaccactcttcctatctccttagaggagatgcttgttcactgtcgcgccgttgctcgcggagccaaaagaccacttcttgtcggcgatttgccgtttggtacttatgaatctagcaccaatcaggtgaataatctcgaaagttggatactttgtttcaaattcacaacccaaaggatcctatcctatgtttcagttaatcgctttgatatcaagtttgttattgttcgagcaaagcatcgatttggttgattaagttttagtttgaatgatgttcaggcggttgatactgcagttagggtgttgaaagaaggaggaatggatgctattaaacttgaaggaggatcaccttcaaggatcactgctgcaaaatccattgtggaagcagggattgccgttatgggacatgttgggttgactcctcaagctatcagtgttcttggtggtttcaggccacagggcaaaaacattgctagtgctgttaaggtttgaatgtaatggttcaggcatgtgtatgtaatccttaagaggttattttttaaaggggtgtgtgataaaattatttttctcttatttggtggattaggttgtggaaactgctatggctttgcaagaagctggatgtttttcggttgttttagaatgtgttccacctcctgtggctgctgctgcaacctctgctcttaatattccaaccattggcataggagctggccctttcttc

SEQ ID NO: 10369 - DNA, 838 bp, Arabidopsis thaliana
gaaacatatctgccttgaaaaatctagaggagcatttctcagaagatctattgatgacataatcttcgaactcggtaagagaatagtcagacataatcctagtatatcttcttattgaaatgttttctagagtcccggcaaagtctatagctaggtttcgttgcgtatcggaatccattcatcgtcgtcctgatgtcacagagcagtccctgactaagtctatgtctcgtccacggctcttgtttgccttggaagttaataaagatttattgtttttctcttcacctcaacctcaaaatccatatgataactcttctcttgtagccaccccatataagcgttttccgaaatatttgccaaccagaatctgtacaacgctcggtggattggtcttccttcagaaatggctaagaaaaaaaacgcgggtgatttgtaaccctgtcagtggagattatataaccttacccaaagtgaaagccactggtgttggagaaagctattgtggctttgatccgatcaccaaacagttcaaagtgttgtgtatgacgtggtcacgttatggaacacccaatactcaccaggttttgacattggagactggaaaacgtttatggaggacgatccaagatcctcgacaaccctattgcgaccgttgtcatcggttacgcttgaatggtgtccgctactacggagctgattttgatgaatctcaatcttctaagatagtttgcttcgaccaacggcgaccgagactcagctttattaacatagtgctagttggcatgttccgtgggagttatatatggactttgttcaactacaaaggtaaattaggtgg

SEQ ID NO: 10370 - DNA, 1195 bp, Arabidopsis thaliana
gggctacctaagtttgctagatatagtagtgttaagttggcggattgtggtggtaagctggttgttttgtggcacaagtatgtgcctgcaagtgggtatgaggagaagatggtttggtgcgcagaaatttcccttgaaaagcgcagatagaaagagatttgggggaagatcgagtggttcgatgcagttcttagagtccctaagtattaccaattcgttggggctaaatctgctactgtttgacaggtttgagcgcttataaatatgatctgcagtcacttgctttgtaggatgatggtttaagcttatttagtgagttctttttcttttagtgcctgacattgtttttgcttataaatatgatctgcagtcacttgctttgtaggatgatggtttaagcttatttagtgagttattttagtgcctgacattgtttttgcttataaatatctggcattgacttgcttgtagatgattaagcttatttcgggacttgtctgtctctttgattaaccctttgatgacaaactcggtctgctactgtttgatgaatgatgcatgagactagcgggtaatgtccgtttttagttctgaatatgtgttgcaaatgcaaaatgtcaaatgcaaacgaaattaaacataggcactgtcttcagttagaaacttgaaaagggtcacttcttattattaatttctgtgggtaactgatacaaacaaacttatctctatgaaactggagaaactacatttgataccaatacaacaaaaataaatcattttttgtccgtataaatagtaaccgaaaactatatcaaaaccgtaacaaaatgtggtttctgtctcttttcactgtgtcttatctctctgctcactcttccatgaattcttagctgcatctgctgaaatagtcgtgcctccattaccatcgctgctgccatcttctccgggctttggtttggagaagaacgggtcccacacatggccccctgcttcccgttggccttcctccagcaacgcatacttccagctgttctcctccacgaagtagtcatactcggttcggccctcgatcatgttcttccttaactgagtcaccttgtctatcacagcctgtaccgagacatcaaatgcatctttctgcgtctccagttctgatctcgggtctgcgtagatcagccttgggatgaggttgatg

SEQ ID NO: 10371 - DNA, 1163 bp, Arabidopsis thaliana
  unsure (1)..(1163): unsure at all n locations
ctttttcttttcccagagtgtagtgtccatctcaccccagacgggtgatactgatcagtctgaaacatccagcccaaagaaatatcattgtttgtagtcaaatttacaggtgaaagtagaaaaaaatcgcagatcgttgtcttaccacatcaatcaaattcccactttcacgaggttttcctttggaatcagattgacttgattctgatagctcgtttgataaaaagtgaacaaaaactgaaacagatagagcctcgctatgacaaaaatttggaatatttacatcataccactctggctgatgagcaaaccagcctaaagacgtcctgggataagttgatgtgcacaaaaaataaaacaaaggtaaatcagagataataaaattgaaatagctattatttaagtattttgaaaacaccgaaaatgccatgttggatggctaagatgacataaagcttaaattgttctccgcatatgaaatagctactatcatagcagatactagtccaggcagttcaatgtgttgtgcaaaggcaatttatgttaaatcctacatccgacaaaacactaagagatcacatgaacattaatatttagaacatagtaaataaatggacgaaaagaaaattagtcagacgcgtgccgccaaatcatagagacaggctgagagatgtccataaagaaagcgtaacaaaatgtatagtgcaagaaaaaacaaaggaaatccgcaaaaaaaatacctatagattcgatcttctaaaagctggagtccagatcgaaatttctgcatgttgccttgtgtttggcatgagcagaatttcagtccaaggagcatcaaagaaaaaaaggtaccagcagctgcagggtggcgagtaaagcaccattcaaggtctgtactccgttgtaacatccgacctagcagcaacagttgctccgcactattatgtcgaacaacctaaaaaagcatagtggcaataagaaactcactcaaatttatctgcttccttgatgatcagtaagcaaatttttcaagtgaagcaaaattaatttagactgcaatttgtcacctaaggtctttcaattgattcaactaggaggatcacaagaatactcagcacttataacacttaagaccgtcttaaccaatgtnggagaagaatgag

SEQ ID NO: 10372 - DNA, 867 bp, Arabidopsis thaliana columbia
cttaagaagaggccaacacgaaggacaggaactggacaagatcttgttcttctatcctcctgatctaaccttctccactcagctatcggttataggtctcagtgaagggcttatcacgttcacgaggttagctactagagattttccttctttacacagatttttcgagttcatggattgattgatgttgtctcatgttcacataaattttgagcgttattagcttttcctgtattgttgggtgttcctgagacgtggtttatggaatataaacacagacttttctccccggaggcagcttgtgaggtaattgaagcagagagacattcccatgttttctatgaggccgagcccgatatctggatggtcatggtacaacattatcaactctttcacttgttttagcaattgatttgcactttgttcatatgcataaaaagaacaaaatttgatttagactttggtagattgtagagaaaaataaggagattgaagctgtatggaggattgatgcattgcggagagtgcttaaggaagtgcactctctctttgttatgtttcaagggtcaattagggcattgcttgagaaagaaccaactggaggacttgtaagatcgcacttgtatccattcatcacagactatttaaatggtaagcaataatcaccaagtctatagcccacaaaatccctgtgtagtagcacttatcaaaagtttttctattttggggcagatcttctcgttgggaaaaaacaacagttaccttccttccgtgacactttgaaagagcgtggaacagttcagatgctaactttagctagagatgcggcacttgaagttcaggtttgtttctctatcagaagatgcg

SEQ ID NO: 10373 - DNA, 604 bp, Arabidopsis thaliana
tcacacatcaggctttaatattgatctgttttggggacatttgctttggaacacagatcttgtttgtcatatcaaagcctgatgtgttcaagagtccagcatcagacacatatgtgatctttggagaggcgaagatcgaggatttgagctctcagatccagtcgcaagcagcagagcaattcaaggcaccagatctcagcaatgtgatctcaaagggtgagtcatcgagcgctgcagtggttcaggatgatgaggaggttgacgaggaaggtgttgagccaaaggacattgagttggtgatgactcaagcaggagtgtctaggccaaatgctgtgaaggctctcaaggctgcagatggagatattgtctctgccatcatggagcttaccacctaaaccaaagtcttttctacttagatgtggtttaacctgagttatgtgccagagattgtccaaagaattcggaaatttttggtttcaatgtttttcatgaagtgattttcgatgttgtatcagtataaactcataagtttttgattttcagtttgattttatattgaatatcaagtccaagtgtttaccattatagacttgtagttataatt

SEQ ID NO: 10374 - DNA, 435 bp, Arabidopsis thaliana
aatggtgaaacattcctcagcttttcattaccattataagatatgtgctgccttctgaagaccacaccatccaaaagcttctgttgctgtacctggagctgattgaaaagacagattcgaaggggaaggtgttgcctgaaatgattttgatatgccagaatcttcgtaataaccttcagcatccgaatgagtacatccgtggagtgacactgaggtttctctgtcggatgaaggagactgaaatagtggaacgtttgactccatcagtgttacaaaatctggagcatcgccatccatttgttcgcaggaatgcaattctggcaatcatgtcgatatataaagctccacatggcgaccaactcttcgtggatgcacctgaaatgatcgagaaagttctatcaacagaacaagatccttctgccaagagaaatgcat

SEQ ID NO: 10375 - DNA, 533 bp, Arabidopsis thaliana
tcatttgagctcacagatttttttctctttcactttttgtgcagcaccggagaagatggacaaatctagtaccatgcttgttcactatgacaaagggactccagcagttgctaatgagattaaagaagctctcgaaggaaatgatgttgaagctaaagttgatgccatgaagaaggcaattatgcttttgctgaatggtgaaaccattcctcagcttttcataaccattataagatatgtgctaccttctgaggaccacacaatccaaaagcttctgttgctgtacctggagctgattgaaaagactgattctaaggggaaggtgttacctgaaatgattttgatatgccagaatcttcgtaataaccttcagcatcctaatgagtacatccgtggagtgacactgaggtttctctgccggatgaaggagactgaaattgtggagcctttaactcgcatcagtgttacaaaatctggagcatcgccatccatttgttcgcaggaatgccattctggccatcatgtcgatatat

SEQ ID NO: 10376 - DNA, 858 bp, Arabidopsis thaliana
caatatcatatagtctatagctgtatattttgcacctcacgaactttagtctggacttacgaaatctgatcatactatatatacacaaacattgtgaggaatcatgcatgtgtattcaattaaaatagagatttttcatccatttatttgtttgtttcagtcggctatacctttttaaacttagtcacttaactactatgtaaagaatcatacacttaaattcaaaacgaattgtcagatgaagagattaataatcaacatctcttaattacactagttttggttatttctgacgtccaatctagattctatacatatgtttactctccggatagttagttatttttggagtcaagtatctaagcattagtgtatgtatatatgtacgtattaacgtatatatgtatgcatgggtgagcatgatgagatgacagcaagttaaaagaaggaatgacgaatatatgcagataaaacaaaaaaacaaaataaaaattgaagaaagagacaaaagtggctttaatgcgtgtttggtcatttgcatgcacgagaccgcacgtaacgtaacatttcatgcatttttatatacatacgtttatttgattattttttaacgatgtcctctcgttttctgtcggtatgtggacacaggaagactgggtcttgtgcagagtgttcaacaaaggcagagactcatcgctacaagacaataattattataacaatgataatcagacgcaaaggcttgaagttaatgacgctccggatcttaattacaacaatcagttgccacctttgctatcacccctcctcataatcatcaacatgagaagatgaaaatcaagtttgtgatcagtggga

SEQ ID NO: 10377 - DNA, 659 bp, Arabidopsis thaliana columbia
tattgggtccatgcatgaggagaaacctgaagttctaaactctactgcatccaaaaaacaaaaagtttgtgcacaagagacagaggaaggcggagagaagactgtacctcttgagaatgatgccttgcaggaaacaggtaactttcatttgcggatttgagcatattcaaattcttgtttttttttggcttatggtcttgtctttcttttctctttctgtgccttgtttaggtgaaaatccaaatgttgaggatcttaaattagcaaatgaagaacacaattctctcatgtcattggttaagctaacaaagagtggcttgcttctctttactttccctgttgaaaactctcccaatacaacgaatatcgtatcacgagtcttccagtctatggaatctggagctttgaaggcaccaatgtaagtctatctggtgtaatgctagttagtgaacctttggtcaattgattaatcagaattttatcgccacttgccttagaattcaactctaccttgaaataagcatgcttatagagttctgatttagtctcgaataatttttcaagtcttataatcccaaagagtggtatctgttacatatcagacctatttcattctgtttggaccatgtagttatttatcactctgctaggaacttttg

SEQ ID NO: 10378 - DNA, 495 bp, Arabidopsis thaliana columbia
atccattctggaaataagctctatgatctcttcttgatcgctgcgggagactcttttctgcaaaagagaaagggccatgctttttgttccaccatacacttcgtcacccaatagaggaactcccatatatttagcatgagcacgtatctacttgaaatcaagatggaagagagagacgtttcagagaccacaagttcaaagcagctggatcaaatacatgacttgaggcagaaacataaagggcagctcaagctcttacaaccagaaaaaacggtagacttttatagattttgagtattccttcagtttttggtttttggttttcaccaaagagtattccttcatctggacagattttcacactgaacaatgttgcagtacctgatgagtacggccggtttccagtctccacctcaccaatgcagagccacttccagcgaatgtttggattaccttatacctagtgcaccataaaagacgcatttttttagcata

SEQ ID NO: 10379 - DNA, 613 bp, Arabidopsis thaliana
ttcactctctctgtcaagactcatcattatcacgaccgtctctctcacctcctcaatacctaatctttcggatcgcagcttacagagctttctcagaaacgtcaccgtttcttcaattcgtcaacttcacagcaaaccaaacgattctcgagtcattcgaagggtttgatcggatccacattgtcgatttcgatatcggttatggaggtcaatgggcgtctctgattcaagagctcgccggaaaaagaaacagatcttcatcagctccgtcgctaaagattacagctttcgcttctccttcaactgtctccgacgaattcgagctccgattcactgaagaaaatctcagaagcttcgccggcgaaacaggtgtctccttcgaaatcgagctcttaaacatggagattctcttgaatccaacttattggccactgtctttattccgatcatcggagaaagaagcaatcgctgtgaatctcccaatcagctccatggtctccggttacctcccattgatacttcgtttcctcaagcaaatctcaccaaacgtcgtcgtttgctcagacagaagctgcgaccgtaacaacgacgcgccgttccctaacggtgtgat

SEQ ID NO: 10380 - DNA, 782 bp, Arabidopsis thaliana
ataaattgtcctgcatttctgcctcgatatcatcttctccagtatagccacgagatcatcaacctttcccatttggcagtatcgatggatgacagttctgtatgtaacaggggtaggatcaattcctttatgaagcatcttcttcataagttctgttgcttctgctattctaccttttttccccaatgtatcaactaaagtagtataggtgaagacatccgcgtgtttgttgatcaggtacatgtcatcaagcacggatagagcagcatctagctcatcgttctgacaaaaaccatgaatcactgtagtaaaattcacaacattaatagcacaacccttgttcagacactcctccatgaattttctggcctcgtgtgttctcccatcccggcaaagactctggagcaacaagttaatttcaactgggcctgggaaaaacccttttagtaccatctctctcaccacatcacaggcctcagacaatttcccttcccttcgcaacccatgcataattacgctataagtaatagaatttggactccaccagtgctcttcgctcatgttcatcatttctcttgcctctaacgatttcccagttcggcacatcccatttaacagagctgtgtatgacacagtatttggtttatgtccatgtgtgtgcataacctgaagtagctttttggctttgtccacttcacccaaacgacagaagccattgacaactgcagtataagttactacatcaggagggcagtgccctttgacaacatttcgttaatgag

SEQ ID NO: 10381 - DNA, 1161 bp, Arabidopsis thaliana
ctgtagcaatgtcaatgtggtaccctctaccttcttcttcttcctccactcactaaccaaatccagaatcaacaataatagaaaaagccctaactttctccgtcgatggctttcttcttctactttttcttcctcttgactctttcttctccttcttcttctgcttcctcttcaaactccttgacttacatcgtccacgtcgaccacgaagctaaaccctcaatcttccccactcattttcactggtacacttcctctcttgcctcactcacctcttctcctccctccattatccacacatacgacaccgttttccatggcttctccgctagactcacttcacaagacgctagtcaactcttagaccatcctcatgtcatctctgttatcccggaacaagtccgtcacttgcacaccactcgttcccctgagtttcttggtcttaggtccaccgacaaagcgggtctactcgaagagtctgatttcgggtcggatctagttatcggagttatcgatactggtgtttggcccgaaagacctagctttgatgaccgtggtcttggtcctgttcccattaaatggaaaggccaatgtatcgcttcccaagattttccggagtctgcttgtaaccgtaaactcgtcggagctagattcttctgcggtgggtatgaagcaaccaacgggaaaatgaatgaaacgactgagtttcgctctccgcgtgactccgatggacatgggactcacacagcttcaatctccgccggccgttacgtttttccggcgtcaactctcggctacgctcacggcgtcgctgctgggatggctccaaaagctagactcgccgcttacaaagtctgttggaactccggttgttacgactccgatatcttagccgctttcgacaccgccgttgccgacggtgtcgatgtcatctctctctccgttggaggcgtcgtggttccttattacctagacgctatcgctattggagcttttggagctattgacagaggcatattcgtctctgcttccgccggtaacggaggtcccggtgctttaacggtgacaaatgttgctccgtggatgacaacagtcggagctggaacaatcgatagggatttccggccaatgtgaactcggtaagggaagatgattctggtg

SEQ ID NO: 10382 - DNA, 756 bp, Arabidopsis thaliana
actgcgctagaagactctacaacttccgcttctgaaggaaaagaagctcaagattggcctcacattcacggactaacctagtaagtggctctgtagtaaagaagggttgatggagaacaagctgtgtgaaaggcaaacgtaaaagtccacctgttcttttatcgtacttcttcaaaatcttgacaagtcctagaatggaagatgtttttagcatacagtagtaatgtgttacaaaaattggttttctagttaaaatatatgattacctgcaaaattaagggagctgtagtttttcaggagcaccatctcgccatgaatggtaacaaggtctctccgaatatccatcatttcttcgctgaactcactttctgatgcaaattccccattcttttctttaacttgctcgattctttccttgagctcctgtttgcaaaatgatgaacacacactaatcaattagagcttcatatgtctataaacaagcagagcaagaagatgaccaaggctcataaaccatactaatatctaagcaatgtgatctcgattgtgatataccacagagcaaataaaccactgtaatcatacatcatacagacaaactcacttgaagcacagagaaactagatccaatttgattagagatcatcactagaactacctccggtttcaactactagcaattttgttctaggattcgagattaatcatccgatcgaagataacctatggaatgattcaattctagaaacttgttta

SEQ ID NO: 10383 - DNA, 1420 bp, Arabidopsis thaliana
gtccagggaggaaagcaccggttaaagataagatttcaaacctgccttggagagagaccacacctcctggtgcggcggcttggcggagggtgacgttagcgactgagcctgtcccgctgagaacgcaaacgccgcgttgcctgcgtcttgagaagtgagcgattgtgtcggcgacgtcactgccgtcggagatctccaagacatggctacggagtgcgttggggctgtctcttgtcacaaagattggagctttgggtttgtttttggatcctggtggtctacctcttggtctacggttgaccacctcaacggctccttctctaggatcatcttcttcgtcttggtcgttgtcttggctctgattcatggctattccaagatctcctttggtaagaagactttggtggtgatggttttggtgatggcctgaggagaccgaatggtccaccatgcccgctaaaccactctggttcgtccaccaagggtttgccatgattgaccaaaaactggaaattcgctaaaaagaaagatcaagaaattgttaccctgatgatttgcttgaaaggcctctagggttccaactttacaaggtcaaaaggtgtatatgtagctctttcttgaaaaatattatcttttcgtttcgatttctctaatttcatatgaattttaggagttgttgatgacaaataaagaagaaaaggctacggtaggagaattagatgcaattgtggaatggaactagaatcaaaacaaagctattgagactttgattttcttttcaagaatcaatcagagagagagagagagagaaagtgggcaataattaatttttcacaagttagtattatttatatagggtttatatagaatccaagaacgcaatactatgtgtgtactctctttttattaatatataaaatatactggacaatttttatatgagtctattttaaataacagtgggattgaataccgattatgccaaagtcctaagctccataacgtatttaatgaattcatcttataattttctgccagaactttaattatacactcatattactgaggttgcctagacaagtcttgggtttcacatggtgtaatattttaggaaagatcggtttatggggaaaactattttagaaaacatattcttgtttactctgatacaatttgtaaaaccccaagaccaaaagagataaatgtattgtgttggaatgttgtggcatggggaactagccagatcattttcttctttcactagagtagtaaatattagtatcatatgttttgcagtttatacatacaataagtgtagttatctttaaatagatgaagaaataaatgagatgtaattgatagattagcattggacattagggttaagtggggcatagtgcgcgtgacgattggggtggtg

SEQ ID NO: 10384 - DNA, 685 bp, Arabidopsis thaliana
agtgtgctccaaagaaatcagatgtcccgagtcctcgtttttcagcccaacgtctgtttccgtccaatataaccgccacatgctttggcattatatttctccctcgtttctgtttctctcccattgtaccactacaaataagtaataagaacaaacaaagttagtatactttcataatagcaaaagatgcataaatacgtagaaactatgattagtaaaaaccaaactaccgtttctcgttcctttcttcctcatcatcgtatttagaagctatgattttgatgaatctgaggatatttgtcaacgacaaaggaacatttagtcgccgagagatgaagagaccagggatgagaaaaagagctagaaaagtaaaaacaacagagaataaagacaacatattttttctgtttttgtcttttgtttttcagtgtttgttcgaattggagcgctagctcgtcatgtacttaaagagcttcgggttcaaagacgcacatgatgatcaatggaacctactttctttctctcacttgctctctgtctactccttgatgctacgcaaagacagatcatacgtattaagttttaataagatcttacgacacttgaaaatcactaaatggtttggtcacgtgattttctcattaaacaaagacatttttgtaagttcagattttgactttttcga

SEQ ID NO: 10385 - DNA, 609 bp, Arabidopsis thaliana
gaaaaaaaaaaaaaaaaaaaaaaacattgtggaagtaactcagataatgcaatccctatttttttttataaagttgaacactttgggtacacacataacatcagaatcatttccaataattcaatttataacctgaaaagcatacaattgttgtaaaactctcctattctctgtcctttcaaagctgtgctaattgcgagatatcaatcggataaacgtcggaagatctttgtgcattgtaagatctttttgcaatggccgtgtttgcagcagccgaaggatgaaatgcatcccaaaacacgtactcatctcggttcaagcacgggggttctcccggtaaacatgttagctgacctccgttccttccaattccgcaacacgcagtgttcgtattcgtaaaccctaaaaacattcattcagagaacccaatatatagattagattctttttaccataaagtagaagagaatatttatttaatcataggcttaagtttcatgaagatatctctattataccataagcagagggattggcgattatatcctgaaaagcgccataagcattgatgtaagtgaaactagcatcggaatgagcgttgtttagtgg

SEQ ID NO: 10386 - DNA, 906 bp, Arabidopsis thaliana
ctctacccagagagaagtgattgattaaactaatcaattatcttggaatcacacaatgctaacctcatgcctttcttcaagcaaagcggactggaaaaactcagatggctgatcatataacactttggctctgtttctccaattcagaacattaatgcatacgaaatcagaatcacatcactttctttagttcagaatcaaaatgtaacaggttattatctatgagaaatttcatctcacctcacaccccaattctgatccagttcatgttgcattgcttttgtgacacatagcgaacctgttgccatctttccataatgattctcagacctaaaatcatgcaaatgctaatatttcacccttaaataaaaaggtcctacaggtagttttaagccattatcaagccactggttaatatacttaccagcggtataaggatacaagcaaattgtttcttcctaaagacaatgccaacaacgtatatccaaaattatgccaatctacaacaaacgctgcacgtctccatgaactcgcccacttaacagcaattagagttgggacggaaggaggattctgtagaaatataactaggtgtaacttgtgcatatatttcgcaagaaaacagaatttactgtaaatttcaaagtgacaagaataaagattttttacctggaccaagaaaatgtcaggcgctggtactttaacgaaaagaaaccagagaagcattgtaaactgaataaatgccttgagcaagagagttacaggataaagtatctttggaaagtactgaatgaatcgaggctgcgcgtgttttaggcccccccaaaataagaactgatgatcgtgaatctcagagtgctagtagttatattgagattgacgaacatccatgtatggagtgatgat

SEQ ID NO: 10387 - DNA, 624 bp, Arabidopsis thaliana
caaacatgttttattctgttaccacatattcgcataactcatagatgtataatttacatacaatgactcaacaagaaaataagaagaaattttgtacatacttaaacgctgccatatcggtgtacttagcttcaagggagatggctaagaaggaagctctctcgcggctagtgatcataacgatcaatgcggcaagagccgaccaaacgctgccaatcgcagcacaagccctcctattctctttgtcaacttcaccatcgaacggtaataaaaatttctagatgaaacagaaaaatatgtaagaacacaaagacatcagggagaagtgtaagaacgtaacacatacacataaactgaataaacaaactaattggtaatcaacaatatatatataattgagtgggatgtgctgttagctgagatttttcaactatcttcaccgtcatcgtctcattttcaacacacgactatttttctctttatgactttatgacatgtggaactacaaaacaaaaatgcttcatcagaaatacaaaaagtattaaatttcaaccgcacataatgtatatagatactcgaaaattgatgtcatggtaaactatacaatggttattaattatttga

SEQ ID NO: 10388 - DNA, 905 bp, Arabidopsis thaliana columbia
ctgtttcttcttcaggaaaagcatctcctacaccaatgtttaatggaagaaaagtgtcagaagtaactgtgggagtcgtcagagaagaaattgttcctcaacggcaagaggaagccaagaagcaatcaggtgcagccagaacaccaagagtggctgggacctcagctaaagcaagcacgcagcgtactgtttttaaacatgaactagtaaggaagaaaaacttaaagctttatgtatttgagatacaatcagggagtgatctgactatatatgttctgtgctgtgtacagatgaaggtatcgaatcctacagagaggagaaggagagtatctctgccgttggtcgtggaaaatccttacacttatgaatcagatattacagctctttgttccctaaattcaccggatgtttctgtaaacactccaagattcgacaagatcgctgaattccctgaagatatcttccaaaaccaaaacagagagacagcgtcaagaagagaagtagctaggcactctttttcttctcctccttgtccgcctcatggtgaggacaattccaacggttcgatcacaaaggacaagtgtactgtacagaaaaggtcagtttcggaggtaaaacagagaaggttcgacacgtcatcgtatcagcagcgtgcggaggctctggagggactgctggagttcagtgcaaagcttttgcagcaggaacggtacgatgagctcggggttctgcttaaaccctttggagccgagagggtgtcatcgagggagacggccatctggttgaccaagagcttcaaagaagcttccgtgtagatgaagcaaccataacaaacgctctatctcttcttctcttggcttgcttttgtcctgtgtggtttgtatataaataaaaacgacgacgca

SEQ ID NO: 10389 - DNA, 725 bp, Arabidopsis thaliana
tctgcttatgtcaaagtcattaaccgactccaacggctacattgaacaaacggttatcattatagatcaagacctaattaacacttcgcttataaatacagattctcacacgcagcctcttctaattcttccttgagagaaaaaaaaaaatcaaaaactctctgattcacgcatcttcttcttcttctttaattttcttcttgagagaatctctttatacagagactctgtgtgaattccgatgatccattattgaagaagtgaaaagtcgatgatgatgatgatctcctctgcaacatgatgatccataagagttgatctcacttctctccgatgagtcggtgaagccaaggcggcggttaacggcgactaaaccacgtttgttctcaacgatccgtccgattacgtcttacgaggcgttctcggcaagccatctcttgtagcctcatgttgcatatcggcttggattggaggtatgagattcgcttgcgcaattactttgggagagaaagctccgactaaggaggaggacgcgaatcagaggaaaacagagaacgaatccagcggtggagatcaaggaatcgcgagttattagggtttcacaaccttcgggtataatttcctgtcttacttttttttttttaaatcatataacatagtaatagttttttttttttttttttatagtaataaatatcaaaggtttttctttagatagcactggc

SEQ ID NO: 10390 - DNA, 714 bp, Arabidopsis thaliana columbia
taaacttgattataattatgaaatcctattagcaaattcaacttaaaacataatttagttaatatccaacattgggaaaggtagcaactttaaactaagtcgatagtaccaaaactcaaaacataatcatgatgaatatctagctatccccacgatcttcggcaagtacagcctaactgagttccgtacatcaacatttcttgatacccccactcgtttgatcccaacgataaaccaccgtctgcgacggctcttacgccgtcgtcattagcttgaaaattcccgtagcgatctagtttcgacgacaaagtctccttagtctcttgaaccatattttcagagtatatagtgagattagagaaataaccagagttgtcatgatggctagtcaccggcggtggtgttggtggagaaggaggaacgccgcgatttttcttcaagaactcttgaacgacctcttgtaatagaccagtatcagaagattcttccgggaaaaacgactcgttgttttcgttttcggaataagaaacgcatgccgttttcgatgctgagtaagaagatgatgagccgttgaaagagttattatacggagtcgttttacgagaggaacacgaggcgtcgcgtaagaagatagactgtgtattatagatcctctgcgctgccggtcaccgtaaaagttttgggtagaggaacctaacggtagagaaggaagag

SEQ ID NO: 10391 - DNA, 555 bp, Arabidopsis thaliana
gttacgacttctgataaatagtttgagattcacttaaagaaccttctgagcagaaggccttgaagtgatgtcagcaacccaagcactcacatgtggacgctcgtcgaagagtttcttagttggagttccaagtaagtattgaatcacagggatagtgtgaagatcgaccaaagtgaagtggtcagaagccaaatacttggactcaccaagcctgtgttcgtaaacatcgaggactttggctagcttagcctcttcttcttcaacaacggttttgtctgtggtcataccatacaaaggctttaagacttgctcccaaacaagctttgaaccaactgggtcaaactcatgcgattcaatttcaatgcccatggctatgcccgcaatgtccttggagccaagggagacaagttggtttcctttgtctgagtaaaaatgagctatgtattgagtgattgctcttgattctgccaacaaaacattaaaaaagttgagtgtttctgctttctttaattgcaattgtcaaaaacagaatttgagattaggtctaaatttaag

SEQ ID NO: 10392 - DNA, 969 bp, Arabidopsis thaliana
ctttccacttctaggtaactaagctgagttgaagaagagatttcaccagtaagagtcttcaatctttgacaagagtctgcctttctatcttcttcctcatcttgctcttcttccataagggggtttatagttttgcagtaactctcaaagtcaatctacccataatgttatgaatttaagaagacaacagaaaccatagtcagtaaagaaaagggcaaaagtataaaccacaatgataactatcaactcgaaaaatcattgagctacaagagtatacacaagttagacaatatgcccttgcagacggctaaattttgatcagaaaaacgaaccaggccagtaactagtcaaagtcttaaagcaaaaaaatcaaaaagaatggtagaatttacaatacataaggaacaaaagttaccatcagattcaactacttacttttatctgatactcattcagtagtaagccgccttcttttcccataatcagtatcccttgattttgagcgatggttatcctcgcgagacaaccgcgatttgttgtgtcctctggatgatcggcctctgttccattcctcatcatgttcaggttcgtccctgtgtctagtacgatgatcaccaccatatcgttctcgttcttctctatgacgatccctctccctttccctttctctgtcacgaacatgttctctggagcgttcacgatccttatgatgatgttccctctcacgctcacgaccggtgtctctatcatcacgatgccttctctctggcatatcataaccgtgaccaacatctttctccctcggtatgtccctttcataaccagcatctttatcctcacgattccttctatcagatgaaccagaccattccctttctgaagctctttctttttccttcacaggatttggacgagccctctttcgtgattaactctccatactgatgatcagatgcagcttcctcccat

SEQ ID NO: 10393 - DNA, 592 bp, Arabidopsis thaliana
aactaacctcaatatcatttgtagtcaaagaagacacgacttgtttccttatcgctagagctttgtctttctaggatttttctgcttgatactcaaccctgaggaaccaccttgatcaagagaggggttaaagcccgacgagaaatccagagaaataaattcagaacatggcttctctaaaggagactgcatcagttgagaatgagttgccgttgacgatccttgcaattcctcaggtaacatcaaaaactttggtgaagaaggaggagaaaccacatgatcttgaactactaaatcttgtcgcttcattatgaccccaaatttctttttcacatctttatctgcctgaatatccttaaaatcccttcccaccaagggattaataatcttatcagactttaagttcacatggaccttctttaaactctcaccagggaatttgccgacttccttgttgcctgctgggacaatcagctttgtcataagtaagacgttggcacagaaaacatctttttcggatatgctcataatcaaaagtgactgagactacttcaccagtaggcacttgtacttccttagagttagcaatgga

SEQ ID NO: 10394 - DNA, 411 bp, Arabidopsis thaliana
taaatccaaaatacagaatgcaaaatcaatccagaattcaaaatcacaacaacatgtcaaacagagagaattagaatacctcaatggatttccacaagacagttctgatatcttcactaactttcctccaatccggaattgtgtaagaaacatgttcccgtactattgttcctaaataggatgcaacaggtactgaacctggaccacaaggttctcccataatagtatagtcaacgtgaaccttttcattttgggtccttggcgatgtgtttcatcttcgttggtcctcgtttctttttacgctttggttcagcagctgtctcagcaacatccacagtaggatccccagcgtcagtagaagcagtatcatcaactggttcctcactttctctgtgcacttcattgttagca

SEQ ID NO: 10395 - DNA, 686 bp, Arabidopsis thaliana
tgccaactaattctacttaatccatagcttgtttctatgctcttgatagcaaggactaacacacaataacagaatgaaaacacttaagtatatacaaaaaagtatatatatactcagattttgctgacataccgtcatttgcattagtttcagactgcggaaactccactgttataaaagcctcaatagcattgaggaggggagggagagttgattttggagtttttattagttgcaaatggcatgtccctccttcacatttaactggtgatgtattgaatagagtacccactagaaactcgtcaggactaacaggtccatagttaacatcttggcctgcgctaatgttgaattccctggtatcattttcccttaaggattggatctcagcgacgtggaggtatgcataaactaagtcgtcaggtgtttccaaattccaagaaatggttaatggtgaactcacatttgcaggtgtggctgccgtaaccactacgtcttccggtatgtcatagccgttatcatcagaagtgttgaccgtgagacttgttcttaacagtctccattccggcatgaaaaatggactccaaagacgatcatggacatcttctggatacctgaagagaaaggatggaaagtattaccgaacagtgtatccagtggaaaccaatctattcattaccaattgg

SEQ ID NO: 10396 - DNA, 655 bp, Arabidopsis thaliana
gtggttgttgcttaggggacatgggtttggttagcactaggagttctagcaaaggaccctaaaaactttccagaaccggagaagttcaagccggaaagatttgatccgaacggagaagaggagaaacatagacatccatacgctttcatcccattcggtatcggtccacgagcctgtgttggacagagatttgccctgcaagagatcaaactcacattactgcatctctaccgtaattacattttcagacattccctagaaatggagataccactgcagcttgattatggtataattctcagcttcaagaacggggttaagctcagaaccatcaaaagattctgattcttgaaacaagtgaaataaaagcaagactgaaatttatatttaaattcaaaactccaatgtagttccaaaggaaaaagaacaattaacaacatacacagatatctcacaacacacaagacaacaacaagctgttgaaactccaatctaacaaggtcacatttaacctctcggcttctcgaatcgagtaggaacaccgagtggtttggagaaactaacaaaaggatctgaggaaggactagtcttcaattcccctgtaaacattccagagttcttcataaactgaaactcatccatagattgcctgaga

SEQ ID NO: 10397 - DNA, 607 bp, Arabidopsis thaliana
  unsure (1)..(607): unsure at all n locations
cgctccggtttgtgttcaacaccattggtttcacgaccgatgcttctctcatgtccgctgtggtcactggctcggttaacgtggccgctacgcttgtttctatctacggtgttgacagatggggacgtcggtttctctttcttgaaggtggtacacaaatgcttatatgccaggtaaggaacaattactacttttatttatctctaagatctatataaacatatactaataaagatgtgttggttcactctctgtgtaattgtaggctgtggttgcagcttgcataggggccaagtttggggtagacgggacccctggtgagctaccaaagtggtatgctatagtggttgtaacgttcatttgcatctatgtggcgggttttgcgtggtcgtggggcccactagggtggttagtacgagtgaaatcttcccgttggagataaggtcggcggcgcagagtatcaccgtgtccgtgaacatgatcttcaagttcattatcgcgcaaatcttgttgacgatgctttgtcatttgaagtttgggttatccttgntttcgcctttttcgtggtggtgatgtcgactttgtaacatttcttgccggagacgaa

SEQ ID NO: 10398 - DNA, 522 bp, Arabidopsis thaliana
aagctataagtctcctggtcctgatggatttcagccaattttctatcaaagatgttgggagacagtcgggtgaatctgtcacaaatttggtgttaaaattctttgagactgctgagctaccttccaatctgaatgatgttctaggtgtcttgctgcaaaaggttggtaaaccagagaaaataccataatttcgcccaataagtttgtgcaatgtgttattcaaaattataacgaagacgatggttgaacgcttgaagccagttatgaataaaatcataggtcctgctcagtcgagttttctcccaggcaaggtaagtactgataatatcgtcgtggttcaagaggcattgcattcgatgcgacgcaagaaaggagtcaagggttggatgctcttaaaattggatctggagaaggcttatgatcggatccgatgggactttctagaagacacactggtggttgcgggtttctctgagttgtgggtgagatggataatgaagtgtgtgtctgggccatcaatga

SEQ ID NO: 10399 - DNA, 1480 bp, Arabidopsis thaliana
aaagaaaagcaaaaatgaactacccgctcttttaggttcggaagtatacaaaatcaatctttcagtgtttccaaaacaatgtcaaataaaaatgtctaaagatgtatatccagcaaataagtatcgaggtaaacctgaatttatgctagcagaaagtactccagacgcagcagagttggcaacagcatcataatgtgtggtatctcctcttatctaaaccacaacaaggacaacagtaatatcaaaatccaactctttaagtatatgttatcaacataaagcaactactttctgaagccatatgaggagaaaaacaaatggaatagcctgagattctttcaaaacaagaatcataccacagcgccgatacataaaacagcatgaaattttcccgatttcccaagattttgtgcaacaacaccaatttcaaagctgccaggaacccaaataacctgaataaaaacagtgtcattagctttgtgaaagctcataactttttattctgttctacaagcaaaagacttttacttcaatgtcttcttctctgactgaatacttcttgaaagtctcaatcgctccttccaaaagcaacttagtcacaacctcattgaaacgagctaccaccttgagaaagaaaaatgaatcagaaccaagtcaacactgcaattgagctcaaagttttcaaatttcactgtaaatcagaaccaagtcactaaatctaagcagcgcacaaagtaagaaagcgattctgagaactcacgatggcgaatctaagaccttcgcctctgataagagaccccgtaacatggcgaacagcagccgtctgtacgaatgaagagcgtaattccttctctacagctagtggtgacgcaaatcctaacaccaaatgttaacatctcaatcacgaaattgcgaaaaaacgatttgagttattataagagaagtgagagaaagcaagcttaccggatgtggatgaggagaatgagagattattggatttgttcacagaagagccaccgtgtatataacaggcggaggaagattgacgcgaattgagctgacggtgtgccgtcggtatcaggcggagacacggcggcgaacgtaatgacttcatttttcgttcgtcggagttttagagacggttcttcgttcttcaggttaagagtgagactgtgaggtccattagcttatcaaatcggttcaaggcttccggtttattattttcattaaaattacggtttcattgaatctattagtttggttagagatttccggtttgatgaaaagggataagctaaaccctacatccccaatcactctcaccggccggaaattttcagacaaaagtgaaagatttaaacttttgactccgtcgtaacaaagaacaaaacttccgtatcctggagagtaaattcctttatggctacgaatgggtacgtttcgaaacctacgaatttcacgttttgattgacggagatga

SEQ ID NO: 10400 - DNA, 411 bp, Arabidopsis thaliana columbia
ctataacttaaaacaaaacagagcatggtaatagaatataacgtcacgagcgatatatggtcctatccggatcaattaaaccaaaccaaacaaaacttaaaatacaaacatctaaccacctatcacattgatcatgttttgccagcaaagaggtaagacctaaagattaagcagacaccttggatatagtgaagttctttttgggaagaaacacaaaattcttatcagcatgttgaagactatagcatagcaagttgcagattgttatcgcggtggctgtgtcccggctttctgtcaaacaaacacatatgcaattcatttccataaccaatataaccgtgtgacaaaaacacttgttcttgaaaggctttggtgacctggcatgtccaataactgtttgtgaggaaggat

SEQ ID NO: 10401 - DNA, 1375 bp, Arabidopsis thaliana
atttctgtctccagcacaatctttcttttcacagaatatataaagtctgcaagcggttggcacaagaatttcaacgcatctacgtattgtggccaacaagtaatcttgttcctgtctttacagctatcatgtgttttattgttgtagttcctatgcccaccaatcgatgatgaaccagtctgattgccctcatcacctgagtaactatcaaccatgccgagtaaagaaactaagctttgccatctagcatcatcatcaaacatagcttgaatcttccaatcatctgttgaatcttctagcttaatttctccgagcttggaattgcaaaccgtgatggacagcccggtcgaatacagtctaagaaccaaattaagttggggtattgcctgccaaccagtcaattataaattaactcatacaccaagataattcatgactaagttgaggcaagtttacatgccaaggagagtaaaactacctctacgaaaatagctgccatctcattcaatttttttgaaacttttgcacagtacatgtctcctgctgctcgaaacttgtgagcgcaataatcgactaggtcaaaaaactccattaaattctcattactttcatcctgaaaaaggaacactgttataaggcattggaagtttgcagtaaaacatcaactgagaggctagcagaaacctaaagtcatccaatctagcaaaagataaaggagcagtctgtggaaattgttactcgatgtacacaagacgatagataattaagatgcaagagatttgtgcaaacctcaaattggcaagataagctgcgcgacacagacattgaaatgtcaatggtcactgacatttgtctatccttacatccaaacagagcagaaagcacctcgcgagcaaactggaaattgggcattagattttattatctattagatgacagcatgtaaaagaaaagcagccgcaagaagggaagacatcaaaggacaagggtcaccttataaactcgatcttttgataatgcagatttataatgttccttcacagttaagtcgcagaaagaaatcactaaatccccattgaaacgctcagcttctctaacgagagaaacagcacatttacccatacttgtcaccatcgctctgtgcaacttttcatacaccttagcatctaagaccctgcacagtaccaaaattgaagcagcattggtctactactataaatcatagaagaaagttaataaaccctacactacactgaccttaaccagcctccgacttcctcaagcaaaagaagaactttccgataccgcttatcatctaactgctgactcattgccacagccctaaagatggccgccacagcatcaacaacaacta

SEQ ID NO: 10402 - DNA, 2023 bp, Arabidopsis thaliana
catcatcttagtatatagtatctacaccatgctttcggttctagtagagaaatgaacgcacaaaccttatcagcaaaaggttcacggatgtatggaaggtctctttcaagatactcaaacatcaaacgaccttgagagcctaaaggttcgccatcatcactggaagagtcttcctgatgttgatccctcaatgagatacagtctactctagcagaaacccgctcggaatcactatcgctgctaacatcgctacttgaatcccgaaaatcactgtcgctactatcaccaggacgcctgccataggaaccgtacatgacataatgaaaaacagcttgttatactataatgctgctatgatgagttcacaaagaattaagaaccttgatttaagagatgaatccaaggcatgagaatgagcatagatttgaatggctgacaaagaagggacatagtattggataacacgatccttgttgttattcaaaacaagaggcacaccggtgcgtaagcactccactctgcaaatgagtcccatatatcaccaagcacaaaataaggcacaagtttattataatcatcatctgctcttctttctcgtagcaatgtctacacagagattatcaccatcaccatcagagaacaacacagacttagattaataaaacaaaaacataaaatagagattgtaataaaccttggataaaaactgagccggtacggatggtgtgaccgactctaaaaaccgatctagattactggaagataaatcggacggctcgagttgttgtttatgcggagaaggagctgatgatggaacgttagagacgtcgctctgagctctacggagctgatcgatgcgctgattggccctgcgagtttttgcggaagtgtagaaaggatcgtcgccgtgtctgcctctcgtcaactgaaatccagcacccaacatctccgagtagtcgtagttgagtttttacctatatatctatatatctatctaagcttaatttagttgatttagcgtgaatatgtgtttgtctccgatgagacggcgaagaagcttggtcgaatcggagattccaaagaaaggggtaaaaatggatcgaatgaaggagaattgatagaacaaaaaccttctgatgatatctaagctccgattaaacaggcaaaagattagtggaagaggaaaatctgaagaagagattcgctgaaatggagagagatttggtaatttcaaaaaaaggggtcaatgaagagagaaagacgattggttagtaattggagggggagagacaaaaaccattgaataacacatgaatccctcataagttagtgtttttacattttggtccttttcattttgatgattgattacagttttacccgaaacttctttgtaattcagttatacgcttacttataaacaagttaatcatacggtaatgcaaggtattttagactgctcagatgcataatgtagatggtgcataggaatgatttggggttatgaatgtaacattttaaaatctgatgagaaatatgtgactatgggaaatataaaggggttaaacattggcaaaagccaaagggcatatgtatattaggaggctctttaatttaatggttgatactcgatgcttgcttgctagatgctgacaagattataaagaaataaaaaagaaaggctgtaaaacatttggtctttctttttttgttcatagataagcttcacaatgttcaagagtaatcaaaaactatactaccattgaagattcgactaatgcatgtacaccaactacattcatcattcattgacaatgacataaacgtatcagaacatatatattcatgtatttagtaacacttatatgagattataaggagttttttgataagtgaaatgaatgaattttcacatattattgagcacctgactctgcattctgcaataggcggctagtttttatcagccacataagtagtcttttattagttgaagatatgcacatgaccaacacattatagt

SEQ ID NO: 10403 - DNA, 983 bp, Arabidopsis thaliana
gtgcggttgtggggacaaggtcatggcccgagttgcagacttctttgaagggtcctggcatgctctgcagttctttgatcagatgggaggaattttcactactgtgaagcgggttatgactcaaggcgcagtccatgagatccggcatctgcaatggaagttgaggaatctcaccaacaatctcacattccaagaagcttacgacataacaggacggattctagggataacagtttgttccctgaggaaacacgagccgcctagatgtctcaattatctgacttcgcctcatgttgtgatatggagtgcagtgactgcatcttgtgctttcccaggtcttttcgaagctcaagaactcatggccaaagacagaactggagagattgttccttatcatccaccatttaacttagatcctgaagagggctcagcatcagttcggcgctggagggacggtagtttggagatggacttaccgatgatacaactcaaagagcttttcaatgtcaaccatttcattgtcagtcaagccaaccctcacatagcacccttcttgaggatgaaggagtttgtgagagcttgtggaggtcgatttgcagcaaaggtatgattcataatctatctagttaatccacaatacttataatccaatgcctaattctatctcttaatcattccaaagctcgcgcaactcgcggagatggaagtgaagcatagatgtaatcaagtactagaactcgggcttcctctaagagaagtagcttcactatttgctcaagaatgggaaggcgatgtcacaattgtcatgccagctactttttctcaggtaaactaaataatgattccaactagaaaacttcctcactcttaatccaattattaatgtatagaggttctatatgtttcagggttcagtacttgaagatcatacaaaatccaagcaatgtagagattcaaaaggcagcaaatcaaggaaggagatg

SEQ ID NO: 10404 - DNA, 1564 bp, Arabidopsis thaliana
gggattagatttagcttcagccagttgttgagagagttaatgtactgcttctgatgggtgacaagtgtatcgaactgaacatgccattcttccaagacggtgcagaactggcgagtctgatggtgatgctgttttgtggtttctttgagagaagttgagatttcaagggcctttagctctccaacaatacctagttgggtgtcgtggtgtatacacatgtttgtccacatcttcgccatcctgcatatccacgagccaaaaaaattggttaaagagagaaaggctttgcagagaatcattagaaggagaagaacttacccttcaactaaggcaacaagtcttggatacaattgatcatcccttaaacggattacttcagaaaccgttgaatccatggattgcatgtcaacaatatatcttgtgtgtagatgacttacagccgcctttgttttctccacggtctctgcactcgcacctcgtttcttatgcctgttgagtaaagataccttcttctgatactctatcttcataagctcaccttgctacaccaccaaaacaatgcactcaactaaacatcattcacttctgatagcaatgatcagcttaaaagttaaaagtaccttcacttcatcatagagtttcttctcccatgctaacaatttatccaacaccgtagcatgagtttcatgctcatctgattcttgatcatcttttccaccttctccattcgaaatgcctcttaacgatttattccaagttataacccgcattactctagctgaatgatcaacatatcctgcgaagcaaaaaatttcattagcaagaaagcaacaattgtccaagaaacattcaacataatcaatagaaacagattaggtaagataatggtagggaatagcaagtaaaaagaggttaaagtgttagttagtcaaatcaagaactttttttaatggctttaaacggaaaaagggcaaataagaaaaccaccaaatctattaagtttaaggttcatcttagattctcataaaagttaaatcacagaccaaaaagtgcatcaaagactcatactttaagaatatttgcatacactaaaccctgatgtaatctacaaaagaaaaaactgtctcttctggttttcttttttttgcttgtttcaataagagaaacaaagactcaaactttctaaacaatccaatcacagacacattatgaatcactttaaaaagcagcaacctaagttttggtaagacaactctgagaaaagcaaagacaaactacaatagaataagctttgaatttgatgattggctagggcacatcaaattcgtgtcttgacagtgacactcaataagattcaccacattgcaagaaaaacacacataaatactttgatcatagactagaccacaccaataagattcaccaaatagcaagaaaacacacacacaaatgcttcaatcacaagagtttcaatacctcggttatctgcaaaattcgagtggtaatgtaaccttgtagcttcaagcatcttagaaacctcttgagcacattctgaagccttaag

SEQ ID NO: 10405 - DNA, 922 bp, Arabidopsis thaliana
ctgacgggctgaaacactttccgggtcacgatcttcttacccgattgttctcgctgcgttttcttgaccgtcgattttaccttcttttacaagtttcaacaaagggttgactccgccttcttcaactatcagtttcacgtatctatcgttatctcttgctaaagaagccaacgacgcggcggcgtctgatttatcttccggcgaaccggtcatcagaaccgcgatttgttcccaaattaagcacaagattggttcgttggctgcgattggcgggagacctaagtaaccaaacccttcgtcgtcatcgttaccggctggagttgagacacggaggagccaagagacgtcgccgacggagttttctagttgagaaatcattttacggaatgctgcggcggggattatgttgaaaagtcgcattatgtagccatcgtcacggcatctttggaccatcgtcaatgctttttcaagaacgttttcagtgtcgtcgaggatacggcgcgtgggacgttcgtagaggtcggagcttgcacgggccgcttgacggagaagagcagcgagcttttccgttttggacttgatatcggcacattcttgtttgttgattgtggcttcatctccggctttcaccacttggtctgcaagttgaatcgggcgagacaatatctgcttggctagatcacccatggataacgaaactggttacgatcaagaaaatcaaaaacgggttgatcttaattttaaagaaaatgaagaaacattttgttggggtttggtttggtttggtctttgaaacacggtttctgtcatttctaatgtatttcttacagaacacgccggtcgtcgccggctttcgttgtcggagtaaattacttattagtacatttaccaagtcgtcttagcccttatcgttcttttttta

SEQ ID NO: 10406 - DNA, 615 bp, Arabidopsis thaliana columbia
acagatcatgatgctcttaaacatatgggttctcaagacaaggtttcggcgagacatgcttcctggtttgcatatttgcaacaattctcctttgtgattaaacataaagctggtactttgaacaaggtagccgatgcttcaagccgaagacattctctcttgacgacatttcatatgtcaattacgggttttgaagtccttcctacattttatcctactgatgttttttcgctaagatttggaatgacgcgaccaatgggattggtgatgagtatctcatttatgatggatttttgttttggggttctcggctatgtattcctgattgtagcttgaggttgaagttaattagcgagcttcatggagaaggtcatgttggaagagatggcacacttcaattgataagctcatcgtatttttggccaaccttaagacgtgatgttgaaagattcattgttcgttgtggtgtttgtcaaactgctaaaggtaaagcttctaatgctggcctatacttgcctcttccgattccaacacagccatggactgacattagcatggattttgacttggactacacaaacacaacgaggtaatgatccatctttgttgttgcga

SEQ ID NO: 10407 - DNA, 599 bp, Arabidopsis thaliana columbia
gtgatcttcatcatcatcatttacccatcgcaagcagtataacatcccatgcctgaaaatgtatcactatattgaaatattgcaaatgatctaacaacattacgtcacattacagcttcttccataccctttcttttatgctcttatatacacaaccaaacatgtatgaatcagaagccggttctgtgctttggcagagaccctacaaaacacacaactctccattagaagctcaagctaccttcttttaacaatgctttataatctcttggcacatcaacccgatcgatcacatccaacactttttccttgtcaatagcaaagtcaagaagcggaaaacccgaagaataccgctttactgcagctgatttgcttcttctcactccacgaaaatactcactgcttttgctcaaagggtcacactttcttgcccgcgagtactcagaatcaaaatcctgactcttgctaacacatggagttctctttctcttgcttgcctcttgtaacatcttttgctcctcatctgttactattgggacactgagtggttcagatatcaattgctggttcgtagtatcaatggagacttgatagaagaa

SEQ ID NO: 10408 - DNA, 518 bp, Arabidopsis thaliana
tatgtagatttgatcctgtttgaggatcaaatttcacaccctaaaagaaatgcttcaccacaatcaaataacacaatgtaacaatagagtcacacaattcgatcaaagtgaatcttacatttagctcattcattgcagccaaggcgaatctatgactcgtgaatgttgcaaatgccacaacctgaagataggtaacttcagaaagcttaaacatcgatagaatcacaaagtatacagcttttctaaaaatgggaataaaaaaaaacagaaattggagatttttacaaacctggtcaccgcgtccagtgtacttgagctgacaagattcgaatccatgacgacgacggaagagattgtggatctcacgagccttaacgtcattaggcaagccagagacaaagagagtgttaatcgccccaggttcgtcggcgagcagtggcagctgcggcggaagatgatgaggatgagaatgaagttgatagacgtagaaaggatcgtacggttggtgatcgccattt

SEQ ID NO: 10409 - DNA, 415 bp, Arabidopsis thaliana columbia
cagtgatgagttttctctagtctcacatagattattcaaccaatatggaactgcaaactctagagtatcatacaataaacgaagcagatatacctcaagatctacctattcagataacaaataagcattcctcattaggaagttaggttatatataaggctagctaagatcacattgttttagaatctgctgactggaacctctctctatgtatagaggtgcaagagcagcggtgtgagagaacttcaagaacaaccccttgtttgacatctccacagatcacccgacaacatactacgaagacatgcagagaggcatcttctgtctatgtcctctaggatgggctccatggagcgtagagttagttgacgcagttgtgtttgagtgattccagttatcatagcagacgacatag

SEQ ID NO: 10410 - DNA, 545 bp, Arabidopsis thaliana
taatttctccgttgaatctccatctttggcgccgttcctgtgtgggaaacgcaagtatttatacaacctggagagaaatctagaggctttgcataaagtaatgcaagacctcaacgcaatgagaaacgatctgttgaagagggtgtcgaaagaagaggagataggtctacaagggctacaagaagtcaaagagtggatttcaatggtggaagagattgaacctaaagccaatcggctgcttgatgaaagtgtctctgaaattcagagactatcaaggtacggctattgttctctgatccctgcgtcgacctatcgttacagtgaaaaggtacttacgactatggaaggagttgaaactctgagatctaagggagtcttcgaagctgtcgttcacagagctcttccgcctcttgtgataaagatgcctccaattcaacttactgtttctcaagcaaagttgcttgatacggcatgggctcgtctaatggacataaatgttgggactttgggtatttatggtaggggtggagtaggcaaaaccaccc

SEQ ID NO: 10411 - DNA, 471 bp, Arabidopsis thaliana columbia
ataatacaggaaagttgacaaacctcgtgacgtagaagggcactactagcactcaaagaatcaactatggcagaaacagcttcctctccaccatgattccttagagcgaacagtgcagcatatctctcatacatgccttttgtttcatccaggagaacttgcctgtagttcgatgatcttaatcaataacgtgctacaaaatattaaataatctagagaatgttgaggtggtcaagagtggaagaacctgagttggtgaacagaagagaaagacgcagctgggcctgctgggtcaacagacatgaaaggtgatttctctgtcgttgatgactggttctcggcatcaacgttactcatgtcttcaatccttttgagagctaattcacatgtttcccgaacctcctgagctggatccgagctcaagcttttctttaaaatgttaacattacccgcaaaccaatagctccaagg

SEQ ID NO: 10412 - DNA, 940 bp, Arabidopsis thaliana
atcttttgaactaagcagaagttccaaaataaacctgataacattgctagatggacccatcgactttgctacataacattgaattctttagttgttaaagaattttgggcttaacttaaaaagtacaaagagggtcttttattattcgcacatggaccagttaaacattgagccgggcctggttataagcagaacatttggggatattttaaaataatggactatggtaccaataattttcttgatccgtatcatcaatttataaatagtgtaatctgacacgatgagctggttgtgtcggtaaggtcaatgactgtcggaactttacaaacttgtgccgtttgatatttcaatctttagtcttttaccaaccaaaacactcaaagcagatctcccagacccactaatggaccaacaaagcgagagagtgaagcaattctgcaatcatccgttaagatacgcaagaattaagcaggagggagtaattacaggtcggtcaaataactgcgatggatgcggtgatgattcaggctacggatattactgtgaactctgcaatattcaagctcatgtggcttgcataggttggccagacatcatcaaccacccctgtcactccagacatcctctcaagaaagtctcgccagagacaattgactatactgatggtaaatgccagttttgtagaagcccacttgttgatctcatgtatcattgttccatttgtaatttcagtgttgatttgagatgctggttaaatcccgcacgcttactatatatgagcaaaagtagcacagccatacattaaccctcatggcgagaaaggacgccttcacttgtaacgcatgtgggttggttggtgaccggaatccttacgtttgtcttgaatgtgattcatgctgcacaaaggttgtacaatttgctcgagtcataacataaa

SEQ ID NO: 10413 - DNA, 597 bp, Arabidopsis thaliana columbia
tgtgcgttggtttcctttatcaatgacccgatttctttctctcgttcttcaactcttgcttctaagattgtaactttggagacagcctccatctcagacacacgaagtctgtccagttcatcctccaagtcagtcttctgtctctctaagttttcgacttgcctctcagctcgttcgatctgagcaagtctttccatcgccaacctctgactctcacttttctccttttgcgacgtgacagcatcagttcgagctttgtctgccagttcagtagcgcgtttagcttctatttcagctgccttacatctctctttgacttcatcgaagcgttgaaactcagatcgatacttttgttccatacggattttctcttgctccaacttattagcctccttttcatatgctagagcctttttgttggcactgtccaacttatcagtcatttcacttaatgttaatcttagtgatgctaactctacctcaaagctttcaagttttgactcagccacctgcaaaagacacaacacaagctaagatccacattccacaaaggttcaactgtttcagcatatttaacagaatgctaggagtacaagt

SEQ ID NO: 10414 - DNA, 1250 bp, Arabidopsis thaliana
cattgaatgtttcgaatcttaaatgtacgtattgaaaatcatcaacaaaaacactttaatatcttgattaataatttattataatactactatataacaagcgtgtgagtttttaacaacattgcataactcaaacactgagaaaaataaggaaaagaagacatttgcattacatgaacaattaattataacttatcatagtgtataaagtttaattgacgatttttaaaaaaaacattataactaccactaatcaacattattaagacattgatccgaagtatacggcgattgattaatgtgcgccatgatcatatatttgaaatgatagccgcaagcagttcgaacatatataaaaataaaactataaaaaaacaatccagcttagactgagtgaaaaactcaaaaaaaagtagtaattaatgtttatggaggatcaattttataaatgccgacaaaaagaaaaaaaaaaggatcaattttataaattcaaaaaaatatatataatacgataaaaatggccttattgataattaatgttgcaatttgcacgatgctgagctggttttatgggtaaagtcaatgagtattgggtaatacaaaaataatgtatatgtcaggtcactggttacacaatttatgtatagctcaaagaaataagagttagcaaggatcccagactaccaatggatcaaccaaagcaaaaagtgaagattccctgcaatcatccgttagaatacatacaactgaagggtggaggatggcccggatcatatgactatgatataaatacttgcgcaggatgcgatgaagattatggcttctgctactactgcgcaagctggcagttttcgagcacattcggaatgcatcgagtggccagacaccatcgaccacccgagtcactccagacatcctctcaagaaagtctcccccgggacaattgactatacagatggcaaatgccatttttgtagagaagaacttgttgatcccatgtatcactgttccttgtgcaacttcagcgtagatgtgaattgttggaggcatccgccacagcgtactatttatcaaccaaagagccacgagcatacattcaccctcatgccgagaaagatcacattcacttgtaacgcatgtgggatgcttggtgattgcaatccttacttttgttttgaatgtggattcatgctgcaaaaaagactgcattgatttgccccgagtgatcaacatcaaccgtcatgaccacc

SEQ ID NO: 10415 - DNA, 871 bp, Arabidopsis thaliana columbia
cggctattttggtgatgagcaggaaagaacatccgattatgccgcttagagtttggcttttggggtatgctttcaatgcgtgttgcatatggtttgtgtctgtgttgagtatcggaggaggaacaggaggagaaccaataggacgacgacgacgactcctccacggtcacgttcttcttcttcctcttcatcttcttcttccttggaggaagaagctttgggttccaggaggaattcaggtgtgcaggacttgtcgcttggccacttggataccgaaagcagcaggtatgaagttttggtgtgaattttgcctcaagcttgcctaaatttcgaattacggataagtagatacttgcatgacctgtgagctttagctggtgaaagaaaatattggatgtgatagttatgatgacttaaagatgtgagttttggtttgaatgatcgaattgtttgcttattctgttatcttctccaacttgtagtggtttcttatcaatacttttgtctgcaccttttacaccaagtgtatattttctgttccttgatgttttggtatgtgttcttatttcgcttaccgtttccaaagcagtgttgctaagcatctggaatctgccaatacgatgttttcttttatatggtggatcattggattctactgggtatctgctggtggccaagagttggcacaagaatcccctcggatttactggtttgttatatgcctccatcttcaatgttaacctattcaaccacttccactactgaatgtctttacttatttcaggctgtctattgtctttcttggtttcgatgtgttctttgttgtcttctgtgttgcgttggcctgcgttattggaattgcggtttgctg

SEQ ID NO: 10416 - DNA, 629 bp, Arabidopsis thaliana columbia
gttttttctgaacagttttgtatctaacgagtttgtgattgtgttttgaccaaagtaaccaaagataagcaactacaaaaatcggtagagatcttattggttgcaggatcttgtcggttgaaaagagctcacatgatcccgaatttctcctctcgatctcaacggcacattctctgtttcaacaaatatgaccgttgtgagaaaatttccatatttttttgtttttagcataattaatgaaatttcctttttcgtaacctagtcggaaaaaaggaaatactcgaaaatttgctattcttcttcttctaaacgacaaaaaataaatccatattttatctacgaattttaagatctccgatgatgatccattactaaattatctctgaaacaacttcgttcttcatctcagaacctatccgtaagatttgagcggaggaaagcattctcttatcgtgatttagttatggtctcttctaatttaacccttcttgttgattcgttaccgtggatgcttcttacgctattctcaccagcggattcggtcgacggtggcgactgagaacgacgaccatgtatcggttcgaatcttgatggagtggcctgaggatgaacgaagaagaagatgtcac

SEQ ID NO: 10417 - DNA, 696 bp, Arabidopsis thaliana columbia
gggtttgagtagaaactcagatgaacgttacttggagctaggtcaattagagaatgaaaacaataggtacatttgttttaagcttcagtgattgtgaaacagatattgtcttatatgtgatgtgaattttggctaaagcagtgttttctgtaaccagttttgctaagcatctagaatctgcaaatacgatgatctcatttatatggtgggttattggattttattgggtatcttctggtggtcaagagttagcacaaggatccccacagctttattggtttgttgttaatttctcttatatctcttagattcttgaatgtttaaagtgtttaagttcttaaatttgtttggatgtctttgtttttataggttgtgtatagtctttcttggtttcgatgtgttctttgttgttttctgcgttgcattggcttgtgttatcggcattgctgtttgctgctgcttgccttgcatcattgcagttctatacgccgtagcagaacaggtagcttcaaattacctgtttcttttgttactccaagaaagttggatttgtccaatgaaaatctgttgcaaaatgtaggaaggagcttcgaaagaagacattgaccaacttactaaattcaaattccgaaaggttggtgatactatgaacacactgttgatgaagacaaggacaaggagatctggaggagtgat

SEQ ID NO: 10418 - DNA, 520 bp, Arabidopsis thaliana
ttcatttccttcaccaaggttaacctcaacctaaccatgtaaagatcaaagaaatcaactaagggaaaaatgcatggaaaacttatcttccataataacattgtaatattatatacattgagaactgtaacgaaagatcacctttgtctctcccagaaatggcattggtgttgaaccatatccgcccaaagaccttgaaggatcatcagggttaaaatcaccattttcacgagcagccttagctgcacgagcttcccatgccggaaaaggttcaaaggcagggaacggtaggtcttttactctatttattagttccatcaggggtttcagttcaccctacattttatttccaattgtgtcaacgcacacactacagccacagtcttgttttgttttgcaaatctcaagcattggatatttaagaatgaatctcctaggaaacttaatcatatatcgttctgatttcatcatgaatttggaacgatgcacaagcttcagtgaaggcaaatcaatttgtgtt

SEQ ID NO: 10419 - DNA, 567 bp, Arabidopsis thaliana columbia
tgaagctgctcctgactcgcctcctcctctgtttggcattgaaacacgacttaagcaattggaagagaagttggattttgagtgcaaggatactcttaccattggtgttgttgggatgcctggtattggtaagaccactctgactagtatgctttatgaaaagtggcaacacgatttcctacgctgtgtttttcttcatgatgtccgtaagatgtggaaagactgcatgatggatcggagcattttcattgaagagttgttgaaggatgataacgtgaaccaagaagtcgctgacttttcacctgaatccttgaaggcactcctactgagtaagaaatctcgttgttgttcttgataatgtgagcgacaagaaacagatagaggttcttctcggggaatcagactggattaagagaggtagtagaatctttatcacaactagcgacaggtcggtgatcgaggggatggttgatgatacatatgaggtcctgagattgactggtagagacagctttgagtactttagctattttgcgtttagtggtaagctttgtccccagtgagact

SEQ ID NO: 10420 - DNA, 577 bp, Arabidopsis thaliana
acattaaacttcattattttactcttgactgagcatttccagacttgaatgtgaaccaagcaacagaggggaaagctcacctggatgcttcaggggtgtatccaatgacatagtatgagaggcaggtccaaacgagagattcaaagaacgagagagggacctttaacactgttgcagggattgcatacgcccatgcaggatagaaacacaactgcttctgcttataaaacacggctagacgttgagccgtcatagacaactctgggaatccgtcaacaagaagtataatgagggcgaaaaagagggcactcatgtaagaatttccatgaatgatatcaatacccatccgtgttcggataaacactgtcatagtgatgaatgcggccataacaagctgcgcacataaagctagaaagctcaggaatactatcgacatctaaagaagacaaggagaaaatctgtggaatggaactcttattgtacctgagcagtcttgagaatatagacgaaatagtttctcttcatgagaagatacctcttgatatgatgctatgaacagctcccagtttggaagaga

SEQ ID NO: 10421 - DNA, 374 bp, Arabidopsis thaliana columbia
ccccaaactaaccggttcataacaatacataagtctttaattttgatttgcagatggagaaaagtgctactcttttcaggccaaaattgattgttgctggtgcaagtgcttatgctagattgtatgactatgcccgcatcagaaaggtaatttcagtctcatatccaactacagaacagattattgtaatcagtagtgagttttgattcgaactcttttcccaggtctgtaacaagcaaaaagctgtaatgctagcagatatggcacacatcagtggtttggttgctgctaatgtaatcccttcaccgttcgactatgctgatgttgtaacaccacaactcacaagtcacttcgtggaccccgtggagccatga

SEQ ID NO: 10422 - DNA, 971 bp, Arabidopsis thaliana
atcctgaattgtagtatcagggtactgctggaacattctgttcaaatactactagggacgtctctagagataaacatttttcttgtaacgcctctaccggtgggccccacatcctctcttgcacccatgggctcaccccaaactttataataattagggagcaaaagcttcagcattcttttcagtagattaggaagatacaagtcttcttcctcataatatggcttgttgagatcaaaattacgattggtgctagaaattgtcttgttgatagattggagattttctgatttgttttctttttgtaacagctcaaccttgggatgaacctattcttcgtcataacatggtttatttaatttgaggatttatcaagctaatgggttgaacatcttgtgatttgctttctcgtttcattctttatgtacatatattttcgtttttgttcatagatgaaagactttgattgtagcaatatagtgagttaagaagatgaaaagtgaacaaactaacgatggattagtttagattctaaaaataatcaaatttttgattatcggttggttaaaatattgaagatttgtatagatttagaaaaaatctaataagatttgtatagtccccaacctcaaactcaaactctcctcctcttgttagtataactccgctttcgatcctgagcttccttcatgttcagcttaagaacccggattctctccgtggtctcctgaacataatctgcaccctatatgctcctctcccccacttgggtccagcataacgatgtcttgcatggcctcccgtacaacgcctcaaaatgagccatcccaatactcgcctgatagttgttgttataagcaaactctaccagactcaagtgatcccccaatgatcacttaatcaagaacacatccgaacatatctcaagtgtctggatagtactctcagattgccatcatgctgaagatgat

SEQ ID NO: 10423 - DNA, 559 bp, Arabidopsis thaliana
tctgaagacctcctctacgctatggttaagctatgtgatctgacaacgagttttttgttgcagtgaagttgattggtaaacttcaagatggaacaaccgtgtttgtgaagaaaggtcatgaagaagatgaggagccgttcgagttcaagattgatgaaggtataatattcatatatacagaacttggaatattgtttcctttttgtatttgacatttcacggctatgatattaaatgacagaggattggtgatctgtgcagaacaagtgatagaagggcttgaaaaagctgtgatgggcatgaagaagggtgaggtagcactcatcacaatttcaccggaatatgcttttggttcctctgaatcaaaacaggagctggctgtaataccgccaaactcgactgtatactatgaggtcgagttggtatctttcatcaaggtgagaggattcacttcgtgagtgttgttctttctttatgaagaaacttaagtgtgctaatgatatcgtctctcttgatgcaggagaaagagtcttgggatatgacacacaggaaaggatag

SEQ ID NO: 10424 - DNA, 534 bp, Arabidopsis thaliana columbia
taaaaggaataaggttttaaaatgttggatatctttttattacagggtcggagcacatacttacgaagactcccgacgtgtttgtccaatcgttgaatcatgttgggcacaagacccggatgcgcgtccggaatttaaagagatttcggttatgctgacaaacttgctaagaagaatgagctcagacagtagcattggcacaacactaccggatggggaagcttatgaaggtgagatggaggaatcagagaactctcctcttcttcaagagcatttttgcaaggtgaagaaacctaaggagaagaagaagaagaagaaactggtgaagatgagatttcctttctttaagaagttcaaggtttggttgtacaactacaagccatgattattttttgtgtctttccataaaaataaaaaatggaaagttggtggatttaaggaaagacaagactgaagattctgttagtgtttgttctttctttcatctttgtgttttcttgttattttttctgtttttttttttgtgaggaaatt

SEQ ID NO: 10425 - DNA, 550 bp, Arabidopsis thaliana columbia
cttattacacatctcgagggccaataacggtgttcaaagagctttgtatcatacctagttgtcttcttgtagtgtcgataagctcccaagttaccatactttttgtccgcagattcctgcatttatacacaacaagaatgttgtttctgctgtgtgatttataatatacaagagcggaaacagagaggagagatagagagaacctcgagtaatggtatgccgctaacgaagagaagtagcaaagtgagaaagactggtccaattatgacaaggtactcgagacctttaagcacaggcaatgaagccacatataagccccaccagagtaacatctgaattcataatcacgcccatcaatttgttttccttgggagcttcttctagttcatacaacaaacccaatatgtatatcgacaaaagtttctcgtagcgatactaacctcaccaaagtagtttggatggcgtgaatacttccatacaccaacatcacaccattttcctttgttttctggacacttcttgaacgaaagcttttgttgatcagctgtag

SEQ ID NO: 10426 - DNA, 567 bp, Arabidopsis thaliana columbia
gactctagcacagtgcaaacaaacattctatatccacgtttaagttgcatatagtgcaacgagcaaataaaaattctaacttactttgacaaaaatgacaagtgttttcatatatacggccagatgatgtgaaaatatgagtatacaccttgagaatgtgattgcacagaaagggtcggttgagggaaaggctgttgatgcattcgtcgtgtaacttcaagccgcaatccatacactgatatctgatgcgagtgactatttctcctagaaacgtagagaaaaggcacaaagagcaagaagtcaaaaattcagaagcataacttgataaaggatgatgatgaaacggaaccatgatttcagatatggtttccacttcgaaatcatcagtagaagacatttttacaatcaaaaaagaaaaaagaaagaagaagtttgagtttcaatttttgtcttgcgagcttgtacttaacttcctttgaactccagctaattgatcggccgccagctcactaaacaaacatatgcaagtttacatattttagattttttgtcttcttttttaagttg

SEQ ID NO: 10427 - DNA, 556 bp, Arabidopsis thaliana
caatttaaagacattgaatccacacaaaatgtaatatagcggacaagcaaaagcagaaatggtccaagaaaatggcatgttaaagcttaacaatttgaaacgaataaaggatgcattagaatgttgttgttgctcagagattgagtcgtcctttgatgatgtcaaggctcatctcactaggatcagttgcttgcaattcaacttgaattccttccatttctctcttgaacctgtcttttgagcttgcatacaacatcttactccgaactctcgatgtatcaggtgacctgatcaatacaacacattcatgagcatttgagatcatgtggaaaaaaacatgttaaggagagcaatgtgttgttaccacgcgatgaaaaagatcttgctcttctgacaattgtcctctgtggtgaaatcaaaatcgtagacagcgtatcggcattcgtcatcggggatagagctggtaaaatcgtcgtaagtttcttctggattcccaagcttttctatttgcacttgctgtgccttctcatcaattttgaacacaatgaacctgtaa

SEQ ID NO: 10428 - DNA, 349 bp, Arabidopsis thaliana columbia
gatgtgtctttcaggatattcaacatcatattcgtcatcgattttaatatagaacaaatcatcgatagttcgttcaatctttatcctaccaaattgtgactccacagatggaaaattaatcctctcgcgagtaaatagattcataacatagagattatatctagaatctcgcataaagagccaacttccatatatcgcccaacaatgactatttgcgaattcaacacccagatctttaattctataggctttctccttttcttcagaattacacaagagaccatagtctttacctttttctggcatcatgatctgccaagggatctgattttttgacgctgattgtctt

SEQ ID NO: 10429 - DNA, 476 bp, Arabidopsis thaliana columbia
ttcttatgaaccgatcaagatcctcgatgacgtcacgtttgagatcatcttccatagccattgtctcaaaggtcgaagggtgttcaagaataactgattcccatctaagactgttgagagaatgcagcatcaagattcttctctcgtctcttatctctttagctttactctcgatgtaaggcacataagagttcaatatcaaatctttatgtttcttgtcgaaactcagctcgaagtactcgcttttaccgtcatcgtccataccacctcttcttcctcctcctcctcctcttcctcctactcctccgccgcctcctttcttgtctccaccgtcagtaacaaacctccatactagctgcacatcttcgtacacatcgttgacgatttctccgtcgctgagatacaagtagacatgtttatacttatggcctttacttatactgagcctgactgcatcaggactgatcttggtggag

SEQ ID NO: 10430 - DNA, 535 bp, Arabidopsis thaliana
accctaatttaacttgcttagatcgaatcagaataccaaaatcatcagatgattgcaaaaacttgtaactgtgtgtttatatgaaaattgttccaaaaatctcaacaaaaacaaaaaaaaaaaacctcaaaggagtgatcagttggtcttaggatcaggcatggggaacaaaccaccagcaccagcagctcctcgcggcggagaaaaccctagaaatttctgtagattggttctgatactaattgaacacagcagatagagaaaagccatggaacaatccgtcggatcatcacctttcagtcccctgtgactcatcttcttcactatcgtgatcggatggaaaggaagcttcgcgacgactttaccttcgaatagtgaattgagcaatccgaagacgacgaagagaaccagtgccacaacggcgccggatttgaacttgaagagtgacagatctcggctcgattcctttaagctggtttcaacgcgatcgatcttcttcgtctttgatttctttatggatagctttgacgatgga

SEQ ID NO: 10431 - DNA, 588 bp, Arabidopsis thaliana
cttcaatctcgcccatgtatgaataaaaatgcactttttaaatatagatttagagatactttagttgcagatttttctaataccactatctttgttgttgtttctttgagagcagcttcaacggtaatcttctacaacaaatgcaaacacccagtttggccaggtatccaacccagcgccggtcaaaacttactcgccggcggtggttttaagcttccagctaacaaagcccactctcttcaactcccaccactctggtccggccgtttctggggtcgccacggctgcaccttcgacagatctggccgtggtcactgcgccaccggagattgcggcggttctctctcctgcaacggtgccggcggtgaacctccggccactctcgccgaaatcactctcggccctgagctagacttctatgacgtcagcctcgtcgacgggtctgtaaatcttacatcaaatctgctttcttttttacacaaacttaacttacttttttcactaattttgtaatgacagttataacctggccatgtcgattatgccggttaaaggttcaggtcaatgtagctacgccggttgtgttag

SEQ ID NO: 10432 - DNA, 573 bp, Arabidopsis thaliana
ttcaatgtttattctcttccaaagtgggaactattcagagcatgcatctcaagagagtttcttctcatgaagagaaactatttcgtctaccttttcaagacgtttcaggtacattgttcttcctatttgcagatatctatttcttttggtctagtgttaatactaaagaatcttatattgctcagcttgttttagccgcaatcatcacaatgacagtgtttattcgaacaaggatggacatagatatcattcatggaaattcttacatgagttgtctcttttttgcaactgttgtacttctggttgatggtattccagagctgtctatgactgttcaacgcctttccgtgttctacaagcagaagcaactctgtttctatccagcttgggcttatgcaatccctgcaactgtgttaaagatcccctctccttctttgaatctctcgtttggacctgccttacttactatgtcatcggatatactcctgaaccttaccggtgagagcttgaaacctctcttgcttgctccaagcctgagaatgacagaaaaatgtaatgtaatgatctatgatg

SEQ ID NO: 10433 - DNA, 557 bp, Arabidopsis thaliana columbia
caaaaactcgaaaaacccacaacatcaaatactctcttgtgtcactatagatcaaatgtcaaatgttttctaagtgagaatttcaatcaataaagcaaaggaagaagaagagaaccattcgacaacgctggaaacatgaacggcccaagtgggtaaagacaacgcattggacggttcgcttagctgaagagaatccaccaccgccgccaaagcagtagcatctggtcccgccgtgatgaaagcagccgcaaccaaactggttccgataagacccgacagcgcaaccgggtcatgaattaaactgcggcttcggatccgaattacaggttcgttagaggtggtgagagaagaagctggacggctctcagaatgaattcgccggaaattgggtttggcgcacgagaaaagaacggtggctgttgaagcaatcgccatggctgagatttttctccaatttccaattcccaagttctggtttaattttaaaccggtttgctgttgaacgtcttttacattttccaaacaaaatttactaatcggtttattacaaattctgg

SEQ ID NO: 10434 - DNA, 742 bp, Arabidopsis thaliana columbia
tgatctgaaaacagctttggaggaggaaaatactccgaccaaagaggcaaaatctccggcaacagagacaaagtattcggtaacagagaaaagagctccggctgacaagaagataacaccggaaatgatgccggttactgaagatctgaaaacagttttggaggaggaggcaaaacctcctgcaacagagacaaaagctatggttgatgatcagaaggtgaagaacgaagtggccgttcgtgaagagaaaatcattgacctcgtgactgtgaaagagaacgaaacagaggcgaaaacagagtaggtgggaaaagaataaacacagtgaaacagccttgaaacgctagtttctgcgttcttgatagcaaaatgcttgtttttgtttagattatatttttcctcgatagataaacgcaaacgctgtattctttatatgaattgaaaacttcaaatttcctattgaccgatccgtcaacccaaaagaatgtcaatgtaagaggctacgaagaacgtgtttttccgttttcgttttctgcgattgcgtttcaaagagaatgcatgcgtaaatcggtgcccgttacaacactttcgaaagttatggtttggactttaatgggccgatacgggccgtattataaaagatttgtaacataagcaccagtttaatggaccgaacttcgtcgatcgagatctaacgggcgagtaagaaccgggtcggaaatacggatccggattctgagca

SEQ ID NO: 10435 - DNA, 977 bp, Arabidopsis thaliana
tttgattgattgatcttcatttgttgttgaattttgattttcttttgttgaattgtgttttggttttgtggtttttgtgttgaagattcgatctggttctattctgtgggagtaagaaggagaagctagcttcagggatttttgaaccattcgtctctcatcttaagttcgctagagatcagatctctaaaggcggttactccatttctctgactcctccttcttctcactcttcttggttcaccaaatccacttttgatcggtaatttcaattttgataatccggcttcgattttgttgacaatttccaaattcagattcgaattatgctaattcgagtagaaatctggtgtttatgtcaagtttgtgataatgactttgtgatgataaatggtgtgtggaagatttttgttactgtgtagagacaatgttgacttgttattgattaagtttctttaattgtaggtttgtgagatttgtaaacacgcctgcgattatcgaaagatttgcgactctggagaaagagattttgcagattgagaattctattcaagctaatgaaattgccaatgctgctgatgctctgcaattacaagacggtaagctaaaaagctagcttgtaatggcaattgtgttggtttaaacagcgttcttgacattatcttaatcctgttttgcttatcatttgcagggagtaattctggagatagcagtaatctaaagaagtcgaatgagtcctctaaggtaactcgtgcgcgctttcaagtggtactgtgttattttcgtaagggctggtttggtgaattgatttttttcgtctcaatgtattacacagaaggaatctgagaatggcaatgaggtggtaggagaggaacctctaagtaactcttttaactatggaacatttcttttggtgcattatgcactgatggtgagtgtgctttgactaattctttttttgtgttgtttcattatta

SEQ ID NO: 10436 - DNA, 550 bp, Arabidopsis thaliana columbia
cacaacacgcccatcatcgatgttcattcgaggaccatatgagttgaagattctagcaatgcggatttctacaaatgacaaacaggccaatgagaatcttaaaggaaacactggataaagaaaaaagtgatgcagtgagtttagggaagtagaaaactgaccaatgccatgttgtctgtggtagtcaaacatcaaggtttcggctacccgcttgccttcgtcatagcaactccgaaccccttttgataatagcaaccaggttaagtttacaaagctgtaaaaactgaaatgcaagaagattcctctataagatgagaacatttgaggtttaccaatagggttgacatttccccagtagctctctggttgagggtggatgagaggatctccatacacttcagaggttgaggttagtaaaattctgtttcgaaaagaacaaatagttacaaagccgagcattttgaaagaaggatgtgattagaaaataggaagcagaagatgtcctgaaccttgctccaacacgcttggcaagaccgagcatgttgagtgt

SEQ ID NO: 10437 - DNA, 580 bp, Arabidopsis thaliana columbia
cggttgacccaactagggattgatttgtgagtaagtttcaaagaaacatggttgcagaaatggttgcagttccttgtgatgagatggtacttgttaccctgatactcttctgataatttctccataaagcttcgaacttctttagccttcatctctgtttcaccaacaagaatcgatttcctgaatgtgaaaccaggacacttctttggctccacctcaaaaatccccgagctcgatttctcgtgtgccccgtatccatactcaaccccatgaactacaaacaaggaatagccaaaaccacgagagaacattcaatataggattaacaacaacgtatggcgtgtgtgtgactgagtcattgttcaaacaacggccacaaaactctaccctcctaagttgttatcatcaaaacacatttagtctctaaatcgattctatgaccaaaagtcaattctactctttaacaataaatagttttcatcgatcaaagcagactttagaatcaaacaaagccaagcaacaatacagacaatggattttttcacaattaatattacaatccacaaaattgacctactat

SEQ ID NO: 10438 - DNA, 547 bp, Arabidopsis thaliana
ctacacttagaccgtgagccaaacttggcatgtgaaaccttgacgcagaaaccagcgtaatgttagcctcgtcacgaataaacgccccatcaccgcagtcagcgccgctttctcttcatgatgcgtaacggcatgaaatttcccgtgaatcgattgcaaatacgcgcgtggcccatgcaactggaaattcgcactttcgcctttgtcgagcacgatatggtgcagccacagcagctgacggacttacagggaacttgaatgtgcaattcaaggaatgggagggggtcatctcatttttggatctgcaacgaatgaattcaagagataagagaattaaggataccaccaagaagactaatccaatccataaagatgtaccagaaaatacaacatttttgttactcgaccaaccatcaggagacgcaaatacaacgggtacactaatcagtaagattgatgaagtaataattaatgcaaaaactgccaattggaaagcaatagtcatgtttttaacctccaagctattacaaaagaatatcaccattta

SEQ ID NO: 10439 - DNA, 588 bp, Arabidopsis thaliana columbia
cactcattgtgtcattaacaaaaacattaacatatacacaaaattagcgtgtaattagtttatgctagttactttgtcatactagtaaacgtttcattaacactgactaacactgatttgaggattttagtcaattttgaaatttacaaaagttgtgtttaattttcttcgcttaagtgttaaatcttcattcaaacccttttgatgtataaaattccaacaaataaactgttatatcaccattgttttatataagagttaatttgtatataggcaatttatcaaaagtactattggttaacttttgtcttaggggctagaccggccatgagagcggctgcagcattaccggcgttattttcctcaatgaaactaatggttgagttgattaatagtaaacacactatccccacaaagtcttgccaatccggtggccgtcctcctccgttggccaaagcgattgccattagtgcagcacctccatcacccacgacaatgggtccacatgaacctaaaaacttaagtacttgcttcctgcgtgtacccaacacaacattaaggagttcacaatgattgttcaagggacga

SEQ ID NO: 10440 - DNA, 606 bp, Arabidopsis thaliana columbia
ccagcaaacatcaaatagtcaaatacaaagaaagtgtgaaagttaaaaccctaaacccttaatttgagctctctgctctcctggttttagttttcctctatttcgtgctcaattcgcttgttctccagttccactctgtaaggatctgttacttttctgtaatcctctcaaaattcaatgcttttgcttactgggtctgatctttgcaagtgaaatgcatgacatttcgtccaaaatcagaccttgcaaaaatggtttcttttttacctaatctgtttcgtctgtgtgttttgatctttacaaaagcagatcagtgccggcggcgatattgtccgaggataaaacatgtttgctctttccaaggttttgcggaggttggtttctcgattatacacttgttataccatttgattctttatttacttttttcatttgtcttctctatcccaaaattggatataattaacagttctctagcatcatgcgagattgaaatgcttcagtctcacagctttctattattaataattttttcagaagtcagagtctccgcctaggagcttgcaatgctggctactctaagctagatatccattgggagaaaga

SEQ ID NO: 10441 - DNA, 486 bp, Arabidopsis thaliana columbia
tgttttacctttacgtttcacgtgattggaaaaaagtcgggtatgaaacagcaaatggttttctcatctactctaatcaattaaactatgaatttgacgaatacgtttaatttcttttggtgtaccaatgctatagttatattttaaggaaaaagagctaggcttaattatgtcctacgaacatgtgatctcttctaacttcactcattcttcccacaaagttccttggctgctatcttcgaccatggatatgttgaagaagcgaaacgtcgatgaaaatggaatcgcgatgctacacgatggagtcagtggctatgtttcgtttcgattggtgccacaagacgcgaggaagattaccgagcttttctttgctgatcagcttcttgatatctttcaagaagctattgtacgacatccagatgttctttttcatattttttgaaaaattgttaaatgtattcaaagaaaaacctggtttacaatata

SEQ ID NO: 10442 - DNA, 622 bp, Arabidopsis thaliana columbia
ctttgactgagggatcaaaacattgaacccttgcttctccaactctggtttcacagctctaatcgccgaagtgaactgaatcgtgcctgcaagaatgatgttcttaacatcactcgcgagattcagatgtatagtgttcaacaagcatttgacatctatctggatctcaacaaaaacataaaggcaagggatttttgtagagtcgatagggacaagacaactatgtccatagtgaataagcaagtcagcaccaagcgcacaagcagagaaatcatcaacacaacaagctccataagtaacatcaccgagtacaaaacagtgagaagctccagcaaaagatgtgaagatatcagagagtgtaagagcgtacataagaagaccctctggaagctgcagagctatgcgtttagcgtttgatgttttgatacgccacacacatttatggacttcaaaatggtaaattgaaggtaagatggagatagcagcgttgagggatgcatcccgaggattgaatcagggatttggttcttgatgaaacgttttggaggttgctttggtttgttggtcttgccattgtttggatcagaaagctccatactttggcctgaacataagagaagat

SEQ ID NO: 10443 - DNA, 918 bp, Arabidopsis thaliana
aatgacaccacgtcttgtcaacgatattgtacgagtctagtgtcttgattcgatccatagcacccactccaccgaaaacgtatacgtgttcctcatccgctgccatcgaatggagactacgaggagtgggtccttcttccaccggagttagcagtttccactcgtatggtgtagtgtcaaacgagtagataccgttgtattggcgtgaaaagtctcggcctccaaaggtatagagggtcgatcctactgacaccatccggacacctaaacaagagaggtgtggaacgtctccggtggctggagcaatggaccaagtccgggtctcgaggtcaaagacgtaaaggtgtttatcgatgggctgatttggtatgagctcaccaccaaaagagtaaatcttgttgcctacttgagctatgccatgtgagcatcttagccctgggccttctccattttgctccaccttataattaattagtaatatttgttagctatttttaaaaggatttatattctgattagtaaatttccataattgtaaaataaaattaatcaaattataaattgcaaaactgtcattaattatctaaattccaatttttccctctctttttttttctttcgcgtccgtggtttagtatttttggtgctaacaaacaaaaccttcaatatacatagttgtgggagatctttgtatgttggtctaagtgattactaccttaatccagtttccaagcaatttgggagtggacggcaaagaaacataggcccctagggaatgtagaacgtcggtcgaacgtccatgaaacccaacgatttttccaccatgtagcacaaacttaaccccaggttttttaacgataggctgagaggttttgcctttagaagtcttgaatgaaagaaacgtgatcatttctgagg

SEQ ID NO: 10444 - DNA, 972 bp, Arabidopsis thaliana
tgcaaaatgcggtaaggctgacgaagccacgctgcttcttcggtttatgctgaaaatgaagttggttccgactattgctagtttcactactctaatgcacttgtgttgcaagaacggtaatgttatagaggccctggaattgagagtcgtcatgagcaattgtgggctgaagcttgatcttgtgtcatacaatgttttgattactggactttgcgccaaaggtgatatggcacttgcatttgaactctatgaagagatgaaaggagatggatttttagccaatgcgactacatacaaagctctcatcagggggttacttgcccgggaaacagcattctccggggctgatattatcttgaaagatttacttgcaagaggattcataacatctatgagcttgtcacaagattcacacagaaacttgaaaatggccatggagaagctgaaggccttgcaaagtaacaagaaggattaacatcagaacgagctttaagagtaatcatatgatcaacttccgtacgcaaattagtattaacgcttattacaggcatctgtttctctgtagcacggttcgttctgaatcctaatgtttgttactctctctgagatccttacaaatccttatttatagtgttttctgttttctagatgatattgcagtttgtcaccgtgaagagctggatttgcaaagtaatgttctctcgaagaaccagctaaagctctttgaactttgtctgattcacagtatgcatcttactcattctctctctgattgacaataaattatgcatcatagtgatgattattttactttcttgaggtgagtgccagtcagttccagaagcttaagcttgtactgttatacagaacaagacaagcaagacagtgaaggtgcaacttactggctcctttctctgacaaatacaactcaaaaactacaccaaaggagagtttgattgaatctcttaaact

SEQ ID NO: 10445 - DNA, 418 bp, Arabidopsis thaliana columbia
ttggtttcgggatgatgggggcatattcaatcgggtcgcgactttcttctcatgggctaaaaaccagtccttggcttgagtaattgcttgcgtcaggactgtccgcggctaaggatgaagatcattaaagatcttgttgttccttgccgtccaaatcacccaaagaatccatggtgccaaaaatccttctccaagcccgattggagggaggcatgttagtaatttggaggcttcgaaaccggatatgaagcttgagattcgctccaagtttagtgagttcttgaagggggccaattgccataatttctttgcaaattgacaattgaagaagaggtgtaggatcgattcctcttcagcttcacaatggatacaacgagctgattccaggatatctcaggacttcagattctctccaaca

SEQ ID NO: 10446 - DNA, 606 bp, Arabidopsis thaliana
tgtccctccaactgctcttgtgaagataactcattctgtattcaatgtcaacgatggggtgaaggggaacaagcctcgggagaagaagctggttagtaagattgcttctttccagaagtttgtggctcatgatttcgatgcaagtgatcatggtacttcaagcttccctgtaacttctgtgcaccgcattggtattttggacataaggatcttcaacacagaccgtcatggtgggaatcttttggtgaagaagctcgatggagttggtatgtttggtcaagtggagcttattccaatagaccatggcctctgcctgccagaaacacttgaggatccttattttgagtggattcattggcctcaggcatcattaccattctctgatgaagaggttgactacatacaaagtcttgatccagtgaaagactgtgacatgcttagaagggaacttccaatgattagagaggcgtgtcttcgggttcttgttctctgtactattttccttaaagaagcttctgcatatggtctgtgtcttccgagattgggagatgatgctcgggaattctgcctggagaagagagcaagtgaactggagttgtgtgtatg

SEQ ID NO: 10447 - DNA, 806 bp, Arabidopsis thaliana
aacggccgccagtgtgctctaaagatgttgccagctttcaccgcgtacattcgaataatgaaaacttccgggggcagagaaaaaacgctccggctgttggcgaataaatgccgtcgccagaaaatgttttatttgttcgataccggcagccgtaatgatattttttacggtgatgtaattatttaccgcgtcatccagtaaataatggctgttgttaatgatcaataacggctcaatctcttcgcgaatggcaacaagttcgcttaagctacgggcaataattacccgacaatttaaaacatcgcgctcaatggcgagctgattaatagtggcaatcgcgttctggtccgagagcaaaatgatcggctggcgttcgttttgatgccgctccagcgcacaggcaaaatacaaaccgatcagatcgctgtcgaaaaggggaatatcgagctgttcacgcagtagcgtaataaagtgcagactcatatcaaaggccgccaggccaggcggctttcaggttattcatgctgctctggcggtgctcagcaatccacactggtgcggcaaggcaacgtaataaatgcccggtaatattctcaaccgagtgcgcatcaataatattcaatgacgcgatgcccggcaccctttgcagcaacccctgcacattatcggctgaaattacctgcgcttgctgatgctgtttctctatcaaacccgtcagggttcttacagcgttatcaccaagaaacagaccgctatgttcaacgatttgttttatctcgtcaccgggactttagagcacactggcg

SEQ ID NO: 10448 - DNA, 620 bp, Arabidopsis thaliana
taaatggagtataagaaagattttctctagtaattaacctagatggcttcattctcaaaatgtacgtaagacgggttagaatttcgaggaatacgaagcttgtttgataaggaatcatctagtgtgactacattttgtaacatcaatattattgtatatgactgtgtttattggtaggatctgagttttattttttccctttttattatgctactgcttatgttaaaccatcctatggttttaggctcacaaataatgtacttagtaccgcccaacaagtatatctgcgtaaactaggtggtgcaaagccaaatatggatgaaaacgcaagcaaaataataagtgcgggacgagcaaagagatctattgctcagcctgacgatgctggcgaaaggtaagtgaatcccgagtctagtggagattatatctctcaatacgaagcgtttttcttacaagtttgttatttctgataaatgtatattggatcacaacagatttagacaattaaaagagcaagagaagcgcacgaagaagaacaaggcggttgcgaaagatacagttgaattggtagaagaatctcagtctgaatcagaagaagggtctgatgatgaggaagaaga

SEQ ID NO: 10449 - DNA, 612 bp, Arabidopsis thaliana columbia
gtagtaattaaaattttaacttattcatcatagagataaaacggttgtcaattacaattaaaacctagacgatacttagctagtaattacaaattacacataacgagagataactagttaactactaatataacaactgcatcattaatcactagcgaacatagttgtgaacatacgagtacgaaagagagagagagaggaaagagctttaatcccgagcgacaccggcgtaagagctagttcagacgtagctcaagagaagcgcaagggcgaacttccgattggccatacttccagatggcaccactaccaccgttgatgtgatcttcaccgtgcatagggaagagaggaagcgtacgtcgatgttccagataagcatcgccaccacattcttcttcttcttgatgaccttctagaccaaacagaggctttgctctatcgaagaagttgtaaggtgcagatgagtaatgatgatccatgtttgcccatcctccacctacgttgttgtaattcatagaacagtcttgttccttcacccaaaaatttcagtttcattaaatttctattcatatatgtagtataaatattatttgaattaatgaattatagttt

SEQ ID NO: 10450 - DNA, 659 bp, Arabidopsis thaliana columbia
gcttccttagttcctcagaaatccttggaaaatccgcagatttatcttcttcgctatctggaattgttttcttcgtaggtttcttctcgttcatgtgtttttccctattgggataatggttttcagctctaaagattctatagccgaaagtaaaaataagacttgtgtaatatttgctgcagctttatttgcgaaatcacgtctaaaaccttgtaggtagaggaaaggacaagaatcccaggcagaagcaaccatggtgatggtgtctaattctacccatcaaaataaggaaatacatgtcagaaggagaatctctgagatgtattcttcgttctgatctttttctctcgttgcatatcatgcttgcctgtgcaaatggtgtgatatttaaaccccttgatcaatctactgcgtattgatcagtatagactcttagcatgtatagcgctaaatttcacatctgatcatttttatagaaaatactttgttcactgcatacacttaatgaagcaattctcccatctatggacccagtgagatgcccattgtttctagcatccttagcataaatggagatcttagtccagttctacagatgagtatgattatataaggtacaatttttcatctgtagaacagagtattcagcgcttgagtac

SEQ ID NO: 10451 - DNA, 1135 bp, Arabidopsis thaliana
tgaaaagaaaaaaaaatcaaacttcactcatcaaactctgacagatgttttaatttttttcatcatcatcatctgatctctccattctcaggatagtcttacgtctgtgcttctaccaacgaagtactctccaaaacaccacgaattagtttcactttcttctccaaatctctctcctttagaattcgatcatcttcaactttatcagcacttatcaacacaacagattcagtatccttctcaaccaaattgtcatcagaagcattgtcgaccaaatcaatttcaccttcctccaactcaccttcttctttctcatcatcactatcttcaatcacaatcttatcactctctcttggttcataatccattaccaaaccttcattaaaaggtttgttctgcacagctcgagcccaagctaaattagataaacccgaattcgcatatggacggtaagcaggatactgagaaatcaactcctccattgtccaaaccctagagttgccattagaaccaccaccacctcctcctcttcctccagccacaaccccaacatcgacgtctccgccaacatcggccgtagtagtagtactcttgtgcttaacttcaatctcagtgttgacagaatcaggaatctcaccttcctcaacatccaccattaccatcaagttttcatcgttgcccattcgaattagggttctagaacaaccagatcgagctacaagcatgtaaaaatctcaaaactttgctcaaaaacgaatccaaacccgattcagaaacaaaaaccttgaattcgaaaatcgcccactttagtccccggtccagagaagagatctccaaaacagaaaaaattagggttcttctctaatttaaacgattcaaaaaacagagattcaagttaaggaaatgttttgtcaatttaactctttttttttcaaagattcacaatttcgaaaattcccaattcgagatctaccacacctttgagagaacaagagagttttcaaattttcttctccagatccaaattttgagatgcttattattttctccgaagggccgaacttgaagagaatgtgaaatatagacgaggggagagagagagaagaagaaggagaatctagttgagagaaggagt

SEQ ID NO: 10452 - DNA, 1097 bp, Arabidopsis thaliana
ctcgtagcttcatcaagaagcaacactgtatgggttcttcaaaaccgcacgagcaatcgcgatcctctgtttttgaccaccagatagttgtactcctctgtctccacagtacgtatcatagccgtccgataatgttacgatgaaatcatgagcgttggctgccttggccgcctcgataatctctgactcgtcaatcttgtcagatgctcctccatacatgatgttctctcggattgtcccagcaaataatattggctcttggctaaccaaacctatgtgttgacgaagtgatctcaaatgataagaccttatatcacgaccatcgatctttacaataccctttaacgggtcataaaaccgttcgattaacccgattatagttgatttacctgacccgcttggacccactatcgctgtcgactttccctcgtcaatatcaatggagaagttcttaaatataatcacatcagggcgtgttgggtacgcaaagtccacattgacaaactttatttgtccctttatgttttgtgggacgaaaccatccggtttctccggttcaatgtttgtgtaacgatctaacaccgcaaatactgatccgaccgcatccgagcccttggctagatccatcgtcattgctcccgcgtccgcaataacccgacccgtactcacaaagagtataaacaactcaaagaatgcttttgacgtgatcttcccatcaataataagtctagcaccgtaccagtaattcaaagctgaagtgcatgtcatgagacttctagaagttgctagcacaatccctgctaaccacgattgacggatattttctctttgtggtccttcttgaaccattttgagtaattttaggatccgttcttgtgacgaaaatgctgttatggttcggatgttggatacagcttctgccgctagtttgctgctctcatcttgtgctttaatggcttttttcgatatgcttttgagtacaatgcgttgagtgtagaagcaccaacaaccactggttgtattgcaatcatcacaatggataattccaagaaatggccaaccaagtgtcaagctaactcactgctgatatagtttgt

SEQ ID NO: 10453 - DNA, 616 bp, Arabidopsis thaliana
gaagctggtcagcagcaagattgcttcgttccagaagtttgtacctcatgattttgatgccagtgatcacgggacttcaagcttccctgtcgcttctgtgcaccgcattgggattttggacataaggattctcaacacagaccggcatggtggaaatcttttggtgaagaagcttgatgatggtggtgttgggaggtttggtcaagtggagcttattccaatagatcatggtctttgcttaccagaaacactcgaagatccttacttcgaatggattcattggcctcaggcttcaatacctttctctgaagaagaacttgactacatacaaagtcttgatccagtgaaagattgtgaaatgcttcgaagagagcttccgatgattcgagaggcttgtctcagggttctagttctctgtaccgttttccttaaagaagctgctgtttttggactttgtcttgcagagatcggtgagatgatgactcgagaatttcgtgcaggagaagaggaccaagtgaactagaaatgttgtgtacgaaccaagagattaacactgaacaagacgttttgtctccaagtcagatggagaaggagagacagagtttcagtttgatat

SEQ ID NO: 10454 - DNA, 744 bp, Arabidopsis thaliana
cgtttatgatcttagttagtactggtcgagtcattgccgatgctggaacatgaccacggatctagctaaaggttcggatgcggtagggtcagttttcgctgtgttggatcggtacacgtcgattgatccggagatccagatggatatgaaacagaaagaataacgggtcaggttgaatttcttgacgtagatttctcgtacccgactagaccggatgtgattatattcaagaacttctccatcaagatcgaagaggggaagtccacagccattgttggtccaagcgggtcaggtaaatccactataattggcttgatagagcggttctacgacccgttaaagggtatagtgaaaatcgatggtcgcgatataaggtcgtatcatctgagatcacttcgtcgacacatagctttggttagccaagagccaacattgtttgctgggacaatccgagagaacatcatatatggaggagtgtcagataaaatagacgaagcagagatcatcgaggcggcgaaagcagcgaatgctcatgatttcatcacgtcattaacggaagggtatgacacatactgtggagacagaggagtacagttgtctggtggtcaaaaacagaggatcgcgatagctagagcggttttgaaaaacccgtcagtgttgcttctagacgaaggacaagcgctttggacagccagtcggaacgtgtggtgcaagatgctctcgagcgtgttatggtagggagga

SEQ ID NO: 10455 - DNA, 1318 bp, Arabidopsis thaliana
ttgaaataaggccttgtatatcgaattcgtatacatatataatccaattagggaaattaagatgtgctgttagacagtatggggaagtatctcaagataatatacacagagattcaaaggtctcttactcagacagacgctggtgttggtgttgatgtggatgttgaagaagcaacacggttttcaggtgggatttctgtgaattcagataggattgctcggaattcatcgcctgacatagtctctttctcaagaagtatttcaacaatcttgtccatggcttcacgattgtttctaatctggctcaaagctatctcgtacgctttgtctgataatgtcttcaccgctgtatcaatatcatttgcaagcttctcagacattgagtttcttgccatcatcctcataatgacatcgctttgctccgatgaatccattagcgaccatggtccgatttcagacatcccaaatgttgtcaccatctgcaagtaaatgatgatatactgtcaagttcattcactagtttaggataacagaaaaaaatactgaagctgggagtgtagaagagatacctgcttagccaaaccggtgatctgttgcaagtcactaactgcaccagtagtcacctcagactcaccaaagatgacttcttcggcagctctaccaccgagtccaccaacaattcttgcaaagagttgctgtttggagattagagttgggtcatctgagggaatgaaccaagtcagacctctagcctggcctcgtggtatcaacgtgaccttttgaacagcatcatgccctggagtcaatgttctgcaagaacgaacaatgaacttaaatttaggcttttgataacacacacatcatctaatctgattctgacttacccacatatggcatggccaacttcatggtaagcaaccaagcttttgctcttcccatctgtcatgactgttccttccatgccagctacaattctgtcaattgagtcatcaatctcttttgatgatattgcagtctttccacggcggccggccaatatggcagcctcgttcaagaggtttgcaagatcagctccgctaaatccaggtgttctcatggctattacttcaagtgaaacaccgctttcaaatttcttattccccgagtgaaccttgagtatatctgttcttccttaacgtctggaacgtcaacagatacctgcatcaaacaacaacacacaataagcaaccagcaataaagaggatcaatggaaagtcacagacacacggcatttagtcgaatatatacctgccggtcaaaacgccctggtcttagcaaa

SEQ ID NO: 10456 - DNA, 599 bp, Arabidopsis thaliana
ggtaaccagctagaggtacggctggacagagaatacaagccaagtagtgtctggtgtagcagctggttatatccgattcataagaagagtggtggatggtttaggctatggttcgatgcagcagtgttattgtctcccttcaccaggtgcttcagcgatcgaatgatgttgtactatgaccctgatttggatgattaccaaaatgctcctggtgtccaaacccgggttcctcatttcggttcgaccaaatcacttctatacctcgaccctcgtctccggttagtactttccaagatatatcattttgggacatttgcataatgaacaaaatagacataaatttgggggattattgttatatcaatatccatttatatgctagtcggtaatgtgagtgttatgttagtatagttaatgtgagtgttatgtgattttccattttaaatgaagctagaaagttgtcgtttaataatgttgctatgtcatgagaattataaggacactatgtaaatgtagcttaataataaggtttgatttgcagagatgccacatcttacatggaacatttggtgaaactctagagaaaaatgcgggtatgt

SEQ ID NO: 10457 - DNA, 577 bp, Arabidopsis thaliana columbia
cttatctatattatgatagagccatttcttgtctcattagggtgctgtaggtgtgcgactcagaatgtatgatcgagtactgtgctttgtaaattgtcattttgctgcacatctagaagctgttaatcggcgaaatgctgacttcgaccatgtttatcgaacaatgaccttctcacggcagtctagttcactcaatgcaggagttggtatgctacgaaatttatttctatcatgctgtgttgcttgctcagcttattactttttacctattcgttggtcactcttgttattggtctcctccattgcagctggtgcgtcatttggtgttacaatgcctcgtggtggcaatgtatgtatttcttttgattgcatagttgctatcacttactttcagagaatgcaatgtataatttttcaaaaagtctaataactgtcctttcacaggctttgggtgtcaatacaatcgaagcaaggcctgaactatctgaggcagacatggtcatatttcttggagattttaattacggtttggatgatatacgtatgatgaacaagggattcatacgcaaagatgttt

SEQ ID NO: 10458 - DNA, 589 bp, Arabidopsis thaliana
gatatcttatcaaaccatttgcagagatccagaattctatatgatccaccagcatcatcaaccattgcataacgaacaaactcattgcatgacttaaaatcaaagagctacccatgtttcttatcaaactatatgccaccggatcaaccattgcataacgaaaaaactcatggcatgacctagaagcatgtatagttacaacctaagaagctgcatttgtttataattatacctgagaataagcttgtcccagttctggaaaccagcattgatgagattttcaacagtgacaagcctgtgactctctttcctccctgtaagcaagaaaactttgtacccaaatctaacactctttggtaaagcttcaagcttggtgctatggctggtgccactcctcatctctacccacttatcaaactccgaatgatcaaaaagctccaaccgttcaaaattcccaaaacatcatcaacaaagtcaagcattttctataaccaattgtcctcttttatgagttctctagcaaaagaacacatgacaatcacgaaccaaaccgagtttgagataaaatgtgtaagtaaaagtttgagag

SEQ ID NO: 10459 - DNA, 578 bp, Arabidopsis thaliana columbia
gctaccattccttgcagccttcaaaggaaagaagagaactagcttcagtgatcatatttttagaacagaatcaataaaccactaaaagcctcaccccaaactttgcaaaaagcctcactttctataaagaaatggtctaaatcaagacatgagaaccattcacaacatgagatgcagagaagatataatttctgctgatgtttgataacataccttctgattatggcttgcaattgtgcttttcttactgtatcacttgacgggaacccggtgttgtcccagtcctcggttctttcatttttgcataccattaccaatttcctcagacaaaactcttcatcctcagtaagcttcaggttttttatctgctccttcattatcagtaagggtccaactagccacacaaatactttatctcttgggctgtttagttctgtaagctccacgccatcagctgccagaaattcatcacaaaatcataagtctgcgtggtgggaacaaaaaagaagattttacaagaatttgtgcagagatcatcgagtatacgtactgatcacaacccagatgagtcgatttag

SEQ ID NO: 10460 - DNA, 571 bp, Arabidopsis thaliana columbia
atgtaaactactaaaaaccacacagtttaaaactataaattacatttgaccagaagatcctatcagcaccattacataatttacatagccgagttcggagttattagatccaccaatgcaataacatagagttctcttaagtagtctaattcaaacaattaaattattaggtgaaccattacaccaccacatactgactttgtcacatatgtcccagcatactttttcttttagttaaagatcattttgcagtttggttgaactaacttggactgggtgtgattcatgtatatgtaagttccctataaatagaattatatacgactgcaccaaaaactcattttactctcacaattacaaacactttgttacaatttagaccccaccagaaaaaagcgaaaatggcaaaagaggaatatgtatcaagaatgttggttatgttaataatgataatgccactggttgctcagggatcgagactgcatagttgggctaatcggcttgaggaaacagggaaggacaaggtaacaaaccttcagttctatttccatgacacgttgagcggcaagaa

SEQ ID NO: 10461 - DNA, 624 bp, Arabidopsis thaliana
tgttaacctagatgatgattctacttgaatctggaagtgatttgaatggaagattaaactaaccagtggaaatcagtcgatctagggttcgttcatccggattctcgccggtgacggtgaagtacctcctctgtacagtttctctatactcggacgagataagctccctcaatcggttgaaactatccatagagtccatcaatttcttcctgagaccattgaggacagaggtcctggttcgatcggaggaagaaccaggtccacagccagggagactccgattagcagcattggcacgatctagcgcctcgagtttaactttaatcatcttcgccttcttcaacgcgactccaacgtcaccgtccattttagaccggagatctttaacggctttagcattgtgaagcgtcttgctctgctcgtgacatgaagagagtgtttcgttgagccgatctagctcctttagctcttctttcacagattcaacatcttcgaagaacttgtcgaggttcacaccaccggttgatcccgcgggattcgccatctgaactccgtcgccaccgccggcaacgtctcggcgaggggatggttctccgctgcggaagcgagagaatgagctggaaa

SEQ ID NO: 10462 - DNA, 624 bp, Arabidopsis thaliana columbia
cggttcagatacaactgtgagagagttgttgatctcgacaagcatgatggaatcttcttaataggggaattctgtctgtatgtgatagaaaacttttacattgacgaagatgggtgtatttgtgagaaggaatgcgaagatgagttatccgttattgatcaagcgttgggtgtgaaaaaagatgtctctggaagctcggatttccattccaagtctagcacatcatggactacaacagtgaaaacaggagcagtagggggaagagcatgggcatatggtggtggtgcttggggaaaagaaaaaatgtgcatgactggtaacttgccgcatccttggcgtatgtggaagcttaataatgttcatgaaattttgaaacgtgattaccagctgcgtccggttgctattgagatatttagcatggatgggtgtaatgatctccttgtgttccacaagaaagagagggaagaagttttcaaaaatctggttgccatgaatcttccaaggaacagcatgtacggtaccatcgttcttttcatcttgtttctttttacctctctactggattgaaccaatgcgtttgttcttttttacattttattgctgtttattttctctagtaaatga

SEQ ID NO: 10463 - DNA, 406 bp, Arabidopsis thaliana columbia
gttgaaccaccaaaacagacactgaagtagaaatctcatttgacacgatcaaatatccgaccggtcccagtactggacactctatcttcataaccggtaatcttgaaaccataggtcctttggaagattttcccaccaataaaatatcgcactcgtaaaaatggcggataatctcaaccacttcctccgttgaattcaccgtcctctcttcaaatctagctgcattggcccttttcttgattgctgcaaggaattgctcgtctaaggaacatagtgatgtttcttgcgcttcaagcctatcaaaccttgcgctctccggaccagagataaccacaacggtcaagttaacgcccggatgttcagccattcgtaacccgtaaaccaaagcttcacgatcatcgcaacc

SEQ ID NO: 10464 - DNA, 657 bp, Arabidopsis thaliana
ctatctctcctctctaaagcctttcgtatcgtaatctcttcgccggaactccaccaaacacgctcgagcctaaacctaaccgaaccggttctttacgctttgatcggattccctcctcatagtttcccgaactggttcattctcaaccacaacattacaagaaacatcccattacgattgagcgctatcggttcacttcctcctatgaatcctggctctgctgtggtcacaatcggctacaagatgtatgtgatcggtggactgatagggccaaataaccctgtaaagactgtgtttgtcatcgactgtagagtccatacgtgtaactatctcccaactatgcatagggctcgttaccgtgcagtcgcagaagtaatcaacggaaagatttatgtcatcggaggttgcgagaagcggtacgacgattggatcgaagtgttcgatgtagtgactggaatttggagtactgtccctgatcgatcccatttcatgtctagtttgccaggaggagggtttgtgacatctgtggtgatgcaaaacaagatttacattttggatgctacgtgtggtttggtttatgacccattgatggacatgggagcaggggacttggactacgtgaagcttctggtaaagcgtgtgtgtgatgagattgtg

SEQ ID NO: 10465 - DNA, 532 bp, Arabidopsis thaliana columbia
ttctcttgcaagcacagaatctttgaaaagcacaaataacaaagacaagagtgattcagatactatagtggctcacaaaacagcaaaggccaaagagaaaatcaagcaacgtagatggaaaatattttaagaagagtgtttgtatcggtagcatcacttacctcctcgcttagaaaatggagattttcgcgttgatattgtaacaaagccgtttgttgatcagaaagccggccttcataatacctttgataccaaacaaaaatgaaagaagcaaacttgtacattatttgctgaagctgcataaatttataaaatcagatacattaaggacattcagtacctcaaaccttccatagaacttgacggctgaagaggagaatataatgacttcaagacatctggccgggaattcacggaattgtattggtgcacataacctgaatatcaaaatgcaccactcagtacttcggtaaaactatcggtttagaatgtagttcaacattaacatataacactcagtctgatgggtttt

SEQ ID NO: 10466 - DNA, 478 bp, Arabidopsis thaliana columbia
tcatcgacatcattgtggttccacatggaactgaccggatccaacaggtattccgcggtggtggtggtagaagccaccaagtcctttctgagaattcatttgcataaaatgtgagtcaatagccgacctgttagcttgttgaatggcgtcatcagacaccttcttcatagcaacgcggaatttctgcaaccaagagacattacaaatgtgtttaatggaatcatacatatatcaacactaacagatcaaatctggagaatcatagtctaactctcacctgaaggtggcttgcaacattctctctagtgagtttgtcaacattcaccagatctagaatctcttttggaacagctcctgcatcatcagtacttataaatcagaacatgattcacagctatatgaaaactagaggtagagagatcaagaaacattactctcagcgcctacatgatcaacagctgctaggaatttgttgtgc

SEQ ID NO: 10467 - DNA, 616 bp, Arabidopsis thaliana columbia
atgtaaataaaaatcaagatattttgataaggtgtctataaaagtcatatgccaccaccaaaagtgtttcactgtctacaaaatcattgaagatctacccaaaaaaaaaaaaaaagagatggttctgctagagaagctttgggatgatgttgtggctggacctcagcctgaccgtggccttggcgcctccgtaagatcaccacccaacccattaatatccgaggtaactatctatattttgactcaaaacactttagctcaagcaaaaactagacttaaatctaataattagtgtgttttgtgaatatggaaagatataggagaagggagcagcagtaaggtggtgatgcataggtcgttgaccatgccggcggagatgagccctggaactccaacgactccaaccactccgacgacgccacgtaaggataacgtgtggaggagcgtctttaatccgggaagcaacctcgccactagagccatcggtccaacatctttgataaaccacccatccaaattctcctccgtctacgactggtaactacaatttttctgttattttatttcatatagtacatgattataccatagtcttagactcttagatgttgtagta

SEQ ID NO: 10468 - DNA, 359 bp, Arabidopsis thaliana columbia
tgatcgatgtctctgggtagttatgctatgcatgtctcgtagctctcatcattcgattgtctcttcgtctttttcaagtgggttaccagaaaactggatttccgtcttcctcaaggaaactctgaatgcaatctcgtaacttcacgatcagggtcatttgcaccgtgacatgaaggcaggtaacatgctggtagattctgatggatccgtgaagctcgctgatttcggagtatctgcatcgatctatgaacccgtgacatcttcctgtggaacaacatgcgcttcgataaggttaactgatatagcgggaagaccgtattggatggctccggcagtggttcatcccacacagggtatgg

SEQ ID NO: 10469 - DNA, 441 bp, Arabidopsis thaliana columbia
ggtagtccatcaggtgttccaaggtaaataatctgagaaaatagagaccaatgagtttatgaagaataacactgcattgattcatatctgtggtccacgcaaacataccgaatcacgatcacaatcaacatacacatcaagaatattgatgaagttattggatgtctctcccttagtccataaggtagatcttgatcgactaaagaatgtagctttccgagaactgatggttgtggagagggcctccctattaacaaagccttgcatcaatactgctcccgtatcaacgttttgtgctattgccacagctaatcctttgtcatcccatttaatgcggtccaacaagttatctacctaacacaagaaaacaacagaaaccatgattagctaccagggaacacaacagccgcatatacattgcttattgagacagtaataaaa

SEQ ID NO: 10470 - DNA, 541 bp, Arabidopsis thaliana columbia
tatacataataaattttaattattttgtaattggttctaaaaagataataattacaaataaaaaaaatcttttttagaaaaaatcttttaaaaattacaaaattagtttaaactctctataaattaatagtacttttataaattaataaaattttattgtatgatgaatagttgaatacctctataaattttgttacaaatgttggatacatatatacaaattacaatctatactaaaccaaattaaccgaaaaacaatcctaaccagcattaaaccggagctatacatatgtagtagatcagtttaatttggtctcactcaatcccaagaaaaaggccgttctttgcattttctatcgtttcatgtctgagtgacagaggaaacccaaaaacctccgtaaaacctcacaaaagaatgcagctttcttcttcgtttccaatttcacctcccaaaatcttcccttccaccaaacaccataaacctccagtgattactaccagctcgccgcacagatacagagcaaccgtagacatttcgtga

SEQ ID NO: 10471 - DNA, 592 bp, Arabidopsis thaliana columbia
tgggcgaaagtctttcatcgttacgggcttctcaatctttggtattaagcacagattagtatgattctacaccttatccattgttccagtattgaagaacgttttgacttcagcaacaatggatgagcccacaatatcccaataggtttggtaataaaccgcattaaacccatccggtccaggtgcccgtgaacctccaatggagaatagcgcatctcgtatctcatcttcagagacatccttcagtaattgatcattcattgtaggagtaaccactggatgtatgttacgcagagctttggatattgtagtaggggaattggtagagaaaagttcagtaaagtatcttattgcttctgtagcaatatttctgttaccatgtacatccattccattcacatcttgtatagacgttaatgtattccttgtaatcgtgttttttgttgcagcgtgaaaaaacccggtatcgcgatctctcatctagccactgattcttactcttcaatttttaatatgtttcctcgccctgtaagcatttaacaaatcccttttgaggctgtgaatttgagccaggggtgtgtagcagtctgtg

SEQ ID NO: 10472 - DNA, 626 bp, Arabidopsis thaliana columbia
cctctgcaacacaaacacaacacacaccatcatcattttcatatctctaacaaaaagtaaagcaaatacaatctcaatcactattgatggatcactggaatgaaattgataaaaaggtcataccttcttagagctcttcttcaccctaacatcgtatctatcagggcacaaatcagccaaccatgttccaggactcaccaactgtttaaaatcagacaacacattattctcaaaactataaacagacaactgaagaatcttcagaacacttttctaaaaacgacaaaaaagagtatgggaaactaacaagtaagcttctttggatgagtttagctctcttcttaggcctatgagaaggtttgcaacctttcatagccatgaaatcttcttctttctctttgtttgataatgttataaagagcttaggccacatactctcttccttgttgttgctatcttctccattgatgtttccatctaaacaatctttcccaatgttatccactacacctctcgtagtataatactctcctctttctccggagacggtctccggcgatctggtagtccagatctgaggattgctccttctgatcactacaacaacgaccaagaaattatgaggg

SEQ ID NO: 10473 - DNA, 547 bp, Arabidopsis thaliana columbia
tcttcatggtgagtgattaaatgtgaaccgttgcttagatatggattagtcactcaatacttaactatctagaaagtaagatacaggaggaagaaactaatgaaacgtggtgactctttggtgcaggcaaaaaaggtgccaaaggagcacttagaggtcctgttatgacgtggcaacagagagtcaaaatcgccgttggtgcggccagaggacttgagtacttgcatgagaaggtgagccctcaggttatccaccgagacatcaaatccagcaacgtacttctgtttgatgatgatgttgccaaaattggtgattttgatctgtctgatcaagcccctgacatggctgctcgccttcactcaactcgtgtgctaggaacctttggctaccacgctccagagtaacgtctttttcaagattttctttaccttgaaaagatttttttcagtttctttcattcagactaaaccatgggttacatgtcttcattcaaaaatgtttggttctcatgctctaatgttatgagtcactttttcattcacatgga

SEQ ID NO: 10474 - DNA, 597 bp, Arabidopsis thaliana columbia
cttcccatacgtttcctcaggtcttcaggtaacattctatgagacatccactgctctgcatctctctttctcaccctcatttcctcttctcgaactgttgttgactccaaatatttctgcaacagcaaacaaaaattacatgcgtgtcctgagtaacttatatgtagcattatggaacaagtccagaaaatgagaagcgattatttgaggctaatacctgcatattgccgataagtagagcaaataagactagtccagatatgcagattgatatagcaaatatgatttcaccaacgaatttgctagtttggagattctgtcccaatgcactgcaacaacaaaagcaacttgtgagaatgatgacttgtttaaattgtgacagatatatatgcttaagatgcaaatataaacaggtcatttcacggcttaaaatctccaaatatagctagttagttattgtcaacagttttatgtgtgtcttacaaacctcagatttcgaagccccaccagaagcagtagaagaatttcttcagaaatcatgtgattcaacacgcactcttaagagcatcagtgagatgcacagttgaagatggtgag

SEQ ID NO: 10475 - DNA, 501 bp, Arabidopsis thaliana columbia
caggcactgaacctgtttattctggaatgtcaaaggaagaatacagaagctctcacccaattatgcaagtggaggcagacttgagttgcccaacacattctaagctttgttagtggtgtttgtataatattattcactttggtatccgttcatcccaatgttttatatgtatcaactgaaacaatggattagcttctacccatgaagccttaattagtacacaatatgcttaacatctaaacctttttttttacacaatatgcttaatgagacagcacattacctttggattgttaatcaaagcttcttcatcttctaccaaaacccaaaataataagtctttagttctgtgtggaagctgaaatctttctggcttcaagaatggatccttcggtaagtgcgatttgagattccttctccattcccaggacagaaagagcagcagactggagatacaatgcaacataccaaacaggagaaatgccttgagccttcattgca

SEQ ID NO: 10476 - DNA, 347 bp, Arabidopsis thaliana columbia
  unsure (1)..(347): unsure at all n locations
tgatgtgcaagtaagagccaggtatcgaatagataaacttctacagacgtgtccgtacatgtttcacaaattaagacccgagatattgagctgtgcaaatgttgggagagttcaatggctccagaagctccatgtgtaatgggagacaggtgaagcttttaagcttaggagacacaaagggcacagctttgatagcatgactagtgatgctctcataaaagtcaggtgtaagttggagantntcaagtgggtcatgtagcgtgactatgattgagaatgtggcatcagttactttcttgcaatagtcgcagcttacttgaattagattcgtaggtttgagatgtata

SEQ ID NO: 10477 - DNA, 584 bp, Arabidopsis thaliana
tagaggaaattgttaataacattgtttccctaaaatatttgtgttttttgtagatgtttacgagcacgcattatgcgggaaaagagatgagaatggattatagaaatggagagccatggaagaaagtttttggtcctgtcttggcttatctcaactctgtctctcccaaagattctactcttcgtctctggagagatgctaaacgacaggttccttattaactttctaatatcatttaaaacacatgaacgattatatatatagttccttatattaacatgttttcatttcatgtttctataaaatggttactaattgtcgcagatggctgcagaagtcaaaagctggccttatgattttataacttcagaagattatcctcttcgccatcaaagaggaactctcgaaggtcaattcttaatcaaagacaggtaaataaacaaccctcatgaatttttgtcaatttttgttttttcttacatatttacgttattcattgttttaatcttattttgatttggattatacaatgttgtagttacgtgtcaaggctaaagatatatggaaatttgcttttgttggtt

SEQ ID NO: 10478 - DNA, 583 bp, Arabidopsis thaliana columbia
acatgagtcttccagaaggttatacatcatcatctggagtcttcccacctaatccagtttgtaaacttcacaagtccatctatggtttgaagcaggcttcacggcagtggtacaagtgtttatcacaggttttgctggatgttggatttcagcaaacttattcagacaatacaatgtttgtgagactcacgggtacgtctttcatagctttattagtctatgtagatgatatcttgatggtgagtaatgatgatgaggcagttcagtctattaagagtgttcttgctgcaagcttcaagataaaatatatgggtcctgcaaagttttttctgggcttggagattgctcggaactctgatgggatttcaatatgtcagaggaagtattgtcttgacttgctgacaaagacaggtttattaggctgcaaaccaaagtcagtgcctatggatccaaaggtgccgatgaacaaagaaacaggtactcttctgactgatggacaccatatagagactaattggcaggcttctttacttgtgtgtactaggccggatatcactttgcgggtcattgtttgagccagttt

SEQ ID NO: 10479 - DNA, 459 bp, Arabidopsis thaliana columbia
aaggagcagaagcaatgcatacatcaaaccctaacgtactggtcatagtctcagggcttaacttcgaggctgacctaagtgtcttaaaagatcgtccagtgaatcttagcttcaagatagaacttgtcttgaagcttcattggtattctttcactgacggtactggtcaatggaagtcacacaatgtcaacgacttttgcagccagatgttctctaaggagcgtcgtaccggcggttttgttctcgaccaaggctttcctttgttcttgagcgagtatgggaccgatcaaagaggtggcgatcttgaaggaaacaggttctcgaccaaggctttcctttataattacatttagatatttgcttaccaatcaaagcttaaagtactttgatcaaccgtataccattaggtacatgaattgtatgtatgcatgggcggccgtgaaaaatttggattgggcg

SEQ ID NO: 10480 - DNA, 471 bp, Arabidopsis thaliana columbia
tacgcgatcaggaaatggtgagtatgggaacccctcgggttccagcaggagtagataatccagatgactatttacgtaaaaaaatcagcattggcggtgctcgtccttcaagagtgggtttgagtatgcgagatgttttgcaacgacatgttgaagaggcgactcattatctcaaaaaactcattgggactggtactatgaaagcctctctcgctgagaaaaatgatgacgggtatcaggtggctcaacaaattgtagttggactaatggactgcattagacagactggcggtgcagctcaagagggtgatccctctttggtttcttctgcggtttctgcgattataaacagtgtaggcctttcagtggcaaggattacagatttctctttgggaaacatttatcagaatcatccttctggcgttgattcatctaatattgcacgatacattttacgaatcgatataacct

SEQ ID NO: 10481 - DNA, 523 bp, Arabidopsis thaliana columbia
cactctccgggattttccctgatggggtttgctcttacttcccaaacctccgtgtacttcgtctctctcacaaccatctcaacaaaagtagcagcttcctcaacaccatccctaattgttctctgcttcgagacctaaacatgagctctgtatatctcaaaggaactctccctgatttctcacagatgaaatctttaagagtcatcgacatgtcttggaaccacttcaccggtagcttccctctctctatcttcaatctcactgacttagagtatctcaatttcaatgagaatccagagcttgatctatggactctaccggattctgtctctaagctgacaaagctcacacacatgctcttgatgacgtgtatgctccatggtaatatcccaagatccattgggaacttgacttctcttgttgatcttgaacttagcggaaacttcctctccggtgagattccaaaagaaatagggaacctttccaacctaaggcagcttgagctttactataactatcactt

SEQ ID NO: 10482 - DNA, 499 bp, Arabidopsis thaliana columbia
ccatagaattgaagtataacagtgtgggaggcagctcgtggaagaacatggttagaggtagttattttaatttgtcttactagtttgtgttttttagtgtaatactaatggctcaaaataaatttcagtggcttagtccagtggagtttatggaagacacaatcgtcgagcatgagtactatctttaccacatcaatttttttgttttcttttcttttgaaaaatgaatgatttatactatggaatatatggagctttgtttaggtatgtagaatgtacggggtcagcgatagtggcattggctcggttcttgaaggagtttccggagcacagaagggaagaggttgaaaagtttatcaagaatgctgtcaaatacatagaaagctttcaaatgcccgatggttcgtggtacggaaactggggtgtgtgtttcatgtatggaacctttttcgcggtaaggggtctagtggctgcaggcaagacgtaccagaactgtgag

SEQ ID NO: 10483 - DNA, 519 bp, Arabidopsis thaliana columbia
  unsure (1)..(519): unsure at all n locations
aggaacgcattaaaacaatgcaactaaaaaaaacaccgctaaaatacccaaacatggatgaggaagaattacggggcttcaaaaaaaatgctgattcggccgtaaaaaaatactatatgtaaaaataaaaaagcgatcgntataatcgatatatatctaactccccctcccacccccggtcactccactctatttcgacacacgacccatccccaagttccagagctttgagtccgctatcgctatcccgagcctgattttcctacccccccggaggccaaggtccttcgcttttgggccggttgtgggcgaggcgggattcgcgcccccgacaccgtggttcgtagccgcgtgctctaatcctgggagctacaagccccaccccgtctcctctggctctgttccccggagtccctaacaccaggacctttcgtgtgccagccatttcggatgtgaaagtgctttcttctatcagccggtgcgttcggggtgtgagtgggatgtctcatattggggttt

SEQ ID NO: 10484 - DNA, 486 bp, Arabidopsis thaliana columbia
tgtgatttgatgagtttgatagtcgccacatcactttgatttcactgtatcaaatccgttgacggaatctattggttgaaattaggttgaaagatcagtggcttataacgagcaccgaccgagaactcctccaccagacttgccatctatgcttcttgacgggagaattgtttacattggaatgcctgtaagtaatgtggattcttatggatttaatggttgggactgcatagactgatgatgacatatttagctttcagcttgtgccggcagtgactgagctagttgtcgctgagctaatgtatcttcagtggctggatcccaaggaacccatttacatttacatcaactccacagggaccactcgtgatgatggagagacggtaagtttgacaactttgtgaatcttttggaccatttctattgttagttctaatttccgtgaataactcactaaacaggttggaatggaatcagaagggtttg

SEQ ID NO: 10485 - DNA, 799 bp, Arabidopsis thaliana
tccccttgtccgtaccagttctgagctgattctaaatgtaaattaacttacccttttgatgctgatggtttcaccaaaggctttggaggaagaggaggaggctcaggaatatcactcaatatgggtatagttttcacctgttttaaacaaatggttaaaaaaaacattcacacaaagtgaaaacaacaatagaagactaatagttttaccaaatttcggtattgaagattgtagaaggaatggatatatctttgtttggccagtttctgatctttgttcaaatgtctccagtagctatatgtactccccatgtttatcactttgtttgcatatatcttccatgtatagctgcacatatatgatcatgtattgtgatgctttaagcttgaaatttggaagctaatactatccgaatgacttgaactattaccattcgtttatgcgttgtagcccttcattcgaaaacatattccaataatcaggatccataccggatttctcaaagaaatccgcaatcttatcacttgattcttctccattgctcgggtcaatgtggaaaccagagacaccatccacaataatctcagcaggaccgccttggttcgtggcgaatgtgaccaaaccacagctcatggcttcaatgacagtaagaccaaaggcttcataatgtgcaggctgcacaaaagcacctcttgtatccgcgatagatcggtaaagttcaccgtttcttgttcgatctgtttgagctgtgatccatctaaattgacccttgagttggtatttctcaatcagagaatgc

SEQ ID NO: 10486 - DNA, 555 bp, Arabidopsis thaliana
gtctttttgtttttacatttctgctggatcaaatattcatttgtagtttcattgttgcgttaattgtttcaggagcaaatcaaggatcaagttgtgaacatgtaaatgcctttatcttttgaatagttaatccatgtcttaaattcaataatataaagcaaatcttaatttttaatctgtagagcattaagaaggcatgttggaatcctccatgtgaaagttgtgaaggctgtggttcaaaggaaaaaagttcagatgggcatgataaatccatacgtgcaaatcgagctctctgaagataaaatttcatctaagaagacaactgttaaacacaagaatttgaaccctgaatggaatgaggaattcaaattctcggtcagagatcccaagactcaggttctagaattcaatgtgtatggctgggaaaaggtaaaaagctatccaaaggggtgacaagtgacatggagtaggatatatatgtatttttattttttttgcaacgcagattgggaagcacgataagatgggtatgaatgtattagctttgaaagaatt

SEQ ID NO: 10487 - DNA, 514 bp, Arabidopsis thaliana columbia
cactcggcaacagcgattaaccacactaccaatatgcctcggtgatctcatcggcctaatgaccaagctaactcatatgctaagttggggttggtccaagtggtccaaaatcttgaaatggccaaacctacacatcattatacatatccaagattagccatatagatcaacacaaatgcaaataacgcattagaagttccgaaattagttaatccgactatatttgtatgttaatgacaaaaagcttataccctccatagcactctgccttgaataagaccataaggtacaggaccaaagtttcttgagtctctcgagttatgagtatagtcaccttgaacaaagacatgtcctttaggaacctaaaaccaatagaacgtggaaagatcaattcgccattaatccaacaaacttaacaacttataatatcgaatcgaaactaaacaatctaaagtaaattgtaatgtacaccaataacactaaacattgctaaagattcaaaaaattccatgaa

SEQ ID NO: 10488 - DNA, 474 bp, Arabidopsis thaliana columbia
gaaactcattttccaaaatctctttttcatcactttcgttacaaattcacaaaaagttacaagtcgtgacaagcttgagcttaagtatgtgtatgaatagtgtgaccaaattgttttgcaagagatcaagtaacttgttacaaaagaaatgattcaacgtaacttacaaaactataccaatttaccaaatcagttatctgtggaaagagggtacctacagtacctctcatttttcatacacataaagaatctctcataagccgaagccatttgagtcgctgtaaacatcgaaagagcgtatcccttacaagctattcctttcatctccaaaaccctaggcccatctcttacaacagaatccaaagtctcaacaagagatctcacgtttggagaaaatgtgtacccaaaacgctcgtccacaaccactgtcccaacaatgcttggataattaggtgcacgacaggtttccacact

SEQ ID NO: 10489 - DNA, 553 bp, Arabidopsis thaliana
gggagattctctacatgctcctttaagaacaatggcgtctcagaggctgtgctggtaaacacaacatccgcttctgaagcacaagctagcatctcatcaagaggtcgatatataatctcaataccaggcatctcctcacggatagctgaaaccctctcttcacttctgttgactaccaccacttttgtgcaacccttagccatcaaatgcttaatcacaagcttccccatttttccagcgccaattacacacatcctagcagatacgtttgaagactgcggaacttcatcagagcaagttcaacagcagctgagctaaccgaaaccgcaccagaagcaatatttgtctctgttctaacacgcttaccaacagttatcgcgtgtttaaacagccgctgatattcctcccaaagccattcactccttgaccaactttcacaacttgtttcacctgtgcaaggatctgaccttctcctaggacaagagagtcaagaccagctgagacttcaaatatatgctgtgtagcatccttgttgtacacagaaaacggtgtt

SEQ ID NO: 10490 - DNA, 553 bp, Arabidopsis thaliana
gtttcacttaaggacatagaatgattcaatgtgaaatgaagctaacatatacttgtatcgtttttgaagccgggaggttttcgacaagtggcaggctcagaggtggtggggtgagaactatgacagaatagttgagctttacaatgttcaaagatttaaccgacaagctcttcaaactcctggtagatccgaggaccaggtaaaacacatcactctttagatcacaactttaagagaaggtttatgagtaatcttatctttcaacttctgtttgtttcttctaacagtcgcagagagattcaacttacacaagaattgattcagcaagagaaagcagagactggacacaaagagacaacaacttcagaccaccaggaggcagtgtccctcatcatttttatggacctccaatggacgcagcaagaatcaccacctcatcgagggacgaaccgccttcaatgagtaatgctagtgaaatgcaaggtgagtgggttgaagaggacgagcctggtgtctacattaccatcagacagttaccagatggaactagaga

SEQ ID NO: 10491 - DNA, 387 bp, Arabidopsis thaliana columbia
catctatcaccgaattagccttgatgggatcctgcgttcttgtgacattgatgaaaggagaagatgtttacgtgatgagcgttggagatagccgagcggttcttgctcgaagacctaatgtcgagaaaatgaagatgcaaaaggagcttgagagagtcaaagaagagagtccattagagaccttgtacatcaccgaaagaggactgagtcttctggtccctgttcagctcaataaggagcatagcacaagtgttgaagaggtgaatctttttgcgagtcctgattcagtgatatgttttgcgaacattagacactaacgatcttttgatgtgacaggaagtgagaagaatccagaaggaacatcctgatgatatattagcgatagag

SEQ ID NO: 10492 - DNA, 604 bp, Arabidopsis thaliana columbia
tgaacatcaacgcctccatactggtagacggcagtctacacaagacacaaaacaaaagcgttaaaaaaaactggaagaagcaaaagttgtgacaacagaaaaccaaaattcaatctgcaaatcaccttcttgttaggctcagggatctctgaagcttttgctggcgagtccaaggatagtttctgcaacagatctgtagcttctacaaacaaggtgagtcaaggaagcaaagaattacacaattaaccattagaatagtggaaagcaaacattctcaaatcaatcaaactcgccacaaatgaatcgatttgaatcaatatagaaacctaacaatcgagaaatatattgagaaacccgaaactgaatctaggcaatatcaaatatatctgaacaagactcaaaatcagctcactggattcaagatccaacagattcaagatcgagaaatcaaaacacagatcgagaaacataaagaaaggatacgatcagcaggaggagcaacggtagccatgagaggagattgacaaacaaagatttggatagaccttctcggataaaaggggatgcgacaaagagaaagaagaagaagaagaaaaaaagaaga

SEQ ID NO: 10493 - DNA, 532 bp, Arabidopsis thaliana columbia
  unsure (1)..(532): unsure at all n locations
nnnnnnnnnnnnnnnnnnnnnnctaaagtaatcgaagcgcagggagtccggatccatatccagctcgcgggccatcgtccctgacagccaggccgtttgctcccgctcaccaagggacatcgacgggcgcggaaatgaccgctgtaatgtgcgactggcgggaaacgcaacataatgtgatgacgctgcggcagttcgcgactccacggtaacaacgttttagccagctgctgcgcatcaacaatccgcccatctttgataatgtcgttctccagcggcaaccgccaccagcgttgcaaaaagcattcttttgcgccccgcacgatcgcaaccgctaccgcttcttgctgttgtaaatgcaaaccaatttgccagatcttaaatgccattgtgatgatctccttatcacccgtcactctgacgggtatatcaatgcgtctggcttgcctttatactaccgcgcgtttgtttataaactgcccaaatgaaactaaatgggaaatttccagtgaagttcgtaaagtattttttg

SEQ ID NO: 10494 - DNA, 950 bp, Arabidopsis thaliana
tacagacaaaatctgcaaagaacatgaactgtgtttcccaagtgtcggatcgtatgattttgaaaaccgctcttcaaggcctcagtaacaaggactggtttgtatcagtcgacctcgtacgtgtccaggagaaaggtgagctgcagattgtaacaagaacattgtggagaaggatgcttaaggattctgctatgacttatcagcatcattgatcgcttctcttatcttttttttttttaattattattggaacttttggttttgtctcggctttctttttgctctatggaacttaaagtacttatttaaatatttgatgctgctctatgtttttcccggtttaagcaacttatttcatctattttatcatatcttctatttaattttcatgcatgattttatataggattaactgctgaacaatccaccatctacatactaatcaaatcaatcatagtaaagtacttgataaaaaatctacggtttagtgttttttctacaattattactcgttagcattttgataaatctacagtttcgtctccccgagtatggcatcgatggcgtcagggaaggtggagagaggcatcagctatacagagacggcaagtacaaggaggcgcttctattctatacggaggctcttactgctgctaaagccaaaccccaaaagatcgctcttcacagcaatcgcgccgcttgttatttgaaattgcacgatttcattaaggtttcttttacttaattcttctttaatgaaggtttcactattgttaatatggttgatatgtttacaaaacatcatagcatcaattatgcaatctaggaacgtttcgttcatcaagttataattaattcacctaacatcaaaagctgaggaaccttgatctaacaatcctaatcataccatttgaatccttggaatataactgtgaaattactcagatatg

SEQ ID NO: 10495 - DNA, 564 bp, Arabidopsis thaliana columbia
tggatacggccaagcaggttactcaatctggaaacttgaacgagttctccatggtcttgcttaataacacactttcattaccacttgggcttcttctttcttatttcttcaacgagatggattatctctatcaaacgtgagttcctgtccttatttctgtgtcaatggaaaatggtttgtgtcatctgaaaacaaaatggtgtattatatttgtgcaggccacttctacgattaccaagtttctggatggtcatgacacttagtggacttctagggcttgccattagctttacttcaatgtggtttcttcatcaaactggagcaacaacatacaggtagcaaattagagagagatagagcaatttcaaaactttgcttaagagagtgttgctgtcccctagccttctccatatatccctttcctatgtttgcttctttgttggttcagtcctaactagatacatctttcgctttattcaaaatcatagcctggtgggatctctaaacaagatacctctatccatcgcggggatcgttcttttcaatgtaccgaccagtttgcag

SEQ ID NO: 10496 - DNA, 476 bp, Arabidopsis thaliana columbia
gcaaatggtaccaaagcgtttacttttaataccgcaacgcgatgcgagaaccgcagcacgcatcaatatataaacagccaaactcgtatgttgcgtatttggccctgtgagaagcatagatggtccagccaccaatccagcaaacagggccctccattttgcagttctggattcagattaaattacttcacagtgatcaaatctgaagaaattgatacttcactatttttgggtttaaatcacaaaataaaagttacaagattagtggggacaaacatgcctcttgtctcctgctaaagcagcaatagcttcatctacagaaacaaaagtcccagcaaaagttcctaagaacaatccatatcttaacgtctccttaatccccatagcgatagttcactattcgaaaactctccggttttcctaaaccgactacgattagatttcagatcagatgagctaaaccggaaaatttgaaa

SEQ ID NO: 10497 - DNA, 558 bp, Arabidopsis thaliana columbia
tttcccaatatttacttgttaatattaacatttaacacgatactcattttttttattcggtataaagaatacacttgttaagatgaatgaagtgattataaagattagtatttgtcctcttcggatttatactatagtgatttagaaacctatcgaatgtttgagggcatttcaaacgcctcggagcttggcgcccatatcttgaagatcttgtatcagagccttagtaatcttgatggtgatatcacggatgtaccaagaaagcggtggcagattaaaaggaaaagaaggctgaaaggtctggttcattttcaccttcgacgcaatctttccttgtccaccactacatttatggtattcttctcgactttttggcttcatttgcttgcacaaacgttttgaatctacgtatattggctccactttccaactaccctcaaaacttttcatgaacatcattttccttttcatatatactgcctacgacaacaagcacgagattaattttccaataattaataatgacaaaaagattgattatattctcttgatagatag

SEQ ID NO: 10498 - DNA, 1158 bp, Arabidopsis thaliana
gctacaattagaggccatcgatgcttacagatctcgcaagggatggatcgcaagaccaggtgttcccattcctgccatggtcacgcaataagatggaccacgagtgaactcttttttgttatctgctgtttttttgtactaggtggctgtaaaattatacaatattgtgtcttgttcatcagatataatatatgatagctgagtcatccaaagatctataaaagcagattatttattacatggaaatttcttggtgtcttgttccaccttcattaagaatgtttgaccaaaactcatggaggcactatgaaagtatggaaagtgttctggttaagtactcaagtgcttgtcctcgggattgcacagagatgtagtcctccatcgacatgaagtgtaagcattttcttgtaagacaccttgctgttctcatcagccattttgaagcgaaagaagtgaagaagtgccattgatactatcttcatctgccggtatgcgaaatccttgccaatacagattcttggaccagcctacatacatagccaaagaaataaaacatctcaggtattagaaaataataccttactcttgatcccttagtttgtcagcaagagtgtacaaacatgaaagcttatgaatttgaatggtgattcgggttggaataagccgtccttgagccatctctctggcttgaattcttcagcatcttgaccccaaatgtaagtcatcctacccattgcataggctatgtagtagatattatcccctttgctcactctatgtccatctggaagaacgtcatcattttctgcacacctcatgtcctttgggaggaccaagaaagattaagaaaaatcttaaaatgttcactcacagaagagtctcttaaagactggttattttaccacaggcacaggagggtagagcctcaaggtctcagacaaggctgcatggaggtagtgcatctcatcaagagcctcttcgttaatactttcaacgaaaccatttacatcggtcgttttctcgtgactaaatgtcacatctctgatttcttgtacgattttctcctgaacaagtgggtttttgcagagcatgtacaagaaccaagagagtagtgcagcggttgtgtccttaccagcaatcatgaagttcagaattata

SEQ ID NO: 10499 - DNA, 470 bp, Arabidopsis thaliana columbia
tttttcctttcttacttcttaccagttcaccttcgtttaggcaattgaaacgatttctttaaaaactgattagcaacacggtcgtttctatgacaaagtaccctcaagatcgtgtttggatcagaccggttccaccgtcctgtagttggaggcataggtagcttctgtccagaaccaaccatccccattccacttgtctcacacgttacaatacttaaatcttccataagttgttctgttggttgactcataagctgaatcactccttccactgtctctgcctctctgtccaccacttcttcaggtatcaacccttcaccacaagtacaaaagacccttttcaagttctcgaaatcttcttcgataatactgtgatccgatctatagaacactcgggagtatccacggcgagaaggaccatcaagaacgcttcgaatgatgatttcataacctcctcattgctaatgatt

SEQ ID NO: 10500 - DNA, 918 bp, Arabidopsis thaliana
aatctcagaaacaaaatctagttagtgttcgtctctttttgtttctgatagtagctgtggtaccttgtcttctccgtgagaggcatgttgatgactataacgtcacatttagggagcatttcattcagatcctcaacgaacttagctccagtctctttctccagctctggtgccatctgaagcctgtcatggtacaacaagttacacccgaatggtttcaaccgctgcagcaaaagctttccgattcttccagctcccacggttcctatcgtcttcccttcaagatcataagctctgtacgcaatgcccgcgacgttccactcgcctttgacgacctggttgtaccctggtacgaagttgcgcatgaggattaagattctcatgagctcatcttctgccactgagaccacgttgcttcccgtgacttcagcaaccgtcaggccagcagctgcagctcgctggagatcaatatgatccgagccaataccagctgtgaggagaagcttcaagtttttggctttcttgattctttcagcagttacatacgccgggtggaagggagtggagattaggacgtgaagatccgggatatgtttctcaagttctggccattaataaataagagttggatcaaaaggaggcttgcattcatatttatagtttgtgctatagaaaaacagaattaaagattttgaatctcttcaagtacttgttagattggaaaatacttaccgcaatcagggccttccttgtcatcagtgacgatgtactgatgtccttgggattcaagccagtcacggattcctaaggcattctcgacgcagccaaggaagttagggttcttggtagcgtattcgatggccttgtagaaaactcctacaatctttttgctatcaccagaagatgcgtgtttcataa

SEQ ID NO: 10501 - DNA, 1010 bp, Arabidopsis thaliana
aaaggtaagacagacaattgttcagacaatttgttggttatagttaattgcttaactgtactgtatatgttccaagttaagtaaatgtcacaaattgtttttttttaaagtggaaaataaatttagtagatgggacaccgaacacagttagaaagagtgaacaagaaaaagacatttattaatgcttattaagactgacttaactaagataaaaaaagaaaaaagaaacaataaagggatccatccgctcatagcctgaggtgatcactataaactagaaagctaaacataaaagcaaactctgcaacataaggatttacagatgctataactgaagagaagttggtgtagcaagtagagagagatatctatgaatctgttggctcggttttaaggggtgcggcaccacctgaggacgatgcatcgcttccattttggttttgattttggttttggaggttaaggctatttgctaccatggaatcgctgaccatccctgcttctgcgtcaaagtttagcgtcctcttgcggttgctgctgctgctgtgacaccagatgaaattggattgggtcagtgattggttttatggaagaagctgatgagagacgtgatttttctacttacttgttcaagcggttgttgatggcagataggtcctttgaagggctctggtaagcatgtgtactctctccaacacaagcatagtaactctttgtactgtgtgaaataagagcatccatctgcaaacacacaacacatggaaggtaaccaaacaatcttgtcacctacctcctcctcaagacttagtcatatcatgataaagagttaagcactatgatcttctttacctttgatccccgaagaggagaaacataaacattgtgcactgcagatacttttttaggggacatgtctggaacacttggaaacacagacacctttggcgatccgggacattgacctgtgaaccaaaataagacgatcatttaacttagggactaaattgata

SEQ ID NO: 10502 - DNA, 479 bp, Arabidopsis thaliana columbia
tgctgagaataagaatgagtctccttggaattctgattgtggtgaggaaacgtgaaaacaaacaacttgtccttgtttttgaagaacattagaagacttggccgtgttgaggatcgagcttcgtatgagttggtaaaatatggatcggtggtggttgataaccagagcttcgaaacacaacgaaacctcaaaacagatttaacaggtagccttaagagtatctccaagattagatcaagaggacagagcaatgttgttgtttttggtatcgaagaagattgtctttttcgtctttctctgtgaatccgttcggtgtttgcttctcgttgctccattgttggctaaaactctctgtgttacttctttttcacgtaatcgttccccgatctatatcttttgaactttttaatttcatatgttaaacttatatatatatagagagagagagagtacatttttttgtttcttacttattataa

SEQ ID NO: 10503 - DNA, 632 bp, Arabidopsis thaliana columbia
caaaggcaaagtcaaaaggaaaagagtcagcagtgatctcatcagttcctcagaaggcattaactgagaggaagaagcaaatgcagagcccagcagcttttagaagtgtacagaatccgagaaatgcaattatcaaggtgtcggaaaacagagttgttgcaaaggctttagtgtttcaatctccaaagaagttggtgaaactgaagagatctgtggagcttagttcctcggtgaagaagttgtgtaatgggatgaggaagcttgagattgataacaaaagaaatggtttgggggttaatcataaggttgtgagttcagcgtcatctagaagacctctaaaaacacgagaggtgaagagccgagtgtttgattctctgcggtcacagaaacagattgatcaaaaagacaaaggtgtcagtactttgaagaagagggttaagaaaaaggaagatcctgtgccttcctctgatcctttgaaaccttatgattctaatggtatggaagttgaggataaaactagtagagatgaagagctcttggttgaaacaaatctgaagaattgtcagacacatcgaaggctaacatgaacaatcagctccaggccagagaagatgtgctgtaataaggagagt

SEQ ID NO: 10504 - DNA, 597 bp, Arabidopsis thaliana columbia
ttctttaccgatgactcgataatccgatggagccacaagtgtaccttggatacggaacgtgacggacttgcgtttacacttggaaccgtcaaaaataatgcttcttaacaaaaaccgtcccttaggtaccaaaatggtgaccggtttgaccgatgcacatgctttggcccacaggacggtaaaggccttggtcgagtcggttttgccgtcgggtttggctccgtaagagaggatattgtaggtttgagctgaggaagatgagaccgagaggagaaagaggagaactatgagaagtgaagaatgcattgctttgaaagtgagagatagagggagaagttgaaaagtggtgatgggtgtgtgggatttgaaacggtttagtgtaaggtatatatagtatttgcgtatttgtgaaatggattgttttttgttgattaacatttttctgttgttattttctatattatcatatcaacgaaaccttagatctgaagaataaaatttgatatgtacagtagtatattttcttaaatagtttattcgagtgttttgtcagatttcaaatattgcaagtggtagatttgagttttagaagtttgt

SEQ ID NO: 10505 - DNA, 375 bp, Arabidopsis thaliana columbia
tgaatctgtcaccatgcatgtgctctcagtttgcttaccggagaagtagttatgccacgggaggggggaatatctgcttgtgtaagtctcggtgaactctctccttctcaagctcctccacagtccaaaaggtctctcccaaaagacaaagagattgtttaaatggaagtgataagaccggtttggtttgtgcatagacatgagcagtttggttcggtcaaatttcttaggacgaggcgcctgtcacggttactcattagtttgatgagtggtacttgtgggagacttgacgccagatttccttcactgctccatttgggttgtcatagtcaaaataccgtcttacctgtatacatggcatcattcaggtacgag

SEQ ID NO: 10506 - DNA, 514 bp, Arabidopsis thaliana columbia
ccgaaaggattggtatggaaggaacacactaagtaaatcactgcagatactttgaattcaatacttgttaaggttcgtgttctcatttccttatttcaatttcgttgaaaattctgagagaacaaagcattattgaccacgcaaaagacgaaattgagtttgacgaagacgttttgattttcttctccactcgttgtgatttggtctgcaagaaaactaaatcacgttttctatataatttaatggtgctttctcaaaagtcttcaagttaattgcaaaattgaaacactgtttttgctgggaatgaggaattgtagagtattacttgtcttggtgctaagtttggttatagttttgaatgttgtacgagctagtgatgaaagcaaggtaagcttgatcttcttctttaccgaaaaaagagaataggttatgaccaagttttggttttgctgtgttgatgattatataggttcatatagtgtacttgggtgagaagcagcatgatgatcctgag

SEQ ID NO: 10507 - DNA, 535 bp, Arabidopsis thaliana columbia
taaaggatatgttgatgatggaaaaccacctcctcaccacatagatcatcaatgactaccacaaagacactatttctcctcgatgcgtgatgaaaatagatattttgaaagcttttgactcggttcagtggagttcctactaaacacgttaagatcagagctcttgaattctgagagaaatatatacagtggatttagacatggattactacatcctcattttcagtgcaagtgaatggactaagatgatggtgacgacgagagacaagaagatgatcatctcgagaacgacaacgaaactgggttgttttctggttgtagatgtgttgcagaaagagattagttcctcgaataccttcctaataatgtagaggagcaaggagaaaaagatgacagtgccgaaagccacattcagaattccccagctataggatttcttcccgtagatgggtgacacgatggagaaagtggtagcagacgctgtcacgagcctgttacaagagagaaaaaaatgagtgagagagatcactggttg

SEQ ID NO: 10508 - DNA, 527 bp, Arabidopsis thaliana columbia
ggtattaacatacagctctcggatgaagcctgacatctccttcatttgcggtaccatcagtagtagattctacaattggcgagctggcatcagaggtagagggttcttcatccagagtaccagctcctagttgtgcagctcgccaaacagaactagctacctctgcttcagctgcagaagcctccgtcaatttctccaacgaattttcatccaagctgatattgttgaggagaaaagtaagataagtcatgctcaaacaactagacacagttaagcacaaaccaaaagagggtaggaaatgggatagacctcagtccctcagacatggagaagcttggttcagagcctgaaggaggtcgtgcggcataagaaaacctgggagtagaactttgttgggttctatctgatgctagcaaaggagaactgatgtctgactggaatgttgaattttcagcaactagaaaatcgtcaagtaacacatctgtgcggaaatacaattacggtaatagtcatactctgagaataag

SEQ ID NO: 10509 - DNA, 556 bp, Arabidopsis thaliana columbia
taacttttaacgcctaccacacttttcttcaacgtttctttgttggatctctggagattctgagtaattccattgatgattcttgggtttctttcagggtttcgcccgatctatgtttctgcgtaaacccatttcagaaactgcagaattcgcaagacttttgcggactactccttaatttctcgagatttaggtccaaagccaaaggtcacatttttaatctctcttcatcacattgtaacttgtatctttgttggataactaggtggcttagtctcatgtttgtcatcaatataagctctttatcttacgtaatgaagttggaaaacacacatttttaaatgtcaaacttattacacttgaaaacagattctgataggagccaacgagaaggaaaatttcagagaagggaaagatcttgttggtagaaacagagtccaaggagccttccagggtctgtatgagctcagtcatgaccatggcagaaaagatgatgttcttgtggctaatcttggtcaacctgaaagcattagatccggctccggtcttatagtag

SEQ ID NO: 10510 - DNA, 566 bp, Arabidopsis thaliana columbia
taccttcctattttattttttaaaaacaaaatttattacaaccaatttaaggactcaattggtcgagatttaattaatgaatacgtacagcgagagtatgactccagtgataatgccaactttgagagccaacatgacataaggtggcgtgaaaaccaaatgtgtgattgacggtggatttatccctttctttagttctccgatctacttccccaacaaaataaattattagtacattttgtagtattttaacagagaaaatatttcgtttggcgttaaaagtttataatgaacaacacattttgtttacaattttttttcataaatttattaaatataagaacgtaaatatgcaaaggtaaatattcgagtctaattgtgagtacttagccgtagaggcaaaagaaaaggagaggaaaaacgtacaaattggataccatggaattggtcatggaggaagtaaaggaaaatggttccaaaaatgacagaaacaagtggagacattgcagatatccagaacagctttggtctcttcttgctcttcacttacgtaattgatactttgt

SEQ ID NO: 10511 - DNA, 579 bp, Arabidopsis thaliana columbia
  unsure (1)..(579): unsure at all n locations
tnnnnnnnnnnnnnnnnnnnnnnnctaaagatggaccacaaaaagccgggcagtgcggcacgaagcggacccaaactgcattacatcaagcaattgctctctaaccgcatgatgctgggcgtatttttcggacaatattttatcaacaccatcacctggttcttcctcacctggttcccgatttatctggtgcaggaaaaaggcatgtcgattctgaaagtgggtctggtcgcctcgattccagcactgtgtggttttgcgggcggcgtgctgggaggtgtcttctcggattatctgatcaaacgcggtttatccctgaccctggcacgtaagctaccgattgtgctgggaatgttgctggcttccaccatcatcttatgtaactacaccaacaacaccacgctggtggtcatgctgatggcgctggctttctttggcaaaggatttggtgcgctgggctggccggtgatttctgacaccgcgccgaaagagattgttggcctctgcggcggcgtctttaacgtctttggcaatgttgctccattgtcactccactggtgattggctacctggtaagtg

SEQ ID NO: 10512 - DNA, 529 bp, Arabidopsis thaliana columbia
tttttaataatatatttcaaaatattactatacaatatgagttcatttgatataatgaatattgtaataatatattacattataagacaatatcttttatttatacaaattaaatactaggggaattattatactaaacatacttagtatttaaaataagatattaatctatggttagccacttttaaaagaaaatctaaggaattttatgttacaaaaaattgttgtttcaagtaaatagtttctagaacttgaaaactaaacacttgtattaaacttctcgatgtatcttaagaagtcgtctatcaagacaaacacatacctgttgttcgccattgttggtggtgagataggtctgcacaagtctatgtgaatcaattccaatgcttgagttgcatgataagtagctttggttggaaatgagtgtcttgtatgtttctcggccaaacatgcatcgcatgcactcatcttgtgtaaagattgcggcattccgacgaccagagccttcttcagcatggtagtcataaca

SEQ ID NO: 10513 - DNA, 519 bp, Arabidopsis thaliana columbia
tcaacactatcctcttctacattttccaacgatggcctcaaacgcactctcgtctttcaccgccgctaatcccgctctgtctcctaagccactactccctcacggctctgcttctccgtcggtttctctcggcttctccaggaaagttggcggcggcagaacagtggtcgttgcagcggctacggtggacacaaacaacatgccgatgaccggagtcgtgttccagcctttcgaagaggtgaagaaagccgatctggccattccaatcacatctcatgcctctctcgctcgccagaggtttgccgacgctagcgaggcagtcattaatgagcaaatcaagtaagcttctctgttcttttctgtctaattaaagaaacgaaaatgtttaaagattagatctaacggaggaggttgctttctatttacagtgtggaatacaacgtctcctatgtgtaccattcaatgtacgcatactttgacagagacaacgttgctatgaagggactagccaagtaatta

SEQ ID NO: 10514 - DNA, 509 bp, Arabidopsis thaliana columbia
tgcagatgaaatgtatcgcagtggcaccaccttcgccatcagggaagccgcggagggtgagggacttaaggtagaattgactatggtggtggttcttgatcacaaatgcagccggtggtcccattgactcgtcccaatcaaacgttactccaaacgcagtttcctcagcggttactgacgtttttatttttgttacccatttttccagatgtgctgcttttccaagtcttcctctcttctcattggctgatacatatgtacacaaaaatattattttagtttaaaacactcagattttgatttggataaagtataaaatgtgtttgtcacaacatcatggtttataacaacaatgaatcttagtatagtgactattaaccaaagaatgatttaagaaaaacagagtaatcaagaactttaagatggatttgataacgggtcgggttaaagaaagaatgggttaccgggtcgggttggtgagagctgatgaggtggagagagacacgacg

SEQ ID NO: 10515 - DNA, 583 bp, Arabidopsis thaliana columbia
tagtcaaatctattgtggtcaaatagtaaaaactctaaaaatacaagtaaataataaaatataggaaaaatctgtcttttctttatctattatcttatcaaaatatccaataatattagagaatataataatcgaattaaaacaagaaaaaaatccacctagttaatttgttacttacaaatcacaacagatacgcaacaaagactctccagttggcttctgttacgatctctggccgtctttaaaacacacaaaaccttttcatgtaaaaacaacaacaacaacaacaacaaaaatggttaatgagcaaaagagatttgctttgtttcttgctacgagcgattcaacgttcgtgaagaaagcgtatggaggctatttcaacgtgtttgtttcgacttttggtgaagatggtgagcaatgggatctgtttcgagtgatcgacggcgagtttcctgacgataaggatctggataagtacgatggttttgttattagtggaagccttaacgatgcttttggtgatgatgattggatcgttaagctttgttctctttgccgaaagcttgacgacatgaagaagaag

SEQ ID NO: 10516 - DNA, 1071 bp, Arabidopsis thaliana
taccctgtttgaggagctttcgtacttcctgaatggaattgaggaatcgaagaaatatggtaatcagctatcgaacagggtaaagactatttgacattccaatttaacttacacatttcattccgtatatgtgcttgttttatcaagcaatgagtcatgattatcctaaaaagtgaattctccaatgcttacagatctgtgctatactcgccgaaacatggtgtttgtttagaaagtcaaattatgactcgggtaaacttgaaagattaggatactgtcccgacagtgtctttcttgagaaattttggaaactctgtgcagaaatgtttaacacttcaggtgactctttgttttgcttttccacaaacccctgtcatttcttgattttccaaattacgtattatttatttctgccggactttgacacagatgagaccgatgaggaggatgaaaataaggaatacattgaagagacaaacagagatgtttcagtcattgctgcctgcaagttggttgctagtgatgtggttccaaaggtacttaccaagtgcattttacattgctgctattattatcttagtaatgttctgacacctatatagattgatgctcacatatcaatttgcttatatggattcttttctgttgcaggattatctaggaccagagatcatatcgcatcttggtatgcatggacctggtgtaacaggcatcataaagaatcttattacattcttaaggaaaaaagaagatgacatctctaatatctatctcgaatccttgaaacgggtaagcaagattttcagaagatgcaaagtttcgtagtccaagaaaattgctgacactatgtaattgggcaggcctatcaccggtattcaagtgaactttctagtggccgtgaagaatccagagtagataaatgtcttgaagagtggcgggacgttgcaggtgggcctcaggaatgtatatcggggctgccgcaacaaatacagattggagatattgagtgtggtgaaggaaggtgttgagtttgcttttagggacgcccaaagcaactgttgtttctggaag

SEQ ID NO: 10517 - DNA, 623 bp, Arabidopsis thaliana columbia
tcatcaaataaacgcattaaatcgccaaattgcccatggagatcgccaaatactttgataggagcctttagctgaagaaccgtttgttcatgcataaatatttgttcggcagcataacagagttccccaacttcgtaagaatccaagaaaaatttcctattgccaggaggtttccagtttcgaggtcttaacaaagcagcaatgacctgcaagcaacaacacattagtagagatattaacagggacagtgtccaggaggatgagaagattgcagaagaatgatacctttttatgcaggccttgcggagacttctgtctcgtgaacttcttggtaggttgtggcacatcgctattgttcatgggaaccatccgtcggctctcattctgaaactgatccaagcttagctgtcttaccatgccgcccagactaccaaccgtctcttttgctaccacaacctatcaaatgagatacttcggtaatcaaatacgcaaaagaataggtcaacagttatcaagcatacactatgttgggaagtattcaaactaagcagcaatatgtccacgcatgagacaaagagataaatgtataatattcttaggtattacatacagctcctggatga

SEQ ID NO: 10518 - DNA, 578 bp, Arabidopsis thaliana columbia
cagtgtgctctaaagttccagcgtcgagccaacacgttcgttaagccccttaccacccagcagagaaaagaccgctgcagcatcggtagagccgacgatagcgccgattaataagccttcaatcaaatcaagattaaacagccacgccgccatcatgccggttaaaccagaggtgataagcacgcccagcgtcgccagcgacagtgccggtcctaacgccacacgaaaggaactggcctgagtgcgcatcccgccgtcgagcaaaataatcgccagtgccaggttacttaccatgtaggcgaaggggtaattatcaaacgggataccgccgacgccatcgactcctgccagcatgccgatcgccagaaaaataaccagaataggaatgccaagacgggaagaaaatgaactaagtaatatactgctggtgacaaggatggatcgtaagatgaaaaggctaattattgttgtggcatcaacggtcggttaccctgattcgctgcacttatataaacctacatattagcggcaaacagcgttttcttagcctgaacgtgattttttcattttagacagga

SEQ ID NO: 10519 - DNA, 576 bp, Arabidopsis thaliana columbia
  unsure (1)..(576): unsure at all n locations
cattaataaatcaatcatgtgaattagattttagaccaaataagaagaagagaaggatattgtttcttttttctcaccatctttgagaaggttcaccacagtgactgagacatttcttctcgttgtaaattccagcatagttgcaacgtccacagttcccacgagccgtgtagcaggccagtggcgtccaatgttatgtccatttacccaaacttgacctttccccattgtgttcatgtccaaagccagtggttcgttgcctctcggtgtatcaaaagaagactacaaatagagacaacaagaatccgatatgaatctatatcttatattatgttcataatttcaataacatccatagttataattcatcacaaaaaccagattaagaatgttagctacattcctaactaatgtaaaatgtatgtttaaagtgttttacacatgtattaaaaaaacattcaacatctcatatataaaccttttaattcatttgccatttttgaaaattcattaaccaataattttgtacgtataggtaggtatatgaaaatatcatatagtntggcatagatttta

SEQ ID NO: 10520 - DNA, 624 bp, Arabidopsis thaliana columbia
cttctttttccagattagcaactatgcgagtatcctcttcatggcgctcttctcgtcgattgcaataacgggtattctcgagatgcaatggggcaaagttgggatcgatgattggtggagaaacgaacagttttgggtcattggaggtgtttctgcgcatctgtttgctctcttccaaggtctcctcaaggttcttgctggtgtcgacactaacttcacagtcacatcaaaagcagctgatgatggagagttctctgacctttacctcttcaaatggacttcacttctcatccctccaatgactctactcatcataaacgtcattggagtcatagtcggagtctctgatgccatcagcaatggatacgactcgtggggaccgcttttcggaagactgttctttgcactttgggtcatcattcatctttacccgttccttaaaggtttgcttgggaaacaagatagaatgccaaccattattgtcgtctggtccatcctcctggcctcgattcttacacttctttgggtccgggttaaccgtttgtggcgaaaggcggtcgtattctcgagatctgtggtttagactgcttgtgattcgattgaccggtggatgggttggtgaaa

SEQ ID NO: 10521 - DNA, 599 bp, Arabidopsis thaliana columbia
  unsure (1)..(599): unsure at all n locations
nnnnnnnnnnnnnnnnnnnnttaaagacgtgcaggataccgtcagcatcgatatcgaaggtaacttcgatctgcggcatgccggcggtgccgggttgataccatctaggttgaactgacccagagatttgttatcagccgcacgtttacgttcaccctgcagcacatggatggttaccgcagactggttgtcttcagcggtagagaacacctggctgtgcttggtcgggatagtggtgtttttcgcgatcagcgtcgtcatcacaccgcccatggtttcgatacccagagacagcggggtaacgtccagcagcagtacgtcttttacgtcaccagtcagaacaccaccctgaacagcagcaccgattgctacagcttcgtccgggttaacgtctttacgcggctctttaccaaagaactcagcaactttcttctgaaccattggcatacgagtctgaccaccaacgaggataacgtcgtcgatatcagatacggacaggccagcgtcctgcagtgcaactttcagcggctcaatggaacggtttacagatcttcaaccaggctttctagtttcgcacgagtcactttgatgttcatgtg

SEQ ID NO: 10522 - DNA, 570 bp, Arabidopsis thaliana columbia
  unsure (1)..(570): unsure at all n locations
tcagactatcagtcttcagngtgtggtcatacaaaaccatcaagaaaattagaaggtaaatgctagtattaacttcaaatatccgtcaaaattttcaattattttcagtgttctcataatctaagcccttaatgttacaacaacaaaacaaccagaaagacgttgtgaaagaaaagaccaaacatcaaaccacagtttctggttatgaaaacaacagtcaagtggtagagattctgatgccactcagaacatagcctccaaaagaactcatctgcatgtgagggtgagatcttgaaggaagcacctgcattttaaatatacatatatcattcaacacacttcttgatgatctagtgagattattataacacacacacaaaataaaaaaattgagaatattatcagacctgatattcgcgtacgcatggttctgttatttgcagattgatcgccattttaccctgttgaagcttgtgcatacatgtcgccagcgcgtgtaataattattatgagagtttgtttattactacaaatataatgaaaagctttgaacaaggtcacttagctata

SEQ ID NO: 10523 - DNA, 518 bp, Arabidopsis thaliana columbia
catctaattgttaagaagtctcttgacgcaatgtgctcaagctgtagcgagctttgaccagagaagagctacagataaactcaaggagataagagcacactcttctagcaatggagatggaacacaaagactagctttttactttgcagaggcgcttgaggcacgtatcactggaaacatctcaccgcctgtttctaatccgtttccttcaagcacgacatcgatggtggacattttgaaagcgtacaagctgtttgttcatacttgtcccatctatgtaactgattacttcgctgcgaacaaatcgatttacgaacttgctatgaaagcaactaagcttcacatagttgattttggagttctctacggctttcaatggccttgtttgttacgagctctgtctaaacgaccgggcggaccaccaatgcttcgggtgactggaatcgagctgccacaagcgggttttcgtccttcagaccgcgttgaagagactggtcgaagactgaaaagggtctgcg

SEQ ID NO: 10524 - DNA, 607 bp, Arabidopsis thaliana columbia
caataattagaaaccaattcatctcaaagtcaacgaaattccaatttttgcaaaaattcaaaaacccgagattatttaccaggagagcgagcgaagagttggggagaagcaccgaagacatcgttgaaattggccttcaaaacatcgaatcgttgtgtagcttcttggagcagagatccttcgccgtagacaggctcaagagatgtgaagatcgggactgatacttcttccggtttcgccatttttgtagtttctccttttggctctctctgtctctctcgatcacttgtcgtcacttaacctctaatgttcacagttatcacgaaacgtcttcgctagagcataattattaattgccaccgatcttatttctaaaatatattaattgtttatcgtatttaagatctgttccggaagatcgcttgtatttatcgaatattttgaattttaaaaatgaatatttgtgaatatcttacttatccaaaactttcgatcttttggattccggaacacgtttatgaatcttaattcgtactatatttgttggtgattttttttttctttgggtaggtttatatttgataaacatattattccaaaaatgatg

SEQ ID NO: 10525 - DNA, 546 bp, Arabidopsis thaliana columbia
tcactaatctgtgaatatctctatttgtaatcactctgttttctttcttttctttccttcaacaactaaacaactacgatggtcagaagaattttgctatacggaggctgaaggtggttctttggacgcagagatactatctgtcaggtcacgaccacttgtctcgaaagggaagagacaaacgcaaattcctgacacaagaatcacaacctcaaacagaagaacagcgatcgtctgatggcatccgtgaactaatccaacggctacgagtggacataagattcctccaattcttcctaccgagctccctactcctactccggttgttctcactgccgttggatatatctccggagcatatatgtaaaccactgtgaaagctgccgagatgcagatacggccgccgaagagaagaacggtggttatgaatggagactgatgggataacagagggagaaggaaaatgcaacatgtgaacaacattgatgccattgaagcttttcgtccaagtctaccaccattgctgctgatatcagtagacctgga

SEQ ID NO: 10526 - DNA, 732 bp, Arabidopsis thaliana
actcacttgttactattgctgcattaatagctatgacttatgagtacgcctaattacgtacgtcaagattaattaatgctaatatattgtctgttggttaatgcattagaaaaataaacgagtccatatcaagaaggaagctagggttcttctcgtgcgggagtggtaatccaatcgatgattgttggcgatgcgacaaggattgggagaaaaaccgaaaacggttagcagactgtggtatcggttttggcaagaacgctattggcggtcgtgatggtgaaatctatgtggtcacggatccaggaaacgatgatccagtaaaccctagaccgggaacactaagatacgcagtcattcaagatgaaccgctatggatcatttttaagcgagacatgacgatccaactaaaagaagaactcatcatgaattctttcaaaaccctagacggacgaggagcctccgtacacatctccggtgggccatgtataaccatacaatatgtaaccaacatcatcatccatggtttacacatacatgactgcaagcaaggtgggaatacttacgtacgtgactcaccagagcattacggatatagaacggtatccgacggtgacggtgtgtcaatattcggtggaaccacgtgtgggttgatcattgctcgctatcgaattgcaacgacgggttaattgatgcaattcgtggataacggctatacgatctcgacaattattt

SEQ ID NO: 10527 - DNA, 758 bp, Arabidopsis thaliana
gccctatcaaaagttttagttagatatatattaattaagtcggtgcaatcaactctcgttatccatcgagtatgatgcaaccgaagaacaagttttttttgttgttgttgtaaatgttaaataccgaagaaaaagttttagtaacgtccggcgtcgtgatgcccggagataactcttatccacctaaaaaacataaatatttccgccacaaatttccaaatactcttacaacttatgtttagctcagaccaaaccaaaccaggagattttgacacgtccttcatatcacatgcacaccatcctcctcccaccaaaaaatcatatacaatttgtgatcttcacatataaataagcaatcaattttaacaaaggtggtcgtgttacatcgagtatatccttctacgtacggacaataacctcaatcacgtataataatatatagatatatatcaatttagtccatgactcgaaatataatggactaacataaacaatggtggaagtcgaagaattggaaccacttagtccaatggacgatgaagaagaagagataagctatgatgacctcaaaagacgcatgtggaaagaccgaaacctcatggaaaaaaagctcaagcaacagaaacgacacagcaacgacgtcgtttcgtttacaacacaccgagccgaagcttcacggcgcaagaagatggctcgttctcaagattcagtgttgaagtacatgatgaagatcatggaggtgtgtcagctaaaggttt

SEQ ID NO: 10528 - DNA, 529 bp, Arabidopsis thaliana columbia
tgaaaagtgaaaaattcacctcccacaactctctacgaccacacagcaaatagtccagctcagaaggggtgaatatttgtagagatgttatgtcaaacacctgataattatgtgcagaaacagaaaggttttgtaagttaacaaatgaaggtaaaagtttaaggtccgccctaaaaagaaaaaatgcaagtctctaatctacagaattttctatattatgtttagaagccaaaggcaatagacaaagaaagagacagaaagtctgcgagactgttaacctgattgaatccagatctgaaggcttcgatctgccgagtgactcctctcttgacagtagcatcaacgacaagggatatatactcctcaagattagtaatatcaacctgtaacaaaacagcacgtcatcagcaatcatggacatgttctaaaagaatagtaagaggtggggtgtaagctaagacagtacaatttcatctcctgatctcaggatgtactcaggatagccaggtagcgtgaattccaaggagag

SEQ ID NO: 10529 - DNA, 505 bp, Arabidopsis thaliana columbia
gaaacatgccactgaaagactctactgagaaaaggtagtcggatctaaactcaaagtcaaggttgttccggcagtcttgtctttaaagtcattgtacgagaagaagtccttcacggtaaccgtttcaggcgccggtcccaaagctgaaaatcttgtctcggcacagctgatctggtccgatggtgtccactttgtgagaagccccattgttgtttatgcttaaaactgatgaatcagaaccagttaatgtttctatatgttatcgtcaattattacttttaaacccttgttcgttagttttgatgtttctggttcctacactcattttagttataaacataaaatctaagtatttgccagttctaattaaaaccttgttggttctaaatggttctgagagttttgatttaatttggagaatgatcacatatattactacttgtttacttaaagaaataggatattagaatcacgttcatagtatttttgtctactcttaaaattt

SEQ ID NO: 10530 - DNA, 471 bp, Arabidopsis thaliana columbia
gttttctctctctctttaatcactttaggccttctagttttttgttatatgaacctgatctgtgtttaaagtctctataagccggctaatttggttcacaaaccttttcttttaggctgaagcagaactaatttcatctataatgacattcttcaagcgaattggaatcactgcatcagatgtgggttttaaggtttcaagccgcaaggtatttttgcttacgttctcttttgatgtgatatgatcattttgtttcttggtttacactctagatacagaaccaagtaactcacttgcaatgctaaacatgagttgagattattttgcacgatctgcagcatctgaatatccactgtagctaacatctcccataacttcttccttgtacaggttttacaagaatttttaaaaaagtatggtgtacccgaagacctgtttggaagagtttgcttcattatagacaaggttagc

SEQ ID NO: 10531 - DNA, 886 bp, Arabidopsis thaliana
  unsure (1)..(886): unsure at all n locations
agacgtatcgcctgatttgctacccgtcatgactgtgattccgccaacatcaacggtaacacgcggcattcgggatatttcgtatgtcaaaggtaaccgttaccacttttcgcgcctggtttttttagtttcacgacgaaaaaatggtctaaaacgtgatcaatttaacaccttgctgattgaccgtaaagaaagatgcgctacatacaagtgtagcaccgtttattctctgtaaattccttattacaacggcgtgaaacgctngtcaggatccactgccagacctcattttacggtttgcgcaggcgtctacgtttcaccacaacactgacatcactctggcaaggaccccagcagggaccacggatgataatgacggtaacaagcatgttagacaatgttttaagaattgccacacgccaaagcccacttgcactctggcaggcacactatgtcaaagacaagttgatggcgagccatccgggcctggtcgttgaactggtaccgatggtgacgcgcggcgatgtgattcttgactacgcgctggcgaaagtaggcggaaaaggcttatttgtaaaagagctggaagtcgcgctcctcgaaaatcgcgccgatatcgccgtacactcaatgaaagatgtgccggttgaattcccgcaaggtctgggactggtcactatttgtgagcgtgaagatcctcgcgatgcctttgtgtccaataactatgacagtctggatgcgttaccggcaggcagtatcgtcgggacgtccagtttacgtcgccagtgccaactggctgaacgccgtccggatctgattatccgctccctgcgcggcaacgtcggcactcgcctgagcaaactggataacggcgaatacgctttag

SEQ ID NO: 10532 - DNA, 690 bp, Arabidopsis thaliana columbia
caccaaaaaattcttccaccttaaacaaccactcattgattctacttccatcaaatctaggaaaatcaatcttccccaacctagtaagattaccatattgattattcacctcctgtcttaccatctcaggtcgaaaatcccgttgaaagtcccgttgatgttcaacaaacccagatctggccatcgaagaagttgacgaacgtggtacactccgatccaacaccttctcaccttccgtcaccctcttcgccgtcgttctactcatcgcactcatcatgtcagccatgtgcttcagcatcgatttatgctgctcagccaccatctcttcaagctttgtcatacgagtagcgataagatcctccttctcaacccctttccctttcacatcctcctcctgacttgaccttgtcaccaccatcttctccgaggaaacgaatggctctgatacctttaatacagagaaactatggattctctgtttgaatggctcaaaatcctttgattaattaactccacaaaaccggccaaatcaacgttcaggaaacgcccaaatgacaactcgctagctctcaagatgagaggatctagcttacaaagaaaataagaatttaatgttttacaaaggatttcgataaagatgagaatgagctgaacaatgctcatatacacgaagctaacggcatcttttga

SEQ ID NO: 10533 - DNA, 451 bp, Arabidopsis thaliana columbia
cattcaatatcaagtctctcattagctgaggtgccaccataggttgccaaatgttcctttatttctggtcaattagtgtttgcagtcattgtgatgaacaaagtaggattaccatatgcacgacatattgccattgcatcatgatatttctctatcatgtatcttggtcctcctgtaaaagttgatggtaaaattattcttttccccacttttatgccttcggtgtcacctttactgactgcatcgaatacgttgttcctgattgtcttttgcccagcgaagtcgctcttgttcgatgatagtgtatacatcaacaacatattggtggaataagcgtcctgcctttatgaatgtcattccttctgctagcctagtctggatttggtaagaatagaagtctcgtatactaagataagttcttttcctttcgccggctgtggtgactgcatgt

SEQ ID NO: 10534 - DNA, 539 bp, Arabidopsis thaliana columbia
ccatgagcttgggatctctggtgactcagttttgcaaacagttagctagccagcttgaaggcgtcaatgaagagaccataagtgaaacccatcttgaaattattgagcagagctataggaaatgtgactgtggtgcggctataatagaatcttgtcacatactctgtcaaaagaacgcatagaaccgcagcaataacatcgttcactcccaatgctccaaacgagagagagatagtctgcgcgacataaaagccacctaacaacgagattcctccaaaaagcgttcttcttgaaggcttcttgaagtaattcctagagatttcaggaacagatcttataatgtctatcaatcttcttggcgttggaccttcagtctcttgtaaagctctaatgcttcttgcaaatctcctctttcgtttaaatggcgacgacacaaacgttccgaaactctggcactgatgatggttaaggactaaactgttcaagttggtggagatgaactcaaagaatgtgccatcctgaaaacaatatccaacaaa

SEQ ID NO: 10535 - DNA, 1288 bp, Arabidopsis thaliana
ctctttaaactttcgtattttattacaagcatctaatttctaaactaaaaacattattttattttcacgtcataagcaagcatcatgcataattttgtaattctatcttcattttggccactagtcactactaatagcaaaataataacaaagtttcattggttcaaacatcatatcttcatatagttgactcattagattccaatcaacaattatatcaaaataatctaaaaacaatttctctttattaaaaatgaaaacaaatcttgattagtataaaaatagagatatggttcttgtcagtctcacataaagattcctagtcttatactctgtctctctctctctctctctttttcacactcacacacaaactaaaccggaatggccaccgccgacgaattctccgacgaagatacatcaccgattgaagaagtccgtttaacggtaacaaacaccgacgatccaacactaccggtttggacattcaggatgtggttcttgggtctaatctcatgttctctcctctctttccttaaccaattcttctcgtaccgaaccgaaccgctcgtaatcactcaaatcacggttcaggtggctacactacctatcggtcatttcttggccaaggtgcttcccaaaacccggtttgggttacccggttgtggatcggcccggttctcgctgaacccgggtccgtttaacatgaaagagcatgttttgatatcgatatttgcgaatggggtagtgctttcggatccgggtcggcttatgcggttggtatcatcacaattattaaagctttttatggccggagtatctcttttattgccggctggctcctcatcatcactacacaggtactcgtaactttaatcattttctcagctttgttgttatatataagtataataaatatatcacttttggtaatagtcaccaaataattgaagattcggaaaaaacgcgttgaaagattaagatatttcaagaaatttacgtcttaatgttaatgatactctgcttcgttaattcaatgtaatcggttaataattatatgaaacaaaattctctgtaaattggaattttgagtgacatgtaacttttcttctcaattgaggaaagataatttctttatcatgttgtatatttcaaacagcatgatttctttacagaacaaataaaaatataggttagacttttggtttaaaaggaaaatttgtcggtttgcgtgatatcatctggcgatgtaaattcgggcgagagaccgatttggagttattgatgg

SEQ ID NO: 10536 - DNA, 558 bp, Arabidopsis thaliana columbia
agcagaatctaatcaagcaaagcaaattgcgaaaattttaatgcaaagaggtaaagggctgagaaaattctttaactaccatctctttcgcaaggtttccatacaatgcttttcgtctctcctttgcccggaaaattgcatgtttgatcccacgataatccatcaatctatttggccagagttcagccaactggagcatgaataattccaaaacaatattcatcaagctctaacaaaccaccttgagcttttggctaggtctaattggtgatttaagacatgagataagcttggaacaaaaaaaaccagaataccaaaaataatcgggaatggagaagggcttacattgacatatagcttttttgtttgtggaccttgatcttcatccaatccctaatataccaaaaaacaggaacaaaaccgttttgactctaattctatgtctagaattggcatggcagattataaaggtatatgataattacgtcgataaatatgtcatataggtcacacaatttatcctccaatgccgcatccatgacaaacttcttcaaagat

SEQ ID NO: 10537 - DNA, 705 bp, Arabidopsis thaliana
tgtaaagggtagtaacgtggttatttcggagaaaggcgaggccaagattgcggattttggttgtgcgaaacgggttgacccggtgttcgagtcgccggttatgggaacgccggcttttatggctccagaggtggcgcgtggagagaaacaggggaaggagagtgatatatgggcggttggttgtacgatgatagagatggttacgggttctccaccgtggacgaaggcagattcgagggaggatccggtttcggttctttatcgggtcgggtattcgagtgaaactccggagcttccttgtttgcttgcggaagaagcaaaagattttttggaaaagtgtttgaagagggaagcaaatgaaagatggacagcgacacaactcctaaaccatccttttttgacaactaaaccagacattgaaccagttctggttcccggtttgatttcaaactcaccgacaagtgtgacagatcaaacgttttggagatcagtagaggaagaggaagaagaagaaacagaggaaatacagaaggattcgagagatcttgatcgtttaagcttgtggggttgtactcggagaggatcggacggctgaagtgtgttggtggtttggatgggccagatgtgatatggagggtggggattggattatggtgagagcgaggtgtgaaggacaatgattagtgggcacaaaaggaattgatt

SEQ ID NO: 10538 - DNA, 505 bp, Arabidopsis thaliana columbia
caacatgaggaaattcagaggtaaatttcttggtcatgacagtagcaaatcccaagttcaagttgcagacagtgatgatatcagcaagggtaatagagtgtccgacaaggtaagtgttagacgtgagatgtgtgttcagagcatcaagtgctctcttcaacgtagagatcgcaccttcttcagccttcatttatataacaatcacggatgagactatttatatagtgaaaagaatacctagattgccatcacaaagagtgaatgaaacaaccaatgaaagtcaaaaaagcttaccggagcactgtatggcataaagcccattcttgggccgaaccacctcaagatacttgcatagatctccaatgaagagaaatcaatccattgctcaatttgtgcctgcgaaaaaacaacatgcagataaccattgagaatactaacaaatagaatgacaaacaatagaagaggtgtcaatggattagagaagagtagcccccagggaaaaaac

SEQ ID NO: 10539 - DNA, 949 bp, Arabidopsis thaliana
atgccatgtaatacagaaaccgatagaagcgttgtaagtgtaggatttttcatttttgactcaaaagttaactatattatttgcaggaaacaatggatttagatatgattattgcattgcagaatgttcagaacattttttagatgatgtatgcgagccagtgtgtatagacaaggggtactcggatggaggatgtattggtttagcaccaaattttaaatgttgttgtaagaaatgatagaaaccaataatctttatagtaaaacggtgatggtgatttgatatcttgtatgttcttcgatgaaataaagctaatcttatctttgataagcttcagaagtcttaataatttcacaaaagcttagcattatcgatatcctagagataaggaggtataaaaaagagtaaaatttatattgaaccaaacaattcatgggactgttttatcagaggatttggcgagtaatggcaccggaacgagtccgtgtttttctctggttagtggtgcagcaagtgatcataactaatgtggaaagatatcgaagacacttgagtgatacgagggtgtgtcagatttgtcaaggcggggaggagacgattctacatgttctccgcgactgtcccgcaatggcagggatatggagccggttagtccctcgtgatcaaatacgacaattcttcactgcttctttgctggagtggatctacaagaacttacgggaacgtggatcatggccgacggtgtttgtaatggcagtatggtggggatggaaatggaggtgtgcaacatctttggcgggaatggtaagtgtagggaccgtgttaagtttattaaggatttggaggaggaagtggcgatacggaatgcttttgtgaaggggactgaggtgcgggtgagtagagttgagcggttggtgtcttgggtatcccggaagatggttgggtaaag

SEQ ID NO: 10540 - DNA, 449 bp, Arabidopsis thaliana columbia
tcaaatctttacttctggatagcgattattcctgtaaccgtaagaactacattttcacagcattctcgctttcttgtattgtgtttgtaaacatcacaacttagtaaaactttcattctcattttatcagcttgttcttctggttggtgctaagttgcaacacgtaatagcaactttggcattggagaatgccgggttaaccgagtatccttccggagtaaagctgagacctcgagatgaacttttctggttcaataaaccagaactactcttgtcccttatccatttcattctgtttcaggtttgcaaaatcttaactaaccaccattgcaccgaaccaatatttctcggtcttggtaaaactaacagctacttgatttgcatttccaacagaattcttttgaactggcttcgttcttctggttctgggtatgacaaatgaaccatat

SEQ ID NO: 10541 - DNA, 1387 bp, Arabidopsis thaliana
caccaaaaaaagagtaaagaagtaaaaaaggaaaggtgaaaattagctatagctagaaaatcaaaaactagatattttttgtttcatattttttaggggttacaccaagcagaattttatactagatggcattttacattcctaaagatgatttatcaatggttttattagataagtgagctatatttaatgacatgctcaagcaacctttatatttcgttgttgttctcttgactttcccatgctaaatgttttttagacgtgtgcttttgcattcaccgcctaggaaataaaaagttgataatataaccgtaataaaaaatatttaaaaattaattacgataatctcgaaatatattttaaaaactatcataaattccccacaatatcataagagatcacagagatacaaaaattctattcaataaaagcttccgaaatctaggcgtagtaatcagaattttagttttaacctgaaggtgctccataataaataaataaaatctcatattttacaaagcacagaaaccctaagtcatctgagagatagataatgaaaacggaagagatgaatgaatcatcagagtctcctcctccttctcgtacgttttcttcgttaccatacgacatcatactcaattgtttggctcgtgtctcgagataccattacccaactctatctctcgtctccaaggagttccaatctctcatcgcctcccgtgagctctacgctacacgatcccgcatcggaaaaaccgagaggttcctctatatctgcttaaacctgactaagagcaaccctaagtatcgctggttcacacttcccccagttcccaacgaacaaaaactactacccgtccctttgtttacttatcatctcaattcctcaaccgtctcctcaactgattcagagatttacataatcggaggcctcgtttggggaaatagaagcaagaaagcgtccatttttgactgtcgatctcatcaaacgcgtagactcccaaaaatgcgttttcctcgagcttctgctgccgctcatgtcattgacggtaagatctatgttattggaggcggcgagattcggggagaggtttatgacccaacgacccaaacttggctcacaacaccagtagatcacaccactgaagagtgtcaaaaagtttatgacaagcatggcgtgaatatttgctttgtagagatagacaacttgctgtgccaaacatttgtattcaacgggaagctatattggcgtcatccaaggggagatgattttggctgggctagggttaagggagtggaacaggaactcttccgtaatcatctttcttatgtggacaaatccggcggaggaagaagagtgacagtgtggtggaagtctgtggtggtg

SEQ ID NO: 10542 - DNA, 641 bp, Arabidopsis thaliana columbia
atgatcaggatccccggagatccttttaatgtatcgcagaccatcctcagctatggcctcctgtttttccttttaggtatcttcgtagctcttcaccgtaaataatcccgacccatctagaggacggagccgccgggattgaaattcaggcagattagatcggcgatttggccttgttttcaacgaagatcgtcttgttagggtttcgtccgcatctatggattctctgtcaaatggggtattgatatgaatttcggctttcgtgatgacggaatctatctggttaaacgatcaatcttctcctcggtcgatgataccttcagcaaaaccagtggctaatgtccatcgccagaggtcaggactagcttattgacttgagtttgaattatggattcttgtagtagaacctttttgatgcctttgaattatagaaactaggaactactttgttcatgtttaggagatccagcgttagatcacgtaattggaaggcttatttaggagatcgtttaaaattcggatgctaatttctgaattttgttttacgatggctatacaaacagtttgaagtgatagatctcatgtaatatagagttttggaccgtaatcttgtcacaaggccaattatgcggcttttgatg

SEQ ID NO: 10543 - DNA, 527 bp, Arabidopsis thaliana columbia
caaacgttgaaaccgcggttgaaacaatcaagtagtaattaaactcacgagaagaaccgagtcaagtttgcgtaaagctggaatgttcgtcagcaaatcatctctttgttttgtaaccatgatctacaaaggagaaaattagggttaataagaaaaatcgtcactagtagactagtagttgttatatatgtacgtaattaatgactaacagttgcatgcattcacctcagtgaattggccatttttacccatttgtctagaaggaacaaactggacaatgtgatcaatcacagataataaccaacccatttctttcctccaattctcttttgtctccggatacataggctgcaatttcatctgctctccaaacatcgaatctgcatgccaataccaaagccacattaattagtttgtgacttattttaaccattcaaatcgttattagacatttaatgttttaatcatattagtagtgttaaaggtttacagcgagtttggtgatggcgtttgcaaagctacgcaga

SEQ ID NO: 10544 - DNA, 448 bp, Arabidopsis thaliana columbia
ggcgcttttgcttttgcaatcttagcctccatgacttctatcatccttggttatggttggtcttctaatcattctctaacgatcaaatttcagatttggtttggtttaacggtttagataatcatcctcacattttatggatgttgcagatattggagtgatgagtggagctgcaattttcataaaagacgatttgaagctgtcggacgtacaacttgagattcttatgggaattctaaatatctattctctgatcggttcaggagcagctggaagaacttccgattggatcggaagacgatataccatagtgttggcaggattcttcttcttttgtggagccctactaatgggttttgccactaactatcctttcattatggtcggccgttttgtagccggtatcggtgtcggttacgctatgatgattgcgcctgtttatccacgg

SEQ ID NO: 10545 - DNA, 1123 bp, Arabidopsis thaliana
tcccttcctgtaatgtggctcattaggatcgccataaggcacaaccatttccacaaaacttagcctgtgtgcaacaggccttcgacctcgactgccatcaacatatgctaccgaatgtatgactaaaccttcccttggagtgaatccaatacgaaagttccactgtaaacaaaatgttgagccaattaagaaataagcttaagcataatcacttggtttcaagtaggctattactggaaatctaccttctgccactcgacaaagtaaccccttacacgaaaacttggaccttcaggctgaataatctggagaggcttaacatcacttctatcaacaccccctctactttcacctggggtataattcctcaaagggtcaggtggggggagtggcacaaacttacggtcttcaaattcaatcaccaccatgttttgcatgtctacaagtacataaatgccctcaactggacgagcatatccattttccataggggaatcactatcagtccgacagtatataaggggctttgcaagcctacgactaggagcgtcacctcactgtgataacccacacacctgcacaatacattaagaggtaggctcagagaagaagtacaccttaattgtcaacagaaacgatgatgttgttaacataccagggatcaaccatcactagatccatgtcttcaatacctctcctcttcattgcctctatgaatggtgggaagtctttgacaatcgcttcacattcagcatattcagccgcatcctaaaatcaaaagaatctaaacttagagactggcaaacaacggtagcatctaaaagtcacttagagatccaattccttaaaacatagtttaacataccatgggtggctgaacatcaggtataacttgtgaggaaacaactcttcccctgtgatgtccaccccgagtgacagcatgaacttcagacaatgccacaatccatacacttgtctcattagacttttggttgtaaacaacaagtctagctcgccttggagggagcttcatcggaatcacaggtccagatttagttcttggaagtagtgatggctggaacggtgggaaaaagtaagcatcagcgagcgccacaacttgttt

SEQ ID NO: 10546 - DNA, 555 bp, Arabidopsis thaliana columbia
tacaagccagaatcgagttttggactctttttaatacacattaaagaacaaaagtaaacatccttgctcttgtagacgataagatcattgatacgagacgaacaagtgtaacaatgtggccgagaagcactatagttggaaagaacttccaatacaaatcgtttcaaatggaaggtggatccaaccctcatatatggctccattccaagtacgcaatcaatatgaagagtggtacaacacaagtcacacgtatagaaccacttttgtggatctagaatcttctcgcatatgtcacaccaataatcacccttggccatctcaccgaattgtaaggacaaaggatgaacatcgtatttgtgcattgccagttcagggatagtagcacacttgtagcacataaataaatcatcctgcccagtcaaactccacatatgctcaccaccttttccgcaaatcgagcatgtgctccaattatcgggaactacaagcattgaatgtggttgacttttatggacatcccatcgtaaattgaacacatcgtacatcaatcttcaa

SEQ ID NO: 10547 - DNA, 503 bp, Arabidopsis thaliana columbia
tcaggtcttgataagatctgggatgcaaagcctctagtcaatggcagggagataatgcaaattgctgagctgaagggaggatcccggctcatccgtgaatgggtaaggcttcctctcttttcattgattccctaatcctcaatctctcagaactcagaactttttctcatcctagatctctgtcatggacccttaaacaaaaaaaacggtttctccatatgttcaattaaatgttggagttgtgctcagtacaaattgaacttgtagatctagtctcttgcatgcctctgtttctgtttcttaggtcactatattatctgaggctagtctttagctgtgacaaaacgtgcaaataacctttctgaaacatctattatatcctgctttcaaatgtggctttatgaaactgttcgtcactaggcaaactcagccttaatgattttaactaaaaactcgatccaaaagctgtgttatcaaagtaatctcgtactgtcgaatcattg

SEQ ID NO: 10548 - DNA, 587 bp, Arabidopsis thaliana columbia
cccatacctaaaagactcacacaatactcaaacacaagacttcatctctgtaagaaaatgacatatataaatagagagagagagagttctgaccttaacatctttttcttgagatatggggagatctcgtagaatccataaggcttaaagaaatctaatgtctctccgatgatcgggaaacccattgatcccggaggtaacttgccgttagacttagggtttgaccattggtaccaccaatgaccaaccctcgcaaccactaaaactataacacaaaatcctgtgttccaaaacaagttcatgttgttgtgccttggaactatgaactcgtgggtcttatatagatgatgaatcctagagtaacaaactagatgataaatgtgccagtttctaaaaaactgccgacaaacttgaccatcttaaaatgttgtattcttttctaaaactcggattaattagaatgatagggagtattcttaattgtaagattagttttcatggttatttattttaaaaatattaacagaatttcaatgaaaaatgtgaattggatataaagtcacttttggggaatggtttacaatata

SEQ ID NO: 10549 - DNA, 590 bp, Arabidopsis thaliana columbia
taaaatggaaaaaaagaacaacaacaaagaaaccattgattagataccacattgtccaccaggtccaccgaaggttagcatctctccacttcgtatttcaaactcgcgataccatacatcgtaacactttggactatccacatattcctcaaactcgttcgaatcaatatctactagtcttttatcctcaaaatacttaagttgtttcatgaaacatgcaaacttgtttcgatatcctacttgtctcggaaaagttcctgcccccataggagggctgatagctccagctaacccccctgtatatccgccgaagaaaacttgtgatactccttgcatcgaaaaaatttgatagggccaatagcctatcaaggtttttctcgtcatcaataaccagttttttgttctggaatcctgtatgattggtgtacatatataagttctatatataacctactaaatatttaaatatattttgttactatatgttttttactgaccgacgagaagatgagcagtggactgtcttttgcctaagacactaattttattgtaagcgataccggggtagattgtcttatggacttggacat

SEQ ID NO: 10550 - DNA, 394 bp, Arabidopsis thaliana columbia
tactgtgtattctttcattagctaataagttttctgattcagatatgccaaagcaatatatatatgagccatggacagcaccattgagcgttcaaactaaagcaaactgcatagtcgggaaggactacccaaagccaagttagtaataccgtctctatttacatatacatagtagaaagatacaaacattattgtgtctaaaattttgagaaatgatgtgatcaatatcatgaagctagttgttctagtgaatttgaggttgctgatagataaagtcttctttaagttgccatagttctaacttcgttgtttgcagtggtattgcacgattcagcaagcaaggagtgcaagaggaagatgggtgaagcatatgctttgaacaagaagatggttg

SEQ ID NO: 10551 - DNA, 569 bp, Arabidopsis thaliana
caattgttgttgagtggatcatgacttagagagggcttcaataaatctctatttctgtaaaattacaaagaccaaaaaagtcaagacaaagtggtgagcccccaccaaaaaaacgaaacgtttcgaattatgcttaagcttaagctggtcctactcatacggaccacgtagctctaaccatttggggaccacacccaacctggctgcctcggaagctatgcgtaaggtgggagccgtgtggcccctctcctcctccctccactctctttttggtgcgtgttgacccacttctgcctaaaatcgaggcccacttcttaacacgtgcacttcttcatgtgcacacgtgctttttttccgatcactaatacgccgccgtttcctttcttttcttcagtggttcgatgaccgtgctgttgtggtgctcatgaactggtgaagctcttgtttctcgtatatctccagggagaagtctctcagcgtgtgcgtcgttgttgttgcaattgacgatgaactaccggttgttacgcctgagcttgagctcggagccataaccgacgtcgctcttgata

SEQ ID NO: 10552 - DNA, 717 bp, Arabidopsis thaliana columbia
  unsure (1)..(717): unsure at all n locations
gtagagttttgcctcggctttcaacgcaagctgcatgatatgctcaaataccatcttcccgaaatcaaacggtgtcttgtgtgcaaccatgaacacaagtttagctctgtctggttgtgcatatgcatcgttagtagttggtgaccagttggtacaacagagtttgaacagctctttgccactattagagaaggtgttccccacaagtttcttcaaagccttctctttgccatcagtcagatatatggctacctcatcatccattattcttgcaatttccattcgctgagttctaacatccatgtattccagaccaaacagctcattgatcttagcaggagaaaactcatacacccagtcacgcacaaagtcaaaagacaacttgtgtgcaatccgatacacaagcaaagccctgtctatacttgcatatccctcactggtcgttggagaccaattgtctgcacaagaacttgaacagcttccttcttttcgttagtcttctgtattttcatcctctctacaacaacagactgtttctttttcagcagacaggaggacacaaacagatctgttgagtcaacagcttatggggattcagacgcatcagagatctgcaccacttgagggttctggttgttgagtggtggaacttggtccaagtctggtttctggcccagcttgaatgggtgctcagatctngcacatgacaacagtaga

SEQ ID NO: 10553 - DNA, 589 bp, Arabidopsis thaliana columbia
gctgcttaaaactgctcaagggcatcctatggtgagtaaaatttcgacccttgattacaattttgttatatatgaagtgaagctgagtttaagtgagcattgcattagggatctaaaggaacttccttttactgtaattttgaatcttgttttgttttggtagctcgtggagcttaagaatggagagacatacaatgggcatttggtgaattgtgatacttggatgaacatccatctgcgtgaagtcatatgtacatcaaaggttatcttatgttttcatatgttgatacaaatatactttgtttagacttcgtgatgaaattttgtgtagctgacactcatatattttgctgcttgattactctaggacggagatagattttggaggatgccggaatgttatatccggtggtaacacaatcaagtaccttcgagttccggatgaggtaatttttttttgtgtgtgtgtgtatatatctcttgcttgatctagttttttctttgtcccctctctctggaatgatgatgcttaccaaatcagatatgtgcccaagaggcatttttctgtggaccttgttcacagatggtg

SEQ ID NO: 10554 - DNA, 308 bp, Arabidopsis thaliana columbia
gaggttccatggttcgtcaccatccttaaatttcattgtaaatcacatttacttacaattcgcgtgaataactctgactacttgcccatggttctcggtccggcattgaacaagagtacacttcacctcagtagaacgtgaaacggcctttaggttggcctgttggagcgttccctggtcctcaggtgatacatcaagttcagctaaaacagtgtcttcttgtggtgttggtaacacaaaaagtgaccaattctgtcttgttgtcagggtccttactactgtggagttggagctgacaagatttgggg

SEQ ID NO: 10555 - DNA, 475 bp, Arabidopsis thaliana columbia
agtgtgaaagaaggaacgaaataagaatcgataaccgatcagggcgtcaatggtcaacctgctgagtgtccacttggtcagccttattcagaacaacgcggatcttgtcatcatgattgcgtaaagatgaaattacacgcttgaactcatcacttacatccagcttgtgtgggtcaaataggaggaggataagatcacacttagaggcaaaccatgatgtaacaccagtgaaatcatatgctcgctgtgttctttgttttcccctgataaaactccaggggtgtcgacaaatgttacatgctccagcagcttaaacaaagatgaatggatcaacaattatcagcaaatcaatacaggcaaaagtaatgaacgatctcctgtcagaagcatgaggttgttaaacatacagggtgaggcatctgagagcattcaaactttgacaaaaaggcagtccaaaagttgtaagacactgaat

SEQ ID NO: 10556 - DNA, 595 bp, Arabidopsis thaliana columbia
ttattcttcttagtttgtcttcacaaaatttagcttatgtttttcattatagctctaatatgtcgccttccactatcccatgttatcatttgagatcttctgaaatcatatgttgtgatctcaaaaattatatataagtatagacgaaaataagagaatatttccgtacatgtatatttatattattgttcattttggtgtttcattttgttggtgtagaaataatggagccaatggaatcttgtagcgttcctccaggatttaggttccatccgacggacgaagagcttgtcgggtactatctaaggaagaaaatcgcatcgcaaaagattgatctcgacgtcatcagagacatcgatctctacagaatagaaccatgggatctacaaggttacttaccgaacaccgtgagatattttactttggttaaggttttattgattatcaccttaaattttaaatgttacagaacaatgtcgaatcggttatgaggaacaaaatgaatggtatttttttagtcacaaggacaagaaataccaacggggacaagagctaatagagcgaccatggctggattttggaaagcacgggaaga

SEQ ID NO: 10557 - DNA, 1150 bp, Arabidopsis thaliana
gaacaagatcctttgtttcgaatttctggtattgaaaatttgtggagttgcctgtatttgactcagaaagaataagaaagtaaaggttggctaaagcaccagtgattctgaagttacttaatgtcgtaattttttgttggagcctctgatcgtgatcatggtacgacagctggttttgttactcggcatgctctctaagtgttttgaactgtatagacaaaagtggttaaagtattcccctatttggtcactccaactttgatgttcttgatggaggtttacttacattcctttcaggacctttttctaccttcggttgtgtctcttgctgttccactagccctcatgtctttgaccaggttaagttcttcttgcatcctcaaacgaaaaaggagactatgtttggcttcaactgtctcgtaaatgtttgcaatgtatatgctaattgatgtaagttttttttctttctcagtgaggtaaatggaaaggaacaggatcctaaagatgtattggcttctgaaaagatggctccaagagggaagctagtttttggagttggccttggagcattggtttttgttccagtctttaaagctctaactggattgcctccttacatgggtatcttgttgggtcttggagttctttggatcttgacagatgccattcattacggtgaatcagaaagacaaaagctcaaagtacctcaagccttatctcgaatagacacacaaggtgctctgtttttcctcgggattcttttatccgtaagcaggtattaaatcaactgttcatctccaaactccttatgttccattactcttaagaattcacaatcttttctgatgttgttttccttttttccagccttgaggcagctgggatactccgggagattgcaaactaccttgatgccaatatacccaacgttgagctcattgcaagtgctatcggtgttgtatcagcaatcatagacaatgttccactggttgcagcgactatggggatgtatgatctcacatcgttccctcaagattctgaattttggcagctcattgcattctgtgccggcactggtggttcgatgcttgtcattggttctgctgctggtgtagccttcatggggatggagaaagtcgatttcttttgg

SEQ ID NO: 10558 - DNA, 710 bp, Arabidopsis thaliana
attagctaagccatgtgcaatgtcattgagaaatgaactttgatataataactcgagaaagatccgaaatttaagcaaagaatcaacatcaatagttgcactcaattcacaaaaatcaaataaaccaaaacaatggccttcaagaaccattcttcaagaacaactctttcttcttcttcttccacttcattttcattcagattcacaacaatcattaccttagcattcatcttttgttcttcttactacattttcttctcacagtttgattactctccggtgacttcttcaccggaaaatcctcctttcgcaggagatcttcgagacctgacattcccttggaacaaactctcacttggaccaatctcggagaagctcaaactcgctgtcttctgcaagtcatggcctgttggttcgatccccggaggaatggagcgtcatgcttacacactctacacttctctcgcctcaagaggtcacgagattcacgtcttcacggtttcttccgacagaagtaaccgagaagagtactacaacaaaggagatctccatgtctactttgctccgcacgaacacggctcacttaaccactctcgagcttttgagatcttccataatactcaacagtctagatcatcattcctttgattatgttccactgagagtgtttctctgcctcattggcgagtcacaatagtgcctaatggtga

SEQ ID NO: 10559 - DNA, 504 bp, Arabidopsis thaliana columbia
tagagggttcctcatctctttataccaataatttgtagtctgtgtgaggctcatagtgaaactctaagtaacagttgctatatactcatgtcttgtactttgtttagtgatgtctactttatttttgtcatatactcacgtatgcagtgtattatgtataacctcaggagggatttgatgcaactcggtggctagatcggactctcattcgtctgtgttcaaaatttggtgaatatagaaaggatgatccaacctcgtttacgctgaaaccatatcttacattgttccctcaattcatgtttaacctgaggcggtcacagtttgttcaggtagactaccgtttttagatttcatcaatatctgcctttatgtaattggcctacatagttgaatcatgttttgttttgcggtgttggaatggtggcaggtctttaacaatagtcctgatgaaacgcatacttccgcatgttgctaaccgggaaacattcaaatgcaattgcatga

SEQ ID NO: 10560 - DNA, 591 bp, Arabidopsis thaliana columbia
gtccgatatctcttgacgtgatgagatctccggttagtctctgtaccggcgtgacttatgatcgagccagtatccagagatggctcgatggtggtaacaacacttgtcccgctactatgcaacttctcaaaactaaagattttgttcctaacctcactcttcaacgtcttatcaatatctggtctgattcaatcggccgtcgtcacaacggtgattctccggttctgaatccgccgtctggtagagaagttccgacgaaggaagaagtgaatgtgttgttggagagattgatgagtctggagaatttgatgaagatcgttcgattcgtgaaggattaggattcgaacagagagtttctctcgaagaagatggagttcgtaccaatgctcgttgatattatacgcacgaagaagacgaagatcgagttagttataatggcgattaggattttggattcgattaaagtagatcgtgaacggttatcgaatctgatgttggcgaatgacggcggagattgtttaacgcgattctcttagcgattcaacgcgggaatctggaatcgagatcgaatgggttcgggttttggattgg

SEQ ID NO: 10561 - DNA, 548 bp, Arabidopsis thaliana columbia
ttttaagctatgtagagtagtactagagagagaactaaggttctatcaatatgaagaaactataataagtataagaaaaatatacatatgaagaaactataacaagaataagagctaacctgggttccttcccaaagcttcaccactttgctatgcatcatgcggagttccacaaggcattctggacgaaattgagaaggaatatacttcatgggatatgaatcccaatgtaataatcttacagcaggcaagtagtttagccctcgaggtaggtggagtttcaaacttgggttttcatcaattttcttgttgtagaatcttaggaactttagattgcgcatgtcttcaaaaactctctcactcatgaagacatcgttttggatctcagatgtatctaatgatatgccaagtactgcttctgaaccctgtaaatattgttaccaatgagaaacaaaatgtgtgaaatgaacgtcaaacaagttcatcaagccaagctcatgaatcatgagtcaagtttgttacatacgtactgtaatatttgaaagtat

SEQ ID NO: 10562 - DNA, 937 bp, Arabidopsis thaliana
ctctagtaacgtgcgccagtgtgcttagacactttttgaacaacactgatttttacatatgaattcatcttgcaatttttcctaacatttctatagagtgacatgttagtattcccgtataatataactcagtgtaatcttgactctttaggagtatgaagagtgcagaaagagagtgtatttgtttgtataaaccaaaacatgtttcaggttcaaatcaaagtcgagcttttaatacagaaggagaagaaaatggtcacctgatcttatttacccatttgtacccaattaggtcaaaagaaagatactgttatatgtacaaaagaaaagagaagagagagcaagatgatgtagagacaagcacttggtgaagaaaatagcaatgtatctgcatcatcttggaatcatcccacaaagctaaaactgctgttggcattattcactaaatcgacttctcttcttccgcagaggttttgcagattgggcaccaattcttcatccgcagccattgttgtacacagctcacatggtacatatgttgacatggaatagtccctaattcatctccatcaacatactcttcctgcatataacatcaagaacattaacattagcttcggttttactaaaaccttttagtacactgtcctagttcagctcagatactagacaaagcagtggattatttctagtttggggtacaaattggggtgaagatagatttttaaaaagacctggcaaatactgcacttgatatcatcatccttatacagagagatggaaccggtttcatctgtctcctgataaatgctttgcttaaggcttcttgagagtgcttcttcgcttagagctgtgccactgtacccattttatccccagagctagtaaccctgccagtttgtattcatatggttttagcgttcatagacttcttgag

SEQ ID NO: 10563 - DNA, 514 bp, Arabidopsis thaliana columbia
gaccttttatctacatttggtaatggattgaaccgatatttgggatctgtgcttattgctggtgtttatttttaagcttccatcaattgaagtagttgtcaaatctcctcctacaagcccggataataagcgacccccaatccttgcgcttgtgatatgccctactagagaacttgccaatcaagctgctacagaagcaaacaccttgctaaagtatcatccatctattggtgttcaagttgtgattggaggtacgagacttggtttagagcaaaagcgtatgcaaacaaatccttgccaggtgaaaattgtttgtcattccttgtggatttattaataatgttcaagcgaatcctaaaagttccttcaatatatgcgtcttctatacgaattgttttatatcgaaattttcagattttagtggctaacctggaaggctcaaagaccatatcgagaacacgccaggctttgcaacgaggttatagggtgtgacagtccttgtgcttgatgaagc

SEQ ID NO: 10564 - DNA, 581 bp, Arabidopsis thaliana columbia
agataccatattcccttactcctagccagctaagcgctgtctcagaaataatatgggatctaaagcgtccggttccaatgaatcggcttttgcaggtaagtttgtcagctgagctggctggtatttcttttttttctcggttatagtttagttctttctttgttggcttttagccaatcttaccagacaatcagaatcagattttttttattgggtgaaactttcagaatcagatttaactgttgccaaatttgtttattaaccaaaaagttccttaatagatcggtttatcatgtagggtgatgttggatgtggcaaaacagtggttgctttcttagcgtgtatggaggtcataggatctggttaccaggttggttaataaaaatctctctacgacttttataaattgcaccatgtgaagttaatttctcaataaatcctctaataactcattcttttcatgtagttgaatttgttttttgagttactcttttctcacctgtaggcagctttcatggccccacagaattacttgccaccagcattatgacagtgtcggatctgtggagaatatggagggg

SEQ ID NO: 10565 - DNA, 635 bp, Arabidopsis thaliana columbia
cggtttaatcgggatcgccatagatttcgatctccgaaacgccggttcacattcaatcaaactcgcgactcggcccaccgatccaacgccggatatattaaaactgatatctccggcgaagatagagaacgacgaggaagacgaagaagacgaaggagagaaagatacggcggcgcgtgactacacgaacaaggaagatcgtgagcacaatctggacaaagagaagagagacgttcgtggagacaaaatggacaaacgcccccaccgctaaaataaccgcgttttgaaaagtgttttgaacattgtgaaaaaccatcttcgtccatgtttttgcgttttgaagattcagagaattttcttctttcttcagtttctcggagtttgaagaagtgaaagagagtcgaaagagagagtttttataaaggctcgtgtgttttaattacggttaaattattacggtgcgttgcacttaaacacacagaattagctcataaggttgatggttatttacgtttgtgcatcatcaatggaccattcagttcattcacgtgtgggcatgactttggaacgacttctctttcctctagttatttatgacatataaatcgaccaaattgaatttgattcaaaattaa

SEQ ID NO: 10566 - DNA, 792 bp, Arabidopsis thaliana columbia
tctgctcataacattctccaatttgaaaattacaagtagtggataaactttgattaaatgatcgaaaacactcatgtagaatgtaacaactatcatgacgatgatgagccatctcccaaagacaactaacaaattgtgttgttcaacaatcgcagtcttggtaaactccaccgctatggaaaccaattccttctgatgtttggtgtaccatgattagctccttccacaatctccagcttatgattcggtataacctttgcaaactccttagcatcttccccaggtaccacggtatcatccgaaccatgaactgtcaaaactttgcattgtttatcaatattgagacaagcttgatgcatatcagtgtttaacctatccattaaagactcttgagtaacacgaaaacaagatttgccctctgtagcatcaataaacccctgttccttaatcttttctatataaccatctccgagacgcacatcattcttaagatcaaaacgtccagagatattgacgacattgcggatataatcgggaaacttggaagcatagagaagaacgacatcaccacctttactatgaccaagaatgacaggaactagacggttcatgatgttagaggaggacaagtgttgaataacgtaatgcagatcatcctctgcttcactgttgaagttaccataatagaaagttccttcactatctccgttaccagagaaatcgaaacgaaaagagctgattttttctttctccaaagctgtagccacgtttttgagaatcttgttggtcttg

SEQ ID NO: 10567 - DNA, 456 bp, Arabidopsis thaliana columbia
ctgtttttagctttcttcatctcctcgacctctgcatcaaccaatgaagtctcagctttgatttcttggcttcacagctcgaactcgccgccaccgtcagtcttctccggctggaatccttctgattctgacccatgtcaatggccttacattacttgttcctcctcagacaacaaactcgttacagagatcaatgtcgtctctgttcagttagctttacctttccctcctaacatttcttcgtttacttcacttcagaaactcgttatctccaacactaatctcaccggagctatatcttctgagatcggagattgttcggagcttatagttatcgatttaagctcaaatagtcttgttggtgaaataccttcgagtctagggaagctcaagagtcttcacgaactttgtgtaaactccaatggcctcacaggaaagatcccaccggaactcggc

SEQ ID NO: 10568 - DNA, 512 bp, Arabidopsis thaliana columbia
tcaaactattttagtgctttttcagcagtaacaagaaggtaaaaaaacatgagcagttgcgaaaatatatgagaattgtctctattcaacagtatagctatacaagatctttacatatccatatggaacttatggtgtgactcttagaaaagaggtttattcaaatccacatttgtttttttttagaattcttctgtcccggtggataaccatgaatccggtaacatttctgaatggtatgaccaaaacgtccacaatgagtacaacagagatgctgaccagaaggtcaaacgctgcataagcagtgttctcaagaggtccagagtaatagccagcattataattttcattgtttccactgtaataaccagtatcagtaagctcagtacgaccagagctttgaaaaactatattatccattttagcaacaggctaatagctttcggtcgctcatcttgtgcaccaatattaaaaacatcctcaatggatggaataggttcaacatcaagata

SEQ ID NO: 10569 - DNA, 559 bp, Arabidopsis thaliana columbia
aagaaattgaacgaaaatttcagaaaaaaatattaataaattgaacgatagagttcacttactacatagtcaactagtgcctagctataatagtttcaaaagacaaaaaaaaacaaaatcggttaactacttccgtgacataattctcattttgatttttgaatccagtctaatttgaaaagtatattcaaaatctttaaatccattaatgataacttttataatacgttgacacacgcaattgtatatacaatattcttgaattttaaatgtaaattctagaatatattgcgatcaccacactaatcaaaatctttgggacaacttgaacccacatttgacttttcttggtcaaatattttggcatcatgcatgatcttctctataaaaaccaaaaggcctcaacgacattcataaactcagtcattatatttatttttgttgtatttcaacgttcaatctctgaaaatgaaatatgcattgattcttgttctcttttttgttgtcttcatatggcaatcaagctcatcatcagcaaactcggagactttcacacaat

SEQ ID NO: 10570 - DNA, 536 bp, Arabidopsis thaliana columbia
ccatatatgctcaataatttttccattaaatagatagtacacatcagtacatccaccgattagttaagctggaaatacaaagctagctcatcaatttcttagacataagctaaacaagatataagcactagctataaataagaacctgatacacatttacgtgttatctaaatccatcattattctcactgtccaattaacagtatatactaattatctttcttaagcatcgatattgtctttctagttatgaaatgactgatacggcttgatcaagggaacgagggagccacttaggtgaagcgacatgacatcgttggtcgaacccacgagcttgccacttacaaagacagcaggagaccgcgttggcgcagcaagacgaactaaggccttctcgatctcacggcagtcaggatcgctgtcgatctcgtggattgttggttgaacctaagatcacggacaaggctttgcacggcgtacagagacaacatgagctcttggtgaagatcacgctcctttctccgatgacattctca

SEQ ID NO: 10571 - DNA, 1028 bp, Arabidopsis thaliana
ggttcccataaatgatccaacggacacggtctcttctcatcaagtctcacccatggcttacctttaccactccaatgcaacaaactcactggtcctttatgcaaagacctacaacttcctcgtacattgtctcctcctaaaccatgttggttccacctatgatcaattgcttcaacgttccctgcgaagacaagaagaaacggaggcaaagaacccaaatcgtagattctcttcttcttctgtatctgcatccaagtttcaagcttttctctgtagtttccttctctccatctaactagatccatcaccatcacacccgtgttgaaataacaaggctttcgacccgagaagaaaccgggtaaagccgggtcggaccagaaacctgaagtgaagtactttgtgaagttagcgtgacaatactccggagctccgatgattcttgaccctgtcaaactcgtgttccaaagctttgttatgtcatcgacgacgatgatgtccgagtctaggtaaatgactctgtctacgcatggatcaagaatatctccgaggtagttccgagcatagttcaatggattctctaaagcttgtctgattgaagaagagataaggttgatcaccgtatcttcccggaaaatgtagactttgaagtttagcgacgggaaagtagatcggacgagttgactcagaacgcgtggactcgccgggtcaaactctgcagcgatgagatggaagaagacgttttctggacacgacgcgtggcggacgattgaatgtacggctgcgattgagccacgtaagtactccgagtcaagcgtcatagctacatgaactaacgaagcgtcgcaagacgacacgaagttttctctgttcaacgattgagacacgcactccttgccgtttctgtactccggagcttccacgaacgaccccagatcaaagccatttccgacggtggcggatacggcggtgagtcttcccggaatcatccgtataccgacggaaaacagtggaataaacaccagaagata

SEQ ID NO: 10572 - DNA, 665 bp, Arabidopsis thaliana columbia
tttttaattgtgagaaattcttatgagatacccacaatagagatggtcttataaatttatcaacatggtgaatctctcatgttatatatagaggtgatttaaaggctaaatagaataacacactacagcatataaactcaatgatatggcaactcaaaaagagaaaccttcctccaattctttcaaatggttttccaccaaaaccttaaagttaaaccttagtttccaaaaccgacgaagatcaccaaaatcaaactcttcgtcaaccttaaactctccaagaagcaacagtgatgacaacaacaacataaagagtcaccaggcctccaaagaagagctccgtcaagtcttcagccatttcgacagcgacggcgacggtaagatctcagcctttgagctcagacattacttcggctctgtcggtgagtatatatctcacgaggcagctcaagaggcgataaacgaagttgacactgacgcagacgggtctctagggtttgaggactttgttggattgatgacaagaagagatctttacggtgacggtgaagttgatggcgatggagagttgaagacagcgtttgagatgttcgaggtggaaaaaggatcaggctgcataacaccaaagggtttgcaaaagatgcttgtgaagttaggggaacaag

SEQ ID NO: 10573 - DNA, 535 bp, Arabidopsis thaliana columbia
tgtacttgaaatggatctcaggatcctcactatcgcacagagagaaacattgtaaacataagcatataaatacaagaatcgtgcttgtttacagaaacgagatcagattttatctatatcacctcatactcaaatatgaacctaggaaaaagtatagcccttcatatgacttgaactgctcaaagagcttaatacatgcatcaacaccaagttgctcacagtactccttgcaagcctgaaattgtatggacaccgttagtgtcaaaataaccaataagattcatcatatcatacaccacttgcctgaacaattatctgcagattgcctctcaggttgaccagcaacagatccttcatgcactccatagcccactcgctagaaagagtgccaaaaaactcaacaagagcctgcatatggagcagagtgttatgcaacaacttgaccacttagtaggtttacaaccaaaatatatttcagaggcactacctgtggctcgatagcatgtgtgtttcaattacacgttttatatcaggt

SEQ ID NO: 10574 - DNA, 449 bp, Arabidopsis thaliana columbia
cggattatcttttgaggggaggagggtgtactctcttggagcatattttacttggattactcctacaagaatagaagcgattgggggcaaagtaggcacgaagtggatgatggagtcgaccatgcgggttttacaaagatacacgtacgaagtggtccgagaggcattcagtacatcaagtttctgtatgttgacaagtatggacatctgatagatgggccaatccatggttctatctcaggaaaaggttccatacacttggtatgtattcatgtcatggaataatattagttagaaatatgtttttttttcaaaactgaaccgcagaaactaaaccgaatccaactgctgtgtggtttggttgcacgaataagggtattttggtccgagaacgattaaataagctaacagtgaaaaccatatctcactttgacaaactatgagagtaa

SEQ ID NO: 10575 - DNA, 586 bp, Arabidopsis thaliana columbia
tcagttatgtgttgtttccttcttttctctgtttcaaattcggtttgtgtaaaagtccttttcatgtgaatttagaatggttcaataatactttagaagcttaactagtttcgatccaaatatcttgcgaatcagttcatcattaacagtctaaagaataaagaaggaaattttacatatttgttcgatcctgtcacttgaagatttcctaataagtacatatccaaatctagattgattacattaagagtcacggttcttattcagttaataagtttagggaacatataagtttaggtataaagtagtttaacaagaaaggctctttgtgtttgatttacttgtctaagggttttgtgctaatgatgaattcaccagttgatttgtcttctcttcctgatgatttacttttgaactgcttagctcgcgtctcgagattgtactacccgatgctctccttagtttccaagagattcagctctctcgtggcatcgcatgagctttataagatccgaaagctattaggacaaactgagagttgtctttacgtgtgcctagaatccagtgctggatttgccgacattgg

SEQ ID NO: 10576 - DNA, 557 bp, Arabidopsis thaliana columbia
tccaacaataactcgaccagctttccaccttccaatacagcaatcctttgcaccgtacatatagaagaattgatcagtatcgtagtagcaatggattctgattggaaaaatccaccatctggtaagagagtctcagtcagctggtgattttgttcatcggtatttaagttattttcattgtcatcacagctttcaacatcttgttcgctatcagtctgcatattcctttcatgttgtaaggtaatagattcttgaatcaaccacggttcctcgataggctgatagttgtcagaaaataacgcacttaagtttgagttctctgacgaaaaggctgcaagctcatcacataagaaagattcagctcctacttgcttatcattcagatgtgttctcgggacttctatagcactatcggcggaagtgcattcatctgccaaaccactggaagcatttaagttttaaaacattttgcaaaggatgaaaagagactgaacaaggaggaccaccgagattttacctcgctttgagctggggtacacagtttggaaaaaggtaag

SEQ ID NO: 10577 - DNA, 611 bp, Arabidopsis thaliana columbia
gagttcattttcataaaaccttatatcagtcgaataattcaccatgagatcattcaaattgtgaatccatccattttctagaaaatctgcagatcatgtgactatcttacttgtgataagactcatcggtacctactatggtctgaggatctgaaggcttaataaacatgaagaccaagacaattatgtaactaggaacaaacaatctcacactgaataagtatagctagtaatgacacttgacatatgtggctttaacactcaggttccacgtaaaagcttcacaaaagtataatacaagttccagggagttagttagctgatctattaatgggaggtacattcttcagcagatagcgtcgtctcttagaccgagcacgactcctaagcatccataagatcactaagaaaccgataaaaaccatctgaagagcgaaaacaagcttcatacctggaaacaacaacaacaacaattgtttttgtatcagtttgctagacaatcaaacaaaacaaataagcttcccaagacaagttgcaaaaccttgtagattcttgaccatgtcctgaagatttctatagtataaactcctttggatgaggcgtgaccgagt

SEQ ID NO: 10578 - DNA, 509 bp, Arabidopsis thaliana columbia
gaaacaggtactttagctgcacgaacattaatcacttttttaactttattctttgttcctctttgctgcacctgaaactttcacattgtctctatcaaagaaatgctattaggtcctaccaaacacagttcgataaagagtagttcttatgtttcaacaacatctgcttcattgcatatacttgtttcatatttgacttctttttcttggtaacaagatgaacaattgcataactcatgtgtaaatgatttgcagacggttgaggaagcttacaccaacttgttaccgagcgtactgtgcgagtacctctacagattatctgaacactacacggactagcgtaccatgaaatttgtggattggcctctgcagctttgtttgaaattcactatagcttagatggcgaattggatttagacatggacttccggattgtatgttgtctttgagtctcaagggattgattaatgtgatgatatttatacaccatagctgaaatgaaatttgta

SEQ ID NO: 10579 - DNA, 589 bp, Arabidopsis thaliana columbia
  unsure (1)..(589): unsure at all n locations
ccgaagctttctgaaactggaacatacgcgtggactgtgaataaagacgacccttcttgcatttcttccttgagtattctagctcgtcttctgcttagaacagcgtacattggaccaagatactcaggtgcagtgttcagttcgcagaagtacattgcttcgacgatacgtggatttgtctggagcacggcggctctacatgcgtctttgacagctgtcatgacttgtcctgtgaaaatgccaaagttttcgggtttatctgtttcaacatcttctgcgggacgnagatgagattcaatggtgaaagctaatccccacattggttcatcacaaagaggtcctgatgctgtcgctagctgaaaacccgagacgatgctgctctcgagggtcagtgcttcactgtacaatgctgtttcagatacttctgcaggtgtctcagtagaatcttctgtgaagccaagtctctgagagacatgaggagagcctcttacaagcattgatccatcctcggcgattcttttacatctggagcgaatagtatgtttggacctttttctcttggaccaagcgcccaaattctcttgagcag

SEQ ID NO: 10580 - DNA, 462 bp, Arabidopsis thaliana columbia
catcatccttgagcaccttgaacatgacagacctgattcattgaagagagaaatagatgtgtatcagctgcagtggtacggctactgcatgttcaaagctctatcgagtctgcataagcaggtatgcagattttggactgaattatttttagcattcatatttcaatcacgcaactaaccagttctattttttctcttcacaatcttgaagggtgttgttcatagggatgttaagccaggaaacttcctcttctctaggaagaccaacaaaggctatctcattgattttaaccttgccatggttagcattttttgtcacccttctcttatcaaaattttcctagcgacgatttttggttagtgtttcttactatagaatttgaagtaaccgaaaaaacctgcttattcaattctaaggtcagtgtctaacagaggcactgaaaaacttgaggaacacaaacg

SEQ ID NO: 10581 - DNA, 656 bp, Arabidopsis thaliana columbia
  unsure (1)..(656): unsure at all n locations
nnnnnnnnnnnnnnnnnnnnnnctaaagcatcgttacaccagtgattcgttgccgccaacatccagcgaaacgttgctggataagctgattacccggctggcggctagctgaaaagtccctttgcgctggataaattttgtgatgaggcatcgtgcagtgagcgcgttttgcgtcacgaatttcgccagcagactggaatgaccatcaatcaatatctgcgacaggtcagagtgtgtcatgcgcaatatcttctccagcatagccgcctgttaatcagtgatatttcgaccgaatgtggctttgaagatagtaactatttttcggtggtgtttacccgggaaaccgggatgacgcccagccagtggcgtcatctcaattcgcagaaagattaattcgccatgccgatgccgacgatgttagcggcgacaataatcaccacacaaccgaggctcaacaccgttaccggacggcgtcctgcattgntccactctttcagcaccagcccgacgataccgccgcacaatacatagaaactcatatgcagcatccaactgatgtagtcatactgcgccggaatgcgggcgtggccccaggcatagaaaagaattgcagatacacatcaaccgcccagtgtcgagagtacacattgtgaatg

SEQ ID NO: 10582 - DNA, 635 bp, Arabidopsis thaliana columbia
tgcatagtcaaaataagcagttagatgattagaacaaatccaataaacccatacatttaccaagaaaatattaaaacataagatacatgacaaagtcatatatgcaacatgaaatataagataaagaaaacaaactcttagatcattttgcagacaacgttatacgacgaataatcaaacaaacgaaaaatgattctccaagaacatgttaaatttcatgttcatcagaagatcataattagtagtaagtaggttcagacgtgtagaagaaaggaccagcccagtaaagcttgaagctcttgtcttgaagaatacggtacgtgctcaatggctgtcctctaacacctttgttcacatcggtcggaaaatcgcaatcagcgagtggagatttgtaaaggtaagttttgcatttggtcactgtccttcctgcacgaagctgcgaagggaatatcgtggcgatgaagtaacctttagcatcagttttgctgctcaatatcgatattggaactaactcattcccatatgcatcgaccttcacacacgcaattcttgccgttgcacctgtcgcaaacaaacaacaatacgatattcgtttggttagccttactatggtctaattttctcctacattagac

SEQ ID NO: 10583 - DNA, 325 bp, Arabidopsis thaliana columbia
ccctagcaacggccgccagtgagctcgaaagataaccaaccaaagaaccccgttcaagagaacggagtattagcagctgcgatgccagacaaatcacagcaaatctcatccccagaaattatgtatattctgtaccaatccgtaaagtatcaagagctggcatcggatatccatatagctcaaatagcaatctataggttcaacacagcaacagtttcctcagcctagacgatgaaaggcgtatacaagccacccgtaacgactacaacgggttcaaacatgacggccaaggcagtggtgtctacaataaccaggatacgagcca

SEQ ID NO: 10584 - DNA, 1176 bp, Arabidopsis thaliana
  unsure (1)..(1176): unsure at all n locations
ccctctgtctctctgtccccaaaccactacctccgttgccgttatccatcccgtcgtcatcctcaccttcgttgacgtcttcgtcggtttccactgacgtcagcattggtttctttctccgtctctgctgctgttgcttcttcatctttccttgacctgcgtcccagtaaccacttcctcctccgccgttattccccgccgcatcagtctggtcttgttgctgcaccggttcctcagataaccctgtccaatcatctacatataaattgtcacaatcacaaaaaattattcaagtttaggcgtatatactctttgaattcctgtacatgacattaatcctcgtacttcttgcactaggtctatttaataaatatcagactatgactgcatactctatacacacagtagctctaaatcaatatcatacaagtaaatatatccaacatataaattaaatatgacatatattatcttgtattatgtaacaaaagcttaaccaatatatttaaccaaaaaaaaagcttaaacataaaattatgtagcaactactatacatatggtaagattcataaattagttatctatattagtcacgtgaacatatacatactttttcttgaaagtcgggcatagaaatgttgagaacaatatatacacatatttataaaacgtgcgatatttgatatttctatatgtattcataattattgtaccttcttgggagagagcatcaagagcgtgatgagtaccggaatcaccagcggcggagagtagcaaatgacggcgtctagaagattcctcttcctcctcttcttgcaatcgtctccgttcagctctaacggcagctttgataccgtaccgttcaccaacaagaagctcccaacgaaagatatgagagagactattcatcatctcttcaagctcctcgtccttcatacccacaagcgtgctcgccgtaaaacctaactccgctatcttcgccgccgtgtagaaacgtataccgtacggaccgaatagtccctctaaaccaccaagtcgcatcccaaaagcagccgtctgcggtgtcaccggctgttgctgcagcggaggtggaactggagtggntgcttgaaccaatgctctcgttgggttcaccggaataagcactcgtgaaccttcaggatcataatctatttt

SEQ ID NO: 10585 - DNA, 863 bp, Arabidopsis thaliana
ccgaagaatgaagtgaaggaactgacttttcatatgagaaagcaacgtttgttttggttgctttcagctttacatcatctgccgcatgagcagcaaatgcagccataccagatgccagtatcaaagatatcgaggtacttacgacacttttctttaatgcagacttcataaatgttcctcttcttattgtacttaattccaaagtaattttacgaagagaaataagtggatgtatgcggggctcgactcaatattttattgggccctgtgctacaaacaaaaatggcccttaaatctaaacaaaataatcttatgtgacatgtgtttactgtatttttattttaaacttattatcttttattttggtggctgttttttttgtagttttccccttaaaaaaaaaaaaactgcaaactagaagacttaaaattaagaaaaaaaaatgaggaccctgtgtactagcacctctggcactcccctagagccgggcctgcctagctatcaatttgaatttatacaacggttggttaatgttcaaataaaacataagcaattttactattccggatccccgaccagcctaccaatattgagcggaccggacgcatatacacatggatccaactagaacctaaatttttaaatatatctaaacaccctaaaataaaggtatagatgcgattaaatcaatataataatcgtattttgttttatatgctttatccactaaacatgatcaaataactttagtgttactaggttttttatatttataatattcatcagataactaaaagcgtaaacaagaaccttaaaaaatcagaaaaaaggaagacaaaactaacctttttctccttgcctat

SEQ ID NO: 10586 - DNA, 489 bp, Arabidopsis thaliana columbia
  unsure (1)..(489): unsure at all n locations
nnnnnnnnnnnnnnnnnnnnnnttaaagaagcattaatgggcgttantgggtgacaaatacgtcgtggcgcttaaccttgccccggcaacggcgctggctggcagctattcacgctgagccgatgaagctcggccttgacctgcgtggcggcgttcacttcctgatggaagtggatatggacaccgcgcttggcaaactccaggaacaaaatatcgatagcctacgcagtgacctgcgcgaaaagggcatcccgtataccactgttcgtaaagaaaacaactacggcctgagcatcactttccgcgatgctaaagctcgtgatgaagccattgcgtatctgagcaagcgccatccggacctggtgattagcagccagggcagcaaccagctgcgtgcggtaatgagcgatgctcgtctgagtgaagcgcgtgaatatgcggtgcagcagaacattaatatcctgcgtaaccgtgtaaacaacttggcgt

SEQ ID NO: 10587 - DNA, 253 bp, Arabidopsis thaliana columbia
tatccctgtagagtcacgcttcttagtttcaaggtcacgagcgatttgcaggcaaaaaagctactcaggaatatgttttcattctccgaacaatgatcaatatcaagatcatgtacatggcgtgaaactgcaatttcaatccatcgactgatatcttcagcgataatatcagggcgatctataatggttacgcaagcgttctatgacgggagctctatgtaatggcagattcgtgtggagaaagtccctaagt

SEQ ID NO: 10588 - DNA, 552 bp, Arabidopsis thaliana columbia
gtaacacagtacatatatttcggtttaacttaatttagttaacgaacctagttatgattggtaagtttatgattgatggaacagggatggttaccgtctccgttcttccctatatatattcacaacattcacaaggcaaagcacggaagcgactctaaaacatatgacaatgaaggaaggtaagtaactgcgtgaccacgaaacatattctataaatataggaatgagtgacaacgagatttagctgtatatatgttcttgtatgctttgggaaggtatacaccagcgaatcttgagttgatgtttagcaaatacgcgaggaccataccagacaagttgagtcttggagagctatgggacatgaccgaagaaaccgcgatgcctttgacttttttggatggtatatatacttgttacaatgctcgaatgtggtcatgtccctttgtaatgacctatttttggtttgtgaaagtggtatattaatggatatgtaggttagcgagcaaagtggaatggggtgtattgtatgcattagcgagtgatgaagaagga

SEQ ID NO: 10589 - DNA, 528 bp, Arabidopsis thaliana columbia
gtttcaatcatctttctttttttgcttttgttcttagttttatccactccaaaacagctctgtgaggatacattttcatagacggcagcgcgtaaattagagatgacaaaccttgtcaagtgtttctggtatgtttattttttacctaaaagagtcacttatacaatttgatgtgcaagttttgatgattgctgccacaagcacaactaaacttgcataattgataattccccaatattctgcgtttctcttaaccataaactattgctatatatataacaaagaaagataaagaaagaaaatcagatgaagtggacgttgcactttgctgaaactctgggaagagtcagcacattagctcgcaagaactcactgttgttgttgttttctgcgtgaacaccaactttcacggtttcaagacattccaacttgcccaagaaatgtctcatctgtttcagctcttgaaaataacctccatactctgaaatctgtagcccttcacttgacatgtcgcagacaacataatgc

SEQ ID NO: 10590 - DNA, 595 bp, Arabidopsis thaliana columbia
tccgagttttcgctagtgttcaattgatgtttgagctgtgatgttgtttctttattttctgtagatttctttgttcagctacttgttttctttgtaacttctctcacaaattcgaaaatggtataaatttttcacattgttacccaaaaaaataaaattggttttagtgcatattttcgaaattgagtatctttgtctgaatggtctgtttgctatcagctcagcagagtgccaaaggtcagattggagttcgggtcatcaaagaaactgcagggattatgggattactacattaacaccatctgcaaagaatggcttaaggttcagagcttctccattcggggatagttctgcgtctagtattgcactgatttccgaacggggccaaaacaagagtagtctcaagccaagagaagtaatgtgtcttctttttcctcatgttgacactctcttgatagagtctttgtgttaacttgtacttttgttttgcatcttctgcaggttcttttccatatgaagaatttgttgaatattttaactgggacaatccagaattggctccctgtgggctcatgaattgtggaaataggtttgt

SEQ ID NO: 10591 - DNA, 2633 bp, Arabidopsis thaliana
gatctgattgtttttttttcaaatcttactttttggttttatcagaagagcttcggggacttgatttgcagacaggatcgttcacattgaaacaaataaaacgtgctactaataactttgatccagaaaacaagattggtgaaggaggatttggaccggtttataaggtgatcattgctttggctttacaccttcacaagttctgttagattggattataagtattgatgtgtttttgttattagggtgttctcgctgatgggatgaccatagcggtgaagcagctttcatcgaaatctaagcaaggaaaccgagaatttgtgactgagatcggtatgatatctgcgttgcaacaccctaatcttgtgaaactttatggttgttgcatcgaagggaaagagcttttgcttgtgtatgaatacttagagaacaacagtctcgctcgcgcactctttggttagttttttctatccatctaagataggcaggccgaagttcttgatcttcaagctaaagtctcttggatttaacaggcacagagaaacaaagacttcacttggattggtccacgaggaacaaggtatgcatagggattgcgaaaggattggcttatctacacgaggaatcaaggctgaagattgtgcacagagacattaaagcgacaaatgtgcttcttgatctgtctctaaatgctaagatctctgattttggtctagcgaaactcgatgaagaagagaatacacatatcagcacaaggattgcaggaacaatgtgagtgttcattacttatcttttgtaatattcatcgtgaatggttaacacttaccgacttaatatttcattgatgcagaggttacatggctccagagtatgcaatgagaggttacttaacagacaaagcagatgtttatagcttcggtgtagtctgtatagagattgttagcggaaagagcaacacaaattacagaccaaaagaagagtttatttaccttcttgactgggcatatgtcttgcaagaacaagggagtcttctagaactcgtggatccagatctcggtacaagcttttcgaagaaagaagcaatgaggatgttgaacatagctttactctgtacaaacccatctccaacattgagaccaccgatgtcatctgttgtaagtatgctacaaggaaaaatcaaagtccaaccaccactggtgaaacgtgaagctgatccaagtggttcagccgcaatgaggtttaaggccttagagcatttgtcacaagacagcgagtcacaagtctcaacctatacaagatacaaagaacacaaaagctcctcctcgatggacggtccttgggtcgattcttccttctctgatccgagcaaagatgttagcctattacagcaagaagaaggaaattcatcatcttcgtcgaggagactgttagatgatcttactgatgtggagattgagtattgaattgtatatattcttttattcaatctacaaacacaacagtatttaccaacatatcaacttttaaaattgaatcgttattacgctgtgaaatttctctgttggattgatgagttgtatttactatatacaatatagtcttttgacgagactacacaaaccaaaaacttgcccttacatattttcagaactcgaaagcattgttgatctgaatggagaaagaaggtcgagcaacgtttggaagaggagtatcagctctaacaactattcctgttcgtccaatgttcccattccacttagaccgaccaaactgcggttttagagaaaaactgaaatgagtgcaaataacaaccgtagagagtatggaaacagaaagaaagattagcttacggaaacagatgcaaatgttgaaggatgagctgtgaatgcacagccacatatcatattgatattatcattcaacgactgaataacttcggttttaatcccgggattgcttccaccaaatgtagagcacacactgtttccatgtttgcaagttaaaaaaaataaataattttgactgtaagaaagaaggcgggtttttaatttacctaagttgaattgcaggtttcaacatgacaccggacctacgccaagccaaggcttgagaaacacccaatgccaatgatttgtcaggccagtttatcatcggtgtgattcgtgttccctgtttactctgtttcatcaaaggcgaaaaacaggtttttaagctcttgaataaaggaactgtgactatacttgatcattattaaccaaccttgcaagagaaactgaatctcatatctcctggatattgaccttgcgcttgaaggagaccgccgcataaaggaacaaagacacttgtcgtcaatccctcaccagaaacatatgttaattgtccatttgggaattgcaagtctacaaatgactgtttcaagtgccagaaaaagacaaagcgtcgagcattagtccactatgtaagaatatagaaaggcaaacaaacacacatagaaagattgttaagtaaagacacttacgcaatctaaaggattgaggcagagcattgacatcataagccaccttcgatgctttgaccacaaagctggacacagtgaatgcatacgtttctgagacgagattccatatgagtat

SEQ ID NO: 10592 - DNA, 637 bp, Arabidopsis thaliana
aggtcgactctctttctttatttttcatttttaatataaaaaaattacatatgtattatgaaattcaaaaagatcaattccaaccatcatacaataaagaaatcaagttgaaaatatcaaatctcttttctctagattgaatgtttcattattttgttgcacactcatgcatctttatttgtaaaccaaatcaaacaatttcttttgtcatacattgctcaaataaattccgttttaacatgtagcataaaatggttatttctcaaatacaattctctcagtcttaacatatagttgttcatcagacaagaaaatcttatgagaaaaacaagtatgcatagtacgatttcgaataagtaactcatgatacaaagtattgttttggtgaaaaataaagaaagaaatgatcaaagttgttcagtcatagactttgcattcctcatcagccgggtttgtcttgcagaaatcctccaaaggatctccacttccaacagcttccgctcccggccacttgctagccactaggtgagccaaatccaccactctttggctaaaacacgaacacgcaaacgcaaacacaaaacataaacaaacaatcataggttaaaacataaaatgatatcatgtaatgtgttat

SEQ ID NO: 10593 - DNA, 287 bp, Arabidopsis thaliana columbia
tatggtaatcagatgggacctaatgagctcacggacgagaccttaggagtaaactacagagcattgagtgatctctttcatttgtcaagtgtgagaaaagaaaccttttcatataacatttcagttcaaatgcttgaaatttacaacgagcaagttcgagatcttcttgccactaatggccaaaccagcagatatcctttttcaagacttgtgtctctttagttttagtaagtcccaatgcttcttgcatatgatcattgtaacctaccgatcgctgacttgtgtac

SEQ ID NO: 10594 - DNA, 577 bp, Arabidopsis thaliana columbia
taacggccgccagtgtgctctaaagtcaagcgtggtgatggatttcttcatgagcggcaacggggcgtccaggcgcgacgaacataatcagcaacaggctcactatgctacaggcaatcagaatcccgatcagcatattccatgcgccgataccaaccaccgctgccagccaaatccacagtgacgaaccgcaaacctgcgcaatacctaaggtcgagctggctacgccgcgcgtaatgaaaacggccctaacgcctgactcatcgccacaccaaaacctaccgagaaaccggcgcaaatcagcgtgataccaaacagagaaaccgcatgggaaggtgaaacggcaagagtgatcccgccgccaggaataacacctgcgaggtgatcatcaacgtacgtggcttaaaaattcccagcgcaaatggcgtggagaatgaaacggtcatgctgacgccagcggtcagcgccataatggtggcgtattcacgcgctcaaaccccatgatttcatcagcaataccggtgacgtgttgacgaaagtgaggatcccgaaacgctgagggtggtgatacaacacg

SEQ ID NO: 10595 - DNA, 582 bp, Arabidopsis thaliana
catcttttccggcactgaaccggcccacgatttacaccgtgacgtttacagtaagacgaaacagaagcccatttaggctccatttgacccgacccgagagccatacccgccgctctccctcgccggactctgttctccgccactctcttcccttgaatcagaaccagaatctcttgtctcgtccaacgaggaagtctcgccgtcttaacgccgtcatctccaccgtcatttgacggcgcgctactgttctctccaccgtcaacggcgctcactcctaatcctaactgttccagagccattcaaacggaatattccttcccgttttgataattccgttcaaacgggttccagacttaacggcgttatggtgaggacatcccgttagcgccggagagagagaggagctacaaatgaaagagcaaagaaaagatttattttgtgagataatgactttttaatgtatcttaatctgatttttaatttggtgactgtagataaaattgacccttgtgttatcattttattttaatttcgtcccttaagcctttcataaggtcatgtagatatgttgaatttaagtag

SEQ ID NO: 10596 - DNA, 515 bp, Arabidopsis thaliana columbia
gtgtataaaggcagacttgaagatgaccgatggatcgctgttaaacgattcaatagatccgcttggcctgatactcgtcaatttcttgtacgaactctcataaatttgattcctttactcatttccgttgatgggttctcgtacagttcaatttaaaacccctgttgcatttggtggtgtttactgtttggtttgattgatctttaggaagaagcaaaagctgtggggcagttgaggaatgagaggttggcgaatttgattggattctgttgtgaaggagacgagagattgctcgttgctgagtttatgccttttgaaactctctcgaagcatctctttcactgtaaggcttctcatcatctttaagagattggcaactgtctactattttggtttgattctctacgccttttagtttttagttctaacacattgtttaggagattatgttggtaattcctgcatttggttctatattgttgaacataagattaacactcttatatgcaaatgat

SEQ ID NO: 10597 - DNA, 569 bp, Arabidopsis thaliana columbia
cgagctcgaatagccccggagacacaaagagaattccacgagcttccaaactcatcagagaatgagctgtgatagtaccacgtgccatggaaacctgtttcatcaagataaataaataaaaataaaaatttgagactacatacaaatttttatgaaggaaaaaagtcaagggaaagcaatctcttattgaaataagagtaacaagccatagacataccaatactcctttcctaacatttccaagcggacctcggtacttttcataagctgcaagaacgcgatacacaaacagcaatcaattgaagaagaatgtaataaaacgtaaaacctaagatgcttctaactaccagacagatatgtttggatctatgatgaatcctcttgcaagaaaactaatgatatctgaagctgaatttgtgtttagcagatatatgcaagaaatattatttacatagatgattcctttagaagagaagtcaactgaattgatgcttatgaaagaagaaaacattgagaaaatagatggataaatagcggactggagttgcagtaaatgcaagtagaaaagt

SEQ ID NO: 10598 - DNA, 473 bp, Arabidopsis thaliana columbia
  unsure (1)..(473): unsure at all n locations
atatcccaatgagtatacgtctgattttgtggttaacattcctgtttgttggtattcagggtctatgtaacaaaacgttcctgccgcagatgtcatgtggaattgcgtgacgctatcagctatcgatgcggggactaaccgcgctaaaccaacgtcgctgatcttgctcacgtagtttttgtctaagagtatattggctggttttaggtcgcggtgaactaaaggttctggcttagcttgatgaaggaatgagagtgcggtacgatctccgccgctatttcaaaacgtttcctccacgaaagcggtggagagtttccagtacgaaaaagtctatcctctaagctcccattttccatgaactcgtaaaccaaacatccatattcaggacatgcaccaaggagaagaaccatgtgaggatngcttatggaacatagaaccctcacctatagaataagaaccaaaatatgtatgat

SEQ ID NO: 10599 - DNA, 550 bp, Arabidopsis thaliana columbia
cgggcatagcaaaggagaagcaagtgaggtgtcgctcattgaatcagatcttgattgacgttgtccatttgcattcgtaaagtgaaatccattttgctcaaacccgttcaataaattagctgtccgtgtggtctcagcttcgtaagcacccggtggtagcagcgcagtatatccttgacctggaaagaccaaatagaaatatttagggaagaaacaagaaaacttagagggaatcatatttcaagaatggatagatcacacagagacttgtctcaacacttcaacaggcagtataggagaaatatataagagaatcaaagccaaacctgtgctgttagagattttataacttgttttgcggcttctgatttggcagattcctctgctgccaggctcattgcttcttgtacttttttcacagatttctggacttcgaattcttggacctcgcatcggtgcctcagactctcggcctgtacacaatatcacagattcattttagaaaacaaaccacgaaaatgtgtggaacaaattcagatgaatggaaacg

SEQ ID NO: 10600 - DNA, 597 bp, Arabidopsis thaliana columbia
gaaaagtgaaactagaaacttaaactgttaacacaacacaaaacatatccatgtcagaacttttcatcaattcgtggtaacgaaatcataaacaacaaaaggtaaagaaaaacctagaattcggagcagttaactagacaaaaaaaaacctccacaaaccaatctatagtcatagtctaaaaacaaacacacaactttctccgattaaaaagggacgagctattctgttaggcgcgaagatttggaattagggtttggtgagtcggcttcattctcgatcatctcagaatcagccaagatttcatcgacgagtatagttaaagaagctggcgggttttgtggggtttgcgtcacgggatcagcgccaatgtcaaggagcgataaggaagtagaaacctcattaagattttgtgtcatggtcgaaggcgttgttcccatctttgcacgatcttctacagcttcttcatcaaactccgtactcatgatatccgtgaagtcaaagagtttcgccgctgtctcatcatcatacaacatagcggcgactttcgcaatgcatagagattcgccacatcttgcctcgttgtatgtagcattgtg

SEQ ID NO: 10601 - DNA, 775 bp, Arabidopsis thaliana
ggtgatgtatgctgaagatgatcttgatggtttagaagaaatctctgatgaggaggacgaatattgtcttgatgatttaaaagtgacctctgatgaggaggaggaagcagatgaacccgaagcagctcgacagagaaagccgaggacggttacaaggccttacagaaaaagggctcgcggtactatacttttccaaatattgcattgaagatgacatcttgttggtttcagaggtttacaagttaagtaactttgaaaatctattttgctgtaagataattcggaggaaatacctttgatggaaggcgaagggagatatctcatggtgctgggatttaacgagactgagagggatatatttttacgtacgtttaagaggtatatcttctttctaataatgttgtctaaattgtggtttggcgtctctcaaagcatcatagtatatcataagtgtctcaaaacaacttttgtaggtatggaactggaaactttgattggaaggagtttgttaatcccttatacatgaagacctatgacgagataaataagtatggaatattacttttgaaacacattgccgaaaaccctaacgataatcctaaaacttttaaagatggagttccaaagaagggataagaagtgacgagctactagtgagcatgacttttatgatgctagtaaaggagaagtgtcaatttttggacaacaatccgaccaaacctgttttctctgactactttatcagaaagtacaatttgagaagtgaagcattttc

SEQ ID NO: 10602 - DNA, 568 bp, Arabidopsis thaliana
cacaaaatctatgaagaaaagatcttgattaactgcatattcccaaactttctgaaagatctctccttcatgatcttctgagaccagaacgttatccgaaatcaacaaccctctcccttctaacagattgatgaaataatggttatcgaagtaagctggtgtcttaatatccagtggagacagttcgttgtctcggcttgaatctttgcattgtgaccctaggactcgacggaacgtgctgtgtcttctgaactcatcgacgtagaacgtttgttccatgtttggttgaacaatgcgttgcttgaagctcacgcatctcgctttacctattgtatgagcacccgaaagagcgatgagatcttgaatgttgagcccttgttgcttgaaattgatgatgaggctgtcgagagaggagtttggtgctggaatgaattggtttgctccggcgaaacttgcctttaatgagtctcttctccctagcaaaacttcccaccatgggccacctctctgatgatccaaacaatatttgtgttaaatgaactgacacataggttcgatttaacagaag

SEQ ID NO: 10603 - DNA, 532 bp, Arabidopsis thaliana columbia
ctttgaagaagatcaggctagagcaggaggatgaaggtgttcctagcacagcaatcagagaaatctccctcttgaaagaaatgcagcacagcaacattgtcaagtatgatgttaataccattgttgaaaactgattcagcatgatgactctggtaaacaattttgattgatgttttttgctacacagattgcaggatgtggtgcacagcgagaaacgtttgtatctggtttttgagtatcttgacttggatctcaaaaagcacatggattctactcctgatttctccaaggatctacatatgatcaaagtgagtgctaagaaactttaggcattgttttatatatgtgcttaaactcaatactcaatataagctgatcagagctgttcatccactattttcagacatatctttaccagattctccgtggaattgcgtattgccactctcatagggttcccatcgtgatctgaagccacagaatttgttgattgatcgctgcacaaactcactgaagcttgctgattttggac

SEQ ID NO: 10604 - DNA, 464 bp, Arabidopsis thaliana columbia
gtaagtgtcttggccttgaagtctctctctgcgaccttcttaatgttgtttgtggtggtgcttgttgttcttctgtttatgtgtcaagagtaggcggcacatgttcctcgactggttctgtatcatgactttcatccctcttgtgattctctgtatctccattgactttggcttcccttataccattgtttccaaattcaccaaatgataaactgaacaaacctgagtcactattagtttcatctttatcattactccacctccagctcttagtctcatcaaaaacaacatatctactcactactaccttcttctttgttggatccaatagacgatatgctttcgagccgggctctgttcggaggtgtactagcattcgtgagcaatcatccagcttctttaagttcacagtctctacttttgcgtatccaatgcaaccaaatattcgtaatcgctcaacgttc

SEQ ID NO: 10605 - DNA, 534 bp, Arabidopsis thaliana columbia
tatgtaaacctatggttagtgtgaatttcaacaaaataacagagttggaggagatgattaactgttgctttatttatagtacaagtacaactagaaccgtatacaaactctgtaatatataattacagcccaaataaatcgaatcaaagaatcatatcttataacctcactattctacttctcacgtatatcgtaaaaacatgtaagaaaaaaataacctcagttgaaacgaatatatatttactccaaaagattttgaaaaaatgatcagattaaaacccgaactaaaagaatatcgcacgaaccaccatgaatcgtcttcctcaatcaatcttccgggtgatcgggaaaaaatcggcgtcttcttcattttccgcgcaccaaataatgtccaaaatgtccttcaaggcttaagcatcggactgttgttcttgttgttgtctatccgagcacatacactctggaacaggatgttttgtacatctttaccagctttgtcattctcactccggctgcctagcgatctcgatgaag

SEQ ID NO: 10606 - DNA, 504 bp, Arabidopsis thaliana columbia
taataaatgttgtcctcaggggaatattccaagaacaagctgtcttgttgatcccagatccaattctcaaatcctcccacttcttcttcgtcctcctccaatgacgttgcttcaacgcaattctcatcttcttcctcgttacgtttctctatctctccccttacttcaatccaaccgttcgtttcccagtctggttcaccggaactctcgtctccggcgagtttcttgatccgatcacccggtaaagaatcgtcatcccataagaaatttgtagaatttgcaaatgggtcttcgtgatcctctttaatgaatctacttctcgaagtttcacataaatcccaaaaccgttgatccaacacagtactaggagatgaagaattcagacagttaccagtttggtcacctgcgttgtcttcttcgtcgagaaacggatgttgaagcaattcttcaacagtccatctctgtttcggatcttttctcaaacacttcctcaaaaagtcttga

SEQ ID NO: 10607 - DNA, 469 bp, Arabidopsis thaliana columbia
cgaatccggtcttgaattagtctcaagaaaccataacaaagaagaaagagacatcttttaggcgaacacactttattccctatggtttattttgtattaaacatgtcaataatctctagacacgtatatacaggtttaaacccgataatagaaatagtaaaacacatcaaattaacaatcaaaatacattttaaggaacataacaacaacgtaaggtactcttcttatgctgcatcaaagaaaacacaaaccccctataaataacactagaatttcaaaccagaaccttggagttgctcttggatgatgatgtctatcttgtactccatttcatgataattcttccagtcactgacttccccttttcggaaataatccttgtgatccacgttatttatatatctccgggttttaataacctccaaagtccaaaccactttggttacgtaaagagcaaagatacatctaa

SEQ ID NO: 10608 - DNA, 453 bp, Arabidopsis thaliana columbia
tcccccacgtctccctctgatagtttttgtgatagttccttagctctgacgacctcctcctgcaccatgtgtcacccatcacctcgtgtatctccgccgatcctttgatcttctgcactatgtatctcccgttgttcatcatgaagatgcagctcaatggtatgtctttgtactgttttgactttgtctccaggtttccgtcgagtagctccattatcctcatcagctggcttgcgaaggccgagtttccgctctccacaggttcctcctcctctcgctccatcttcgagtgactcttgaacacttgttccaatgtgtccttgtattcgcacgagtacttgaggtagttcatggtgtacctcgtcaatggatgcactgccctcctggcacaggggtcttgcttgaatctgatttgatggagtgctcagatcacagaaaatgtgaatcgcagtc

SEQ ID NO: 10609 - DNA, 631 bp, Arabidopsis thaliana columbia
gtttcgtaacaaataaaaaactagttttaaaattttatttttgtttcacaaaattatcgatttataaacataaattttatttgaaaatgttagtagatggagcttacgaacagaagtccagtgtcgtccaagattccagcagcaccagaagcatagttgattccattgcgaatttgtgttagcctcagtgtttggttcaagatatggtggtggtggtgattttgctcctaaggcttcacctaatgttttaatttattccaataaaactatatattagtctatcttatatttatgagtaatgattatgtagtatgtgtaaaacaaataaacacagagtggcatcatcttaaactaagaaaaacatcgagtgattgaagagagctaggaccaattcagaaacggtttactaaattatgaaaattaaatagaactccttaccaaactccatgaatgttgcatttatggaatttgcctttgacttctctcacattacaaaattttaattactcttaactaatttattggtccaatccaattcagttatgactttacatgctttaagaagagtcagcttatcaattagttgacttcaagtgtgtacaagggttttgttctgttagatactttagag

SEQ ID NO: 10610 - DNA, 410 bp, Arabidopsis thaliana columbia
tgtaagaatggaaataagagtcctggtaatacatttgaggactttggtggctgcgggggaccgtttcacgtcgtggttgaacaacaatatccaagcaacaagaatcaagcagagccaaatgaaaacttggacgctcttcttcaagccgtgcacaaagtagagcacttttctcctcaaaagaaagtttgtttctatgaggaacacaatcaaacgcatgaaccagtttgtcaccaacattccactgaatataaccatcacaagcacactccatttccagacttctagcccccagaaggtgtgatgtttcaggacattaatggttaaactcgcaaccaaagcgctcaaaatcaccacaaagaaagctgactctatcaaagccaatgtagttatcttactgcgcatctctctgt

SEQ ID NO: 10611 - DNA, 371 bp, Arabidopsis thaliana columbia
tgcttatataaattgtgttgttctgttttcacattcctacatttcagtgatctgcttctgttattaaccatccttttaagcatctttggttcttcattttttacaggacaaagctcacgcttactagatggagtgctgattggagaggtgctactgagttgtatgagcaagcaggtgggtaacacagtgtattttgctctatggcagaatccaaatgctattctctaaaagcttggagactataaaagcatggtttgattctttccttttactcctattcattgatgaatgacagcaaatgggtttagagcatcatacaaatatgagaaagctaaagtggctctcgagaaagcttcagaaggacacgagat

SEQ ID NO: 10612 - DNA, 450 bp, Arabidopsis thaliana columbia
caagaaaaacaatacaaaatttcagaaaatttatagtaatttcagtatggcgtttcaggattttgacaagatccaagaacgtgtaaacgccaataggaaacgtaaattcaggaagaggatcatcgttggaacggtctctttgcttgtggttgttgctgccattgttggaggagcttttgcttatgttgcttatgagataagaaatgaacaacaacaacaacaacaacaagcatagaaccacaacaaaagcggtacgactaacaacgtcgtcaaggatagcgacaagaagagcccgagcccaccaaccccgagccataaagcgcccgtttccgcagcgcagtccgtgaaacccggtcagggtgataagattatccgcactctctgcagttcaacgctctacatgcaaatctgcgagccaacgctcaagatcatatcagacaaggggtttgc

SEQ ID NO: 10613 - DNA, 479 bp, Arabidopsis thaliana columbia
tgcttgcaacacaaggaagacactaaacgtaagtaatgggtcaagttaatgacttactttgagcatatcacagacggagttgtgttctttgacaaagagagcttgcaacagagagaaacctgaccagctgtttcttatgtcaccggagatcggaacacctctttcgtccctctccaacaagccatccccagagatttttagctttccgtccttgaaaaccctaactcttctcattccagtctcgtcatttccatatattacactcccatccctatccccaaaataatgttatataaaatcaaactcggatagtaattaaacaacaaataagcagtaactaaatgattgagatactaaccaccaaggggttctagtgttgacagcgccagatttgtggtgatcatcggtgggaactttcttcgttctgaggaacttgaatgacttcaatggacatccacttgctacttcttctggaagct

SEQ ID NO: 10614 - DNA, 200 bp, Arabidopsis thaliana columbia
ccacagaaaatcccagacaacattggtctaatgcagtcactagagaaagtggacctcagcggaaatgatttcaggaatctacccgcatcaacaaagaacctttcgaagttgaaatacgcgaggctctctaattgcatcaaactcgaggcatttgtagagctgactgagttgcagacgctcaagctttctggttgtacgaa

SEQ ID NO: 10615 - DNA, 1222 bp, Arabidopsis thaliana
gtgaatctgttgttgactttgaatacatctgttttgagctcagtgaatttaccagctggtcccactgtgaagattagtggagttggtactttgagactcaatgatgataatcttctcaagaatgttttaatcatacctgaattttgtcttaatctgatgagtataagttcattgacagatgatattggttcaagagtgatatttaatcaacatgcttgtgaaattcaggatcttatcaagggccggatgcttggtcacggtaggagagtggctaatctttatgtcatggatgttgaagatacaaatgtttcagtgaatgcagttgtggatatcagtacgtggcataacagactcggtcatgcttctctacaaagactggatgttatttcagaatcattgggaactactaaacacaagaataaaggatccgattattgtcatgtttgtcatctagctaagcacagaaagttgtctttcccttctcagaataatgtttgtaatgagatttttgagatgttacacattgatatttgggggcctttctcagttgaaacagtggatggttatcaatatttcttgacaatcgttgatgatcattctcgtgcaacatggatttatttgctcaaaactaagtctgaagttcttacaatatttcatgatttcattcagcaagtggagaatcagtataaggttaaagtgaaagctgtaagatctgacaatgctccagaactgcgttttacaagtttgtatcaacagaaagggattatggcttttcattcttgtccagagactccataacagaactcggttgtagaacgtaaacatcagcacattcttaatgtggcaaaggctctcatgtttcaatctcaggtaccactttctctattgggtgaatgtgtcttaacaactgttttccttatcaacaggacaccttcaaagcttctttcaaataagacttcttatgagattctcaatggtactactccttagtatggacagctcagaacatttggttgcttatgttacagttctacatcaccgaagcaaagacataagtttcagcctcgatcaaaagcttgtatcttcttgggatacccgtctggttataaaacctataaatttatggatttggagtgtaatgccatctttatttccagaaatgtggtgtttcatgaggaggtgtttcctttggctggtaccaagaagtcagaagattctctga

SEQ ID NO: 10616 - DNA, 583 bp, Arabidopsis thaliana columbia
cttccatgttcgtagtaatcataaaccacgagcttctcatccttagagtagaaatatcctcttaaagtggcaacattctcatgcttgatgctgccaatattttcgatttgctgctcgaattcccgttgaggtacactcacttccttgatccttttcacaacgatggtcgcagagtcctcgagatcaaccttgtaggttgtcccaaacgggcccttccctaaaacttctgcagaagctctcaacaagtcttctaggtcaaagacaagattcttcccttcgaagaacacaatcttgttatctccttcacccacgtttggatctgaatccttcctcctcttgctaggtttgtcctttgaagatcttctttgctcttctctattatggatgatgattaccaataagatagcaagcagagctagtatcgcaaaacacacgcttaatgctatgccaagaactacatggttgtgatgtttcgtgtgtttccttaatgatgaatgaacaggcgcacgactttgtttccgacaaatgctgagagtggaaactctgcaatgactgaggtacagttcgtgttagattgttgtga

SEQ ID NO: 10617 - DNA, 625 bp, Arabidopsis thaliana columbia
ccttgcattacacacctccccacatctttttccttatttcaatcttcctcccttcaacaaaagatctaacataaattcatctatattttatacattctcacaatttcatcccctcatcttttttattgctcccccatgccccaaaatgtcccttaaaacggaatcgatccctcacaatattggtttgtccatcagctcgttttcggctgcgatccttcccgagccacggccggttatcctaccgaatgatccaatagttgatagtcccatgaagctgctgctttcttcgccaaggtttattgatcttctatgttttctgaatttggaggagctaacatcacctgcctcacgatcaacaacaacaacatcatctaggcttttgctcttttcgttgttgttgttgttgttctgggcgacgactaaacatgcaatggtgcttctacagaacggacagaccggtggagtcacggttgaggtcgttgggtttggtttgttgtgacagcacagtgcaagtgtgcattgtgccacatttggtgccacagtctttaacttcaattgtacatacttgctcaaagcaaatgcagcacagttccgtatcactcacgtatagacacatttacatgtt

SEQ ID NO: 10618 - DNA, 540 bp, Arabidopsis thaliana columbia
gttacggagacaccgactcgccggagagtgtggacgcgtacacaagtctccacgtggttggagatctgattggattgatcgacgccgtggttggagatcgggaaaaggtgttcgtagtgggacatgattggggcgctattatcgcttggcatctctgtctttttcgaccggatagggttaaagctttggttaacatgagtgtggtgtttgatccttggaatcgtaaacggaaaccaacctcgacgtttaaagctctctatggagatgactactacatctgcagattccaggtttatgaatcttgaatttgagtctaatgcatctgtggtgttcaacatttgacatgtgtttggaatttggcgtcaatcacgcttgtgttagtaaaacacagtagtaactagattgtcgataaacatttgagtattgctgattctggatgttcgaacgaagagattagtcattagaaagagatcaatgcactcaaatcagttttgaatgtatctttcggttgtggctgtctgatctgattatatttggtag

SEQ ID NO: 10619 - DNA, 566 bp, Arabidopsis thaliana columbia
tgcaagacaaacaaataatctccaataaaaagaaaactagtatcataaatcttctttaaaggattaataatatattaacgccgtaacactaaataacatttattcatcaaatacaacacaccttcatgactcacatctagctatgattttcatataaactgtaatgttatattcaacacttgataatatatatgcaaattgcatttaattcttatatatattataaggatattaaatagctgatcaccatcaagaataccatgagcccatcgattgattatctagtagaagtcatcgagagagatattctcaacggagcccaaaccatcgaatgttccgaacttggagtaataattattagtagtcgtcgtatgtccacccaaaaaatcgagaggagtatcgttggaggtaagagccgtcgtgtcgtagcaaaagactctgtgtttgtggtgcatcatctatgactggataatagtaagacatttgttgctgttgctgttgctgttgttgttgctgttgttgttgtgatgattaaatcttggaggagaagatcgttaccacagtgt

SEQ ID NO: 10620 - DNA, 481 bp, Arabidopsis thaliana columbia
aaacgtatctagatagtcctccccatacgtttgagtaaatcctcttgccacaagtcttgcattgtatctttcaatctccccatcactcttatatttagtggtgaagacccacttcgaggtgacagctttcttacctctaggaagctcatcttcatcccatgtatggttgttctccattgcttgtttctcggctgcaatagcgtccctccatacttgatgagttatagcttcttcataagtttgagggatccaatgttggtctacttttccaagaaagacttgatgttcttcgggtagatgagctagggtgcacacaacttgaattgggtgttcccggcattgtcaaagtagacttggttgttgtagtagactctcttgtctttaagacgttcacttcttcttggtattcttggttcttctcgagagttagagtcttcttcttggttattggtattccattgtcatcgttaagtaagcttgt

SEQ ID NO: 10621 - DNA, 377 bp, Arabidopsis thaliana columbia
aattgttgcagtagtgagaaaagagagccagacctcaagggctttgcaaactttgtccacttcgggtgcatagtgaatcttctctgaggtcattataagtgccacaacacctatacaggactgaccagagggatgataaacagagcaggccagtgtacaactcacgttgtagtacaaggcgtgatcaaggcgcgagcattctttgctggcataatagtggacatctggaggccattcaggcaatttctgacggtaaactcgatgcgagagtccgagctctacgtcactttcactatccgacagacaacatatatgtgagagagatcatcctgcattgattaagcccattaccattaggacttaagaactccaggttg

SEQ ID NO: 10622 - DNA, 922 bp, Arabidopsis thaliana
atgagaacaactggatctcctgattgctgacgatgcgtcaagtgttttccttggaagaattgggattcaattgttgatttccattgcttcgatacagccttgaatcgaggcagagaattcaccgcaagtctctccaggattcgctctactacatcatgttgcagcagcgattcaatcctcatgcaacgttattcttgtctagtcgtctcagtacgtacgtatatatagtagcaattgatgaatagataatagagtcttatttataaaaacaagtactcgcagacaaatccggttttgtactcaacccttcctcgaggaaaatctatcttcgtattccctctttctttctccacacgacacacgacaaagatcttccttctcctaactaaacatagaaacatcttcaaaccctatctctgaataagtcttatttaagtgaatacacatctttttggtatgttttgtttacttttttgagattttgagttattttctaaacatttctacatttgaaatattactttattattaaaacatagaaaacgtctaaccggtcggaccaggatgaaccatgattcatgacccgaactcacacccggttttgataaaagttttaaaagagactactagacgacaaaaacaaaaacaaagactagtaaataaattaaaaaatgacccgaacacacagccggttcaaagtccggttattaaatcattgattaaaaaattaaaaaacaaagactactagatgacaaaaacaaagaccagtaaaaaacgttttaaatatttttgctgtaaagtgtaaactacataaattgtctttacgcaacacacctccactcgcgcagccaaccaaaaaaaaaggtgccctgattgtttactccccaaagtttctctctttctctcttctccttctgctgtt

SEQ ID NO: 10623 - DNA, 520 bp, Arabidopsis thaliana
ttgtccacacgccctgttccacatttcaatcatttgtcacatatcagaattccgaaaccagaataaactgaatcgaaaaccaaatgtgcaatctatatcttggatggtctaatacctgtggtgggccagaacttggaggagcggaccaaggcgcagggaaagcagcatactctcgagaatacggctttttccatgtgtctgccattagcaacgatgggggatgtggagctccctgagaaaacaaacaaccaccaacgtatgaatctcaacttctccgaacaatattattattggatataattatgataagtctttgttttcctaattaccttgagaacgttgttctggacatctgcatttcctttttcaatctgtgcaatttcttccctgattgaaatgagagcatcgcagaacctgtctagctccgcctgcaaacgaatattatttagtttcatcaagttgatacactgagagaagaaagagtcaatgagagatctgcatatatccatatttaccttgc

SEQ ID NO: 10624 - DNA, 556 bp, Arabidopsis thaliana columbia
tagtaactagaggatccccctaagtttgtctctggcagttgggaacctaaaaaggataaaagtgagatacttgttattgatgacggccgcactgctgagcgtttgctcaactggattaacaagcagattggcaggtttgtgccacaaatccaccggacgtttatcttcagcattgactcgaaatatatctagcagattcaaactatgtttcatctttgaagtgtatctataattttccttaccgagtttgccaatatcacatcttacttagtctgttttgtttctcaataatttgcagttcttatggcttggatgatcagaaattcaaaaacgaacatgccctgtcgaatctaaccgactacaaccaggtttctagacttatctctgcctaactttgctgatattattagcgtttcgtctaagattaaacagctttaagataaccgggtgttgatttgccacagatttctcaggctgtgtatgatgtcgaggaagcaaccgcagaagcttttgatatcattttagcacataaggttgagagatgtgtatgtatatg

SEQ ID NO: 10625 - DNA, 423 bp, Arabidopsis thaliana columbia
cgttaaactaaagtaattataagaatcaatggatcctcgtaagcacctttaatggtgacaatgttcttgtagccagccagatggtgcatgatttgaatttccctgcgtacgtcttccacatcttcctttgatatcaactttcgttttgttatagacttgcatgcgtattcacgccctgttgagatctctttgcacatgtaagtcgtcccaaactgtccttgacctagtttgtgtcccaacgagtagagatctcggatgcttggggtcttttgaccaagaacatagcaggcttggttcccaccgctgtgcttcattgtggcttcttcctgggggcgtcttttgccagtttgtgtgctgaaacaaatcgttgaaagacaaaatgtattagaagtggtttggcttgtaaagaattgcccatcaaac

SEQ ID NO: 10626 - DNA, 686 bp, Arabidopsis thaliana
cgtaagtatctgaattctaagaaaaggtcatgcatgaacgacgagtgtttgttttatggaagctatagacagctcaagaagcatgttaaggagaaccatccgagagccaagccaagagccatagaccctgtgctggaggcgaaatggaagaagcttgaggttgagagggagaggagtgatgtaatcagcacagtcatgtcgtcaacagcctggggctatggtatttggagactatgtgattgagccatacaatggttatgatcatcaagatgacagtgacgattacagtgattcgtcggatgacgaaatggaaggtggggtattcgagcttggagcattcgacctgggcgtcttcaaccggcgttcggctgccatctcaagccggggaattcgcggtatgatcataaggaaccggtgggctcgaagcagaggtgcgagcagaaggcgacaaacataagattgatgattggaagcttggaaggcagatgattctacaccgtctgaccaagttaacctccgaactctatatatcggcagaggggaaggcgagtgggaacaaaacagagggttgttgattaaagtttttagttagcggtttaggttttcaggtttggaagatttgagctgtttgttcctctctacctttgatttaaagtgttaaaacgtttcatttgctacttttattt

SEQ ID NO: 10627 - DNA, 564 bp, Arabidopsis thaliana columbia
ctgttaaattctaaatataaaaaatccatcaatccaatttttttttccagatctttcttatttttggattttttattcaactatcttgagagagatttgaatttcgagcgatttcataactaagcgtggtatctaaaagggaagagcctcggatagaatgtcatgcttgcttcggagctgatcaggaattaccagaaaacaacatgccccaaaaattataagctaaagttgcacattcacaaagcttttgatacagtttgttgagatttggtgcttaaagcactagaggctcagaattatcctcctttttaaaaaaaaaataatattaaataatattcaaaaaagataaaataacgtttgtacaacttgtgcgacatttatcgaagaagaaagctgaggaaaaaaaaaatgagaattagatgttcttagagatggtttgaagtggtcagtttctggttttgagccagtcttgcatgcccttgtcgtagcatcgatcaccggtacgattaatgatggtgaccggattcacacacagttatatcactgagattgggtagttggaga

SEQ ID NO: 10628 - DNA, 523 bp, Arabidopsis thaliana columbia
gccagtgtgctgtaaaggtcgcaatggttgttacagaagggcaagctgactggtgggaaaaacgcgcccattcgttaggtgttgcgggaattgctaaaggttactttaactccggttttttattgattaatactgcccaatggcggctcagcaggtttctgcacgagctattgcaatgctaaatgagccagaaataatcaaaaaaataacacatcctgatcaggatgtgttaaatatgttgctggcggataaacttattttcgctgatattaaatataacacccagttcagcttaaattatcaactcaaagaaagctttataaacccagtaaccaacgatactatttttatccattatatcgggccaaccaagccctggcatgattgggcctgggattatctgtatcacaagcctttatggaggcaaaaaatgcttcgcgatggaagaatacggcgttgctgaaaccgaacaatagcaatcaattaagatatagcgcaaaccatatgcttaaaaagcatagat

SEQ ID NO: 10629 - DNA, 567 bp, Arabidopsis thaliana
tgaggttgattagtgttggcaaggagattcatgggtatgctatgcggtcgggatttgattctcttgtcaatatctccactgctttggttgatatgtatgcgaaatgtggatctctggaaactgctcggcagctctttgatgggatgttagaaaggaatgttgtttcatggaattcaatgattgatgcctatgtgcagaatgagaatcctaaagaggcaatgttaatttttcaaaagatgttggacgaaggagtcaaacccactgatgtatctgtcatgggtgctttgcatgcttgtgctgacctgggtgaccttgagagaggaagattcattcataagttatctgttgaattgggtcttgatagaaatgtttctgtagtgaactctttgatctccatgtattgcaagtgcaaggaagttgatactgctgcttctatgtttgggaaattgcagagcagaacccttgtctcttggaatgcaatgatattaggatttgcacagaatggacgtccatcgatgctttgaattacttcagccagatgcggtctcggacagtgaaccagacaca

SEQ ID NO: 10630 - DNA, 557 bp, Arabidopsis thaliana columbia
taggttaaccgggaccaatgattgaacgaaattaaattaaccggaaaagcgtttgttcctcagtgaaaagaatacaaggatttggatatctggttttaagttacaggagacaatcttcttgctacgtttgtgtttgttgttgaagagaatctgctctaatgattgaagtaagtgacggatggatccgtgcagttctcatagaacgagcttcgcttcttcctttcgcatactcctcgccaagaggccacctcggtcgaagatcatactaaattcataaccaacaaaacatcaatctccaagttatcagtttttcaaacaatagaatctttacaagtaccgagttttgttaagaaaaagtaccacataatcctcaggttcagttgcaggtggaggtggatcatatcttcctacacgaaaatgctcgagaccagtccaagccaccattactcctggtgagactaatgaatacttgttagtttctattctctgtgtctctaatttgatcagtaggagaattcaaactctatgtacgattgtctgtgcagaggctaggagga

SEQ ID NO: 10631 - DNA, 612 bp, Arabidopsis thaliana columbia
tgtccagccaccataaattgcaggttatgtaagaaacatgggttaaattgaattaactatacctgggcatcccatacagggtaattatgacccttgtagcacacgagattagcatttagttttgtgctccacagtcgtactgcacttatgaatacagggttggtaactaaaaaagtctgaactaatgagccagtgtatggatttgtaaagtgatggacagatacatacttgttgtatctgctgaagaagatagaacaaaatctccagggggactgaaagtggctgagtaaactggccctgaatgacccagtaataatgtataacttcttctgccatttggtcctatgctttgatcacttgaatcattttcagcctgcaaagcacctggaaccagacagcttagtgtctataactctcatggaaacaaaaacaatcattatgagaaatcaacaaaaatgacaagcgaaacgtatgagataaatatcattcttaaacgtggatgtcaatacaatttttcagagaattaacataccactgccagcttgtcctatcttagccatgtcccagacctgaacaccataattgtcacttggcatcatttaagagaggaag

SEQ ID NO: 10632 - DNA, 505 bp, Arabidopsis thaliana columbia
ccatatctttctttccataattgtcttagtgtaggttttgaaacatttctttaaaaacaacattcattgtttttttctgtggttttcctttcttgtctgttataagaatcttcaaacctgatatttgtggaagattaataatcgtatacatattatagtaattaaaatggtggcttaagaaaactttgtaccagtttttgacgtcactctagagattgccacgtatagttgcccatgtgaaaacacaggcctaggcaaataaagtccaacagactctagtgtctgcccttgactcttatttatggtcatggcaaaagctacagatagagcaaattgcttacgcctcattttgaaaggtaatcttgtatctgatggtgtgattagcatcctaggaatcagaacaatcttaccaactctattacctgtaataaatctagcttgtattacagtatctgccatttgagtgacctgtaatcttgtccattgcataaactttattaggatc

SEQ ID NO: 10633 - DNA, 473 bp, Arabidopsis thaliana columbia
cctgaccaagtatctcccgtgcattctgccagtactgcactccgatcagacaaagcagcagataaggacctagatgcaccacctggttttcattcgggatcccatgtgcagacgctaaatgtacttgaaaattcagcggaaagaatagcatttgctgtaaagaagaggcctttgatccaaggtgtgagctcccagcatccagggcctaataaacagccacttgacttgccagtctccactagctccactttgttgggtaaatacatcaaacatcactatgtagttttcatattcatctaggatgtgtagttatgacttgcatgaggatgatggagaacatcatgctgatgggaatcttaatgccatgttattttggtaggtggtggccagtgcaaaatcagaatgccgtgtcatctgtttgtgatgggtcaaaaggtcttctgagggtcgaacttatcagccttgcaaggtgt

SEQ ID NO: 10634 - DNA, 631 bp, Arabidopsis thaliana
  unsure (1)..(631): unsure at all n locations
cagtcttaagcttctttacgggacttggggcattgcgttgcatatgcaggtcacaatgtgtcgcttgagatccaagcaacgataccctctacaccaagtaacccttctaaaggtcctatgtggagaggagtggtggtggcttacgtggttgtggccttgtgttatttccccgttgctttggttggctatggagttttcggaaacgcggttttggataacgtgttgatgtcgctcgaaacgcccgtttgggccattgcaactgctaacttgttcgtcgttatgcatgtcattggtagttaccaggtcagtccaataatttttaaatcgatccatggaagtttcattgatcaatcaattgagatctatctgatttctgaatggacacattacggtccaaaattcacttcttaaaagttagtctaggttttgaactacatgagacacattgcgaaattttgatatcctaaatataaaatttccacttgcactcttgcagatattcgcgatgccggttttcgacatggtggagacatttctggttaagaaactgaatttcaaaccctctacagttcttcgtttcattgtacgaaatgtttatgttggtaagtacngttggcatgtactatataga

SEQ ID NO: 10635 - DNA, 571 bp, Arabidopsis thaliana columbia
attacagacgtatgatcattacgcttcaaccgggttattctattccacctcttagaaagaaaagaacttaaataaaaatacttaaaaacatggcgatacatttatacaaaaattctaccccgagcacacgcaatggagccgtagacagtcaagtgaaatccaatccacgaaataatttgatctgtgggcagcatcattgtggtaaaggtcgtaatgccagaggaataattaccgcaaggcgatagagggggaggtcataagcgtctataccgtaaaatagattttcgacgaaatgcccaagtcatatatggtagcatcgtaaccattggattcgtccctcctcggattgctatctcttgtgtcgtctcccttggagttagaagtggcacaagtgggtttatcctaaacgtgtctttaattaccattttcagatattggagtcgttctatatcttcttctatgatatcatctttgtgttttatcactctctcacctcggcctgcgctttcttcaaaactcttgggtttgaaatcaaatatgtcatcacccatgtcatgaattgtgcagaagt

SEQ ID NO: 10636 - DNA, 803 bp, Arabidopsis thaliana
taacttaaaatatatttttctttgctaatcgtttgggaatttctagctggaaagttaagcttgaaaatctgtgttttaagcatctccatcctgatcagcaccatgagatgtccgatatgcttgaggattcattcgatgaagctatgattacttctgcgattgagaaattggagcaagcgcttaagaaagaaggcatctcttaccatgttgtctctggacggcacaagagtttgtatagtatctactgcaagatgttgaagtaagttctcatttcctctctattcgaaactgcttgttggttttctggtttcactaagataaaggagagaaccgggaatactgacacttcattttatgccaggaaaaagctaaccatggatgaaattcatgatattcatggcttacgtttgattgttgacaatgagaaagattgttacaaggccttgggagtagttcacaagctatggtctgaagttcctggaaagctgaaagattacatttctcatcccaagttcaacgggtgggttctgcaaaccgattgtagcttaagatgatgcaggcttctgctttctctaattatctaactttgggctttgtgaattttaggtaccaatctttgcatactgtagtgatgggtgatggaactattccgctggaagttcaaatacggacaaaggagatgcatttgcaagctgaatttgggtttgcagctcactggagatacaaggaaggtgacgtcaacactcatcgtttgtgcttcaaatggttgaatgggcaagatgggttgtgacatggcattttga

SEQ ID NO: 10637 - DNA, 1009 bp, Arabidopsis thaliana
  unsure (1)..(1009): unsure at all n locations
taatataggcctagtgtgataagacctcaaaaacaataagctttgatattacgatgagagtaggagtatataataaaagcataagattatgatgatacaaaggacatcaaagttggtgaacacctagaacaacaaaaggagtaggtaaaaggggtcagctttgcattgtgcttatctcaactaccttatgagaagaaaataatatttttttctaaagtcaaatgtttgatgagtgtagtttggataatgccgcattaaaaaaaaaaacgtgaaatgacaatcgaacattgatgattggagggcttatttgtaattacgataactatagtcaaacggcccaaaccattaataataaaaggtgaataaagaattttctgaaagacgaagaagagaaacgaaattcgtagaaatgatctcgggctcggcgacggcgagtcatgggagagtgttgcttccgtcacaaagggagcgacggcccgtctcaactggatcaaatattttacgtttcagagaaacagtaccgagacaattcagcctgatgatggtgacgaaggcgacggcaaagtatatggggacgaagatgagggaggagaaactatcggagatgatagaggagaaagtgaaggaagcgacagaggtttgcgaggcggaagagatgtcggaggagtgtagagttgcgtgggacgaagttgaagaagtgagtcaagccagagcagatctgaggatcaagctgaagttactgaatcaggatccgctcgagagtttctgccaggagaatccagagaccgacgagtgtcgaatctacgaagactaaaatttgagttttcgtgtttttaatgattgtagctaatctcaaaacagaggacttagaacagagactgattctgattaataaatctcaatcgtccattgaaaccgttgttcatcgtgttcacttacaccgattgatttggaatgaaactctgcattttggatcttttngctttggacaaaacggttgttttgattg

SEQ ID NO: 10638 - DNA, 518 bp, Arabidopsis thaliana columbia
cgtcaaactgtacttccttggtcaagaagtcggctccaatggttgccttgtactggttgctgaactttttattaacatactgattcatcaaagaggtttttcccaccctacaaaaccacaagtcagagaagtcaaaattagtttcactcaagtaaagacaccaatttcatgtagtcatgacataacacaaacattttctgcttcaggacgtaacaacagagagaaacaaaaaataaaaaagagtcaaaacgaatgcataacaaaaccaacatgatcttgaatgtcaagcacaaactcagtacccacaaatcagatgcagacaagaacatgcaaaatgttaataagaaaccaaacatcagatcataagcaagtttggagaaacaacaagtaatcattaaacatcaaattaactctaaacaatctacagacaaataaatcgtggtatagtgaactcaagttacaagcgtcaatgtttgatgagactatgatgtcatctcaattcttcaattttgaatttt

SEQ ID NO: 10639 - DNA, 488 bp, Arabidopsis thaliana columbia
cacttgcggtctcattagtccctcatacagtatctctgtgaaatcgttataacgataactctcttagacgaagaagaaatcgcgaaacgagaatgtcattctcagacgattgtacatctccatcggaaaagaatcgagctcgtacgagtcaagaaccacgagagcgccctcaagatttgtctttcttgtcatccaaggtaacagagaagcaaattatgagccaagaaccgtttgaaacgtcttgctcctctgtttctccgatgaacagagactcagaagcctttaacagtcgacatggtccattctcgaaaaaccaagactacttcgacagtaatggcatcaccatgaacactgaaatacctgctaaatcctttccatttcggaggaggtacttgtggttgtgcccttttatcaacagagtcgatgttatgttcttttaccgtttcaggtgaagacgatggcacaaacaattctgacactttgggaga

SEQ ID NO: 10640 - DNA, 547 bp, Arabidopsis thaliana columbia
ccgttttttgttttgctttttgttctttacagtgtcactgttatgtttgtgacacccgtgctccgtgtacttactggttcagtggcgggatctctaacactgatcactgtcatgccaatgataaagagaagacatggaatgatcaacgggaatgcatcagaactggaaatatgttacctcgacctgtttcgaaacctgcttcggccaaattacaatttaaacgtgctccacggcgtccatctgtatatgtacctgtaccgttgctccaaaactcgtctggaaccaacttaggaatccgggcttgctccaaatctactaaggttgcaattcacccaaaaacatacactagacccggtcatagaaccgagcaatcaagaaccgtccaacaaaatcctgggtcacaacctcacgctatgcagtcattaccaaatcacaaaagtggctctaataatggtaaccaagtcctcaagttgtccttccaatccatatgtattgactcgacggccaagtaatggcgtttacctccggaaaacagtgtacagaatat

SEQ ID NO: 10641 - DNA, 546 bp, Arabidopsis thaliana columbia
gaagctattgtaactaaggttaagaatcatgagttgatcaagggtcgagaaaaaacctggtgggagaggacccgagagacggttgtaagaaagatcaagacgagagagacggtgaatgttctgaacagacgaagcgagagtgccagagagtcctctagagggcaaggaaatcacagtgacgtgactatctgatgaatcatcgcaggtaattccctcccaggaacaacaatcaatggacaaattccaattcaatggagaaacagaagaagaaacattgccggaaaaccatatgagagattctcggtcttgtaggttacaaacagcttctgaaagtgtaagaaagagggcagataggaaaagaatacagaggaggaagagatgcatgtgagaactcagaggctgtacaggttttgtgattaatggtctcacaagacctttggctttggatctcatttccttatctatcatagcaaggagaagaacaatacagagaagaataagagaaatagaaaacttcttgttgatacagggttactaagggaaata

SEQ ID NO: 10642 - DNA, 405 bp, Arabidopsis thaliana columbia
tccgggtttagtttgggtcggtttgagttcggttggttcggatcggttcggttcggttaaaatgcccaccccttagcaaacgtaaatgttaatgcagaaattgcgatactcctaccgggatcgcactcgtgactgttgcaatcacccgaattttaaactcgcatcagacactaaattcaaacttttttctcttctccgattaaacttaaaaagacaacaacaacgtgtattatttcataacctatgttgctgctctttatcaccaaccatttcaatttgatcatcaaacttgatcaacaaggttcgaatttccatcggaacaagctcaaccactagcttctctgcgtccaccgcctctcctctcttcacttcctccccggccgagccttctactttccagattag

SEQ ID NO: 10643 - DNA, 574 bp, Arabidopsis thaliana columbia
tccccattatattaaatacacttaaataaatcaaatcaaataagctacgaaaataattttgtatatttaaattatagattattgtcaaaccggaaattaatagatgctatcaaaattgatatttatatctatatcaaaattgataataatccggttatgatttgattctcaactcttctattcgagtatgtccggataagccttatcttcatgtatccttctaagtttttttttttttttgtcgtcatgtatccttctaagttaattctcatgatttggtgcacacacaaaaaagaagataagtttacttataaaaatactataaaattatattcaaagtgacacttacaatgtaaccggatgctacaaccttcaatgtcctggtttcatacaaacaagtaacaacattgttgttggaggcaccattactccgtctctacatccgaggaaaaatatttgagattgtatcttttgttttagttaatgaattttacatttctaatttaaaagttaaatatcatcgttgataaacaattatataggatcaagagtctgggaactggtggctaagttt

SEQ ID NO: 10644 - DNA, 583 bp, Arabidopsis thaliana columbia
aataataacccatccggatgataaaatgtgataataattaacaagactgattcaatttcaatttcaaatgacctagtcggtttaaatataaaggtagttaatatatatctcatatatataaatcaattataatttataatatggaaaaaaaaatatatggtagaatagaaccgtaagaggtgtaataagtttcccctcttttgggcttagaaccctctttctctctcagtgtcttttcactagggtaagaatagagcttttggctgaataatctcgatccctcagccgcattccactgttcccttgtctgatatagctcaattcttggggtttctcaatagtgttttcaaggtttccgttcgatcttccatcggttttcttctactaaaggtctccgcggttcagtaaagcttcttgtagggggaagttctttgaggttctgcaatgtcggctgcaatggacagagctttaatggagaagtctttggatgacaaagatgaaccattcgagatgccggatttgcctgatctcatgtcttgtgacaggaataagctctgtttaatagggagggtctcaccctagt

SEQ ID NO: 10645 - DNA, 346 bp, Arabidopsis thaliana columbia
ttccaagggtaagacgtatagactcctctgggtttgaatttgaatgccctccaaccacgttatcttgaacattaatcggggtactattgacttgtcgtcctagcgagccagccagacggatttctctattttgcatctctctcagcatttttgcctgtttgttttccctccacattgcaaactccaagtccttaatgctctcctcgtccaggacatattctttccctttagcggttgcacttggttgcccttgggttagatttctcggtgcgacgcttcctacagccgtcttctctcgcattctctcgtataattatgcccccactcgctgcctaagtgtgttctg

SEQ ID NO: 10646 - DNA, 545 bp, Arabidopsis thaliana columbia
  unsure (1)..(545): unsure at all n locations
nnnnnnnnnnnnnnnnnnnnnnctaaaggcgtttaaaaatagcaccgtattggggctcatcggatttggcctcgctatttttacccttcagggtcgcgtaaagaattttactccccagatagagcaaataaaacgcaccaagataacgtacaatgttgaataatatcggggtggtcttaattaatgtcgccactccagcccatgccagaaacatcaataccgcatcgccaataaatacaccgcaggccgcaagataaccgcctttcataccgctactgacgctatttttgagtacaaacagggtatttggccctggcaccaacacaataaaaatggccccaaccagataggtccagtaattcagaaccccgtattcagcgaacacattaacctctttaattatctttcgatcatgcgcgattaaaggtgaatatgctaaccaatctgtagcggcttagaaaggagaaaatcaggttttaacctgatatcaaccccgataattgaatcattaatcaggcatgctccagtgaaaaattcgggtagtg

SEQ ID NO: 10647 - DNA, 1547 bp, Arabidopsis thaliana columbia
acactctgcttggagaaattacgacgacatcaatgagtatttctggagtaagagagccttgaagagccttaaatggcctcttgactacaccagtaatttctttgatactacacctaaaagcagtagagtggggaagacaggatttgtggagcagagatcattttggaatgtgtatcgaagctttgatcggttatggattttattgcttctgtacttgcaggcagctattattgttgctactagtgatgttaagtttccttggcaagaccgtgatgtagaggtctaaaagcttctcctttgtttgatctaattacggtaatatgtgttttgagttggatataaagacattttctgttcttctacttgcaggttgctttgttgactgttttcatctcctgggcgggattgaggttgctccaatctgtgctcgatgctagtactcagtacagtttggtgagcagagaaacttattggcttttcatcagattgactttgaagttcgtggtggctgtggcatggacagttttgttttcggtcttctatgcaaggatttggagccagaaaaataaggatggtgtatggtctcgggctgcaaacgagagggttgtcacgtttctcaaggttgtgttcgtttatgttatacctgagttattagctcttgtactctttattgttccttgtataaggaactgggttgaggagttgaatcttggagttgtgtactttctgacatggtggttctatagcaagacttttgttggtcgtgggatgagggaaggtttagtggacaatgttaagtatacactcttttggattattgtattggccactaaattcatatttagttacttcttacaaattaggcctctaattgctccgaccagggcactactgaaccttaaggatgcgacgtacaattggcatgagttttttggtagcactcacaggatagcagtagggatgctctggctccctgttattttggtttacctgatggatttgcaaatttggtactcgatctactcatcccttgtaggtgcaacaattggtctgttttctcacttgggggagatccggaacattgatcagttgagacttagatttcagtttttctcaagtgctatgcagtttaatcttaaacctgaagagcatcttctgagccctaaagcaacaatgcttaagaaggctcgtgatgctattcaccggctgaaattgcgatatggaattggtcagcctttcaacaagatcgaatccagtcaggttgaagcaacttggtttgccctgatttggaatgagataatcctcacatttagggaggaagaccttatcagtgatagggaggttgagctactcgagttgccgcctaattgttggaatattcgggttatccgttggccgtgtttcccctttgcaatgagctcctacttgcgctaagtcaggcaaacgagctctgtgacgctcctgatcactggctttggtcaaaaatctgtagcagtgagtacaggcgttgtgctgttatggaaggttttgatagcacaaatttgtga

SEQ ID NO: 10648 - DNA, 616 bp, Arabidopsis thaliana
tctatccgtcgagacgccttctcggtcaacttcctctaatctcaaacgccgatggagtttcgtcaaatccaaacgagaaaaagaaagtacaccgattaatcaagttcctcatactccatcgctaccgaattcgacgcctccaccgccgtctcaccaccaatcgtcgccgagacgacggagaaaacaaaagccgatgtgggaggatgagggaagtgaagattcggacaagcatgctattgcggtggctgccgcgactgctgcggttgctgaagctgcagtcgccgccgctaatgctgctgctgcggtcgtcaggctgacgagcacaagtgggaggtcgactcgaagtcctgttaaggcacggtttagcgacggattcgacgacgtggtggcgcatggtagcaagttttatggacacggccgtgacagttgtgaacttgcggtgattaagatacaatctatatttcgcggatacttggtaattttctttctctaaaatttatttcactcgttttataaattagtttatgaagccaaaatagaaatatacatgaattgcatttttttagtcaaaagtttatcatttttgattaaacgaaagctgaatgaatcatttgtg

SEQ ID NO: 10649 - DNA, 558 bp, Arabidopsis thaliana columbia
caatgcattgtgatgaaagggaagtttggagaagatgaggatatcaaaatggaagcaactatgtttgatgggtttatgaatgttccaagagccggtttagatgcttcagggcacgatgtccgtcttcatattagcttgcttgttgacatttccaaggttgatggaagtgaagagatcgagtcctttgctccgtctggcctaaccgtattgaaattcgaaagctttacaagcttagacgcaacaaaatcactggtcagccttacatgggacctaattttgggtacttactactaatctctctgctttcttgaatcactttaaatgtagagtgtagcatttaactggtcttgaatttgttgatacagtcaaggaaattgcctagttgaattcagctactgaaccttgtgatctttgtttctttgcaggaatttgaagtatgattttcagacagcgattcgggagtttttacgagtaagaggaatcgacgcagagctttgttttttcttgcatgaatatatgatgaataaggataggattgagctcattcaatggttgaga

SEQ ID NO: 10650 - DNA, 565 bp, Arabidopsis thaliana columbia
aagcaccatgttaataattacgagattactctgatatccaccaagaaagtattaatctttcagtatttcattgagagtgggaatgagattactacttacttgctctgcaaactcgggacttgtcagatttacagacaggttttgcatcagtaaaagaacctgatgtatcaaaaagaaacaatatcaaagaagcttctttattatcatcaggattgaatttttcaacaaaggctcagagtagggactgagtctgattaaacgtgtctcataccgtttccatatttattggatccatctgctttaatctctggaggtggcctgatgtgttgggatcgaagacacttccaatgaagctgtaaacttcagcaaaattcggcatcactgcattaaaacagctccattgtcagcgtaaatctcaaagatgtctactagaaaaacacataatgtaacaagataacaagtcttacctctatgtggctttcacaactttcttcgttatttggctttgtcactgctcgtacccatctctgtatcttcctgtctgcagcgattatttgggagagga

SEQ ID NO: 10651 - DNA, 502 bp, Arabidopsis thaliana columbia
agaagtaaaagaagtcaggcctgggaaagaatttcaaggattggagtgggtagaagggataaatggtgtatgtttggtgacttcaatgacattcttcataatggtgagaaaaatggaggtccgagaagaagtgatttagattgtaaagcctttaatgagatgattaaaggttgtgaccttgtggaaatgcctgctcatggtaatggttttacttgggctggaaaggaaaggagatcactggattcaatgcagattagatcgggcttttggtaacaaggagtggttctgtttcttcccggtctctaatcaaacctttttagattttcgaggttcagatcatagaccggttttgataaagctgatgtcgtcttaagattcttatagagggcagtttcgttttgataagaggtttctgtttaaagaagatgttaaagaagctattatcagaacttggagtagaggcaaacaccggaccaacatatcagtggcagatagattgcgt

SEQ ID NO: 10652 - DNA, 565 bp, Arabidopsis thaliana columbia
tgggatactcaacctgtttgagggagataggaaaagtgagtttgctagaaagctcaggaactctgacgatctctttgacgatttctcgccagttcctgcagacaccagcgcaagaaacaacatttttcctagacggccaagtgtcttcggattgctcaatcctcataagaacatctctcaggagctccggaggcatactagcccagcagctctgcttgaaagcatcaacaggaacagaagtatcctgaacaacacgttgagacctggatctaccatacccgaatctgacatcgaatccctttctggatatactcccaagctctcctctcatgtcctgaatgagactcttgaaggacatggctctgaattctaactaataacgaactagaagcagtctctatatatttcttggtaatgcacctaattcaaagttgcagactttttcaagaaccctaataaacccacattcggaacgaacgagatctcaacgaactaaaacacaagctcctccaaattattagaaaaaaaaaacacgcttcttattacattcagatcaagagtacta

SEQ ID NO: 10653 - DNA, 504 bp, Arabidopsis thaliana columbia
cggcatcaggttggttttcccactcttcccatacagggagtaacaaaaccagccagcttcccgctttcaacgttccgctaagtgcggcaaaggcagcggcatcaaagccgtggcggagcgtcgaataccgcatgccggaactcgcgcccaagtaaagtttgtagtgccgagggagaacagtggttttcagcatctggccgcggcgaaatccacagccagtcgccaggtaaggcatcacgcaacttaagagtatgctcaaaacaccaaccctctttcccgctcaacaccagcaagcggcggatcccttcacgtttcatttgcgctgttaatgtgtgaagcgcagtcagttcagccatccctgccccggaagttaaatgcttttaccaaaagtattgcattgtgccggatcgccgctgtcgaaaccacgtttaaaccagctgtagcgttgctgagaagtgccatgagtgaaactgtctggtactactcgcccctgactttgctgtt

SEQ ID NO: 10654 - DNA, 587 bp, Arabidopsis thaliana columbia
tttccatggtaataataagaaacatcataacaatctgtcaccttgcaatagcaattagatgcaatactgcatttgtcgatcccccaagggccatgacggaaaccattgcattacgaagtgattttggagtgataatgtcacggggttttaagtccatctttagcaattctagaagatattttcctgctaagcgacactcgtccaacttcaatgggtcttcagcaggtattgaagaacttcaaaaaaaaaagaagaagcaaatatatgaacttttgaaataagcattccacaattacagtttaggatctacaatgttcttgtggaaataactttctattaagcacaaatctgggaaaacgtttgaagttgatttataaatgtggtcttcaggactgaaagcctcacctgtaaggaagggacattcccattgcttcgatagcagaagccattgtattcgctgtgtacatgccaccacaggctccagctccaggacatgaatgatggaggacagtctttctctgtgcatcacttatggagcactaacaaattctccataactctgaaatacaaaattggaaaacatgatg

SEQ ID NO: 10655 - DNA, 559 bp, Arabidopsis thaliana columbia
agtctttcgcgcagattcgttgtttctttaaacgcaaattaaccactcccaagtgtttgtaacaactgtgtttgccttatagccttgaaggcttgaacataaagaaagattgaaagtgcacgtggtcttcctccttgataccctttcgggttaaatcctaatctcctgattatagattaactaaaaactgttattaacagaaatatgttttcctcctttaggaaacattttgagcaacaggttttgatataatttgatgaggaagtgccaaccagtatcggtctccaacgagaaattcgtcagagtatcaaaacttatcttccaaggtggagaaacgaagtatttttcaagtgaatacattagccaatacatttatataaatagactggttcgggttataaatgagtttgagatcaacattgacttcccaacctcttggaaaagattcggtcgttttgattaccattcacaaatagcataaatatcctaatttttgtttccaattaaaataaactcaaaaattatgaaaaagtttttgaaaaaagtgtaagagtgtaag

SEQ ID NO: 10656 - DNA, 488 bp, Arabidopsis thaliana columbia
tgccattttaacaatggaatagagccctaattttaattcactaactgggatatgttgaacggactagctataggtccgttaaacgctgcgttagcaccacagtatttatcacttccgtagtatgcacgttatcccagaatatgaatttgtttctgtctggacaaaccggtccgttcgccgcacaaagttcttcacccggattaaccgtacagcaactcctatcaccaaccgtaatccctacaatatttcaaatgaacaaattagtgtcggtaacaatttcatcgtttttcttctaagtataaaattacctagagcggcgaaatcttcagcatttccagagaagagatcaacataagtgaacatagctcccggtttgttgttgaaatctgtgactagggctttgagtttagtgttgaagatgatcacggcttggttcacttcttctgcgcacgcagtgccgccaccgagggtagcaacaatccgtggtg

SEQ ID NO: 10657 - DNA, 540 bp, Arabidopsis thaliana columbia
gggtaccgagctctgttatgtgcagattgaaactgagggacgtgaactaaatcctgttgttctcggtacctccaatgatctacgcgtaggtcaaagttgctttgcgattgggaatccatatggatatgaaaacaccttgacaataggggtaagagtagttagatcctgagttttgtgttcatatatacgttgaagtctaaacattttcacttgaaatggatttgttatcatgaggatttgtaggtagtaagtgggttgggaagagagataccttcacctaatgggaagagtatttcagaagctatacaaaccgatgctgatattaactcaggtatgtaagttaattttacatgaaccctaagatctttaaacatctaggttaatcacataatagaatcattaggaggtttatcggtttacctctctttattgccgtagagatgtcttcatgaataggtttctgaagtattgatctttagtttaggattaggtttcctcaccttgcaaatatgttaaataatacattattcaatagaaacg

SEQ ID NO: 10658 - DNA, 519 bp, Arabidopsis thaliana columbia
taatatcaggcgtataagcatccttagcaagctttataaaatttggtggaagctccagggtctcagatgcgccacaaacctgaacaacatattgataagtttaataaacagcataaaatcctcaacttgagagtaactagacattaaacagacgcaagataactgttaagagataccagacacagccacccagtcggtagtgatgtttccttcaagttccaccctgagggctgcccatgagaaaaaggcatgatcaatgagaaacaacgcaaatgcacattaaaggtaaaatcagagcatttgttttgagaaattaaaacaaaaccatgaaactatcaaatataagaacagacagccatacctgtccaccaaaattgagtataacaacattcacatcttcagcaatgccgagttctttcctcacctgataaagaagggcattagatgttatttggattagttgtccactgaatataagatcaatgaaatgttgttgacagcctccttgcgagatttgtg

SEQ ID NO: 10659 - DNA, 522 bp, Arabidopsis thaliana columbia
aatgtaagattacatacctcgataagcaccatcccctgcttgttcagattctccacgatgatcgagcttacttgaagatgacctccaacctccactgcgcagttgaaccttgcataccagtttccttttgttgcatctgagattacaaaggtataagctaattttgatatttacttctgattttcagttgagtttttctatatatctccatgtgcctaataatcctatcttctcattcaaggattcagaaatttgatccactatttgctacatcaatcaatcaaacctaacaaactgcttaatgtgttcatttacaaactatggaggctggaataaaaatttctaggatagaacagagattatcagttatcaagaaagctgacatttttaccttttcattagcacttttactgagcttttcagcatgcttagtaacattctgcaaaaagagcatgtgtttgaacgttcgttctagcaaagaatcgatactgcactgaaaatgtgacaacaatattagtgaat

SEQ ID NO: 10660 - DNA, 507 bp, Arabidopsis thaliana columbia
aacaaactggctgacatccgctgacaccgtttctcggttttgtgcacgcatcagcgcagggatcagttcattacgccagtaatcttgtaaaccctgtaattgcgccagttgtccgtctcgttctgctgctcgagtcaactcggcgctaaatgccgtttgttccatctctttaattaagggcttgtctttctcgcttaatggcactgccgccaacagacggtaactttgcatgcgcacgtatcccgctttgttgatcgcatgggcgctgccatgaacgccttgcaccatgcagccagaaatcgccatccctgctagtccaatagcagtagaaagcaacacgataagcgcaacctgattacacagggtgagcggagagagacaacgtttaatcatgtagactcttcgttcaggctttaaatgagcaataaccttaatgaatgtgacgatacatcttggaatggcagtatctcggctattggctgaagtatcccatacccggaaagagtt

SEQ ID NO: 10661 - DNA, 500 bp, Arabidopsis thaliana columbia
acttatgccctacctcaaatggctgggatgtccaaaggatcaggtccctcttacctcaacttgaggacacaattcgccaactcagaccgagttcaaaaccgacacctgacgcctttgtttggctaccagagaagccaggcacctattcttctaaatcagggtacaaccttctgaagaataatgggttggctccttcacctaatgcctttagctggtcccctcttgtctggaatttaaaaacttccccaaagattaaaagtttcctttggaaagtggcaagcgggatcctcccaacaggtgtgtcccttgcgacccgaggaatccaagcagagacagcttgcaaacgttgtggagagcaagaatcaacaactcatctcctcctccactgccactttgctttggacgtttggagtttggctccaatctctccctcctgcgcagaccttgcgatatcagaggccaaagtcctccttaaagctctgaaacagagacagaacttg

SEQ ID NO: 10662 - DNA, 628 bp, Arabidopsis thaliana columbia
tcaccatttttataaactattatgcgaacttagttttgttctttgtgattttgtatgacaatgatcttcttctctaagcttaatcgctccatttctcgttcaaaggttagttgttattttcatttcattgattccttctcagattcgttctcaatttgttttttttttttgcttacctgatttttgtttatatgtgaaattagggatttttgtacggtggtggtgttagatcggcggcaaggctacttacttcgccgggacttgaggcggcgtctgtgaatgaagtggaaggtggattagggtttataagaagacactttgcttctttagcttcacggaagggtttagtcaataatgatttgattggtgtttttgctaatccaagacttcgtagattcttctctgatgaagctcctaagaagaagagtatgtttgcaaaaatgttaaaccatttttaatgagtgttgagaattggttataaattagtgttcttgttgttgtctttgtgtagattatgagaactattttcctaaagataagcaagaacccaagagtgatcagaaatcagagcataaaggtgaacaacatagattttgaagatacttttcttattatgagacctgttggt

SEQ ID NO: 10663 - DNA, 701 bp, Arabidopsis thaliana
cttcccctgtttctgagtctgcagactgcgaaagtttagtcaaacattcacgaaatggagactcacagcttcggttgagaagcgttaggagaagtgtgatatcgtgagttcttgtctctgtttcagacaagccatctgggatctgtaagaaggtgaacagagggtggtttgaagcttttggcgcattgaagcacgtgtggatcacagtgatggagaaacctcttgagtggaggatcttggcgagctgaatcatggggttgatgcagccttgtaatggaagtggaaacagaatcactcgaaggccattactcttctccattgaagctttcttcttctttcttgtttgtcgacccaaatgcaaaaagatctgataaatcagtgaagctatatcacacaagaaatcatttatgttattaatatgagagtggacccctaggccctaactctacgcttctcgatcgatgtgatgataaaaaaaaaaaagaagataagatccattttctctctctcgagtggaaacaaaattactcagctttacaactaacgaagcactaacaattaacaagtgcaagtggtttagttttatttaatctggtttaacaggtaactaacgtgtatcaaatagtcgcaagtaaatgtttttaaacctgtaccatttgtaaatcacatgaaagtctcgactatgtagtaactagtatgta

SEQ ID NO: 10664 - DNA, 549 bp, Arabidopsis thaliana
atcccctgctccacaagtagatgatctcagacttcaaaggatgcatcaccaccgggaagtaatcgatacctagcttggtcacagacgccaagctgacttcccaaaagagctgccacgcctcaggaccaccagtgtacttgaccagcctccaaacacgtaatcttcggtttccgttctcaccaaactcgttgaagtagacaatagacccatccgaggtcgacaatgttctcctaaaacgccgtaactgatcatcatctttttcacaatcagggaaagatatgatatgacatgcataatcatcatgacctccatagaaatcgtaagctacaaaagaagtgctgaaattgcaaagccaatgaagaatcccattcaaagcaatcggcttgtgatgactaaaccagaaggaagaatgaagacaagtcgcaattcgagcttcccacatgccagtatcagatgagtaaatcacaaagtcgatggttgtactattgcgagggacaaccacacaaccttgtaactcacaacggcaccactctgcatctttataccaat

SEQ ID NO: 10665 - DNA, 570 bp, Arabidopsis thaliana columbia
tactaatggctactaccaagctcgtctacattctcctcatcctattcaccttcaccgtatctccggcgatctcaacggccccggaacattgtgatagcggctttgataacccgtgcatcaacaaagctaaggctttaccactcaaaatcgtagccattgttgccatacttacaacaagcttgataggcgtgacctctcctcttttcagccgttacatttcgttcctccgtcccgatggcaatggtttcatgatcgtcaaatgtttttcttctggaatcatccttggaaccggtttcatgcacgtcttgcctgactctttcgagatgttgtcatcgaaatgtcttagtgataatccgtggcataagttcccttttgcgggttttgtcgctatgatgtccggtctagtcactctagccattgactccattaccaccagcctttataccggtaagaactcagtcggaccagtgcctgatgaagagtatggcattgatcaagagaaagcgattcacatggtaggcacaatcatagtcacggtcatggtgtagtgctacaactacagatgatgga

SEQ ID NO: 10666 - DNA, 524 bp, Arabidopsis thaliana columbia
ttaagctatataatgattttgactttggtgatttgttgacaggaatgaagttgattcactgattgatgaacttgttgttagcacgaagaagcttgtgaaagctactacaaatgaaatcgacaagtggttaaaatgatgaacttttaggatttgttgcagcttccaagtaaatggtagtgtttggtttgttcttagatcaataatgtagatttggggctagtgataatctcctttctttttgtacaattttacgtatggtataaagatggattcgcataatttaggtggctgatttatcattctggtaatgtgtatggtttgagtgctgattattggtgctatgagttgttctgtatggctcaacttggatcaatatggaggctgagtttgagatgttctctcagtttaaggaggtagaatagtgcgtatagtggcacagtgagctcagctctagggccaaagggcataaattcattatagctctttcgattctaccgtagtactgtgtgtgaacggcactgtga

SEQ ID NO: 10667 - DNA, 439 bp, Arabidopsis thaliana columbia
gagagcacgtgtggagtacatggttcaggggtggaacctagaaaatagagttataggtcgtgagctaggaccggagcgcttcttcttcagatttgagactgaagcagacctccaacttgttctgaaaaaagctccctatcacttcaagaagtggatgttcatccttcaacgctgggagccaattgtttcagaggctttcccagcttttatccccttttggataaaagtcaatgatatacccatgcatcattgtacggaactgacactgaataccattggacaggctttgggtccggtgattgataaggatctctcagatgggagaatccgggttaacataaatggtttagaaccgcttgagatgaagattccaattcgtctcccaacaggagaagtaactactgtttttttggaatatgagaaactagagaaacattgc

SEQ ID NO: 10668 - DNA, 464 bp, Arabidopsis thaliana columbia
ttcacgtaataatcagcgaatctatatccaaaccttttgtcgaatttcttaagtatcttgcgcagaccaatggcgttcaactcaacgaatttcaggagctgaagaaggtctcgtccaacatctctgtatgcttcacgtagctcgaaaattcttgatatgtcaggctgctcaagtatagcatcatgagattccctcaatttggctaatcgccctgaaagcaacccttgttgttccaacatgaaaaggacagttgtctcaatctgcaaacaatgattcactttcaatatctcgaacaacattttagaggagttccatctgatcatcagaatggtttatttcttaaatgtcttatctaattaagagaaacaatgacaaacactggactgagattactcgtatgtagccatatataacctcggagatgcacagaaaataacaattcagtgaggataatctcaaacaag

SEQ ID NO: 10669 - DNA, 575 bp, Arabidopsis thaliana columbia
gatgctgtactgttaaaatttgagaaagcaaaatctgcacttatcgatagtcttagacgtgtggaggacattgttcctagttcaattgggtctcaggtaatgtatatatcagtgcacacaaaatctttccttttgcaagttaataagtgtccagggcttatgtgctagatattggctttttttgtttattgattttagaattctagttgataaaatggtttatgctaatgttatttgacttcttcagattttggacattgttggtgaactagagcacaccaagttcctacttgatccatcagagaaggaagttggtgataggataattgcactattacaacaagggaagaaatttgacaacggcagtgacagtaccgaacttgaaatttttcaccaggcagctactagactcagtataacttcttctagatcagctctggcggacgggcgtgctttaaagaaagtcattgacagggcacgtgtggaagaagacaagcggaaggagtcaattgtggcttatctgttgcatctcatgagaaaatactccaagctatttagaagtgagatgatggatg

SEQ ID NO: 10670 - DNA, 568 bp, Arabidopsis thaliana columbia
taatcctcttttccttctaccgtcacaaaactaatgtgatcctcttatctttctctctctctcgttcatttttttttgtcttaggttgaattaaacacataatatctatgagttctcacgtggttgatgatcaaaggcaacctaataactcaatctcgagtttaagttctaaactaaccaagccatggatcacaaccacaatcttcatctttgtcttcttcttcttcatcatcctcgttggagcttctctcaggtggatggacatggtatatctatatctatacataattattcattacaatctattagtaactcaaatgggtttcctcaaaaattgttctttcttacatagtttttaatcggtggaggtagaatcaaagtgacaccaatatttacaagaaacaccaacgcaactatccccaaggaaaaactcactacaccactgaacttcacattgcaatgctcactagaccagaacatagcaacccagacgtgtcctgcaagcaacccggagaaatcacaacctagtaaggacgagccagagacttgtccagactacttcaggtgg

SEQ ID NO: 10671 - DNA, 493 bp, Arabidopsis thaliana columbia
ctgcgattcatcagaaagatgcccagtctccatgtcattgtcactgaccccagtgggaaactcactagtcatcagatgactccagccctcgtactcccacaacccatcatcaccatctgcagaggactcattaaaaccgtcggtataactatcttcatctgcatcctcatcactctgaaatagcttacgcttccctttgcactgacgttttgatttctctgccctctcaatctcttctacctctcttaacatcctcatatcctccgcctcagtctcagattccacatatgcattagagactgaatcctcacaattatcggctaaattgtttgataatgatggagttgctgcatctgcaagattaatgataccatttgcattggtactcagccacggctctgtgctactctccctcagttgtggcacaacacaatcatttgaatcgtcaccggctgtgcagtttgcagctgtggcaatattcactccaacagtt

SEQ ID NO: 10672 - DNA, 545 bp, Arabidopsis thaliana columbia
  unsure (1)..(545): unsure at all n locations
gatgttgcttctcagttntgtgtgctcaacgttagattttgctcattcaaatcttggaaatactcgctagctaggttctcggctcagttatcatcatcattcatacactccgttctccggtgcccaaattttcaaccttttcgcacctctttcacaattctcgttcgcactgtctgtaccattctgaacagtagaggtaacatcttctgcagcagctttggttgaacctggtgaaagtccaatttccatttcagaacccgaaataatgtcttctgcatttcctgagcagaccctcagacaactcattggcattttactcaatccgccatctaaatcagtagcaacttcaccatgaccctcatgcttatctagcaagtcagattcatcaagagattttccactagatggttcactgaaagcaatttctttctgcaagttaccttcattagcatcactcttttgcagatagccgagtgcgtttatttgcttttccacagagacagctaaagagactgcataatcacgaaacaaggaatcgtgaggtg

SEQ ID NO: 10673 - DNA, 481 bp, Arabidopsis thaliana columbia
tcgaagcccaaaattttctttcttctggattgaaagactttttgttttcaatatatttcttgcaaattcccccccccccccacaggcccacactattcgtgaaacagaaacaaaatctctgataaacagccgacaaaaaaaaaaaaaaaatctctaataaaaaactttttggacgtttccaaaagcaaacgaaaaagcagcacagtgagtaacgccagtacgccacaaacattttcatcaaaaccaacagaacacaacaatacaacatctcagaaaaaaaaaaaccactcctcgatgtctgatcaacagcttgaaacagagatcaacttctggggagagacttcagaagaagattactttaatctcaaaggcatcatcggctccaaatctttcttcacttcccctggaggtctcaacctcttcactcgttcatggcttcctcttcctcttctccgcacgtggtctcatcttcatggtccat

SEQ ID NO: 10674 - DNA, 529 bp, Arabidopsis thaliana columbia
tagatattttggttccaatggacaactttatatcaaggggaacggctcattttctcacttgcaaagagcccgactatcagcaaagtctatataacgttctttcaactgtgagtatatcttctgatagtgctagtgagttagatgtctgtgcttgttgattgttgtaaggaactgtaaggttataaaattcttgcaaatatcatgtagcatagaatcttcctttatcgtttaacaaaatttcgagttcattttacatgcctattgtggtaaaaagttgttggaatcttgtttattgtgaaaacactaggaatactatatgttacattcagtactacatgccatttttttgctaatatatatataagcatctcttatgttttccgcacaaggatagcttatatatgtctcacgtttccacttctacagcttatgaccgacagaaacatagaagacagtgaaattgagtctgctccaaagcttattgaagttgttttccagaattgcaaagggcaggtggatcagtgggttg

SEQ ID NO: 10675 - DNA, 496 bp, Arabidopsis thaliana columbia
actactttgtggaagtggacattgttttgccagaggacatgagactacaagaggctcacaacatcggagagactcttcaggaaaagctcgagcagctcgctgaagtagaacgagcttttgtccacatagactttgagttcactcatcgtcctgaacacaagtgtaactagattttaagtagtaatttgtagtactataattagttctttagtttatgtactcttcgtgtcgtttttgtctatatagatacttgaacgttgtgccgtctctgtttatcgaatgcgcattgtgtgtcgtttgaagctaatcgtcgacattaatagcgtttcaaacactaaactcaaaataaagataaaatcatatataatacccccccgcatctcacatgaaaaccactcaaaatggttttcatctatcttccgacaaaattccgtgcttcattgctcttctccacaagacaacatgtctctggctcagaatcgacgccatggaaatg

SEQ ID NO: 10676 - DNA, 292 bp, Arabidopsis thaliana columbia
ttcgtcttcgtcgtcaaatctagcttttttcttcatcgctttgcataatccattccttcttctctcttctccatctccttcctccgatcttcgtctccaattcggaatcttcctatcacaatttcaaggctcctttaacccttgatcatcaccgattcaatcaattcggaatcacaatttcaaatcgagagaatttcaatttctcttgtaaaaccctaaattatgtacagcaatttcaaggaacaagcgatcgagtacgtgaagcaagcggttcatgaagacaatgctggga

SEQ ID NO: 10677 - DNA, 526 bp, Arabidopsis thaliana columbia
ttctaaatccctatattgaaaccttgttgtgtgagtgtttgagagttgcttctaagtatcataacgtatttcctttcaatgaaaattttcagagaagcctctgcttccgatagacgggaaagcagaagagaaggaagagaaagagaataaaaaaccagtttcatactcatacgcattcttccacatcatcttctcccttgcgagcatgtactctgcaatgctcctaaccggctggtcaacttcagttggtgaaagtggtaagctggtggatgtcgggtggccttcagtgtgggtccgtgttgtgaccagctgggccactgctggtctcttcatctggtcccttgttgctcccattctcttccccgaccgtgagttctgagctaatgcatctacttgagattctgaataacttttcatgaatcttcaatttgtaaaaaaatattcgatctttctactataatagaacatcgtgtgcttaatcacgaatggcctatgttgcccttctgtaatatgaagatgatataaa

SEQ ID NO: 10678 - DNA, 519 bp, Arabidopsis thaliana columbia
agattatcatcatgctacacgcttctcgcggcaacaagtaaaatcctagcttgccgaaatccatataaataagggtatatataattaacacattattaaagtttatatatatgtataaattaaaaggtggtcagtcatagcgagacatttgcccaaaagaacagataacgagattaagaactactggaacacgcatctcaaaaagctcctgatcgataagggaatcgatcccgtgacccacaagccacttgcctatgactcaaacccggatgagcaatcgcaatcgggttccatctctccaaagtctcttcctccttcaagctccaaaaatgtaccggagataaccagcagtgacgagacaccgaaatatgatgcttccttgagctccaagaaacgttgttttaagagatcgagttctacatcaaaactgttaaacaaagttgcagctagggcttcttccatgggaactatactaggcgcctccatcgaaggaaccttgatcagctctacaccgttgtc

SEQ ID NO: 10679 - DNA, 603 bp, Arabidopsis thaliana columbia
  unsure (1)..(603): unsure at all n locations
ctggagcttcctataccttcacctgtaatccactcctccaattttctaagctctttgtctccataaaggcacaagatacagaaagaaacaagggcaccaatttacagatagagtgatgcaagtaagcaccttctttccaacccatttttgacaagagtttatgtccaacattatctgcttggatcttcgctttctcagcagcctcctttgtggctttttgtgcagctgcgtcattgcactttgaaaggaacttatctagctcctcaagtgggatataatcacccatgtgatgacctctctttccagggtctgtggaggaagtttctgaaatcaaacatggttgagcgataagaccttacagctgcctaaaaccataaatagcactaggattcattctcaccagatgggccttgaagggaagctggtggaggcatttcgtcttttgactgcctaggacgtctcattttctcttcttgggcagccttcttcatgtaaaactccatcattgatagagggtctgcaccctcggcccactanaggagtcacctgcagatcagacatatatacccacaatcaaactagatatcagtaataggaaggacc

SEQ ID NO: 10680 - DNA, 544 bp, Arabidopsis thaliana columbia
cagaagaggattctctttcataggctgaaaagcaaatctcccaagaaacctagctaagcaataagccgagttcttaggacaattgttaataaacatcgaaatggcgaaaagggcaatgttagccaccacgatagctggaacaagccatggaaaccaaagcttaaacggtctaaactcagcgaacgaagctcgttgttgttgtctccgtctcctcgtcgccgtcgccggagacgtttctacagccacattgtttgtcgccgccgccggtggattcaccaccttgatctccagaccttcccgccgatcgcgagccatttctcgaagccaaatctaaagagaaaggatcagactttttgtgacattgttgtccgaaagaagacgagaaggttgagatgaatcaatcgtctttcctcttttgaggcatttccttgtgaacaagctaattaaatttggatttaagcaaaatatgtttaaagttaggtacgaataattaaattttataatatatagtttctaacttggtttaaacacatgagtttagaga

SEQ ID NO: 10681 - DNA, 557 bp, Arabidopsis thaliana columbia
aggatccccttctcgggaagttaagcctcggcaatacaaatccaggacatgcatacagcctgtctgctgcaacgacctaatgagtcctttgaacggttgtctctggacctccccttcaccaaaaaccgaatgccgtgcactagttgttggctgaaattgttccacctctagattttcagaaaggctacttggcaccaccattttctgtgaacgtgcttgcaagtcataatactcgagtgccctagtccagtttccctcatgctcgaatgtgattatttgagcagacaacttttagattgcatccatgtaacagaaacagaaagtattattcacatataagaaaccagtaaaaaaattaaaaacaaatactgcaatatgatttagctacttcattttttactaatcagtgtcgaaaatatattttggcaatcaaatgaaacgggagatgtctcaaaacattcctagagtagataacaaaaaggttaatgttccaagttcaggagaatacagactagcaaccatttccaataggcaagatccaagtgtgtggatgagat

SEQ ID NO: 10682 - DNA, 489 bp, Arabidopsis thaliana columbia
gcatgccttatatgtatgttgaactgtgttttgtcttgttgaaatttcatgatattgagttctctcagagtatattttctttcttgtttagagattgcaaagggagatgagcaagtaaaagctgatgcgaaccgaattgggaattatgctaatgggcagtttcctactgatagcaaagagtttgccaaacgaatattttacactgtctttatgggttctgaaaacaggtgaattagttaataagagcaaagagcatatgatttttcgtcactgtgtggatttacagcagagatgaaacttttttccccatattgaaatcttaaatttgcagttctgaggagacaaaaaggcgttcaaagcagctggcagacgagattggtgcttggcatcttgatgtttgcatagatggtgttgtctctgcagttttatcattatttcaaacagttacaggcaagcgaccaaggtataaggtaaagtctgaatatacat

SEQ ID NO: 10683 - DNA, 855 bp, Arabidopsis thaliana
tgttgtattatactttgcaagtcttctgaaaatatggaacctgaacgaattcactggcgttattgagagttttcaactgccaaggcgctggatggtgtaagaacgagaagagatacctaatccatgaccaagaacctgggaccatttctggttgtgtccgaaccaatgatgttcattatcttcataaagtagcagcctttgaatggacaggagattccattgtctattcccatctcagaggtagtacacaaactcaaacatcagtctaaattactctgattatactaaaaccttcactttttttttccttttctatcaggagagttagtgtatctcccaaaagatacatctttaccagtgacattgatgccacgtgaatacgaagttttcacggtggttccggtgaaggaattttccgatggaagtaaatttgcaccggtggggcttatggagatgtttaattctggaggagccattgtgagtttaagatacgatgacgaggggactaaatttgtcgttaggatgaaacttcgaggcagtggtttggttggtgtttactcgtccgttcgacgaccacgaagtgttacggtggattcagacgacgtggagtaccggtatgaaccggaatccggtttagttacgtttactttaggagttccggagaaagaattgtatctgtgggacgtggtcatcccaataattattgatctgtataattgtatcagttctgtattgatttgttggttaatctgtatgggttatcgaccagaccaatacaaatcaaacagattggtccgtgttcgttttgatataataatacaaaaaaaaaatgtttgttgtatggcttagcatgca

SEQ ID NO: 10684 - DNA, 356 bp, Arabidopsis thaliana columbia
  unsure (1)..(356): unsure at all n locations
nnnnnnnnnnnnnnnnnnnnctaaaggtaatacgtcgtgctgaacggtccattttggctaacaggatagttaccaaagttgcattccagtatttcaccaaccttagggctgaaattaatcgccacgagtaaacctctccttagtaaactctgaaaaagtaataacacaacgttacgacccgatattttctaagtctaatggattcacgatgaactccgatttcggtcttctctctctgatttaaacatccgcagccaaccggttagcggcttacacgcggtcacattcaaatgcgattctgctacaatcctccccccgttcgaagattgagcaatacacctatgcgtctaaatccc

SEQ ID NO: 10685 - DNA, 531 bp, Arabidopsis thaliana columbia
gtgtcattgttgaattgttccgtttgtggtttctgattctgaaccgttgggaaactataatcggtgatggatagttgaatgtaatatttttaccttattttctttaaggaaccaagctgatgtcgatgctcttatgctggaactggatgggaccccaaacaagtcgaaactcggggctaatgcgatattaggagtgtcattgagcgtttgcagggcaggtgctggagctaaaggagtgcctttgtacaaacacatccaggaaacatcaggaacaaaggagcttgtcatgccagttcctgcattcaatgtgatcaatggaggcagtcatgctgggaatagtttggctatgcaagagtttatgatactacctgtaggagctacctcattctcggaggccttccagatgggaagtgaaggtcagttagtgataactgggtttaacttgctagaacttaagaaactatggcggctcctaatttttcttgagtttgcaatgaaatgtcagaaaaacagaaaagccttgataagcag

SEQ ID NO: 10686 - DNA, 609 bp, Arabidopsis thaliana
tggtataccttttgtgagcatatcagctggattcctagtcgtgtgaatcttatgaacttcgacttcaccagcttcaataatgtctctgatgaaatgatacttcttaccaatgtgctttgttctttcatgaaaagcattgttctttgataaacataatgcagactgtgagtcacttcacacttcagcagtctcagttccaagcatcatatcatccaacaagtttcttatccacatagcctcctttacagccttagtaagagctatgtattctgcttcagtggttgacagcgcaacaactggttgcagacatgacttccagctcacaatgttgcctcccactgtgaaaacatatccgctaatagacatgttcttatcaaggtctgcagcatgatctgaatcgcaataaccctgcactttaaaatcaaatcctttagtatacatcaagtttaatcctattgaccatttaagatacctcaacaaccacttgactgctgtccaatgtacttctccttgcttgctcataaacctgctaactagtccaatagcataagctatatccggtctagtccaatcatagcatacatgagactgccgacacactagagtagg

SEQ ID NO: 10687 - DNA, 486 bp, Arabidopsis thaliana columbia
cgtgcccactcaaatagctcattcttctctgcctccgtgctcggttcttcaccctccgtcgccagctcaaccatcatcagtgtcacccaataacgcatcaccgtcattgtcgccaatcactccgtcctcatcaccacacagctcgtcgtcgacgtctccacctgcgccacaattctcatctcctccaaattcagaacgggcctcattcaacaagggcccaacaacatcaactccaagcccaaacaaaagcccaagtcaaccttcctctacaaaccaaatcccaatccacacaagcccaaatccaaatatcacaccaactcaaacacgttcctcttcacacaacgacacgtcctcatcacaaactacaacctccggtgaatcacctcctccaccaatcattccaaacttacctccaccattacaaaatgaccatcccatgagaacaagagctaaaaaccaaatcacaaaacccaaaaccaaattgag

SEQ ID NO: 10688 - DNA, 274 bp, Arabidopsis thaliana columbia
ccataaagaacccagagatatcctctcttgtccccacccttctattggccttaacagatcccaatgagtacacacgccatgctcttgacacccttcttcaagtaaggcttccgtatttaattgtcttcgattatacttatcttcttttctgtttttttctaaatctttcttctcttattacagacaacattcgttaattctgttgatgccccctcgcttgcactgttggtaccaatagtacatagaggattgagagaaagaagttctgaaacaa

SEQ ID NO: 10689 - DNA, 601 bp, Arabidopsis thaliana columbia
tccaggagtagtaagaggaaccaaggagtttccattagcaaacgttataagcggtttaaccgttgacagctatcgaattcgggttttgtgacttcaacgacgtcgtggaacgcagcagggtaggagaaaactgtttcaagcaaaaacagagttttggtttttagtcttttttttttttttgaatcaaagtttaagatagagatgtgatatatcttaccaagattgtctccaacagcaaatgtttgtcctgcagcccaagttcgaagactagctcctacagtccaaccactaggaccaccaatggtatggtcagtagctactgttaaaccaatgagtgtagtagcgaggaccgagattatgatcagcatttctctagatgccattatcttcttatatcctttttctttttgggggaaaattgacaagagaactgaaagatagatcaagagatgatgatgttttgtgcatgacatatggtgtcaaatgtgtgtctatataggggtcaaaggaggataaattattgagaagaatcttttgagataagagttggtacataataaacttgtgtttgtatctgttgagagttagtatgtatgttgga

SEQ ID NO: 10690 - DNA, 562 bp, Arabidopsis thaliana columbia
tgtcagcccatctgtagacaaactgctggaaatgatgtgtttaagaggtatgaattggaaaaaggaaagctgaaaaagttttttgaacaattcagaggaagagtttgttgtactgcggatttgtggacagctcgtggcattgtcacagggtatatctgtttgaccgcccattatgttgatgatgagtggaggttgaataataagattctagcgttttgtgatatgaaacctccacatactggtgaagaattagctaataagattcttagttgtttgaaggaatggggtttagaaaaaaagatattctctttgactttggataatgctaggaataatgatagtatgcaaagtatccttaagcatcgccttcagatgattagcggtaatggattgttgtgtgatgggaagttttttcatgttagatgctgtgctcatgtgttgaatcttattgtgcaagaaggattatcaatagctactgagcttttggaaaatattagagagagtgtcagatttgtcaaagcatctgagtctaggaaagatgcatttgcagcatgtgttgaga

SEQ ID NO: 10691 - DNA, 824 bp, Arabidopsis thaliana
atcactttggatcgttagtaacgtatcaactaagtccgatctggtgtctttattggcatcttcatgttcttttacgactctttccaaaaactcatcaaatcttttatctacttcctccattttatgatcctgaccgcggattttatcgatccacgacaaactaggaatgtattcgccgataggaaattcacccacgagtgcggaaaatgccctaactatgttctcaacatcaattccatcttccttgctgctatattttcttcccaaggcagctctacatattatatcgtttgtcaaagtcataaagagttggcttagatttactggtgagggaggagaacaagaactcgcattttccagtttttctatcatgagttttatctcgtcttctcttatcttcttgtaagaccggaccattttgttgctgagtagattctgaatgcaaatactctgcatccaacatatatgtttagatcataaaatactcctcataagtcataaccccatcccatattaatgatcaaaattaattggattttaccaaatcacgataaggaaaattgaggaaaataactaatagtttataggaaaatagttatcaataaaatgttcttgtaggagaatattataagtcaaaaaagaaaagaaaaaaggagagaacaaaaactagttgaacttttgaagtaccttcatttgtttccaatattctccgtaaggggcaaaagccacatctctgccacctctcaaaattttatcaatcacttttgtttttgggcggttggacaaataacatcgtacgtcttcaagatgtcatgagcaacgtc

SEQ ID NO: 10692 - DNA, 633 bp, Arabidopsis thaliana columbia
  unsure (1)..(633): unsure at all n locations
gtgaaacacgccgagagttgttgcagtaaacaattcctcattcgagcttagtcaatctgacaatctttatagagatacatataatgaagttaaaactaataagatgatagtgagccaaaattatatagaaaatattaaatttcgaggcattatattaaagacaagccatgttcttgagagaatattatggaacagaacatttacctgttattgctataaaggataaatttcaaccattccgcgattcaacaaacaccgtcgttgttcttgccggtacagtgaagcccccagaaaacgagtcgtaaactgatttcttgactatttcatcggctgacatcacctgttagtcactcagagttaacttatcgcttagagatcttacaacttttctaatacacaacaaactgaaaggtgaaagcttgtgatattgttctattttctgtgatgcgtgatttacctgaaccgggtgtaattcgagcttcctgtcttttagagcgggactgggatatgagaactcagacgggcgtgcattgaagattacccaatgagtgagtagctgtaggggtacagcccnattactgaacaatgtctacatatatgaagctttgaaagatttgtcgagttgtttttttt

SEQ ID NO: 10693 - DNA, 1073 bp, Arabidopsis thaliana
tcatgctccccgtcggattctgcatgcccaagtcgtcaaaactgggtttttcgttgatgtgttcacggcaacggctttggtgagtatgtatatgaaggtgaagcaggtgacggatgctcttaaggtgctcgatgaaatgcctgagaggggtattgcgagtgttaatgcagcggtttctgggcttttggagaatgggttttgtagagatgcgtttaggatgtttggggatgctagggtttctgggtctgggatgaattcggttaccgttgctagtgttttgggtggttgtggggatattgaaggagggatgcaattgcattgtttggcgatgaaatcaggttttgagatggaagtttacgttggaacctctcttgtttcaatgtattcgagatgtggagagtgggttttggctgcgagaatgttcgaaaaggttcctcataagagtgttgttacctacaatgcttttatctctggattgatggagaatggagttatgaatttggttcctagtgttttcaatctcatgaggaagttttcaagtgaagaaccaaatgatgttacttttgttaatgcaataactgcttgcgctagtcttttgaatctccagtatggtaggcaacttcatggtcttgtcatgaaaaaagagtttcagtttgagacaatggttggtactgctctcattgatatgtattcgaaatgtcggtgttggaaatcagcttacattgttttcaccgagctgaaagataccaggaacttgatatcttggaactctgttatctctggaatgatgattaatggacagcatgagacagcagttgagttgtttgaaaagttggattccgagggacttaagcctgattcagcgacgtggaattcactgatcagtggcttttcacaattagggaaagtaattgaagctttcaagttctttgagagaatgctatcagtagttatggttcctagtttgaaatgtctcactagccttttatctgcttgttcagatatttggactttgaagaacggcaaagagatccatgggcatgtcattaaagctgcagcggaaagggatatag

SEQ ID NO: 10694 - DNA, 588 bp, Arabidopsis thaliana columbia
cacttcgtaaactatcttcttccaaagatccatttccgcttcgaacgttttagatctaaggagaggtctcatgtcgacccaacaaaagagtcccgcattactcttcagacatttgatcccgatggcctctagacccaacacgagctttctctgtctgttcttgagccgtttttggttctctctaaggtagttcttagtgaacttcttgtcagataataatgaggatagtaggtattgtgtctgggaggagacaaggccgaaacttgacatttttgtagcggcagagatgacatctttgtcattggagtaaatggctccaactctaaaaccagggaggcctagatctttagataagctacaaacaatgtggactcggttcaaaacatcggtgttttcgagttgattattttttagaatctccatgacgctgatgaattctgaagagttgaatactgtgcccgaatatatctcgtcacttactaaatgtatattcttattcttggtgatgaatcaaatagaatgttgagttcggtttgggttgttgtcgtcccaaagggttagatgggttggtgatgagtatcctttgac

SEQ ID NO: 10695 - DNA, 480 bp, Arabidopsis thaliana columbia
aatggaaaaaaatccagaaaaatagtagttggcctgtaataactgtaaattaactaaattacaaagaaaaaaagtaaagacaaaaaacaaatgattaataaataacaaggaaaataattgtccaaaaataattaattacccaaaaggccccatgtgaacaaagattttaattggcccattctctcattctctctttaactctataaaacacagagcaaagaaaaaacagaggaggttgattctctttggcatctccgaatcgaatctgagaagagaagaggaagaaaaacgaagatcgatgttcgagagggaattagatgcatgaagttggattatttgtggatctgaattccttcacgcagcttatattgacgctcttctttgtctctatcggtcttctctactttgttaaaagaacggcagcgaagtacttcgaggtcggtggtggctccggtggtttcgatagagaccatcgccgag

SEQ ID NO: 10696 - DNA, 536 bp, Arabidopsis thaliana columbia
taagagtccttttttttgcagtttgtgctaaaggatcaagatggtgagtatgttaaatccgtggagggaactgtcgacaagacgacaaagatggattcatctcgtctttaactttcaaaacatcaatgaatagaagttctgagaaatttgggaaaccggttggtacaaaattccaacttgaggcaaaagggttcgataagattgtggggttccgaggaaggtcgtccgtaaatcgtatcaatgcactcggagcaaattttgcggtggtggtagttcctccggtcaagaaactaaatgcaaaaggtggtgtccttgggaacgattgggatgatgggatcacgacgatgctcgatgataacagtaagatacaatgacaaattagtgaaatcggtcaagtttgagtacatcaaatggacctgtaatcggagacgctcacggagatgaagacatccatagagatgataaggagaaagagttatatgctttaatctagaattaaatacatacgctaacattatatatatatatatatatat

SEQ ID NO: 10697 - DNA, 616 bp, Arabidopsis thaliana columbia
ttcagacttcgcttccgtgtccttcctctgtttcttcttcttcttcttcggctcttcttcttctgctatcacttcgtcctcttcgtcattagtatctccacgctgctgtagctttttatttttcttcttcttcttcttcggctcttcttctgctaccgcttcgtcctctccatcatcagtatctccacgcttcttatttttcttcttcttcttcttcttcggttcttcgtcaattaacgcattgttctctttggcatcaccatcttcatgatcgggttcttcttccattgctggctgctttagtttcttagcttcgtctctcgctcttttcttatgcttcttcttcttaatctcttcgttttcggatgaatgttgctccatatccaaattcgccatgttttcttattcgccgccaaatccaaagctcttatcggatttttgattaagaaatcggaattcgtctgaaattcaaaaataagggttttgctacgtattttcttcgaattcgagagtgttctaatgtattactgtttaccgtcacattagggtttataaagatctctctattttcatttcaatatttaaatttcccgtaatgcccttttattgacttgtt

SEQ ID NO: 10698 - DNA, 536 bp, Arabidopsis thaliana columbia
cgaggactcgtaatgatccgatgcgtatggtcatgagaggaccgtaagtatgagccaaggcttgaagagatcgtggtaggctagaccggaggagatgcatatgaccaagaacgggaagtcctcgaggacctggaggaagacctctgcggctagaggagctgaagagtctatggagaaggaagatggttacaagtgtgaagaagagatatgaacaagaagtataattcatatccaaattcaatgtaaacatatttgtttgtgctgattattgtgactgggatcaaacaagtataagacgatgttagtatataacacaagctttatgtttgtttgaaaatactataaaaccttgtcttgttgccatgaaggatctaaaaatacatgattctttgatgatagtgaccttgacttacaattgttaaattatgcattatgttcaattatgtgttagactttattgaaaatcatataataccacattacatttttcatcaaaaagataataactaggcctcataataatatgttattaatat

SEQ ID NO: 10699 - DNA, 741 bp, Arabidopsis thaliana
ccagtgtgctttaaagatatcgaaaaagcgaaacgactgtatgcaccgacgcgccacgactatgagcgtattgaaccgattgctgaactgttctccgatctggatggcagcattgacgcccgtgaagatgattacgagcaaaaagccgccgacccaaaattcactggtttccaccgtctggaaaaagcattgtttggcgacaacaccaccaaagggatggatcagtacgctgagcagctttataccgatgtggtcgatttgcaaaaacgcatcagtgaactggctttcccaccttcaaaagtggtcggcggcgcacgagcgtgattgaggaagtggcagccagcaaaattagcggtgaagaagatcgctacagccacaccgatctgtgggatttccaggctaacgttgaaggctcgcagaaaattgtcgatttgctgcgtccacaactgcaaaaagccaacccggaactgctggcaaaagtcgatgccaactttaaaaaggtcgataccattctggcgaaataccgtactaaagacggttttgaaacctacgacaaattgaccgatgccgaccggaatgcactgaaaggaccgattactgcgctggcggaagatctggcgcaacttcgcggtgtgctgggactggattaagcgttatgcagtataaagatgaaaacggcgtgaatgaaccgtcacgccgacgtttactgaaagtgataggtgcactggcgctggcgggaag

SEQ ID NO: 10700 - DNA, 832 bp, Arabidopsis thaliana
aatctgaagagtagtttgcgcgctatggcgagtaaacggaacatacttttgtctcccttctgttgttccagagctgcgtcataaagggaggaaaaggatcaatacagaacatatatcacatacacataaacacagatatccatagatgcatgtagaaatatacctgagggacagaacagtgatgggttcttgtgtaagtaatggagaagtctctccatctgcaattctttgaatataaggatctaaatcagcatgtgaaacaataggcaccaaggaagtaaagagagtttccaaagtataatcgtccatcttttctacatcaacagtcccaagccatttcctcagatactccactccggagttgagctcaagaatccttcgtagcgtctcgctttggaccttgcaggcattttccgacacatgctcgaaccaaccaataacatcatcatgccccgcttctacagtttccatccaataccaagtctttcaaggcagtatagtatctcaacgatgcaaaatgagtagaagtcctaacccaacatataggggagtactggtcattgaccaccccctttgtcttcagacaaaagaaatttctttgtgtgtatagttgttctcaccttttttgggtctccttatttgtctttttaataggaaaaacatcacagatacctccataaatgtcacgggaattaccgtccacaaattctatcaacacttaatacagctattaatgcgttctcacagaagagtatccagtctcaacatgtgctcaagagacaaaccttaaccacaatgtattttgcaactatcatccagtgtggtccatgaa

SEQ ID NO: 10701 - DNA, 525 bp, Arabidopsis thaliana
catcgaacttatttggaaaacatttcgaagttactttggaaaaaatgtggttagaaaactcagaaaccctgtgttaagtcaatccaagtttgcaattacagaatcaacaacctcttgtgtagttgtattactgttcccacactttccttcagagataacacgtgtcacggcggttttaagccggtcggcaaataaaggaagcagaagatgtctcagcatcataaccgaagagaacagtaacgccacaggatttttatggtttcctactgatccaacttgctcaaagattgcatagtcatcaccaaaacttcctccagcaacaccagaagcaatgtttgcaattatagcccatagagatttggagttactatgacgtcgaatcgctctggtttctctactagctgcaaacagcagttattaataccgatttcgttgtaggtgatgtttggatacattttagcaacttcttgacaagactccaagaaaaacgcatcagctagtttttcgtatttcccattgttgtga

SEQ ID NO: 10702 - DNA, 700 bp, Arabidopsis thaliana
ttctcaacaagcccttcacctaccatatcaactgctatcttcacggcgcctttacccgttcgcttacccgctctgcattgcagcatccacaatctctcttcttgtactgtgaattcaatatcctgcaatacacatttgagattttgtttaaattactaaagaattgttgatgaggactaattgaagtattgtttatgtgtatcaaccatcatgtctttgtaatgtctttctaagatgttgcagttctcaacaagttcagcgtaagcctcaggcataaatctcttcattgtatccaaatcttctggtgttcttatccctgcaaccacatcctctccctgtcccaaaaccaatatttaatgagtatgggcttacttgttgatatgagattcacacattgtgatagatgccaaacctgagcattaactagaaactcgccataaagcttcttctctcctgtgctagggttcctagtgaagagaacaccagtccctgaagtgtcccccatgtttccaaacaccatacactgaatgttaacgcggttcctttcaatccagttatctggttaatacttctgtacttgttcgctctcgggctatcccaagaatcgaataccgcttcaatcgctagctccaattgcttctttggatctgcaattaacccgtttaaacatttgtaactaataactaatttttatcacttg

SEQ ID NO: 10703 - DNA, 467 bp, Arabidopsis thaliana columbia
aaggattgaaaacaaaactaaagagtacttaattatacaaattgtttataactaagcctcgtggttcctcaagcaaatcgtcaaactttaatgctttctagaacaacacttcctgaccctctagtgacatgttattgatgatcatatcgtggctttgctcatcaaagagccatttctcgatcaaagaaagagagccttgtgtaattagaccattaatgtcatggtctattagtttaggcttctcttcagcttcatctatggagttgaagctgatcaaagaatggtcaatcccttctccgtctccttcggttgtgctagggctcgaagctgccgtggtgatagccatctaggtggctgcaaccggcaagggcatcgaggtctttggtgtgtctttcataaaattctgaagcaaacgagcaatgttctcagcacttgaagcatagaccctagatgggtatggattagtg

SEQ ID NO: 10704 - DNA, 596 bp, Arabidopsis thaliana columbia
cagctactatttgagcttaagaacagattggctgagtttggatttgtatgtgtttactctctcaggagatgtgctttctggtaatgaaaatggtggtcctgaacatattggagttttgcaagaatggtttggttcttactggtggaacacgagaatcttcgctttgttatttgtctacggctttgtcttgcttccattggtcctgcgtagacgagtcggtaagtttctctctataatcttgtgttctcaaaattatggatatctatgagattgttgatgattttctttttgttaatggttatgtagaaagactggcaattagttccgctgtatcgtttcttcttgcggttctatttgttgtcataagctcggtgctggcgatttcgcgctggtgaatggacaaacgaagaatccaagactgtttccggagttgagcaatggaggatcgttctggcaactcttcacagcttcccctgttatagttacagccttcacgtttcacttcaatggtaagacccatctctttcacatattggtaactgtttctctgttttctctgtttttcatgttctgagtttggtgttgtgatccaaatg

SEQ ID NO: 10705 - DNA, 518 bp, Arabidopsis thaliana columbia
tcgaggacctggtgttcagactcctgttatcgttcgtttctcaactgtcatccatgagcgtggcagtcccgagactctcagagatccccgtggttttgctgttaagttttacaccagagaggttagctttttgtcttatccttccattgtctctctattttctataaccgatatcgatgtgtttgctgatattcaaacgtttatttgcttatctatttcgtttcaccacctatatgattacttgcaaatcatatcatactatactgatgattcctcttaccctctgtttgcaaactcaggggaactttgatcttgttgggaacaacttccctgtattcttcgtccgtgatggaatgaaattccctgacatggtccatgcattgaaaccgaatcccaagtctcacattcaggagaactggaggatactggacttcttctcccaccacctcagagagtttgcacatgttttcatttctctttgatgatctcggtacccacaggactacaggcacatggaa

SEQ ID NO: 10706 - DNA, 1220 bp, Arabidopsis thaliana
gattaccagctctctctcctcatgttttgccaaatacggaactactggtacttaacgcttgagttgtgtcgatctataattggtacgtacgcatttgtttattatttgggccgtaagaaaacacgtggtagtgggtgcgacgtgcaaaaacttaaaagtacttaccaaccattattactacgtacgtgagtgagacgctgtgctatcagtaaccacaccgatcccgtttatattctaagttttactgcaaatggtaatcaaacaaattatttgttctttcatgagaagtggcggtaaattctattatattcattctagaggaatgagtaaacttaagcaaaatacccatgcattaatgcatatcgaatgttcaggggttttttgcacaatatatatacttagtcctgctgcaatttctttaatcatttatataaatctatcatttttcgcatcttgttttttaatttaccggccatggataagtttttagtcatgtatatatagtagcacattgaatatgcatgtaaaggcataaacttttagaacattaagccatgatgtctctatctacaactctcaaaccgctttctcatttttcaccttttgttaaaagacataaccccaaaactaacaataccttgttcacacttgacacacataactttacaaactctttttggtccaaacgaggaggatctgtgtctcacaggaaacacacggtcgtggctgtttatgaggcaccggatcatgtcgagagctcatggagaagactcttgtcggaggttgtggtggtgagaacgaagaggtcattttgggaaaggagttggacttcttgggacgtgagcaagttagtaatattcgtcgggactcatttgttgagcctcttggctccattttacttcagttgggaggctttttgggttttcccttggctcgttttcatcaatggaatccgcattacctggtcttagcatcggaacctttctcagcgaagtgttgatctgccgaaatggctcgaatatccatctgcctaaggtggcgttctgtctgttcatgtatacatatctacgtatatatacacactgtttgatatgagcattagattaagaatatatctattacgtatgtttaatcgcgacttccagattgtctgtgcgcgcatggatacccagtagagtgtggtgagcagtcatcggtatcatggtatgcaatgtgagaca

SEQ ID NO: 10707 - DNA, 451 bp, Arabidopsis thaliana columbia
gaaacccagcttccaaattctcatcaagcaacacattactggatttcatgtctctgtggatgatatgcggactgcagttgtggtgaaggaaagcaagccctctagctgatcctatcgcaatcttccgccgtgtggaccagtttagtttcaccccagctttcttggggtcgtgcaaaacatcttctaaacttccatacttcataaactcatacacaagaagccgctcgtctccaactttgcaataaccaagaagaggcacaagatttcgatgtttgatcttcccaatggtttccatctccgccatgaactctctatcaccttgaccgctaacatgaatcagtttcttgatagccaccgcgcttccatctttcaaaatcgctttgtaaacatctccaaacccaccagaaccaatcagactatcattatggaaaccattggtagcctgaagaag

SEQ ID NO: 10708 - DNA, 561 bp, Arabidopsis thaliana columbia
aaatgaaaatgctatcatgcaaacaagaattgtcttctagggtgaggttcatgttgatcaatgccatcgatctgagaaagaacaaatggcaggagagaatgaaggtcgaagggccgaaaaaaattgaggaagtgcacagagatgctgcacaagaacgccaaactcaagcgaataggctttcacgtggaccctcaatgaattcgtcaggaagaagggggcatatggagtttagtagtcctaggggaggaggaggaatgctatcacctccagctgcccaaatgggtagttaccatggaccacctcaaggtcgtggctttagtaatcaggacattcgatttgatgacaggccatcttatgagcctaggatggttccaatgccgcaaaggtcagtatgtgaggagcctattaccttgggtccgcaaggtggtcttggtcagggaatgtctattagaaggcctgcagtagcatcaaacacttatcagtctgatgctactcaggccggtggtggagattctaggcgaccggcggtggtttgaatggttttggctcacatagacctgc

SEQ ID NO: 10709 - DNA, 601 bp, Arabidopsis thaliana
gaatcggttgatgcatctctacatttgattattgttttctctctcaaaatcactgatttgtttgtttttgctgcaacacagctggaagatgatgatgaagttgctgattttgtgaatcctaacacaaagaaggaaacattggcacttggtgattcgaatatgaggaatctgaaatgtggagatgtgattcagcttgagaggaaaggctatttcagatgtgatgtgccttttgtcaaatcttcaaagcccattgtcttattctccattccagatggaagagccgctaagtgatcaatgaactatttttgagtttcccattttatgaacattgtgttgagaaatttgctctttaggttttaaaacaatgaaaacaaagctttttatcagttctttagtttcatctcataatagttttaaagttgcaaactttatattgattcattcttctttgcgtagtgtttacgatataaacaaaaacagactcatttcttgggtgcgtatctcagtttgatcttcttaacctgtttgtgtttgagctggaatgacttggccagaatgtcatcgggaagagctccaaagagagaggcgacaagtgattgtg

SEQ ID NO: 10710 - DNA, 564 bp, Arabidopsis thaliana columbia
gctctcgtcaaactagatggtagaatgtgcttacgtagagaaaagcaaagttctccatttcttttaggaatcactcttttctcctctctttttaggtcgagctggctgaaaagcttcctcatgtgcaatccctctgtgttcatgaaatgattgttcgggcgtacaagcatatactgcaggctgttgtagcagctgttgaaaacaccgctgatgtggccacctcaatagcaacatgcttaaatgtcctattggggacaccgtctgacactgagagtgtatacgatgaaaagattaagtggacctgggtggaaacgttcatttccaagaggtttgggtgggattggaagcatgaaggctgccaggaactgagaaaattttccattcttagaggactgtcacacaaggtttgcaactgtcagtgaaatttgttttcaataatgactatctaacctgagattctcatatgttgcattactcatcggttcaggttggactggagcttgtcctaaagactatgagatggacacgtcttatccttttaagaagtttgatattatcagtatg

SEQ ID NO: 10711 - DNA, 453 bp, Arabidopsis thaliana
acacttgcaaggactcaacacaaataacaccagaagacttctacttcaaaggcttagccaacattgccgccacaaacacctctaccggctcagtcgtgaccggagccaacgtagaaaagctaccgggactcaacactctcggcctctccatgtcccgcatcgactacgccccaaacggcctaaacccaccccatgtccacccacgtgcctccgagatcattttcgtccttgaaggtcagctctatgttggctttgtaacaaccgctggaaaactcatcgccaagaaccttaacaagggagacgttttcaccttccccaagggactcatccatttccagaagaacattgccaacagtccagcatctgtactcgcagccttcgatagccaattgcccggaacacaatcacttgtcgcctctctctttggagctcttcccgatgaccatctggcca

SEQ ID NO: 10712 - DNA, 559 bp, Arabidopsis thaliana columbia
  unsure (1)..(559): unsure at all n locations
ctctagccgccagtgtgctctaaagatccgtttgaggtgcaaacctgccgagcgcctcgtttaacctgattcagcaggttgggcgactgattcgaagccacggttgctggggcgaagtggttatctacgacaaacgcttgctgaccaaaaattatggcaagcgactactggatgcattaccggtatttccgatagagcaaccggaagtccctgaaggtatagttaaaaagaaagaaaaaacgaaatccccacgccgtcggggcgnttaatgatgtgagtcaggtaaggagtcgtaaatggactatcgcaaaatcattaaagagatcgggcgcgggaaaaaccacgcgcgcgatttagaccgggatactgcgcgcggtctgtatgctcatatgctcaatggtgaagtccctgaccttgagttgggcggcgtattgattgcgctgcgtatcaaaggagaaggggaagcagagatgctcggcttttacgaagccatgcaaaatcacaccatcaagctgacgccgccagcaggcaagccgatgccgattgtcaccccagttac

SEQ ID NO: 10713 - DNA, 613 bp, Arabidopsis thaliana columbia
ctccaggtgagagaaatagtcaaacgggtgcggctcaagctccgtgaaggaattaaccaaaatacccttcgcatctgcgaatctcggcgctagtctacgtaagcctcgtaagcttccttattgaacaatccaggcggcataaatttcgtcggaatagcgtttatgaatcccggaaccggcaattcttcatcgccggagctcaaatcgaactcagatgcgattttccgatgccgatccggaatatatttcatcatccccaagtatctagcgttacacgtaaggtatatgtaagaaggaagattaagctcgttgccaacatcttttaccaatgaattgcagaataaatcgagaaccaaaccggcgacttgaaccgaatctgagcctccacgacgcgacgcgacgatgctggagacggcgtcttttatcagaggagtatttttgttgatgagttttactatgtaagcttcgggagctctttggtaaagatcgaatggaggaggatcttggatagggggaaggtcgtggagacggattttgggctgggtagcgatgagagatctggcgaagacggaggcgtgaggagaagagggtgaggataagttgagaatagtga

SEQ ID NO: 10714 - DNA, 568 bp, Arabidopsis thaliana columbia
agtaacgcccgccagtgtgctctaaagctaccgtggcggcaactggatttatgagtgggccacccaggcgatggtgtggcaacaaaaagcctgtgcggaagacgatccgcaactcagtggtcgtcactggctgcatgcggctacgttgtacaacattgccgcctatcctcatctgaaaggagatgacctggccgagcaagcgcaggctttgtcaaaccgcgcctatgaagaggccgctcagcgtctaccgggcacgatgcggcagatggagtttaccgtacccggcggtgcgccatcaccggctttttgcatatgccgaaacggatggcccgttcccgacggtattaatgtgtggtggtctggatgcgatgcagacggactattacagcctgtatgaacgttattttgcgccgcgcggcattgcgatgctgactattgatatgccgtcggtgggcttttcttcaaaatggaagctccccaggactccagcctgttgcatcagcacgtcttaaaggcgctgcctaacgtaccgtgggtggatcaactcgcgtcgcggctttggtttcgt

SEQ ID NO: 10715 - DNA, 504 bp, Arabidopsis thaliana columbia
atgttttacgcattaatacaatagtcacatagttatttcacatacaaacctcttaaatcgtattggttccacgaaactagcagaaggctttattgactattgaagatctgaaggtttatgaatcaaatcaggacaatatgagtcgaagaatctcccctgaagacttaaacgatttctcagtctcttccaagcaatgactctattcttctcttgtccaccactgcccattcaaaatccacattagccattagaatattcttctttgttcaatagagtagtgtaaagttcaatacctctgcaactttgttcagtttttgcctcacattttgcaacaactgagacagttgaccgtcccatttatagaactcgagttctttattatctagtatcttcttagatacctgcataactgatcgtaaactttcagaaaatattccaacttcgattccaaatgaatatagtacctaaagttgttttctttacctttgttccaatcatctggcc

SEQ ID NO: 10716 - DNA, 594 bp, Arabidopsis thaliana columbia
tcatagagttcactgagtaggaaaggtggctcggaatctgtgtcagaaataactggtccatcttcatttttgactttgggaagctcaatttctccaagttccaactttccatcaagaacattctggatgctatcaatttttagcttacatcgttcaagctttttgcgcattctgtatggaccttcaatcggacagagctgccattcaggatcttcagtccctttggattttcgcattgggaatatcccacgctcatgtacaagctgctggagatgagtttgccactcactctcagcatgaagtatccaaccatatttgttttgccgaactactctaagctcagtagacatggcatcacgcaatacttctagcgcatatcttcgttcattcaactgatcccaatgttttaggtctaactttgacatatctcgtgattttctcccatctctctcttccgacgaccttccatgccttttatcctacaccgggaaattttgctgaccagctatgtactgtaccacataattgcagcacattgctccagtactttgttaataatcttatagagcttcaagcacttaaagaatctggtag

SEQ ID NO: 10717 - DNA, 606 bp, Arabidopsis thaliana columbia
tctccatggaaacttatactaagattgtttttttccctcatatttaagccactaaagtcaaaagattagtacattgacaactaagtttagatgctctatgcggagaatcaatttcatatgaatgtatcaagcaattcatgaactctaggagaccataaaatccaattgacagaaaaaatgagtcaactaacatatttacctgtgatatgaggtacatgtgcaggtcaaagatcagaagaaaattttctccatgagtctcttgagcttccaactcatccagcgatttgtatcacaaacaatctgaaaaagaagctaaaaaacgttataccaaagtttcacgcccataatgctattgtttggttctttcaagaacctccccaatcttttgaattcgcattcaaaaaaaccatcagtgagtccatttcaagtcggaactggcaggtattattcattatgacaaagtacatacacttgccccccactgaacaatgtcaagaagggaaacccgacattgtgttggaatagctaaagtccatctcgtctcgtgatacatgaaggttatcaatatcaacttgtagcaactgtaatttacttctaatatctgat

SEQ ID NO: 10718 - DNA, 574 bp, Arabidopsis thaliana columbia
  unsure (1)..(574): unsure at all n locations
nnnnnnnnnnnnnnnnnnnnnnctaaaggcatatcgcgcggataaattttcaatgcggataaccgcgtccgactctcttcaatctgctgcgcgctcaatgttaccgggctgtggttaatcactctggacttaacgctgccgtcttccagaagcacgtcaacttcaagcaacccgttgatatcataactaaagcgaatatcaatcgactgataagccccggttttcttcaacggcacatcgaaggattccaccagaatgttgtttttaactttgtggttttctccctgatagacgttaaccgtaattgaatcctgttccgggtgcatggttgaataagtttctacacgcgacacgggcacagtggtgtttcgttcaataatcggcgagaaaatgccggaaacgccctggcggttaacttcaacgcccaacgagtaagggcaaatatcagtgaggattacctcttcaatatcttcactgcgtaacgggcaggcggcctggattgctgcgcccaccggacaatggtgctcggatcgtaactttgatacggtaatttgccaaacagacgcacggcgat

SEQ ID NO: 10719 - DNA, 636 bp, Arabidopsis thaliana
ttcttcaggttgcgaaggcatccctgtctgcgagcttcaacctctgcttatgatcgtacgtggcaataaggtcgttcgccaaagcagcggtctggagaaataatatttttgttagaacgtagtacagagtaaaagtagaacgccagtggaatcggcacatacctctaatgacgatctgacaaacttcttgtactcgtctctcaggatcaattcatcagggttggggaattctctcaccctgggaagcatcagattgcgcaggacatggctggcagcttcgcgatctcgtacgaggaatttgtcgccagtatacttgaatgtaaactattcagggttaagagcttcgcccctataaatacagaaagtctttgacgcgggggcttcatcatttagtccggcttcagaagctgatctcttcttggactgattgtccactcctttccctttttcctcgcgggatcttctcaaagtcccgatctcagcatcactgccatccttgtttgaatcaaggttggtcaggtcgacatcgaccttctcgcctcccaaagtggcagtctgaacttcagcaggctgttcgcttgtgacaacttgaacctcaggcttgacggcctgagcatgaataggttgatttagatc

SEQ ID NO: 10720 - DNA, 622 bp, Arabidopsis thaliana columbia
tatacctttgacgaagagaggtttcttggcgagcgtacgtaagacggcggagtcgccgaagttcatagagaaagcattgttttggtgatgagagaggaagtcggagagagtttcgccgggaagtttaggagttttgccggagaaatgagaagccggactgttgagttcttccggtgggtgagcaaaagctttctgaaatattgccaacattttcgttttctttgtctttgattaatccaatgcttgaaatgtgttatgtttttgttgaagacaatgaggggttttataaaggtacgagattattattacacgagatgctgacttggattttaagataagactgacatgtcttacgtgttcttatccgtttctttttagacaaaattattctgtagttaatctttttttttaaagtgtctggtaggtaaataaacaaattgtgaatccaatgatgattagatatttaatctgacgagtaaatctttttggaatgatatgattttttaaacgtgccacgatagaaaagtagtatgttttttttttgtcatgttggaaaagtggtaggatattttttgacagcgaaatagttaagtgaaatatgattttgaatatatgagatatt

SEQ ID NO: 10721 - DNA, 612 bp, Arabidopsis thaliana columbia
tagtaacggtcatagggtcaaaggccaaacggtttccgaatcctaagaaatggacgactctgtttttgagtagaagaggaagaatgtgcttcatataaaacccgggcttggcttctttcatgacatctatatccgtaaccttaaaaaacgacataaaagagaactacattagaaaaaatacgaagatgaaatcggtttttcacactaaaagcggtgtaaggaacttacgacgctgccaatagcctcaagatctagagactgaagctctttgggtagtttctttacaatccggatatcaggagaaagatactttataaagtgttccacctgatagatatctccaaactgactatgaaacatatatataccattcaagagtgttaaaatttgacgttttcaagaaagcatcaattataagagaaggagacagagaacggagggaccttacaatagttaccttgcatcggtccagacatcgctgaacataaatttaggaataacgagtgtcgcatttagcatccgcgcaacaacaacgatgttcaaacgtgttttaataatgccccgcgaaatcaacggttagcaatataaagagtgggacatgcaaagtatgtg

SEQ ID NO: 10722 - DNA, 490 bp, Arabidopsis thaliana
cttcatcttctgaagcttcttcagctccaccttgagcttctcctgctcagcgtctctggtctctagctcctcctccttctttctcagaatctcatccttctccttaagtaactcctccgtcttatccttctcgatcttcatcttctccaacattgtctgcatctccatcagatcttgctcgaaagacttcgctgacttccccttgacggagacaggcgatggtggcgtctccacgagctcattcttctgcttcaacgcctttctactgttccttggtttcttcgtcggagctggatctgcgttggtcgccatttctaaagtcgaaaatgagagagagtgagatttcgaaatttagggattgagaattttaggtggagcctccgtaaaatatcttcggggttatatagaaagaaacacaacggtctgataaattcgaaattcaaaaaaatatttcgtggatttgatacttctttggcggtcgaggatatat

SEQ ID NO: 10723 - DNA, 556 bp, Arabidopsis thaliana
tcttggacgtaaaggtctgagtttttccgagaggacaaaatgaccacggttttgaatatccgcccataaagtaacctccattcaagagcagtacgttccacaggtccgttacagaacattataagcactacattcccaaaattcttcctccacttaatcaagttcccaatttcagaactcactgtgcctatctcctcgaccccaagatgaaccgaagcaatttcctaggaacaaactcttttctatctccatgaccaatggttgctcgtgggcggtccaactcaagtgacattaaccgaggctgctggtatccgaccataagcaaatcctggagccaagcagctgtgaatttcacatctagctcagtccaaaacccttgttcagccataacaaagctcaaatcaagaatcgtctcgaagaacctatgcttatttgatctccaagcaagcaagaatttgatcaaacgaccgacattgatatggagatctttctcatcagagaaagggtaagcttcgactctatcataccggtgaacagttggtggataacagcacat

SEQ ID NO: 10724 - DNA, 562 bp, Arabidopsis thaliana columbia
cacccacatttgaaatacatatcgatcaaagcattccccacaacaacatcgttcttgatcttgtttttgtctatgtatgtcttaatccattcacctatctccaaggaacccagatgagcacaagctgtgagaacactaaccatggtgaattcatcgggtatcatacctgcactttgcatctctcggaatatttccagagattcattgaagcaaccagctcgtaggtaaccgtcaatcataatagtccacgaaattctgtctctcactggcatctgatcaaaatatgtccttgccaacttcagattccctctctcaacataccctttcacgatagatgtccaagaaatcacatccctagctttcatactcctgaaaatcctcaccgctatatccatttccccgcacgcagcatatgcattgaccagagcattttccaatctcaaactgggttcagtcttacactcactaacatactcatgaacccttttacagagatccttatctttcaccttagaacaagccgagagaacaagaagtaaggtacagaagttggagaaccaag

SEQ ID NO: 10725 - DNA, 527 bp, Arabidopsis thaliana columbia
taatttctgcatcaaaccaccaacttcatatgctttgtcttgtgatcaagttatttcgtttgttacaatggcttctttcttttgtgtttttggcttcatcaatcaggtgaaaacaacatctccaaagaagtattttgtaagacctaacactggtgtcattcagccatgggactcttgcatcattagaggtatagtaattcctcatactctaacttctttcattagcagtttaaaacttgaacatggagatgattaagatcttcttaattatagttactctacaagcgcaacgagagtatcctccagatatgcagtgcaaagacaaatttctcctgcaaagtaccattgtacctccacacactgatgtggatgaacttcctcaagacactgtaagaaatccaagtttaaaactttttttattaagattcttcttgtttctgcagtttttggaaaacaaattgacattatatatgcaatacttgtgtgtctagttcccaaggacagtggaaagacattaccagaatgta

SEQ ID NO: 10726 - DNA, 710 bp, Arabidopsis thaliana
ccacttgttctccaacttcgcagagatatcataaagatcatatggaagattgctcaatgctttctcaagcttccatgtaacacattggaactgaaatgagattctcttcgcagcaccatcctttaatcaacaaaattcaaaatctttcagctaaatcggagataaccgtattgtaaccaatggtctaattacatttaaccggtaattctaatgaatctgggaattttcatgagattgaagaacaacaaatcgtgatttgattttttttaaggagttagttagatttttttgcttacagaggaatcgcgagcttggaatcgagctgtggagagaagacgcttcgcggcttgaagtccgaccacgagatcagaccaccaatcattctccgacgacgacgaagcggcggaatcgataggagttgagtctctaatctcctctaacaaatgcgttaagagacaaactcgtcgagtgagatctgcgcaatccttcttgaacattccggtgttgagtggaatctcgacgatatcagcgattaggtcgagtagagaggccggtgagacgattcctccggccattacgccgtcgccgatcaacctccgtcgatcggaaaaattgaaagaataattgaaaaggaaagaataaatgagctttgggattggttctttactcagaagcgactaacgttgcttttatttttcacgcgaccattt

SEQ ID NO: 10727 - DNA, 544 bp, Arabidopsis thaliana
gagtttggcttcttctacatagagatctgagttcttctgagaagaaagtatcacaacagttttgaatatccggccataaagtaacctccactcgagtgcggtacgttcaacgggaccgttacaaaacataaccagcacaacattcccaaaattcttcctccacctaatcaagttccctatttcagtgctcactgtgccagtctcctcaaccccgagatgaaccgaagtaacttccttggaacaaactcttttctatctccatgaccgatacttgctcgcgggcgatccaattccagcgacatcaatctcggttgttggtaccaacagcaatcaaatcctgaagccaagcagctgtgaatttcaaatcctgttctgtccaaaacccttcttcagccatagcaaagctcaaatcaaggaccgtctcaaagaaactatgcttctctgatctccaagcaagtaagaacttgatcaaacgaccaacattaacatgaagatccttctcctctacaaaagggtaacctcgattctataaactggtgagctg

SEQ ID NO: 10728 - DNA, 963 bp, Arabidopsis thaliana
ggaacatcttttgtatggtttaaaacctgttcttcctctactcattagctttgaagcatctaatccgattccaagaaatcctgtgtttctcttctcctcttgatcatcaactggtgttaactgagctgtgaagttaagatcaagtgccattggatatctttgttcttgttgttgttgttcttcctctctgtgttcttctcgatatgtaaaactttgcggcaatacctctctggagaagagagcttggaaggcaattcgaccctgaatgtacaatatttatatgagaaaatgatttgaaataaaggaagttgatctttagtccaagtaagtacctcgtcagacacagacttccatggatcggttatattggagctgattctactgcggcgtgcattggactctgaagtttgaggtttattagtgtcttcattcgtttctttcacctcaccattggtgccatcctcttgcctttctgatgcatccgcctcaacatcatcactactcgacggagtgtttgagccacacgaggaccggtcaacttgttttctgtctcctgctccatctgaaccctttgcatcactctcaggtgttgcagaaggctgctcatgacaaactggtttactcttattttcaacatcctctgagtccagtgaagatcgagcctttgatgcctcggagtgttcttgctctcggctctgcacagaaccatgttgtaaagtgcttgcttttgtgtactctacatcacatgatggtccaaaagtagatggaggatgactagtgaaaccacctgaactaagaggagcacataaaggtaataatccattggcagcgcaccaagcactagcagctgcaacagtggctgcggccatggcagccagattcggaggtgagttcctggaacaggtgagccacactagaatcgggaggcaaaatgatgaggcgaaagttgcggcagtataaaga

SEQ ID NO: 10729 - DNA, 1075 bp, Arabidopsis thaliana
ctagaggatccaggagctcgaatggtcatttctgtggaaacaagaacaacaattcccaagaaaatgttcatttttctttgcctcttatgttatctaatcaaaatatccaaaatttatttaaatcaacttcttaaaaaagttctattaagaaaataatataattttccttacccttgattttttgtttttgtttctttcttaagtatacaacaaacagcatcgagtgtgagctgatgatggacggtggagatgatctggagttgttctatgccgcatcgttttacggtgaagatagatcgccgagaaaggaagtatccgatgaatctttggtttggttaaccggtcccgacgagctccggtttagcaactacgagagggctaaagaagccggttttcacggggtacacacattggtctccatagccatcaacaatggcattatcgaacttggttcgtctgaatcaattatacaaaaccggaactttataaaccgagtcaagtccatattcgggtcgggtaaaacaacaaaacacactaaccaaaccggttcttaccctaaaccggcggtatcagatcattcgaaaagcggaaatcagcaattcgggtcggaaagaaaacggaggaggaaacttgagacgacaagggtagctgcggcgacgaaagagaaacatcatccggcggttttgtcccacgtggaagcggagaagcaacggagagagaagctaaaccaccggttttacgctctacgtgccatcgtaccaaaagtgtcacgaatggacaaagcgtcacttttatccgacgcagtttcgtacatagaaagtcttaaatccaaaatcgatgatctcgaaactgagatcaagaaaatgaagatgacggagacagataaattagacaacagcagcagcaatacgtctccgtcttccgttgagtccaagttaccagaaaccttcaaaacaaacagaggctctgacttggaagtgcaagtgaagatcgtcggagaagaagccataattagggttcagacagagaatgtgaccatcctacgcggcattgatgagtgcgtaatgaaatggat

SEQ ID NO: 10730 - DNA, 566 bp, Arabidopsis thaliana columbia
tcaagtcttggtctagactcactgtgttgcatatgtcatacttcgaaaaactcaaggaattctcgcatgttctagacatcataacgtggctagaattcggagaagatatacaagaagttgctccatggatcaaagaaatctctcgtctacatggacttagactctacaaatgcagaaagcttttatcactcccacagcttccagaatctctctctatcataaatgctgaaggttgtgagtccttggagacactagattgctcttacaacaatcccttgagtcttcttaattttgctaagtgcttcaaactgaatcaagaagcgagagacttcatcatccagataccgaccagtaatgatgcggtcttacccggtgcagaagtgcctgcatacttcactcaccgagctactactggagcttccttgaccatcaagttaaatgagaggcctatttctacatccatgagatttaaggcttgtatcgtactgattaagtgtgacaatgatgaagctggtgatgatgggagttcgttgatggtacatgttgacatcatggacaaacaaaat

SEQ ID NO: 10731 - DNA, 917 bp, Arabidopsis thaliana
tcctgtatcagttcttttgaaccttaccatcccaaaaccttctccttcggaatggtctaggttttatcgctctgccaacattgttttctgcccttttgcccttttatacacttgcaactcttttgtacaactaaaccacccaatttcattcctctttccaaacacccatctcccgctttggcttgttgtcctcttcatgacgtcttccctagcgttcctccacttcacagtagaataacaaccaccaaaaaccgagcaactgccggtcattgttgtagctttcataatgagtgttttctggatatcaacaattgctggtgagctccttaactgcttggctgcgcttggatacctctcttaaactgcctccgcgctccttggcctaaccgttcttgcttggggaaactcggttggtgacctagttgctgacgtggcagttgcaaaggcaggtagaccagcaatggctatggccggttgttttgcaggtccaatgtttaacatgcttgttggacttggatcggccttggtgatgcaaacagctaatgtatatccagacgcttacaaacttggattccatgtaggtattgtgatagctttcgtcttcttgttgcttagtctaatgggatctctgttggtaataacctggtctagattccgagttccgagattctgggggatctgtcttgttggactgtatgttgctttcacatttgttagtttgatcatcgccagcgtttcaacctgatcatatgcgtgaagtctgcacattgaataatctagggtcaaccagggttcattgtttaggaatttttgttgtctagaagggaattgccaaaattttgagctcagctgatggccaccgccagaccagtaatcttcgaatcccacaaaaagttcttgtgatcgtccgagccaga

SEQ ID NO: 10732 - DNA, 531 bp, Arabidopsis thaliana columbia
cacaaggggcgtgtgttagcttactgagacaaggtttaaaaatatgatgtttccctcaagtacgcccattgcttataagaaggttgatagcttcagccgctgtgtttccggacaagatcatattcaatttcagtgtcattaagcacttcaagtgtgtttgaattggctaacaatgtgcactagagcaaagcgaaaagaggagatatcttgtaatatgtccttaacaatttttagttttctaaatttattctcatacaataaaaacattattattagcttttcaaaacgtgaatttcacatggatagtttgacagtaaccggaaaataacaattattagcagtctgcaaaattgaacattcaaacagttaaaacacacacgaaacattagatatctactcaaaccgcatcaaaggcaaacgcccgttctcaaaggatcctagtacctgtatcctatcacaaccaagttctcgaaagcggccgagtcaccagaagcccagccggtgtatttccgagggtagcgtccttgttag

SEQ ID NO: 10733 - DNA, 582 bp, Arabidopsis thaliana columbia
catgccggcattattaatcagaacatgcaaaggggctagccgtgcattccacgcattgctaaatctgacgacggaatctaaagagagaaggtcaagttccattgccttgaggaaacaaaaaacatagtatcaatgttaacaattcggatgttgtgtaagatatcgtaaaacttattgtcttttatccaatcagttagagagggattactaatagcttatagttcttataagttataacatgcattttctctagaacgtgaatgcacatgaatcttaacgaaatgaaatcttttagttcttaactaagctattaattagttatcataatttcatgacctatacaactttatccatccgttcacaaatagtttcgttttgacactttccagaaaatttaacaagaggttgaaaatattttcttatagattcacgaacaaaacaaaagttctcttcatataattttttatttaatacttttgataaatttgatggattatttaaatattttttaccaaaaaaaaattgaaaacgccatgattatataaatattaacaaaaattttacctgaatattaagtgggag

SEQ ID NO: 10734 - DNA, 887 bp, Arabidopsis thaliana
taccggttggtaatagagtgaggacgcagccgccgccaccagctcctgtaagtttggagacaagcttgtgcttgaccgtggttagaatcacagcctcgattgagctgtggctaacccccattgacaggagcagaccttggttcatctccatgagttcttttattctctcttctttttctgtaactgaggtctcgtctttagactgaatgatcgcagcgagctctttgcttatagaatccacggcgttgaacactgacttcatcgcatcaggatgtcttaccgctctctgtgacacaccagagaccagagcttttgtgtttcgcccaactctagtgttggtaattagcattctcagaggcatgttggattgtaacagagttatctcgcctgagcagaacttgatcatgttgcctgcaaccaccacgaaacagaaacggttttctctaacatattattgaaactttgatccgagaatttggagtttacagttagaacaaaccgtatgcactgacggtgttgtctatcccagaaggtttcccatggatgatcttttcgccttcgaaagcccatttatttagcaactcaagattggtttcatcgagagatgaccaaccgttaccacgggttttctctgaaatagaagaagcaaggagagcagctgtgagagctacacataaagctgctgatgaaccgaggccagacccgtatggaagctcagagttaatgactactgtagccggattgaacctaaaaaacaagaaacgtgaaacacaacaagatgaagaactcggaaaaaatgtttgcaagaacatagaaatgtcaactatttagagttatgtaccctataattctggtgtataaccagagagaattcgagctcggtaccc

SEQ ID NO: 10735 - DNA, 600 bp, Arabidopsis thaliana columbia
caccgttcgtcgtcttcttgacgccgagatcaaacggtcaggatttatccatcatcatcatcacaccaagcaaccacgtctcactagaagatcaagccatacaacttgtggaacggcgataagtcacgccgttcataaagcttcaacggcgtttcttaaacttttgccgttcccttcttccaccgttaaaaaacaaggcgttttctctagaagcttctctaaacggcttttaagcataagcttctggagaaaacccgttgtaggtcaatctcgccgtgaagtaaccggagatggagacggagagatccaatggtggagatccgtcgcgtacgaagagagtttagatcaacaatccgatctgttttctcaaatctccaccaccgacgacaaaataacattttcaacctcagccgctgcgatcactgtcgtggaggagtttatctccggtgactcatcgagttacggtagcgagtttttcacaaactcatcatcggaggttgtacagtcttcttcctcatcgttctcttcttcgtcgagtggtgaatcggaggaagtctccacgagatcgcgccgtggaaacgggaaggagacggagatagt

SEQ ID NO: 10736 - DNA, 552 bp, Arabidopsis thaliana columbia
  unsure (1)..(552): unsure at all n locations
cgttctgagagttttagagctccgaagattgaggttacgggttcgggtttgagtgagggttacgatgctaggttgagtttgaagggaagaaatggtggtggggttctggtgttggagcttagcttggaggttttggctgcgaattctgatgtgttctcgggtttgattgcggaggagaagaagtgttcttcttcttcatcgtctttaggattgaagaacacatgcaggattgaagtatgtgatgtggagaatcttggtgtttttagggaaactgttgagctcatgtttgaggaaagtaatgttattatcaagaagtttatgacaatgggagtctacagagccattgatgtacttgaggtttggaaattttcttccttgttattgaattgatatgggtattgattgccttgatgtgtttgttgttattaccatatatgctgatcttagctaagattttacctttttgcttattaggctaaaacccttgaggattagatggatagatatgganagaccaacaatttgacataactcatgtatttggaaatagga

SEQ ID NO: 10737 - DNA, 473 bp, Arabidopsis thaliana columbia
cagcatcctctcttgagagatgagtagcagaatactcaattcttctttcctcgaaataggcctctttctcttctggtggataatctaactcctcagaccatcttgaagtaaacttttttctcgggatagtatcaatcccgcattttgattgagctttctcttgcatctgatccagtttactcttaagttcctcaactgtctgagctagcttctctatggtttcttcttgctcatcagatttctttttgagatctcacaagtcaggtgtagaggttgtgcttggtctggtgattgaattcgaaggttgaggttgagccctgatcttttctcttacagctgtcctttgcgaagtttcgttgatatcaaactgtagcttgatgtgctcccaaggttaagacttattctcccgtctttgacatctatcattgccccactgacgctaagaaaggtcccctaggattagaggatcttag

SEQ ID NO: 10738 - DNA, 587 bp, Arabidopsis thaliana columbia
ggattgatgtagatgcaacatttacatgcatttcactctctctatttgaccctatattattcttcttgaatttgcaaaagcttatttccaaacaaatattttagttaaaatggtgatcaaatccctccatgtacaagttgaagagatgagacaatctttctttgacgaggttagtatatttcaaactaatgcacataaaattaagcgtatagaggatgatttacacatatcaatccggttgatttatactttgaattacctgtttttataaaaacatgtaattttctaaggaatctcgtttaatctttcaaagtaaataatgacgcaggggtaccttgatcgtcagtatactcagcttgaggctctggcgaaagacacgaaccctaactttattgtagagataataactctttattttagggattcccctaatgtgattgcttctttggaacatgaattgtgagtgcctatctctcgtcatatgaaattttgatccatggaaatatggaatgcatcaacattgaacttatataatgtaatgcggcatagttcgaatgaaaaccaagatttagttgaaagtagatgca

SEQ ID NO: 10739 - DNA, 532 bp, Arabidopsis thaliana columbia
aggatccccctctgcatcttccaccattccagctttaaacagccccttaagcaaagtattaaacgtaataagactcggttcgatatgatccgctttcatacgttctctcactttaaaactcttttccggattcccagctttgcaatatccatcaatcaacgtgttatacgttatcaaagaaggtaacaatcttcttgcaagcatttcgtcgaacaactgttctgcatcattcatccttttccctttacacaatccatcaataaggacattgtagataaacacactgggatagattctatcgtgcttcatccggttaaacagctctaaacctttacctacatcgctcaatttcacagcagcttgaattgctttcccatacatgaacttactcggacgaaaatcagattcgagaatgttcaaaaacacgtttatagtcactctgaattgtttcgtcttcacaagatgatcaagcaaaagcgttaacgaatctgagctgggataaataccttcattcctcaaagcgaaaaacaaa

SEQ ID NO: 10740 - DNA, 1192 bp, Arabidopsis thaliana
aaccaaattataagcccaaatccatgattcaataagcccaaattacaaacttaatatttttaacatgattcaaaataggcccactgtatctgttaattttgtaaaattagagacggttttgcatttgtgaaaggaaacaaaaaaagagaggttgtgcatgttgttcaaactcttaattagtcattatgattcattagtcattgcttgaccacaacacttaattcacatagaatacatcacttatacttaattagcctttttgcattgactgattattttttgatgcaaatatatttctgttcctcatatgaatcccattgctttatctacaaattcatgcaccatttctctgtgcttttgaattgtgaaaggatcttctttgaatttgaataacaatctaaggtttagtcatttgttgccaaaacaaagatctaggatactcaattttaaaaggaatttaaacaatggtcaaaactgtgaacaaaaagattatggagttttaattttgtatttacgttgactgttgtcagagataaatatgaaacataaactttttattaaaaagaagttattcaactctctcctttagagttttaataacagtcgccggggaaaacatggcaaggtcttcgccggcaaatattccggccactactatagatgattatgctcacagtcccgtccactacgccgtcgttgtaggagatcacgccggtttgactcgtctggtttcgtctttgcctaaactaaccgacccggaacaaatccacaccgagtccgactcaatgagccaagagcgagtcgcggagaaaatctccaccgtcatcgaccgccgtgacgttccctttggagagacgcctctccatttagccgtacgtctcggcgacgttttcgcggcaaagactatatcttccgccggtgctgatatcacgctccaaaacgccgccgggtggaactccttgcatgaggctttgtgtcgtcggaactcagagatcacggaggcaattctccgggaccatcaccgttcggcgtggtgcaaatggagacggagacttcctcatctcatcgccgtactcagccgcatgagagatttctacatggagatatcatttcacttcgagagctccgtgattccattcgtcggaaaaatcgctccttccgatacttacaagatatggaaacgcggtggaga

SEQ ID NO: 10741 - DNA, 599 bp, Arabidopsis thaliana
aaaagggtgttcatcggattcaagcatccgcacaacctggctcattttaggccgtttctgtgcttcaggatccacacatctcagggcaacaagaagtgcacgtttcagagcacgtgtagcgggtggaggctcaatccttgagtcaacaacttcttcagctcttcttgttccaaccatcatctttagccattcgaccagattcacctgccaacaagaacacatgttttaacaccaagttaacattttcataactcctggatacattgacaaagcagacatattttaggctacctcattagctggacgttcatagtcaactggatctcttccagttatagtctctagcagcaggacaccaaagctatagatgtcactcttctcattcaatagacctgtattagcatattcgggtgcgacatatctgatgcatatacacatgaccgttaataatatgtatacaaaaacccatcatcaccaaagagggtacaaattttagacttacccaaaggttcccatgactctggtcgtgatgtgactctcacccgagtctaagagcttggccaacccaaaatcagaaagtttgcattgaagtcatcgtc

SEQ ID NO: 10742 - DNA, 601 bp, Arabidopsis thaliana columbia
cagtagaaaacagtttttgagcttaacagaaaatgaaaaacatcctaaaaacacaagttcatgtggtggtaatatatctactcatcaaaatagctttctcacaagtgaaaaccgattttgatgttaattggtctacttcaaaaatggtgaggatcacaaaccgccttggtgatggtttgaccttaaaccttcattgtaagtccgcagatgacgatcttggcctcaaaatcctcgctccgaatggttcttggtcgtttaagtttagaacaagtattgttggaacgacacttttctattgtcatttcacatggcctggacaatcaaaaaggtttgacatttacgatgatgacagagatggtgttcgtagtcatatttcatgcatcaattgtatctgggatataagcatacaagggccatgcatgtttagtgaaagtgatcatgcatttaatatatgttatgattggaatgggaatctaaggacataaatttgttgtgttccaagaataaaattttagactgcttttatatggcttttaatgttttatatattatcacaaagagagaaacattgtatggtataatggtaatgtgcacattagag

SEQ ID NO: 10743 - DNA, 592 bp, Arabidopsis thaliana columbia
caagaaaagtctttgtcatttgttctccatttgtttgtcaaacgcacgttcttgagcctttcggcctgcaatctttccactattctcttttaaattattttcactattatgatattgtgcaaaatatttgtcgaaaactcgatacttgtatacaatttataagacatgatcaactctcgtttaaagatcaccaggcacgacattactctccactcatcaagtattcttctcgcctcatacacctgaggtcatctctatctccttcagttcacaatggttgaaatgttggaagcgataggcataccgggaggcgataagtgggatgatggatccgaacatgatggaatttataagattcatgtacgtggtggtcataccggtatccacagagccgtgcctatgggtaataaaaaaggcatttgcctcatgttttcaaaatctaaaacttttttaaggccccaagatgctgtaacataatggttttgaaagacactgttttccattcatataattttattattatttctcttaaaagtgactaatctatttttaatggttttatttatcactttatttattttaacacagttgg

SEQ ID NO: 10744 - DNA, 1683 bp, Arabidopsis thaliana
cacagtcacactcacacctagttttcattaaccacatatcttttttacttttaagtattacaaaattctgcaaacggcaagttgaatttaaattggttttttatattacatatatattggaaatttatctacatcgtctttttttttcctaacttttatttaaaataaaattcaaaagctgttacaaaactaaaaaggtgatattgtttagaattagaacgtgcattaccattatgcaaaaggatattgtttgctttgagcattgcatagaataaaattttaaataaaccttttttgcgcaattgctctacttgttttgcagccttatacttttcctccaaattcattttcctataaagagagaatcctttaaaaacttgtagctcaatgagagacaaaagtagcttcttcataattacattctttacttcaacttataaacaagcttcttgattagtttaatcagaataaatacctttcttccacaattaggtttctctcctcaagattctttcccttttaaatctcccttgcactccaagaaaccaagaaaaccccacaatgagaaacaccaccaaactagtcgtgcacgtggttgatgctcaatatcttatgcccagagatggccaaggatcagcaagtccttttgtagaagttgatttccttaaccagttaagcaaaacaagaaccgtacctaaaagccttaaccctgtttggaaccaaaaactctactttgattatgaccagagtgtgataaaccagcacaaccaacacattgaagtctcggtttaccacgaaagaagaccgattcccggtagaagtttcctcggtagagtcaagatttctctctgtaatattgtttacaaggacgaccaagtgtatcaacgcttcacgttggagaagaaatggcttctctcttctgttaaaggtgagattggtctcaaattctacatttcatcgtcagaagaagaccaaacatttcctcttccttctaaaccttacaccagcccaacacaagcctctgcctctggaactgaagaagatactgctgattctgaaacagaagattctctaaagagttttgcatcagcagaggaagaagatcttgctgattcggtcagtgagtgtgtcgaagggaaaaagagtgaagaagttaaagaaccagttcagaaactacatagacaagaagtttttgctcggccagcacctatgcagtccattcgcctacggtctcgtgaaaacccgcatgaagcccaaaaaccgatgtctcgtggagctaaccagcttcaccctcaaaaccccaaccacttgcaatcatatggtgacactgacctagacgactttaaggtgaaagacatgaacttggatcttggagagagatggccaaatccaaatgctggagaaagatttacaggcacatacgatcttgtggaacagatgttttatctctatgttcgagttgttaaagcaaaagagctaccacctggttcaataactggcggatgtgatccttacgtggaggtcaagcttgggaactacaagggaagaacgaaaatttttgataggaagacaacaattcctgaatggaaccaagtttttgcatttaccaaagaacggattcaatcatcagttcttgaagttttcgtgaaggacaaggaaacactaggtcgagatgatattctt

SEQ ID NO: 10745 - DNA, 674 bp, Arabidopsis thaliana
gattactcttgtatccaggaatatatccaggtggatacccatgaggtttgtaacacttctgaattacatgacctgtcatcccacagtaagtacataaaggacgagaagcacctcttggtttataactattctgtactgcacaagcattattatctgcaggaccattatatgagtactcagtataagctgcaggattctgatcaacagagaacttagcattatcagaagcttgaaacactacattatcactcttgtgaaatggtttcaaatttttctgcctttcatcttgtgttaccatgttaaacacttcttctatagaaggaatcggcttgagcataagaatgtgtcatcgtgtagcctcatacgagtcattaagccccatcaaaaacttcatcacacgacttctcgcttgtagcttttcccacaaagcagctgcattacattcacactttccacaagtgcacaatggaagctcaacaaaattcctatattcttcccacaaagttactaactccgtataatatgcactaatatccattgttccctgctgaatagcactcaacctctgctctatttcaaacactcttggagcatcatcttgtttaaaccttgacattagactattccatatcccttccgcagtgttgataacaataaactttgtccaatttttt

SEQ ID NO: 10746 - DNA, 502 bp, Arabidopsis thaliana columbia
tcagttaaaagaaaacataatatatcacaatcccacataaatcaccgagttagtctgaaaacaataaaagaaaaacaaacaaactcgaagcacttcttgtaacctcgagtccaaaagaaagaaaaaaaagtagtgttaagctcaaaactaataactaaagaccagagacaatgtgaaaggtcaaaaacacaagcaagtaatgcatctgtacaaacaaagccgaatctactaccgagctgttggctgcaatactgattcatcaatggatacataactctgtgatccagccaggtcaagcattcccatgttgagcgaagacgaatgagccgagctcctggaaaactcgtctgatataccgcctcttgcagccaacgcttccttctcgatcctaatcgcgtcttggatatctttttgcacctcggacatcgaaggtctcatgttcccgtgcggtttacacacagcaacgctttctccgcaatcttccacattgattggagactgt

SEQ ID NO: 10747 - DNA, 607 bp, Arabidopsis thaliana columbia
tccccattaactagttgatgctgatcgaaccctcagagcacaagataagtgtaatgcatacctcccatactcgtcaacaagcatcccttccatgtcccttagaggatcatctacagcacgctcagatctagaaggacgtcgtagggaaaacccaacggttttatcatcaccagaagcaccaagatcaccaatataacgacgcaaaagaaaatctgggaaaattttcctcttaagccacaacctcaacacctagcaggaacagttgattcactgactctgaacaacaaaaacatgagactgtcctcgaaacgaacaaaaggtaaaaggaaccttgcgacattgatgacgattttcacgagcaccagtccctggaggagcagcagcacctagaaggcgtggaagggctgcctgaacagtaggaatatacaaagagcgcgctctacctaaagaagattcgaaagcaccatgaactatcactttagtcttactagttcccaaaagacaaacgaagatattctctttgactccagacataaatacaacaataagagaaatatatcgtgaaccctcaggaccaagatttccgtttttggctatgtgactctgg

SEQ ID NO: 10748 - DNA, 473 bp, Arabidopsis thaliana columbia
agcaacgagtctctttagattgagaagcaacagctttctgaatgttggaggaagctccttacgcttctcctcgatgaacttctgaatcgcgtattggctagatccagttctctctttcaacgtaacaatcgcatccttaatcatctgaaatcgcatcaacaaagaacacaaaaatcaatttctagattccaaaatcagaatccggcttaataagaaacacgaataaacgaaatcgaatctcatttttacctcttcgtaagtaggatgagatgaaacagttctcttcttcggagcggcagaacgagtcttcttctccttcacttccttaacattcttcgtctttcgtcctttcgctgcaggcttcttctcaacggccgcatccgtcaccggcgcatccgcagcggtgtttccttcgatcgtagcagcgttctctatttccacctctgacatcgtcttctgaacttaagatcggg

SEQ ID NO: 10749 - DNA, 569 bp, Arabidopsis thaliana columbia
ttgctgcgcaggttgcagaaggtgtagcaacagccggggcagtgatagcattagcacagaaatacaatgtgaaactgccggttttgacagccgtagctaagataatagataatgaactgaccccgactaaggctgttcttgagctcatgaaccttcctcaggttgattataggtttcacagattcccatttcgactcggctactcttctggtatttttatttgactctgttctgtataattctggttttgcagattgaagaagtatgaggtagaacaatcgttttgaggaccacatattcaaagagatggctttaaggcggcaagagctttgcattcgtttagagatagctaacgatagagatgattcgaagtgagttttgtaatcgatttttaggcctgaatctcatgaatgtgaattgttcataaacattttacaaaatctctgtaaatttttctcttacatctataaaaatgatgtttcagtatcttgtttagagtggagtgtggaatttggaataggcttcgtatgatcttcagactttcggagccatggatataagtatgggtg

SEQ ID NO: 10750 - DNA, 449 bp, Arabidopsis thaliana columbia
ttttttaaaatcacactagcttctactcaaagcttctctgagacttttcttgtatgagtcttggctgtgacttttcttgtatgaatatttttcaatattgttgttcatatctttgattagtctctgctcttatctatatgtttatcagaagctagttagtcagccatgtgtgaggccttgcgtgagacagcttcacgtcagaaagggtcttgtctctggtgtcatgaagctgttctcttcacctcttaggactttgcgtgatgctggtaaatccgttcgcatttcaagattctgcagtgtctccaatgtctcttcctcattgcaaattgaactggtttgtgtgtttgcttttccttcctttttatttcttttgttgtcctaaaataatggcttcatcttgtaaatggtttttctgtctttgcaacaaacaacaacttgtaaactagtga

SEQ ID NO: 10751 - DNA, 640 bp, Arabidopsis thaliana columbia
tgaaggactcaagctctgtctttgtaacttgcttgatgataaaacggtcatccaaactttttgcaaagaagacgttgctctttccaccctgggctccccattttctacaacgaccaagagatctaatgaaatctgtttctgaaggacagcaaatcatcctcagggcttcaaactccttagcataataacacgtcacagagtacttcactttcccaggaggaccttcatctgtaaacgaaatcctcgcatgcagatctttcaaatacagtgatgaatgtagcagctgcgagacttgttcatcagcagagctaagacttctactcatgtcgaccgacaaatcactcaaagagttcaatgagagaagattaacagaatcaaaaagtgaaaaggaacctccactatccaagcgatctcttgacttatctgatccagacatctgagctttatattctgatgatgtaagggcataagctatgatactagtaggttcgtcatcataaactggcagtactaagtcattacatcccagaggaagcagcagccttgaccacttcgccattcaagctctctatatgaagaacataacaggccggcttcagcatgatatcttcgagattaagcgatatcttgtgagtgatag

SEQ ID NO: 10752 - DNA, 451 bp, Arabidopsis thaliana columbia
agattccctaatcgaatcaagattgctggtagtcgatacatctgtatccacagaaactggaactgactccggattttgaacaaagcctaaatatttacttaatctggcagataaagatgagaacccagtaaaaataactggattatatggctcgtgagagaacacatgatctccatctgattcccaagttccaactttctcaccatctgcttccccattaatctgaatagtttgttcatcgaatccattagacacaggaatatcaactgcttcagagggagattcacgaggagaaggagatggtgaaaaattttctatttccacaacacatgatgtagcttcttttgcaaagatggttgagaacattgtatgccggtcagcgaggaaagaagcctccagcattagatgatatgccaggataaatgaatattgtactacttctttgaccttt

SEQ ID NO: 10753 - DNA, 376 bp, Arabidopsis thaliana columbia
catttagaacaagagagagatattgaatgatttttcgatgcgacaaaatcattttatactaggcgaggtagcataggatataagtggaaacaatgaagatagaagtataagaacagcaccctgcaggctgtccagaggctgcagcagatttcaatattgatgcatgacttgggtccaacagttgtccaacattgtccccaaatcgctgtagccaatgaaaatttgaattataccatttgatgaaactaaggtgtgacaaaaagaagaaataaaatttaaacacacgcctagccaaaactaaccttcatagcagcctcatctaaggactccctctgagtaggcatttttacacgctcctcatatgctttactagcta

SEQ ID NO: 10754 - DNA, 631 bp, Arabidopsis thaliana columbia
cctcgctgagtgtacgaacaccaacaaccacagctcctttggaatcagatgtttcagcagctcgtccaccaccaacaatgagccgcatgacacctgcccgggattcggtcgtagatttctatattgaaaagggaaatgtcaagggaagggtctttatttctccatacaagatggtacagtaaaaactgaagtatcaatcaacaccaaataaaatgttttctgctagaacgaagcatattttcttaagttgttaagaactgcaatttgataagtagacagcaaacaacaatataaatattgaggaatatgtctaataatgtagaaagaaaatcactacggagatccttacatagtaaggaagagcaaaaagatgaaagacgtaccttgtaatttacagctatcccattggataaccgaagctgagtgatcccagtctctttgtcatgcaatttggttaaactgacccaggaatagggacaaaacatggatttctctgcaaggttaactctttcaattgtgattgagagatcaattcttttggcacatcgagctgcaaggatgaaggcaaaaagctgattcagaactagcctttggtttatattgaataaacgagatagagtacaaagaaaga

SEQ ID NO: 10755 - DNA, 790 bp, Arabidopsis thaliana
ccccgaatcccattccaactaacttacgggccaccaatcttttcctcattatgcagaatttcattgaaatcacccaccatacaccatctttctctccttccaactccaattatgcttagtctttcccaaacaatctttctttttttaaagtcggggtcaccatacacacaagacagaaaaaagttcaccgcaccaaactgcacttgaagatcaatcaaattcttatcagcaaacttgatatcgatcttaacactttccttccaaaagatagctaaaccaccacaccttccaacaggctctatagaatacactctatcataacctaaaaatgtatgcaaatcaacaagaacatctctactattcatagtctccatcagaaacaacatctcagggaaatactttttacgcaattccttaagacgagggaaagccaagtcttgagaccgtcccaagccttgacaattccagctgataatgctcattgcgcggtgggcaatcccccctttgggatcacctctaagggattgagttttgtggattttgcagtgctagttccctcatcaactgcctttcgtttctctttagcaccatgactgagacctttcttcaactcttgtgatgcagcaagacctgaagccggtaaaggattagctttcctctgattcttagttggcctttttcttgcctttgctttcttaggcttaattcgggataagctaggttcaaagaacccagctttaaaaaccgccgaattatcctgaaaaggctgagacaaagcaagaaaattggc

SEQ ID NO: 10756 - DNA, 497 bp, Arabidopsis thaliana columbia
attaacgcgttgagtagcctcaagctcaaatgctacagcttgttcagccaatttcataatatatggtaacatcctcctcggctttcaacgaactgatctgtattgtctcagcgaactcattcaacttgtccacttccttttgcagctcgtctttatagctcagcaaagcactcagttgggactcacaattatctaaattaacttggcattctttaatatcatccttggcagctaaaagagcttcttctttatcattaacatctattgtttcctcagtctcttcagacacatgtggaatatcattccctgcaccagcttcaagtgattccactatagcctgaagcctagcttcagccagagacagggccatagtagccgtttgaacagcttctttagcaagagcctcctcataaacagtatctcgaatggcatcaagggttttgtttacgtcaagccatgcagtagcagcttcatccttgagtgctatggctctttct

SEQ ID NO: 10757 - DNA, 528 bp, Arabidopsis thaliana
tgcctaagccttgaaattaggtgttaactattggttattctagttgaaatttgaaataaagaaaaaactatacgtccatactattttattttcttagcaataactaaaaataaatgtttggaaacgttaggcaattttattatattctatcgttgttctctataaatgaagtctcgaccacacacttggtagctacacacgagaaagaaaaagctcacaactttaacctttctggagagagaagaacaaaagagggagagggagagaaatggaaggcaaagaagaagatgtacgagtgggagctaacaagttcccggagaggcaacccatcggtacatcggctcagtccaccgacaaggactacaaagagccacctcctgcgccactgttcgagcccggcgagctcagctcatggtctttctacagagccggaatagctgagtttatcgctactttcttgtttctctacatcactgttttgactgtaatgggagttaagagagcacaaacatgtgtgcttctgttgga

SEQ ID NO: 10758 - DNA, 577 bp, Arabidopsis thaliana
tgcagagaaaacggtgtaaacaaggacgaaagttccaataatctcagctccgagagcagttcctttgctgtaaccgtcagctacggtgttagctcctccaccaagagtgttgtaaggagttttcatgaaagctttcacgaaacccacaccacaaatggctccaagacactgagctatcatgtaaccaagagctcgcaccaaagagaccttacgggccaagaacagaccgaaagtcacagctgggttaatgtgaccacctacgagaagacgagaacaagaacgagattaacaataaaaccaacgaaccaaacaagtaaaagttagggtttttggtgggattcaaacttaccagagataccggcggtgcagtagacgaggacgaagatcataccaccgaaagcccaagcgataccaagtaaaccaacgccgtcacaaggaccggtttgcttcttgtggccgatgacagtagcgacggtgacgtagaggaagaggagtgtagcgatgaactcagcgatgagagctctgtagaaagaccaggatttgagctcacccatgtcgagaagaggagctggtggag

SEQ ID NO: 10759 - DNA, 490 bp, Arabidopsis thaliana columbia
caagagaaactacttctgtcacttatattttataatttatagcaaggcctttgaatagctcacaagctattctccttctagtatccacatcacttccttccatatctctacggataaactcaatataattcatctcgaaaatttctacatcttccaccctcaaagaaacattaggaatcacaatactttggcaaatttccttgataacattatcccccgcaaacaaagcatggtgaacacttatgctcacagaggtcaagaacttaattgctgtagtagctagttgatctctgctaggagactttgacacatcccggagcaatgtccagacaaatgatgcaaactcattcaaaaagccttgaaactcttcttcgtttttctcaatataatgattgatattctcgcaaatagcagcgcgaagatcatcaacaagtgttaaccctcctctgtgcttccaaggcgggataatttgaagatagatacttcttaa

SEQ ID NO: 10760 - DNA, 454 bp, Arabidopsis thaliana columbia
gctggttggcagtctctggcaacgaagcagaaagaaatcctctccctctcgttatattatgctgcacactggatacgagaactcgttagtcacattaacatgtatattctgcgaccttgttataccatactttctaatatttatgttcttgctttctgttgccgctgaacgccttcagttcacaaattgatgaaaaaattggttgcattagtcaggctactgtgtaggatgtatcaacgtagcttctaacacgcctcagaaatttcgtgtatgttcattctactctgactcaatctaagctctgtaatgtgctgctgtgttttacgctcttgtttcagatgttattggtcgtcataaagcgtattcgtgatgaagttctgatacaactaatacttggtatagccgattcttggaaagcttattgagtcctacgattacactatctcctcagtct

SEQ ID NO: 10761 - DNA, 493 bp, Arabidopsis thaliana
gggttgattccagttccagtaatggggatggttgctaagtgaaccaagaacacagcgaatccgatagggagcggtgctagaatctgtcaaaatttcaaaaccaattaagcattttgatccgatgttacaaaaaccaaaatccatcctttattgataaacttacaggaacatgagagtcacgagcgtttctcttggcatcagtggcagagaagacggtgtaaacaaggacaaaggttccaataatctcagctccaagaccacttcctttggtgtagccatgagctatggtgttggctccacctcccaaagcctggtattgctttggctggaaccccttgaccacaccagctccacagatagctcctaagcactgcatcactatgtagtacacagctcgtgtgagcgaaacttcctagctaagaacaaaccgaacgtaaccgctgggttgatgtgtcacctgaaagtcataacatacacaaacacagattaaaca

SEQ ID NO: 10762 - DNA, 709 bp, Arabidopsis thaliana
aacaacgcagaagaaaccggcaaaatcggagtgtccctctctaaaaacctaatggcgatagctggagaagctctcaagacaaacatcacaactctcggaccactagttctaccaatgtccgaacaacttctctttttcgcgactcttgtggcccgaaaagtcttcaaagtcaagaaaataaagccttacattcctgatttcaagctagctttcgagcatttctgtatccacgcgggaggtagagccgtgctcgacgagattgagaagaacttggatttatccgaatggcacatggagccatcgaggatgacgttgaaccggtttggtaacacttcgagtagctcactttggtatgagcttgcgtatagtgaagctaaaggaaggattaagagaggagataggacttggcagattgcttttggatcgggttttaagtgtaatagtgcagtttggaaagctttgagaacgattgatccaatggacgagaagactaatccatggattgatgagattgatgactttcctgttcaagttcctaggatcactcccattacatcgtcgtagtgttttaaattcttttggagaactaatttgttatgtgatattaacatgtaataacttacgtgatttgatatccgtttattatcttaatatatatcattgccaatttgccatatgtgagttcgagattagtgatgtgtaacatgag

SEQ ID NO: 10763 - DNA, 491 bp, Arabidopsis thaliana
accggtttgaaatacttcgagtagctcgctttggtatgagcttgcgtatagtgaggctaaaggaaggattaagagaggagataggacttggcagattgcttttggatccggttttaagtgtaatagtgcggtttggagagctttgagaactatcgatccgtccaaggagaagaagaagaagactaatccttggattgatgagattcatgagtttcccgtgccggttccaaggacatctccggtgacatcttcctcggaatctcgatagttaacttttttaaattttctttcatgtataatactatggttcacatcacatctatctcaaaatcttcaatccatatatttttgcacgctaaaaaaaatattgtacaaaagataacggaatctcgaaggggtttaaagaaaagttgtccatcaaatatgtattgttcaaatgctctttgtttaaataaaaatttggaagaagaatgatacaatggcgtctacag

SEQ ID NO: 10764 - DNA, 601 bp, Arabidopsis thaliana columbia
ttaaaacgtgtcataatctgcttacagatggtgacatatcattgtgtagattggtaaatcagaaatctaataattttatctcaaatgtgtagaattttagataaatattgttcttaatttattagttacggaataaaccacaattaattgattttaaaaagggtaatttatttggatcacgcggtttacaattttttgtggtttttaatcttattaatgtgaagacccttaaaattagggtttcgtttagggtttctactgtcagtttcttgtcaaattagggtttcgttttgctcgattactgtggttttctgttctcaaaaacaatctgatcagtgctaagtgattttcaaatcaaaggaaggaaggattatctcaatcagagaaatcatgtttgcagttgaaaacatttctatggaattcgaaccggcgatcaacgaatcgtcttcgtcactttcgtcatctcgtagtagctgcggtcactggtatgttcgttacggagtctgcatcgcttgtaaatcgacggtaaacaaacgccatggcagagcattcgattatctcgttcaaggtttgcagctaagcccgaagcagcagcgtttac

SEQ ID NO: 10765 - DNA, 369 bp, Arabidopsis thaliana columbia
agatgtatccagatccggggctctgattcttttacgaggtgggggggggggagtaacctctagctacttctttgcctttaaggtgataggggattctcttctctatgagttcaggtgggtgagtaatagctgtggggttaagttggatgagagttctttgagaaacaataaatgcgctgagacttgtttagggtttgagacaggattaccagggttacaaaggtttaacagggttacaaagttttcttcagagggtatcagttggaagcaagatgggggagagcagatggctacctgagaggggtcgtcattaagggagacgtgagtgagtaagtacaggagcgtgaggtgtaaagcttctgagcaggg

SEQ ID NO: 10766 - DNA, 579 bp, Arabidopsis thaliana columbia
gtggtcatgggaagattagaagccaaggagcaggaactcaagaaattgaaagaagaaacgatcaatgacagtgaagatttgaaagtgctatatgccttggacaagagagagtcggggaaaaaacaatgggtgatctggccatagagatgcttcagcttgaggcagctaaccttgaagttgaagctgcgaccagtgcattacagaagcttgcaaaaatgagcacggaactgttaactcaagctgacatgagcattgaggccgacacaactcacactgtaatgccagagagagggtattcagaaggaagtaatgagtgtcttggtgaggtaaaaacagaagttgtcaggctctggtccttgacagagaaactcctggagaacgcaggaatcgttgctggtacatctacatgcatggaaggtgtaattttataaagctttgattaactttataagcctaatctgtatgattcttttgtggatatgtagaattactggcggttaaatatgtttacttgtcactgtgagcaagtctattggagagtcttaatcaagaactctttgcattttataataataaata

SEQ ID NO: 10767 - DNA, 495 bp, Arabidopsis thaliana columbia
tgctttagccacttggatcaccagctcttgttgctgtccaggaagatgcaggtcgactctgtctcggctctctgcctcgattgattgatcggcaccgatcacaagcacagacacatctgcagtggctgctagtttcgtggcgccggctacatccgctacagcacaagctacattggagcagcctggtagatatgttgtagacaccgtcccggctagtccttgtagtggtgttgtgtatttacacggcgtgccttcgtagtttccaatcattgttttggtgacattcgcgtttggtccaatcacggctagtgttttgatcgatttaggagaaagcggtaagcatccagtattcttgagtagaacaatgccttgtcttgctgcatctgctgctagctcttgattcgcagacgtgcaaacgtcggtaggacctaacccagcatagatttggttctttgggttccatcaaagaacctaaacgcataagggcaaaaagtt

SEQ ID NO: 10768 - DNA, 611 bp, Arabidopsis thaliana
gctgtaactccaatttgagtcttcctgcaatccagctagcaatccttttgcagaacttggtgtgcttccctgcttccacgaaaagtaaataaatttctagattggaaaattgttacttattagtttggaaaatctactcttaaactactattagagattagaaaatcataacacatatggttcgttcaccgtgttcctctgtatgaagtaactgttaggattctttctgttcatagtttatagatacaagatagtcatccgtgtttgattccacaaagtatatgagagagttacctcagagttaagaggtatagaagcctcacatgcctccaacacatctttccaagattcagacccttgatctccactccctcctgtaccacctgtaaacagattgcttcttactcttcctaaaaactatataccattcttcatttccacgcatacacgagacaagcaagactacaagggcatactaaagctacttcatatagatgaataaattacagatcgtccataaagtttgctacagtcaatgaatgaccattgaaacgttctcagacagactagtgaactcaagtgaatgacataaatattttcctgaatattga

SEQ ID NO: 10769 - DNA, 573 bp, Arabidopsis thaliana columbia
taactatactgaaaataacctcgagccagttgcttgtgggctcaagatcattcgcaaatgtgctgtaaaacgcgacccccaaaacagattcagtatgtcaatcagagaatttttttatatccaagatgtaaaccttaagctcagaaacaaagcaattacctgagagtcattaggccccagaagatggggtaaaggatcttaaccgcaagagagttgctggagatgactggaagtgcccaacggtagataccatatcggaatggtccgttagagtctaagcacataggcttattgaccacactggtaaggtttccagataagcatggatatccaactgtgcttgtcggtgacacaaattggtaacagacctcttctttgcaagccagactcagattgcagttcccggttctcatacattgttgtcttatgcaagaagcaacacgctgtattgcgagaacataccaacatcccccagcaacctgaaaccaccagaatttccataaacaacaacctttaatttcatatcttaggacagaccttagtagtactatatatatcacatgggatttgtta

SEQ ID NO: 10770 - DNA, 557 bp, Arabidopsis thaliana columbia
tgccttgaaagagtctctcattgacttgactctttcctataaatacacctttccactctctcttctccactgtcaaatcaaatccctcttcctcttcaattctctgtttcctccaaaatggctacaccaaacgaagtatcagctcttttcctcatcaagaagtatctcctcgacgaattgtctccgttgcctactactgccaccaccaatcgatggatgaacgatttcacgtcatttgatcaaaccggtttcgagttttctgaatttgaaaccaaaccggaaataatcgatctcgtcactcccaaaccggagatttttgatttcgatgtgaaatctgaaattccatctgaatcgaacgattccttcacgttccaatcgaatcctcctcgcgttactgttcaatccaatcgaaaaccgccgttgaagatcgcaccaccgaaccgaaccaagtggattcaattcgcaaccggaaatcctaaaccggaacttcccgtaccggttgtagcagcagaggagaagaggcattacagaggagtgaggatgaggccgtgggggaa

SEQ ID NO: 10771 - DNA, 501 bp, Arabidopsis thaliana columbia
ccggttcggttgcgtttgccgttcaacaacggtcaggagacgaatgaactggaactgatgaacgcaacatttgatgagaaatcgcgtgaactggtgaccttagcgaaagggcgcggattaagcgattgtggcattcaggcgcgctggccgtttgacggtcagcgttttcgcctggtgcgttacgccgcagaacccacctgcgataactggcatgggccagacgcctggcaccacgttgtggatcacccgttaaacaaaatggcgggacatgtaggccggataagacgctgtaggccggataacacgcgtcaccgcacatccggccctcagccatcggccctcaccatcaggcacctttcactcccagcaccttacgcgcttctcgcacaatattctcggcggtccagcaaagaacgggaacagcttatccgccggagcagattccccgtaacacgtcatcccgacacattgcactttaagaccaacatacttgtaccagta

SEQ ID NO: 10772 - DNA, 1615 bp, Arabidopsis thaliana
ctcaacaaaagaaaaaccaaactcttttttttttttgtcgataaataatttcaaagaaagcaaattaagctccggcataagggttaaccttaggcttgcccttgacaagaccacattgaaggcttgtctccggcatgttgtattcgtcccggagagatttttctggtgacaagacgcttgcgtacagttgctgtcccaagtagcgtctttctgcgttctccgacctaatgttccacattccacagttgtcgaatgtgagcaagattgcagcccaacacttggggtagacctggactgtgtgtcggctcactgcatctagaaggttgtagttcttcctcttctctggtgtccatgtccctggctcaacccttttgtacgatgaaagataattaaaattagggtttagagattggttactttttgtacaagcaaaatgatgtaaagtgtgttacttacgctacagcgaagaaggaatagccgtccaaatgccaagactggacactcctctcgtggttctcgaacacgacttcaatgaaggtgcggtgagtgatgttaagaacattgggttcgatcttgatgttcttgatctgatcaggatttgggttgtccgagatggtgtcgtacttgaaaaccttatcagcaacgccgaagtactcagcaagcttgagaggtgtctcagggtcggtgtgggagaccccgctcaacgcgtacctaagcttgccatcgacctttccctgagtgttcacgagcttgatggtgcgagtgatattaatttttccgtagtggtacgagccttgtgggttaggtctagcggcgctggctgtcaagttccacctgaaagatcggtactgattcaaagaccaagcccaaccaacgggggccgcaggtagctgagaagacgcaggacctttgcctccctcgtagcggagcaatcctgtggttgtcagaggtttcttcaagaaccttgtggaagcaatcatgtagtaatctttaggttcttggtctgccgtgacgattacaccaaaacactgaccgacatggacatcaagcgagtcatagtcgttttgtagaacatgtgagccttccatctcgacaagcttcattttgtggttctgaatcctgaagttaagagatgccttgagacccacgttacagatacgaactctgtatgttttccctggcttcaaagtgaaaagaggtttgtcagagccatcagttttcccggatttaccgttgatgagaatgccatcaggacgaccaatagtacgaccactgtcgaggaacttcttgagctgagtatggcttttggtgtaccagtcgttgataaggatagtgtagtcatcttcagggtcagcgtaaggaaccgggatcaatagacggctgttcacacgaaggccaccaaagccaccagcggcacgatgcatggctgtggtcgggtagtagaagtagctaccgatttgatcctttggctggaaatggtatgtaaagttctgacccggagggatcggacacattgttccagctgttccatcttgccagcagttcttcctgtgctggattccggccctatttataaattttccaaataaaaccccaattagaaaatattggtacc

SEQ ID NO: 10773 - DNA, 824 bp, Arabidopsis thaliana
cattgcttaccgtttagtttattaaattgcttgatcagggtttccctactgatctgagattttctgctagcatcgactcatataatcatatctctgctgtggttgagctcaataatgttgaaatgctagtcgaccttaagcgatgtcctggtcagcttaaacccttctcacccaaggcagtttatatggctcatatctcaatggcatggcagcctgattttgtagacaataacccttgtgcttcaccattggagccaaacagtcccatggaacggtctggtccaccatctgcattacaatccggtttaaggtgataagcatacttgtttagttttcttgattatgtttgtatatttgctaccatatatatcttatgtttctctatagggcaagcaaaagcgttatgcacgtataaaagtaacttttgttgtttcctcagtcgttcactaggcgagccaaacatagctactgaagttttgcggagaaaggtcatcaaggaaccgccacctgctgatttcaggttaaattgttagtcaatatatatttcctttcaacagtggtgtagttttgataaactttttcaatgctaagtagttgtatatagattccatgctacttctctcttaaaacttgggtgtcgtcatgttccctcaaattctgtcaattatctttattgataaaaggtgaaatatggtaaccattaaagtccattctagtcaactacaatgcaagagctatgagttacgttgtgagagtattgggcttaactatcagatgaggtgaattcaatatgtactgcaattgatgagtttgcttcaaaagca

SEQ ID NO: 10774 - DNA, 299 bp, Arabidopsis thaliana columbia
ctaaggttcagagagcagcatgcacgagcagtaacaacgcagcagctgcagaggtgttctcagggatagaccacaagtatgatatcatgtacgcgaacagggcattcgaggactggtacgttggtgaaggaatgcacgcagcatgactctctgaggcacgttgagacttggccgcactgcagagcgactacgacgaggtcggtcgtgaacgtcgagacgatgaagagcatcacaagtgaagactattgacacctgtactcccgcaatgtgctacccaaagtttgctcgcttatccgttt

SEQ ID NO: 10775 - DNA, 670 bp, Arabidopsis thaliana
gaaagttgtagaaagtaatggtgttgtgggagttagctctaggaacagcttacttcttggggattaggcggacttaccggctcgcattgaagacccagcgtcggcttgttagccctaagcatccaaggattcgagattttatgcatcggtgaagtttctttcatctttacgcttttctttttgtggattttgcgatttggttgtttctgatttaggtttgactggaaatacgtttctttgtatatgaattggcctcttcaattgatgaaactgctttgttattgatgtatcgttctgattgtttattgtgtttaggttgatttcgattttctactgtccagttagttttgttctgactcccgtatcgctataaaaatgtgatttaagcaatgcaatgcaatgcaagtggttggatttaagtaaaatcaagaggtaggctagtcctatttccacggttttgattcgttgaacttacttatgtgatttcgtaattctatacattgctcttgaaccattcgatgtgagattcaagagtagagtgacacgaagctatgatgcatttattcatagagggagagatagaacatctggtgtttcctggattgaagtcttatattgtgcccgtttgggattctgaagtgtagttgcactaggaaatatatttgttgat

SEQ ID NO: 10776 - DNA, 1007 bp, Arabidopsis thaliana
ctcccatcatcccatattccacatggactctttgaaatccaaggttttgccatttgaccacagatttgtgttattttcaaacacaaaatcaaccaattccgatgaatcagaaacctccgccgtacggttatggcggcgctggtggtggaggagtcggtccttcttccacttccaacaccacaatcatcgggacgttgagtgcacgcgccaagcagacgacgcaatcgatgatcacgacgctccgtccatggcgagagattctcgatctgtccgcgctctctctccctcgcgggtatgatgaagccatggcgcatctaaagcacaacatctcttatttccgtggaaattacgctctcgccgttctcgccattgttttcctcggccttatttaccatccgatgtctatgatcgctttcatcgtcgtcttcatcggatggattcttctctatttctctcgagacgcaaacgattcgattgtgatttcggggaaagaagtagatgacaagatcgtgctggttttactcagcttggtaacggttttggcattggtatatacagatgtgggcgaaaacgttctggtttcgctgatcattggtttgctcatcgtcggagctcacggcgcttttcgtaataccgatgatttgtttcttgatgaagaaagtgctcgccgtggtggcctggtgtctgccggttctggtaaccggccaccgtcgagttataccccaatttgagtaaaccggtttggagaattactcgtaatttcttgggtttttgattgaagaagctaagggaatcaatttagggctttgtattttggattcccaaagattcttgtatttatattttggcgtgtgtgtttcattttgtttgaatgtatacaaattctgggaaaaaacaaattggtgttatggtattttatagaattgccaaaaacataatttccgatagaaaaagaaaagtatgcattaaccagatgaaatttcataatgaacaaaaccagtatgtta

SEQ ID NO: 10777 - DNA, 1675 bp, Arabidopsis thaliana
tcatatattgaaagttcaaagactaaatgatactttatagttttggaaaaaaaatgacgagttattttattggtttgtgtggcagaatagccgtctacaaggcgatttatccatcaatcggaactcttgttgacgtaattgcagccatcgaccaagtaaacaatactaatttagggcctaaatttctcttagtgatctttaaccaattttatttgtttacttatttaattttgtcataggcaattatggacggcgtagatgtgttgacgctatcggttggaccagacgaaccaccggtggataagcccacggtactcgggatattcgacctcgcaatgctattggctagaaaagccggcgtgtttgtggtgcaagccgtagggaataatggcccgtcgccgtcttctgtgttgtcttatagtccgtgggtcgtcggtgttgctgccggaaatactgaccggtcttatcctgcccccctcatcctcgacggtggccaaaccgttcagggcgttggactatcaggtaaaacaagaattactataaacatataaagtttcaagacttttataatagaagaataataacaatgtagtgttagtgatgatcttagatcttcaaataccaaaatttgcaagatttagtataaaattatggcactcatcgctataaaagtttgtcttctttcatagatgctttatttggttattattgtgtacctaattatagcatagcagtagctagtaaattatttaggacctaaacgatttgaaatatttggatcatgttctttcaaactcgcaacaatttatacttgtagtaaatattcatgaaaggaatgtcgtttctcctttttttcaacttgaaattaaaggtccaacccttggagctccattagttcaacacagacttgtcttagccaaagacgctgttagaacaaacggctcggttctacaacccttaaccagagacattgaagaatgccagcggccggagaattttgaccctgccgcagtttttggaagtatcgtgatatgtacattttctgatggcttctacaatcagatgtcgaccgttcttgccatcacccaaaccgccaggactcttggtttcatgggttttatactcattgcaaatcctagattcggcgattatgttgcagaaccagtgatattttcagctcctggtattctaatccctacagtatcagctgcccaggtaatttctttacgtaaaagccatataataagaaaataattgccataacaaatttttggacgaaaaatactcttgtacttgtttatgtgcaactatttgacacaataaaaatagtctagcaaatatataagttcgaatatgtgatttgatgtggatgaagaagactattacatagtatgtcacttagcaataacgaaatccacatttatgtgtagcaatgaacttgagtgaagtaggtaactatattcatggttcactaacaaactggccatttgatttgcatcgaaattatatttcaaacgtttcctcacattttgagactttctcatgttagattattttgagatactacgaagagaaaacctttagagacacgagaggagtggcgacacaatttggggcacgtgctagaataggcgaaggtcgaaactcggtcttcgccggaaaagcaccggtggtg

SEQ ID NO: 10778 - DNA, 728 bp, Arabidopsis thaliana
gtttagagctgatgatggggttttgttgatgagtatagctgtcgtatgagtagcctctgcccaaaacttctttggaagaccagaatcactaagcatactcctgactttctccattaaggtcctgttcatgcgctctgcaacaccattctgttgtggcgtgtatgcacacgttctatgccatagaatccctttctgtgagcagaactcatcaaatgacctgttacaaaactcaagaccattgtctgttctaagagtttttatcctcttgtcagtttggttctcaacaaggttagcccattcaacaaatttatcaaatgcctcatccttagtcttcaggaaataaatcctaacttttctagtgtaatcatcaataaacgatatgaagtattgacatttacctagagagaatggcactgatggagctccccataaatccgaatgcacatactccagcttctctcttgtatcatgttgagctaagttgaatccaatcctcttagctttcccgtatatgcagtcctcacatgtctccagcttggacacttttttcttgtccaaaagaccttttttcagcaataaatccatgttcttttgactcatgtgtcccaatcttcgatgccacaagattgtgtcatcttgtctcttcaccacagagagagactcttctgttactggtctcactgtaacaggtagagtgtatacaccttcttactgtgagtagaacactg

SEQ ID NO: 10779 - DNA, 554 bp, Arabidopsis thaliana columbia
gactctacccgggtaccgatttaataattatatgtatttatatcttatacaagttaatattaatatactccatgataataacaaaaaatatatttgataaattaagttatgtttataaaaaaatagtcaaaagctagcacaaggaaacaaaacgattgtgccctaagccctaagttaacaatttgtcttcatatatctcgagagaaaagagtgggcaagcgtagatagttaaaaacttagtttgaaatttgtaagaataatgacgacaatgtcagatctttctgtggatttggtaggggagatactctctagggttccgctaacatctctgagcgcagtgcgatgtacttgcaaatcgtggaacactttatctaagcatcagatttttggtaaagcagaattagcagcgactaagcagtttttggggttcactgtgatggattataaggtttgttccttgagattcgatctccaaggaatccgcaacgacggtgatgactttgttgatcacggtaaatccggtttaaaaataaggaataaagcggttaagaaaa

SEQ ID NO: 10780 - DNA, 622 bp, Arabidopsis thaliana columbia
  unsure (1)..(622): unsure at all n locations
aattgtctttttcctcaggtcatccctggctggttggctcgcatgaactaaagattccatctgatatgatcatatacaagcttgtaaaagtgtacataatgtcaacttcattgagaaaatcggctttagcggtgagtttgattccacagaagctgtgacatatatactacttacttaacaatttcaattgttgagttctttgaatgaaaactttatgattaatgggttttgtttttcatggttttaggctcttgccaaaacattaactgtaccgcagttagcgtatcttcgggagcaattcacattgttggggccaagcaaaaatggatatatctcgatgcagaattacaaaacagtgagttgtttttccatgattccatcaacctcttcagttttcttttgcgatcttctgtgattattgaactttcctctacaaatctcaggcaatcctaaagagttcaacagatgctatgaaggattctcgagtgtctgattttgtcacatggtaagaaagctataaatatcaggactataagcttaatcattaggtttggtggtttacgttgtaactctgttgggatcagatagttgcntcaatcaagaactagactttgagagtttg

SEQ ID NO: 10781 - DNA, 1038 bp, Arabidopsis thaliana
ctcattatttttctggcactgcattttccttgtccttgtgctgcagcttgctaattacttgaaagataatggagtgaagaagggtgatgctgttgtaatttatttacctatgttgatggaacttcccatcgctatgcttgcatgtgcaaggatcggagctgttcattcggtaacttgtgattttcgtacatttttctacaatacaacatatacctaattcattaacacaaaaccagtttcgaaactaattcaattctcccacaggtcgtttttgctggattttctgcggactctcttgcccaaagaatcgttgattgcaagccaaatgtaatactgacttgcaatgctgttaaaagaggccctaagaccataaaccttaaagctattgttgatgctgcacttgaccaatcttctaaagatggagtctctgtaggtttgttcattcaccagaatctgaatttgagtggttgttggtttgatggatatataactgatgattttctgtgttttacttctctacaaccaggcatatgcttgacctatgacaactcattagcgacaacaagggaaaacactaaatggcagaatggaagagatgtgtggtggcaggtaactgcagagcaacttaataattgtcaaaattccttcattgtttttttttttcgaatggttctaaaagtcttctgtgggtggtggtgatcactttaggatgttatttctcaatatccaacatcgtgtgaggtggaatgggttgatgcagaagatcccctgtttttgctctacaccagtggaagtactgggaagccaaaggtaactttggtccttggttagattaaatctttagcgtagatttttgatatgtttctctattaaatattggtttttgaagggtgtcctacacacaactggagggtatatgatctacactgctacaacgttcaaatatgcatttgactacaaatcaacagatgtatactggtatgcaaagacacttgtcttgactgttaaacttccttaccaaaagctatgctatatagt

SEQ ID NO: 10782 - DNA, 922 bp, Arabidopsis thaliana
atatcaaatatatatatagaaagttgaaaacaaacataaggtccaataaattaagtgcatcttactaagacatcttttactctaaaatttcattatttacaagctctaactcagctttgcttctcgctctctatgattctaaacatactactaacgctcacacttcttatgggtcgggttaaatccgacccggacccgctccaagactactgcgtttctcctcctccttcatctcaccaacaaatcttcctcaacggcaaactttgcaaagatccgacacaagccagcgtctctgacttttcaacatccgcattatccagacccggaaacactaagaccaaaccgcttatgatcaacgtcactgtgaccacaaccgccaacctcccaggtctaaacacagtgggccttacaatggccaggctagacttcggaggctctggtgttgtcccaccgcacgtgacccacgcgcctccgaagtgacagtctgcctcgacggtgtccttctcgtcggattcgtggatacgtcgggtcgggtctttacgcaggagcttcatccgggtgagacattcgtgtttcccaaaggtttgatccattttctatataacattgatacggtgagctcagctttggcagtctctgggctgagtagtcagaatcctgggactcagattgtatctttgtcgtctttcatttcaaagcctccgtttctggtagaggttttgaagagtgcttatgatatcaacggccaggatgttgctaggatccgcaaaagtcttgaaggctaaaaatgctaaaagcctaaaactatatataactacatggccaaccaataactatatacaaatgtatatgactaactcaaaactatattatgacaacaacaaaaaaaaacgtataaacaataaaatgtcactaaaaaagg

SEQ ID NO: 10783 - DNA, 447 bp, Arabidopsis thaliana
tgttgttgatgcatctgtttggcatgaacgacttggacatacatcttttgattgcatagacttgctcacagatgtacttgggatttctaaaaccaagaataaatgattgttacattgtgatatttatcagcgtgctaaacaaaagaagttaacttaccttagtcgtcacaatatttgcttagcaccttttgatttgctgcacatagatgtctggggacccttttctgaaccaacacaggaaggatatcattacttcttaaccatagtagatgattacacacgtgtgacatgggtctatctcatgaaatttaaaagtgatgttctcaccattttcctttgttttatcacgatggtagagacacaatatcaaacaaaagtcaaagacgtccgatctgataatgctccagagcttaaatttgaggaactatacaggagaaaagggattgt

SEQ ID NO: 10784 - DNA, 827 bp, Arabidopsis thaliana
tccccaatatgagagaggaatttgagactgaaagagaagagccctggcaacattcaggatatgttggtgctttctctctaccactgagttctgttctggtgtttcagggcaagagtggtatgccacaatcccttttcttctatatagctcctcaaatttaagttctggagcattatcagaccgtactgccttgacctttgtgtcatactgtgtctctaccattgtgataaaatcaggaaaaatggtgaggacatcgcttttgtatttcataaggtagacccatgtcacacgtgtgtggtcatcgacgatggttaagaagtaatgatacccctcctgtgttggttcagagaaaggtccccagacatctatgtgcagcaaatcaaaaggtgctaagcaaatattatgacgactaggataagttaacttcttttgtttagcacgttggcaaatatcacaatgtaacaatcctttattcttggttttaaaaattccaagtacatctgtgagcaagtctatgagatcaaaagatgtatgaccaagtcgttaatgccaaacagatgcatcaacaacagagtttgcaacaaaagaagtagatacaacgtcttcagacactgaatcttcaacatccagcaagtatagatttccaactcttctaccgcttccaatcgttgaccccttggtaagatcatgtaccacacaacaagtcggatcaaacacaactctggcaccaatatctgtggtcaaagcactaacactaagcagattcagtctgaactcaggaatatacagaacattcttcaatatcagatcagcatttacagcaatgt

SEQ ID NO: 10785 - DNA, 1192 bp, Arabidopsis thaliana
gagctcaatactaaggaagaagaagatccagaagaggaaaatgtaaggagacgaaagtggaaaatatttctgttatcttattaaagagtgaatacaagacattatatacattttctctatctaacctaattaacccggaacaaaccggttaggtattaacaaaagaatcaaaccaatgtaaatcaaagtctattagtccccctcaagatggagcataaatgttaatgatgttcatcttgcttagaagtcgtttaaactgacctgaaaatagagcttttgtaaggaatatcagccaactggttctctgttctcacatgaagagtccttatcaaaccaagaatgatcttttctctaatatgatggtagtcccgctcgatgtgcttcgtcctttcgtggaaaacaggattgtttgcaatgtgaatagctgctgtgttatcacaatacaatacggaagcctctgaaacatcaatccaaagatcctcaagaaggtacctgagccacattatctctcgtgtagccatagacattgctcggtactctgcttctgcagaagacatggagactacttcctgcttcttagatttccaagacactaaggacgttccgagaaacatgcagtatccagttgttgacttcctcgagtctaagcaggaactgaaatctgaataagcaaaggcagacaactttaaatccacattcgcagaatagaagagaccttgaccaactgttcccttcaagtagtagattatcttgtagactgctttcaaatgaggaactcgaggtgcagatgtgaactgacagagcctatgaaccgcataagtgatatcaggtctggtgaatgtgagatacatgagtttaccaaccagcttgcgataatgttctgcatcatcaatcagctcaccatcttcttgagataatttctgatttggttccatgggaactgaacttgacttgcatccaaggagaccagtttcagccaacaactcaagcgtgtacttcctttggcagattgagattccatcagtatttctagcaatctctaggcctagaaagtatctgagggttcccaaatccctgagcttagaggaacgctgcaatgcgtctctcagcaattccgtctctctatcacagctactagcaatgataagatcgatctacattgaccagcactgccatataagagttactagat

SEQ ID NO: 10786 - DNA, 1525 bp, Arabidopsis thaliana
gaggatcccctagtcgtaaagatgttgaactgaagtgtcaagattaatgaacatatctttgacatgacaaacatggtgtgtgccaccagaatccacaatccatgtactttgtgtcatttcagtctcagagacagtgagaataccaatgaagctgaaagtagaagatgagaaagtaataccagatggatcattgctgtgagaagagggcatggaagcaggttgctgaactggagtagcaggttgtaactgagagctgaacaaagcaatgaaattctgtatctgatccttgctcaaattcccaatgagactttccagacctgcaggagtgctctgactgtttcccgttacttgtgcagtgacaccagaattgggcttagggggctgtgaagactgagaagaatgttgtgatttctcatagaacgactttcctttcttccaaccaacaggatagccatggagtttgtaacatcgctcagaagtatgtcctgtgtagccacaatgagaacatatgggcttagagtccttcttttgaacagcattcaacgttccaagttgattcatggtcgaggaagaaggcaacacaccaggctgaacaacttcctgactaacctgaaagacagctgaagggacattgtgactgaactgtctctggctatcatcttgatccaagatgttgtaaacttctgctaagtcagggagaggtttcttcatgattatctgtccccaaatgattgagtacttctcattcagaccagcaaggaacttgataatccgtcctctgttcactttggatttagcagcaagttgaccatcgcagtttgatttcttacaacactggcagggttcactagcctctgcaccatcgagattatcccaaagggttttcaaagttgtgtagtaggttgaaaggttcatagaaccttggcggagatcctggatttgttgaacaagctgaaaggttctaggcaggtttgtcatatggaaacgattgtgcagatcattccagacttgagcagcatcatcaaaagacaaaatactaccatagatttccctattgactgagttaaggatccaggacttgaccatactattacacctagaccagattcgagagagatggttaccttcttcaggacgagggcaagatccatcaacaaaggcgattttattcttcgcatccagggctatcttcatcgcggagctccactggttgtagtttgagccgtctagctgctcagagacaatcgatatccctgggtggtcggcgttatgaagaaacagtggagagtggatgctgtcaggattcatcacaacagaggatccaaacggagcatacaatgcttccggaatgggtggtaagcttcctgctcgagaggtgcttcctgcgcgtgatgagcttgccggacggcgagtactgcgatgaacgacagctttaaccatcgtcggattgtgaagaatcaaatcggagacaaaacaaaatcagagaatgaaacaagctaagtgtagatcggagccaatcaaacca

SEQ ID NO: 10787 - DNA, 1009 bp, Arabidopsis thaliana
tctatcaaaaaaagaagaaaaatgtggtgggtgtgcaacaacatcactaatacaaataagtaattaatagactttggtttacattgtaaatacctaaccagtttgttccgggttaattaggttagatagggaaagtgtatataatgtcttgtattcactctttaataagataacagaaacattttccactttcggctccttacatttttctcttctggatcttcttcttccttagtattgagctctctttctgttcatctctacttctaatatggtatcagagctatacgcttagctcgcttttctctctgattttgttgtgccttcgatttggtttcataaaatccgaaaatggttaaagctgtggttcgtcgcaacactcgcaagacaggaagctcatcacgcgcaggaagcacctctcgagcaggaagcttaccacccattcaggaagcattgtttgctccgtttggctcctccgttctgatgaaccctgacagtgttcactctcctctgtttcttcataacgccgaccacccagggatatcgattgtctctgtgcagctagacggcgcgaactacaaccagtggagctctgcgatgaagatagctctggatgcgaagaataagatcgcattcattgatggctcttgccctcgccctgaagaaggtaaccatctcttacgcatctggtctaggtgtaatagcatggtcaagtcctggattcttaactccgttaacagagaaatctatggtagtattttgtcctttgatgatgctgctcagatctggaacgatttacacaatcgttttcacatgacaaatctccctagaacctttcagcttgttcaacaaatccaagaccttcgtcaaggctctatgaacctttccacctactacacaactttgaaaacccttagggataatctcgatggtgcagaagctagtgtaccctgccattgttgcaagaaatcaacttgtgaaagtcagatttttgctaagtctaatgtga

SEQ ID NO: 10788 - DNA, 961 bp, Arabidopsis thaliana
tcttctttttgtaggtatacaaatgttttggttatatccatatgtaacctagctattttgatgataaacattgcattaaaaaaatcttatgaaagaaaaatgtttaacaaaaagagagaaaagtagactcttcttaattacatacctgatgaggaagacacatgggagaaggatgagagcagcaatcaaaggacatatgatcatatggacgatgatgattatgatgatgattatgatggtgatgatgataaggattgtgatgatcgatgatattcttattaactggttgagaaatcatcgatgatattggttttggtttgatctgctgaagttggagttgaagttgatgttgttgctggtgaagttgcttggctagtttcttcctcagcttctgtctatctctagccttatggttctggaaccagtaaaagacgtttttgccctcgattcttccatagaacgccaagtgagctgtgatctgttgtatctgcaccgcattcggagtccgtataccactccggtacatctcttccaagatcatcagttgctccggcgtcggacaccacctcgttgaagccacaggactcattctccgttcagacaaatattgatgctttgtgtgtgtgttctctagtgatgctatctccaaacacttagggttatatagagagagatgtgtgtgtgtgtggatgaggttatttatacgcgaaaacggatgtttatatggttagagagaaaatggtaaagttataaatattaaagtgcattggaaagggacgcaagagaaggaagggttagacagaaaataaacataaagaaagaacattgtactatattgttttttatgttgtatcaaactggccaatctcatatgccccaaaattattcattacgtctctacttctgtaaatgtgaatttagtatatatgtatacaggaatatattgtttggaatactatag

SEQ ID NO: 10789 - DNA, 585 bp, Arabidopsis thaliana
actcatcccccatgtacataacatcttcttgggtttaattatttttactaattcatgtaataatagatggtgtgtaacatgttcctataatatatattttagatttttaaatcaaaaccatctgaataaattcataaatcaacagcattttttaaaatctttttaacaattaacatatacatatatctatcaaagtcatatatgtagatcttgttagtttttttttttttgtgtgtgctaattcatgtaatagctagtggtgtaaatggttctcttagtaattataaaaaaccacctgaataaattcataaaaaagcatgtataagagagattagtcaccgttattgaagctgggatatggcttgttatgatgatagagatgatggtcttggttaagtttaacgttgacggaattagcaggtctctgcatgggaacaccgtgatgatggtgaagtagaggatgataatgatcgttagccgccatcataaccgagttgggtgatgaagatggtgtggtcatgtttgttccgttgaatccttcttctgacgctcacgagccttatggttctggaaccagtaaaagac

SEQ ID NO: 10790 - DNA, 1089 bp, Arabidopsis thaliana
gtacatgaacatcaaggatggagacttctctcttgtatgtggcttcacgctggtatcattcatcttcttacaaacatgttgagtttgatcttcattggtatccgccttgagcagcaatttggcttcagtaagtcttacctttacgtgtacaagaattattgttcagtcaagttttagactctctttgtttaatcgccaagtgaaacatttgatctttatcgcgggaatgttactgtgcagtaagagtcgggttgatatacttaatatcgggtctcggtggaagcatactttcgtcgcttttccttcaagaaagtatctctgttggtgcttcgggtgctctctttggacttcttggagcaatgttatctgaacttcttaccaattggactatctatgccaacaaggtacttatgcccttttcgctatacgcgccttaaccggaacttaggattaacggcttcttttggcaggcggctgctctgatcacacttctgttcatcatcgcaatcaacttagcattaggcatgcttcctcgggttgacaactttgcacacattggagggttttaaccggattctgcctcgggtttgtctccttgtccgacctcagtacggttgggaagcttcccgcaccaacacttcgcgaaccaaacgaaagtatagcatgtaccagtacgtgctgtttgtagtttcagtggtgctacttgtggttgggctaacggttgcattagtgatgcttttcaaaggagagaatgggaacaaacattgcaaatagtgtcattaccttagctgtttcccaacttctaaatggacctgctaatcatcatcatcatcatcataatcatatagtaaaagcttttatatgtgttcttgttaacatttaatctctttgatctcactagcctttgattaattatatatgaggttattaccaaattcgtctcgagtaaaaggggatagaaataccagagtgtaatacgaagaatgtccagcccgataaccaatctagctttaagtacataaatagtaaacaattttattaatgtaaaacataagctgtaattcggaataaattcctttaatttggtta

SEQ ID NO: 10791 - DNA, 498 bp, Arabidopsis thaliana columbia
gtacctattgttgaagatttggtagtcatttcggacaaagcttatacgaggaccgatgttttagaaatggtaaaataagattgtttctttccaaaaactcggtaaaaagattatacatttgatctgatttcaataatataatctttgtgtgcaggagaagattatgcttagtactttgcaattcaatatgtcgttaccaacgcaataccctttcttgaagaggttcctcaaggcagctcaatcagacaagaaggtaaagaaacaaatctatcaatgtacacaataatataaatggattgtgaattacaaactaatcttgttattgaaacagcttgagatcttggcgtcgttcttgattgagcttgctcttgtggactacgaaatggttcggtatccccatcgttactcgccgccactgccgtgtacacagctcaatgtacaatccatggcttcagtgaatggaacagcacttgtgaattccattgtcactactctgag

SEQ ID NO: 10792 - DNA, 558 bp, Arabidopsis thaliana
tgttgagtccgcacaactggccaaagctccagtacagaagttggctgatcggatttccaagttctttgttcctcttgtgagtaatctgaccagttgataaacaaattatttagtcttttagaggcacaactattttttaaactcactggattataatgttgaaggtaattttcctctcgttctcaacttggcttgcctggttcttagctgggaaactgcattggtaccctgaatcctggataccttcttcgatggatagctttgagctagctcttcagttcgggatctctgtcatggtcatagcttgtccatgtgctcttgggctggctactccaactgctgttatggttggtactggggttggtgcatcccaaggtgtgctgataaagggtggccaagccctagaaagagcacacaaggttagtttagtgtgcagtaacttggtctatggctttgtaaacttactatactgtatatactttactcaggttctctggatcatttcttttctgaaatggtgaaacctgacagtttcaatgacggtgtaggtaaattgca

SEQ ID NO: 10793 - DNA, 518 bp, Arabidopsis thaliana
cttagtctctcactcgtgttcttaagtaattcagcatctttcctcacttcctcgtacttgtccttccattgctgagactctatcctagcagcctcgagctctgtttccacaatcacaagcttctctttcgtttggctacaatcagtagctacctctttcaaagctaaagccaaatcatccattgctttctcgttagtcatctctgcatcagtcgctgatttaagctcgttcttaaccgatttcatctcttctaacaattcagaaacctttaaagaagaggcttgtgcagcctcatgagcctgtgcaagactctccttggtcgattccatctcagtcttcaaagactcaatatcaaaatcctgaacagaactatcgtcttcgtcttcctcgctggaatcttggctattgtaagatgtatctatcttctcttttaatgaagcaatctctacctttgactcttctaccaaagctttggtttcctctaactctctcgattgatctttaacgaacaagcagtt

SEQ ID NO: 10794 - DNA, 535 bp, Arabidopsis thaliana columbia
tgtgacttccaaacgcatggtagttcaccctttttgcttgctttaggtggcatgtttgatccccgttgtctattccaaacccacctatatgcaatgtgaatctctagtgccttgttaaaatgctgcaactctataggaaccacctcatcttttgctgcaaattcattagtgattttgacatgagaaccgcctttgtagggaaagaaatcctggagtttctaagctactagcagatcacatgctttggtctacttggctgaattactagttgaataggtttctctttcttgattggtgtaggtggcgcatatgtttttggatatccacagtcccagctgcaatgcttgctgtcttcatggaactctgcgtggaaagtcctcagtggctttttaaggttactgtctaattttaacccgcatagctcttaaagacgttttgatttttataaaccatttctttggttgattccttttctgtttaaccgtagaggggaagggcactgaagctgaactgtgtttgagaagctatcgggagg

SEQ ID NO: 10795 - DNA, 493 bp, Arabidopsis thaliana columbia
ggaaacaaaaatggcaggcagaagcggcggcggaagaggatgaggatgaggaggagcatcggctgatcttcactccgcggcaagatccggtgatttagcagcagttcaatctattatcagctctaatcctttggctgttaattctagggataagcattctcggactccgtatcctttcttctcgcaaaatcaatcttcttcgattttagtttctgcttgatcatgaaatttaaattctctcgactcgcttttctctgtttgactacaaattttccgatgtttgctgaatgtaatttgctacggccttaattagggttcttaaaaccttagtatcagcttatacaactttattcaatgctaaacattatttctaggttttacattttgattcgtcacacttgatttggttgctaggagaatgatggtttgtagattacagctagagcaatgatagatctgatctactttacgtgttcattgcagtcttttgttg

SEQ ID NO: 10796 - DNA, 641 bp, Arabidopsis thaliana columbia
caagtaactagtgtttagtacggttctttaataagtgttgtagaatttctaatgcccatttaccacgaatgcatattctagttgctgcttgcttctgatattagtgacatcttaatattcctgaatttaatattcatagacacaactacttcggttattttctaagatacattctcaagtcttaaccacaaaggagagcgtctcaaattgtagagactttttatggaatgagtatccgaaatgtttagaacagggaacggacaacttgattgagccaaaaaaagaagcttagattttattctcctgacactcaagtttcaaaagagagcagtaaagtcctgtccggatagcaaattaatccaccatacaccagagtagggcaaagaaacaggtcgcttctaacttttccggtcacctgaaagttttcaaatgtttaagcaaaggcaccggtacaggctgtaccggaccagcctcgacctgcgtcttcgctgagctgtatttcttggttataaacctgttcaagtttaacacacatcaaagagagaatcagacaaatcaaattctacattctactagggggcaagttaagaagtagagccacctgaagaaatcctccattagcactcatcattaccagttga

SEQ ID NO: 10797 - DNA, 515 bp, Arabidopsis thaliana
tgaaatatttttcaatggcaaataacatttggttatattgctaacaacattgcacaaataatagtatagagatcgtacatgtgggtggctacttctctttcttttcttttttttgttttttgaatttaatattaaattagattcaaaaagaaaacataacatttttacagtttgtgcaactatttttgatagtaagttaagaatttgaatgagaaatcataagaacttttctcagtttatccctcttgatgtgaaccatacttggagacccttgttatatcgatgatctccactgattttaagaaccgaaagttgattgcgaatgtgtcgatcaatccatttgataagtcgattagctgagttgagaccagtgccatgtttgcgctcgttacgttcccgccaaatggtatatatcgttgcctgcaacacgtatctagcaagtaagccatcgaccttgtcccgccactgattagaaacacaagtgatgatagaatgccagccagtccgttgagtag

SEQ ID NO: 10798 - DNA, 589 bp, Arabidopsis thaliana
cttcctcctccacctcccttcaggctaccatttcctccaatactagagagaatcgcagacctccctatctcaagtgtgcgcaagaataaaagtacggttccacctgaaccaccaccaggtcctagacttgaattacttaggcctttcagcgtcttcctgggactttcgccatcagttgttattgagccttccagtgacaagcttgaaagtgggtgctcaagtgaaccaagcacttcacaaattggtagaaaacaaattattaggaagagttatatttgagagacagtcagtatgttgcaggaaacaggtcaaagtgaactaatcactacacaagtttgtagaaaaaaatattattctaaagagataaatttcagaaacagttggtatattggtaggaaacaggtcgaagttaaaccagtcacttctgtacagagatagtgaaaagatgctgaaaccagattagaaatagtaagctttacatgaggtcaataaattacttcagttttctctttttagagttcaaaattaatcatgttagaacgaggattaagttgatactatctgaaatttaaaacttaccaatgattcc

SEQ ID NO: 10799 - DNA, 560 bp, Arabidopsis thaliana
tgaagagctcagatccttatcatgccttttaccagcacaagctcactgaataccgtgctcagaataaagacggagctcagggtactgatgattcagatggtactacagatccccaacttgatactggagctgctgatgagtctgaagctggtgatacacaacccgaccttcaggctcaatttaggattccttctaagcctttggaagctccggaacctgagaagtatacagttagacttcctgaagggatcacgggtgaagagcttgatattattaagctcacagcacagtttgtggcacggaatgggaaatcgtttctaacgggattgtcgaatagagagaacaacaatcctcagtttcattttatgaagccaacacacagcatgttcactttttttacttctctggttgatgcgtattcggaagtattaatgcctcccaaagatttgaaagaaaagctgagaaagagtgctgctgatttgacgactgttcttgagcgttgtatgcatcgtttggaatgggatcgttccaggagcagcagaagaagaaagaagacgatg

SEQ ID NO: 10800 - DNA, 476 bp, Arabidopsis thaliana
tgcacttcaagaggacaagaaagcgttggaacgtctaacaaaatcaaaagaatcggcgcttcttgaagcagagagaatcttgagaagtgcccttgaacgtgctttgattgttgaagaggtccagaaccataactttgaacttcgacgacagattgagatatgccaggatgagaacaagtttcttgagaaaattaaccgccagaaagtgttggagattgagaagccccctcactgcgatagtcaacggcagctcttaccctgccaagggaggctcagccgccatatgcagttcgcgagtatcgccgccaaatctcccagctcaatgcaagtgttctgtttagtttcttgtacttcattctcacatttgtgttaaagggctatctcatgatggattcatcgtcaccaggatgcgttcgcgaccgtcgcgagtgaactggcgctagtcaaagtgtcagcaagtagagtggcacttgcag

SEQ ID NO: 10801 - DNA, 570 bp, Arabidopsis thaliana
ggagactctctcatctctccatacaatctcattgcttctaaaggaagttcattatccaagaaccctcgaacaaggtctccaaatgtatgttgatcaaacaaaacctcttctttctttaaatcttcccatactttcttggtttcatcaactttcttgtttcttgcaagcatcattagcatgtctctgtaaaaaaacatgtccggtctgtaccatatttctctcctcactacttcatagagctgaaacataataagaagacaaacactaaaccaaattaaacatcaacgacaagtgacaatacataaacatcaacaagctccatataaaccaaaccgaaatagtttaaccaaaccagttaggctaattcgattctgattcagtttattaggtatcaagcggcaagaggaagtatgaaattcagtaactggtttggttcggcattgcaaaccgaaattaccaaaattttatcctaaatataaccgaattcacagaaatataccaaaatttaaccgaagcataaacattaacagtaacaccatcaacaaactccataaccaaacttagaactag

SEQ ID NO: 10802 - DNA, 583 bp, Arabidopsis thaliana columbia
cttcaagaaaatgcgtaccagattcaacaaacttggcaagttcttcagcacgctccacttcctggacaaattctttctgaatctgaggcaataacttctctgatcctccgtggctgatatttcttcctactctgttaatgtcttggagcaggcttccttctatacccgagactgcctgagtatgacagatgtgtagtgcttgattccaaattgcaagaatcaccagttggatcgagaaagcttctaaatgcttaccattttcaccctatgaaaaaagaaacgtgaaaagaaaacgctcagaaactcaagttagtaaggttttgtgcagaactttactatattcgaagttgctaaccctttcatgaaccaattctgctattgcagctgcacacttttgcaaagaccggattcttgtcaagctgttagttgatggctgttcaaaagcatctacaagatccagagacccatgggaagtacccgggatacaattctgactctccaagcttccaaatcgactaaggttgttgcagtagcactagctattggcataggaccgttaaattagttacattctcttgatgac

SEQ ID NO: 10803 - DNA, 466 bp, Arabidopsis thaliana
accactagtcaagaatcctaaaatcttgccagatttttcagtctttgtagttggagagacgaaaaacgtgtttgggcccttcaagacatcttctatggttttcagcctaagctttaacctctcctataatgtttacttgcattagaaactacactttttaccaacagaatattaactacataagcaatcacctttagctgggactcagccttagcggttctctcggaaacagcgagtttatctttcaatttctgcatttctccctgcacacagacacaaagttcaacactaatgtttcccatataagctagtcagtgtgtattaactggatgtgtaagtgaaaagcagtgagtacatggagaatccttctctcttcaagccattgctttacaggcatgactctatcgttctcatctttccactcgttagcaactgcaagtgccactctacttgctgacactttgac

SEQ ID NO: 10804 - DNA, 284 bp, Arabidopsis thaliana columbia
tttcgttctagtcatctagatctgctgttataccagagtattttcggtgtccgatatcacttgaactgaaaaaaagatcctgttatcgtctccactggacaggtctggctttgcaagtttcgttgtgcattgtagtgactctcattatgaaacttgtgtatatgttgttatagctgaatttttcgaccttgcagacatatgaaagaacatcaattcagaagtggcttgatgctggtcataaaaaatgttcgaaatctcaggagagacttgtacatgctggatta

SEQ ID NO: 10805 - DNA, 584 bp, Arabidopsis thaliana columbia
catcttcttctatatatacctctttaagcttgcttctctttgtctttatcttgtccgatggttcaaacagaaaccgatcaaaggatgggtcttaatctgaatttgtctatctactctttaccaaaacccttatctcaatttctcgatgaagtgtcgaggatcaaagacaatcattccaaactgtctgaaatcgatggttatgtcggaaaattagaggaagaaaggaacaaaatcgatgtttttaaacgagaactccctttatgcatgctcttattgaacgaaggtatcttttattaaaattctctccttttcttttttttatcttctctaatcgattcgtgtttttgtttaaagagattgtttttctctgtgtagcgattggggcgttgaaggatgaggctagaaaagggttatcactgatggcatctaatgggaaattcgatgatgttgaaagggcaaaaccggaaactgataagaagagctggatgagctctgcccagttatggatctcgaacctaattccaattccgatcggtacgataaaaagcaacctttttatgtttgtgaagaacatatgttgtgtg

SEQ ID NO: 10806 - DNA, 1184 bp, Arabidopsis thaliana
tactgatccgctcctacgtattgtgcgcaagatatttgcagcaaaccgtgatgcgtatattgtagcaccgaggcttggggaacttccacaagcttctttagccaaagcatcctgcaaccgattctcttcttctttaagagactcttcgagtttcttcttaatgtatcttctccaagcggcttgtatgaagcaagcggcccaagtcttccattgttgtgagtagtacctgaaagtatgtcttagctgtttgctgtgaagacgtctgaactgggaagccacgaatttgaggtcatcagctttaagtgcgaaacttcaacttccatgagagctcgaacagttcttgttgagattgggaggtttgaggatgagtgtgggtctaaagcccaggttaaaagctcctcaccacagaaatcaccggctccaagatactcggaatttaaaaaaccggttcttccaccgtttgttgtgattgttagaagcttcccgcgcattatgaagagcatttcgtctaccggatctccttctcttactatgtagctttcctctgtgtataacacaggttgcaaacggtcacagagcgcatcaagaagctgttcgtccattttctcaaacatggggacctagaaccaacaaaaacaagatgcggttacgagtgatgttgacaataaatgagaaatcgagtaaagagaggagatgatttcttctttacccgcatgagaagggcgagacagagatgacgtttgatgtcgcgtctaagatctttgggaagattactaagaagattctcttcgtcaacacctcttgtctcttgccatttgtactgctcgtatcgccggattctttttctcaagttctcaggtagcaaacggtgtgacatccattgttctgcgtctcttctctttaccctcatctcctccaatctcgtggtagtggattgcagatacgtctgccatttaaaagaaaagcagtaagtaatcgatttcgcaaacactatggcatattagatgaaatgagactaacctgcatatttccaatcaagaaggagaacaaaaccagccccgcaatagaaatgacaccgcgaaacagattcccaaatatatgtacttgttttaaggttctgaccgagcgaactggatcacgaaaacagaacaaagatgcaagaacttagtgttgaagggtacgag

SEQ ID NO: 10807 - DNA, 574 bp, Arabidopsis thaliana columbia
tggtttctgtcttcctctatgctctcttgacagatagagtcatgcttgttgaccaacggaacgatataactgacctcttctgcgagcctttccccgaaacttcctggttacttcctctagattttccattgaatgatcagttagatagcttcaacagggaacactcgcgatgttacggaacaatgttgaagaatcatggcattaactcaacttcaataataccgtcacatctttatcttgatattttccatgattccagggatcatgacaaaaagttcttctgtgaagaagatcaagctttccttgataaagtcacttggctcgtcgtgaaatccaacctttactttgttccatctctatggatgatccctagtttccaaaccaaactcatcaaactattcccacagaaagaaaccgtctttcaccatttggctcgctatctttttcaccgacaaaccaagtttggggtatggtcctagatcatcaatgcctacttatcaagagcagacgagagacttgggatcaagtacgagttttagcaagccagttggatattttcacatgtaatggccag

SEQ ID NO: 10808 - DNA, 918 bp, Arabidopsis thaliana
ggtgcattcaagacacgttcaatgataacaataggaacccgcataggatctccaagtatatgcatgtcttgtattgaacggttgttaatctgcaccaacaaatgtattgaccaaataaactaagagttgataaaaccaagaaagggaactaaatcaaaaagagaagaacaaacccgcatctgtgcaatactccgacggtgaagttcagcacgtgtagctgcaatttgggccggctacatcaaagcaaaaattggatgagtcaggcttgtgttttcacaaaatttgataaatagagagagaacgctaaactcacttcattcaacacgcctgaggcccttttgtgcgcgctctggtttaagatatctgtcattccactatttataaaatgatggggcatttcaaccttagagtacaccatccatattgaccattcagctctccgatctttagtccagatatcacgaagatattcaagtatttttgtgtgattatccctaaaaaggacatatgcgataaatgcctagaatattgatattttcagagtctctcagtagatagataaagaaacgatcttggtctgaaacttaattagatcattgaagtacaaaagaattaccggtgaaatcccagaagtgtgttccaaagataatgcagttgggtgcccagtaagtggaatatacgggatagatgatctttcgagagttcatgaagccagtcatcacttgttaaatcaaatgtaatattcaaattctgtgccaaaagaatggagaaataagcagaagaaaacgacgcaaaaataatcggaaaaaaaccagtcagcatcaaaattaaagcaaggacctcaagactgttttgttccttgccttgtcctgaaccggtacttgttgagttagataactgaacattgttcatatttga

SEQ ID NO: 10809 - DNA, 732 bp, Arabidopsis thaliana
tactttttcatattgaaaaaaaaaatgaaaaatgaaaaggttgtcttattcaaaaccccaattatgaaatcatcccacttcacaccccggaacgcaccgttcttatagagagaaaggcactttcacatccgaaatggctggggagaggaaaggttcctttttttagggtactcctgggaacagatccagtggagacggggtggggcttgtagctcagaggattagagcacgtggctacgaaccacggtgtcgggggttcgaatccctcctcgcccacaaccggcccaaaagggaaggacctttccctccgggggggtaggaaaatcatgctcgggatagcgatagcggactcaaagctatggaacttggggatgggtcttttgtcgaaatagagtggagtgaccttcttttttatttgaatttagatatatatctattatatctatcgcttttttaattttacatatagtatttttaaacggccgaatcagcatattttttgaagccccgtaactcttcctcagccaggcttgggcagaatagcggagcaagtattagtagcatagcaaaaatgcgttcctcatcattaagtcattaaattcatatgtttgctcgcggtaattgtgaactctcgggagaatcgatgactgcatcaaagatgcacttgttagtacatctgaaaattctgaattggctagttgtaaatagccccaggactatgagatcctatgc

SEQ ID NO: 10810 - DNA, 559 bp, Arabidopsis thaliana columbia
cgatgaggcgttggattttgttgagagaatgactgtggaaccgagtgttgaaatgtgggaaacactgatgaatctttgttgggttcagggatatttagagcttggggataggtttgctgagttaataaagaagctagatgcctcaagaatgagcaaagagtcaaatgcaggtcttgtagcagcaaaagcatcagactctgcaatggagaaactaaaggagttgcgatattgtcagatgatcagagacgacccaaaaaagcgtatgcatgaatttagagcaggagatacttcacatctggggaccgtttctgcattcaggagtttgaaagtgcaaatgttagatataggttttgtccctgcgactcgggtttgttttgtaacagtggaagaagaggaaaaagaggaacaacttctttttagaagcaacaagcttgcctttgctcacgcgatcattaattcagaggctcggagaccattaactgttttacaaaatatgcgaacctgtattgatggcccaacacatttaagatgacgcactgatcccggcagacactgatac

SEQ ID NO: 10811 - DNA, 712 bp, Arabidopsis thaliana columbia
ccctaactttagttggctaaccattgccagataaagaaaccatttttccaaaatcaccaagaatacagtcagttccaaaatttgaattataacaaaacagtcagttccaaaaggaagagataagcttacagttcggtcttatcatcatcgttttcacttccctcttcatcgttttgatcgccattacagtcttcttcttcttgctcgggtttgctttctaacaaagcatcgctttcaagaaaagcatcgatttgttccctgacgaaagctttcttatcggttaattcgacgccgaaatacacctccagctgacggcgaacgctcgccggagtcgtagtttctaggtcggagctacggagaatttcccggagctgggtcacgaggtccgagtccgaaaccatttctctgttccttctaagaagaaaaaataatttattttgtttttggttttcttacaaaactgaaacttacaaaagcggtttcggaataagaaaacgatgaataagggcatttatggatttttcacatggctacttttttttatgtttttttttttatgtactattggattaaacaactgtgtcagagtagaacaaaacaaacaaatggaacaacaaaccgaaaaaagtgtggttaatatggcacataaaaaacatgcggaatttgattagaatatattgtagagcttaaaatattcaattgatagaattgt

SEQ ID NO: 10812 - DNA, 694 bp, Arabidopsis thaliana
ccgacccaaaactaccaccacacaagatagaagaagagtaaagggcaatggcctccaaatgtatagacaagctcttccagaggtgtatagcagtttggcaatctgtatttttctgatacacatttatagggacaaacaggttcgctaactcctcctgcagattcaaagcaccttccgtcagaagacatcccaattaagaagacacaaaagatcagggaatagaagagtaagagaactattagaaaaaatacctcgtacgtatacaaattttgcacgacttggaagatgctcaggcgggcagggagtacaaagacgtttgtcagagccttcgacgttcttgtaagtgccaatggggcattcctggaagaatacatgaatccagatatatcgagaagtatcaggcacaagcacacaagacagagatttgcaattatgctaacagaacgctactgggcctgtctaattttgtggtttgttacgcccatttaattgctagaataaaagatgagcagaattggccaagggtaagccataaatggacagtgtcgaagtaactacaacataataaaccagaagacttaccaagcagaatgtaccgtagagtccctttggacactttttcccagtcattgttccctcttccccgaatcgacctccattgtcccctgcacctccgtctgaagacaccagaaag

SEQ ID NO: 10813 - DNA, 1364 bp, Arabidopsis thaliana columbia
ggtcttttcttgaggggtgtttctattaagcggtcttataatatgctaggttctttgtggatttgagttttctattggtctggaacaaacgcgtaatcaggagttcattgattagaagttttgttcgattatatagatagctctcatttcttacataggtgctgtgagttgcattgagtatgtagcctcaggtgggttatcacttatcagaaaaaagtactcttttgattttcttttctttagggaatgtgctgaccagagtaagacaatggacagttatttaacaacttttaggagataggcttatctcaatggctttgctttgtcactacaccataaaaagataaaaaagtgttcatttttttgttcactgagtaacgatactaacagtttcttcatcttccatttcaaacggaaaccaaatctcattgacccgctgactccactggaacggccagctaaattgcgccaccgtgtaagcccaagccgatccgacaccgccggtttctctgcttttctcaattgccttggccatacggtaccttgtaggctcgccttcagctcagccacttgttttccaattttatgatccgcaacatatccactaatttgcttcaccgccacgtacctcgagtcccatctctgtacgtggaggttgtttcccggagtggatcaggttggaatgccttgggaacgaagaaagagactatgaaggtgctcaagttctgagagacttgggtgatataaggaagtgctatctctatcctctggtgataatcgttgttcccgttcatgtaatcagacaatctgcatacaaattagcaaaacgcattttgaatacgttttcgattaaaaaccttagttaatttaggaatgaataatgaataaaatactggttccaaccgttgccagaagcttcgttgagagagatatcttgaattggttcggtagaaatccaaacggtggtgttgtagcgatgaatctcgtagccattcccggcgtggacaacctcataactcggacactcggctcggttacaattcggcggcaacgagtcgataaggtctgaaccgccggagagaagggtgagaaggaacgagagcttgaagatgctcagagccgcttccattggcggatttgttttccgttgcggccatgcaacgtaaactgatacaaggttttatacatttatgaagaaaaacataaacattttttttgtaacagataaggttttatgtgtgtggttcatcttcggataggattaaattgcattgtaaacacatgattaaatataacaagttggccgacaaaaataatatgcattaataatatcgaaattacataaattatcgctttaatttata

SEQ ID NO: 10814 - DNA, 1956 bp, Arabidopsis thaliana
ttttgggttaattaattttgtaggcgaacggatgagaataaggaaaagaaacggaagggtgttagctttggagtcggaacctcacattctgagagtttggcttccaaccgaaaaccgaccaggcctagccatgtcgcgggcttttggtgatttcctccttaaaagctacggtgtcattgcgactccgcaagtctctacgcatcaaatcacttccagcgaccaatttctactccttgcttcagacggggtacgtaaatctaaacctattaagtataaactaaaaacctgccacaccacactttaattttatatgagagactatgtttttgtattttggttactattgatttaaaaccgaaccaaaatccatgttcaattgtggcccacccatttaaggctttttattaatcaacctgggcccaaataatacgaccaaatccaaagtaaagcccacatttaaaataattcgttttagttgaatgacccacttaaataatgattttcttttgtttcttgtataaaggtgtgggatgtacttagtaacgaggaagtggcaacggtggtgatgaagtcagcaagtgaggcaggagcggccaacgaggtggcagaggcggcgactaatgcgtggatccagaaatttccaacggttaagattgacgatatctctgtcgtgtgtctctctctcaacaagaagcataatccacagccacaaatatgaacaaaacccacttgctctaatcaaagaatcatgacacgacagctcacacaagacttttgtgttttgcctataagtgattgtgactgtatatatataatctatatataccgttgtatcttaattcttaagtcgtgtgattatttagaaagaaaaaaaaagaaaaagaagaacaatagattataattaggaatggtgtgtgtcgttgaataaaagcaacaatgaattatgacattttggacacacgtcgtgtggactggtttggactagttcaaattgattatgtaattgctatagaaatttgataataacattttttttttgttaaacaatagtaacatataacgaaataatatcgattttgatcaatatgtttttttgttgttgttaaaagatataattttgatcaatagtttataaccaaattatttaatgacgcatctatttgagtttgattgcttatcagagttaagatggtggaagaaaacaagaggcagaaaaagaaacaaaaatagatatttgccgaaatatccaaaacaaataattatttttgtaagtttgctatagagtgaaagaaaaagattctatattgttgcccccacaaattttggcattccatctctgactaagagagtatattcagttttcggatttatctaaaatttggaataaattaggctcctatattttttatttttagtagtgaatttagtccgaaaacaaattgatcccatctaaaccaaacagaaatagtcaatccaaaaacttcattatagattaatttagtttcaaaactaaatcatctttttattgttcaaagttcaaacttaaacacacttgacatgatcacaagaaatagtgcttatttttctcctttggcatgattctctcatgttctttcttttttttcttttcaaagactcgtcttttttactcatgggatttgtgaaacaaatgaaagaattcaataatgtgtccatttttttgacaaattcctttataatacgccataactcacgaaccaatgtttaagaaggaagcaacatcacgcaactgaattttcaaaatatgtccttttcggtttcttttgtccaaatttccaaagaaatgtctaaatgtgcaaatatatccatttataaaactagacaagtaaatatccaattctagcttttgcgtgttcattatataaacaacgtgtctgttctctccaatcagataaaaagattcaattttatttgata

SEQ ID NO: 10815 - DNA, 1005 bp, Arabidopsis thaliana
atgtgaccacctacaaagttcttggggttaatttcaaataaattacaaaacaaaggacaaatttgaaaggtccacaaatgttaaattttctgaaccgggtaataaaccggaccggtttcgatatatgatacctgagataccggcggtgcagtagacaaggatgaagatcatgccaccaaaagcccacgcgatgccaaggattccgacgccgccgcagtcaactccaccggcttttgtgtcggactgaatcttgtaaccgatgacagttaaaacggtgatgtacaagaagaggagagtggctacgaactcggcaatgacggctctgtataaagaccacttggtaagctcgtccgcatcgaaaaacggagttggtggcggatctacgtagtctcttgtctgaaatccatcaggtccttccacgtctttggccatatgtgttaatggatgtttctggactttctaagtaagtgttttgctttgtggttgttgtagggcttgtggttgtgagatgaagaataaaggttctttatatagagtgagctcttggtttgtgctactgttgattttgacacttttgatttaatgtcacaacttacaacattgatgttttgttttatggtatttttttttgtaacgaatgcataagttggtttagtggtaattttttttttttgctaaagaagttggtcagtggtaactaaaggaaatctaaaacaagtattaattttttttttatctcagtaacttgataatctaaatcagtgagaaccaatacaaaaaatctcctaaagatataatttaacatttcctgaaaagtttatacaaatagtataaatctcatactgtaattcatttccaaataactagattgttaaatgctactgatagatcaccgtcccaagagtcacgtcattaaattttgttaggcatcacccaaaaaatttgaccgttgacaaaaaaccaaaaaccgataaaacgtgagcaattatataagtgaacatattt

SEQ ID NO: 10816 - DNA, 578 bp, Arabidopsis thaliana columbia
ttctcttaacgagttctcagctatgcataagtatatattaaacatgtgggtgaaaaaatttcaatatatggtccttatatttggacaaaagtttttattccatgatcgctcaaagagagtaaaaaggatcaatgttatttacctgaagagagccattcctgaactgctcatacggatgagcatacatcatagctgcattaggccaatgcatatacattgcatccattgtggtgccatagggactcatgattgagctaggatgtggtccgaagccaagaggagcaggaggacttggaatttggttatatccagtgaatcccatttcgtagtatggtgtcggtatttgctgaatgttgaagggtggtagattgaagttctgattcaccggaaggctcctaatgtacctgcattgacacacacaattatcatcaaccatcatgtatgaaactttttcgctagtatagtaatggtttaccagtaaactaacagctgagttactcactttggtgtctgcggtcataatcagggtcaaaccgatctttctctctgtctctaaatattgcaacacgagatgttgg

SEQ ID NO: 10817 - DNA, 572 bp, Arabidopsis thaliana
gttttcacgctttcttttcatctcagttttcttagcttcaaattcttctctccccattataggatgctggagattcatacgattccccatctccgcaaggtccctgctcaagtcacatgtcctggttactaatagctataatgaagatacaaaatcacaaactatctatgaactgagagagcaagtctcagcttctcagtacctataaggtggtggtatattagggaacccaaagccctgtgcagcgaaaggatctggatggatcacaccgccaaatccatagccaacaaaaggaggcatcgcaccaggaaaagggcctggaaacccattgaaaccatgatgaaagccattgaacccaggttgaacgccattgaacccatgttgaacgccgttgaagccgggttggaaacattgaagtactgattaccgggacctgggcccatggcgatcatatagtcagggcctgctagatctggcaaaggaaaaggaagacaaacaatctgttaagcctctctatacagttaacatagtctgggaagaaagagcatgggtagtcacatcaaaataagaaa

SEQ ID NO: 10818 - DNA, 535 bp, Arabidopsis thaliana columbia
cttgtttctccattttcacaattgtacaatcaagctggttagatgaggatttggagcagagagattcgagtttctgatatggaaattttgagagatttctacttacaatccgcttaagactttgatggcatcataaaagaaccattgcaaagtaatgacaggtccaacaatagtgatccgaacaggaaggcttctggtgaatagaccaacaaacccaatattcctcacagcctaaagctcaagcaaataaccaacatcaataagaatactttgcttcatgattgtgaaatttcgaaatggattttaaaagataaataatgatggttaagagtcgacctgcaacacattcttggctttgttgttgtagagagacgaaagaaccacatctgcggggttagagatgattgtacctacggctccagcagtatagccagcaagacatgtgacaccgagttgttgagctttagagcaatcttgcttccttttctggataatcttttgatatataaactcaactgactgctcaaacgttgag

SEQ ID NO: 10819 - DNA, 553 bp, Arabidopsis thaliana columbia
tatatgggtccgtagagtattcataattaaatgttacacataaatgcatatataataccaatcatagaaaaatgactagtatactgtatacagtaaaatttgtagctaatcataaatgtccaactaccaaaaatgtgacacaacagcaatgttggcccatagccaatttttacctgacatttttccagctcttatgttactttaaatttagtgtccaacagttcttacttcttagctggcatgaccaaaagtgtatagcctacatatctaaataaattttataaactagaaacatgaattcaaattaaatgctaatctgatttttaattatttttactctttcatggcaaaaaaagagaagagaattacattagaacatgcataaaatacggaaataagcaatgtggtattacaaatgttgtaggtacaacatttctgtgaacgctatagcttgcggttacacggcgatctcgatagcgattctgatgatcagcaggggaagaagaagcaagaagttgttaatggtggttttgctaggagatctagtgatggt

SEQ ID NO: 10820 - DNA, 631 bp, Arabidopsis thaliana
cccctaaatccaagcaagacctcgtaatcaaaactttctattatctctcttccgcgattaccgtaatctctgtcacaaacaacaaaaccttctctctctcactatcttaatgagagaagaagacattctcgagaaatgagaagactaccactacgatgaacacgacgccgtttcactcggatcctccgccgtcgaggatccagcgtaacgtcgttgtcgaagttgttgaagctcgtaatattctccctaaagatggtcaaggaagctctagcgcttacgtcgttgtcgatttcgatgctcagaagaaacgaacctccactaagttccgtgacctaaaccctatttggaacgagatgcttgatttcgccgtctccgatcccaaaaacatggattacgacgagctcgatatcgaggtttataacgataaaagatttggtaacggaggtggccggaagaatcattttctcggtagggttaagatctatggaagccagttctcgcgaagaggtgaagaaggtcttgtgtatttccctttggagaagaagagtgtgttcagctggattcgcggcgagattggactcaaaatctactattacgacgaagccgccgacgaagacacggcgggtggaag

SEQ ID NO: 10821 - DNA, 755 bp, Arabidopsis thaliana
ttttttgattcgtacaatcaagttaattggtgttcctacatgtgctgatcctaatctcctcaagaagaccatacgcaatcaatggggtctcaacgggtaagatcacgccacgtcagctcaaaacattccgtatatgtaatttagaatttcgttgaccgttgatttttttttttttctgcaaacaggtatatcgtgtctgattgtgactctgtcggtgttttgtacgatacccaacattacactggtactcctgaagaagctgccgctgattccatcaaagctggtaaataaaattattgatttttagtagaaaattaaaattgaatatttttccttaaactaaccaatcttgtgtgttgattgtgtaggcttggatttagattgtgggccatttctaggagcccatacaatcgatgcggtgaagaaaaacttgttgcgtgagtccgatgttgataatgccttaatcaacacgctaacagtccaaatgagactaggaatgtttgatggcgatatagcggctcaaccgtacggacaccttggaccggcacacgtgtgtacaccggttcacaaaggactagctctcgaagcagctcaacaaggaatcgtcctactcaaaaatcacggctcgtctctacctctctcaagccaacgtcaccgaactgtcgccgtaattggacctaattcagacgctacggtcacaatgattggtaattatgcaggggttgcttgtggatatccagtccggttcaaggtat

SEQ ID NO: 10822 - DNA, 943 bp, Arabidopsis thaliana
ctttttatttcagagcaaaagagaagactttacttggagactcgggagccacaagatcctcctctctttatctttctcttcctgtgttttttttttcttcacttgagttaaaaaaatcttatccagtaattctaaccaatgtttcacaaaatttggccaataataatttttcacttgtacatgattagacagagttttgataatgaaaatgatatggtgagtggcgagagagagacatagatagagaaatcaagagcttctaatacatttctcaaatggttttatccttaaaaaaacatcttttggacacaagtacaagtgttccaaactttaaaaaacagagctaagagaaataaagagagagattaaacatctttgtttgtcttcgacttttgagggactttgttttctctctctaatgcattggaccaggaccaccataatgctgtggaggcatatgaccacccggaccttgatgcattgagcttgaagatggtggtgccatgtaatgattgtgaccaccaccacccattcccatagagccttgccctcctggttggacccatccaccttgtggctgctgctgctgctggtggtggctcccacctgctgcgtggtattgctgtggattgccggcgtatggattctgaacgggttgttgaggcattggaaccggtgggttgggcattgtgtagtctctgcttctatcgttgttcacctttatgctgaggtcggtgtggcgtgaataagtaatgtggagcttacaaaaaccaccatcgtagatacaatgtccttccaatgcttccttcgccaccacagccgtttgaacatctggaagaaacccgccagagtcatttgagaatttgctctttacagagatcaataataactaaaacagagtatatcatacaagatgttacctgagtattggatcagtgcctgt

SEQ ID NO: 10823 - DNA, 557 bp, Arabidopsis thaliana
gtttcaactcttgattaattagaaatatactaatgaaaaaaaaaattctgtcttgggaaccactggagccatcgattatgttcttagatagacaaaaacacaaacgaaaacaaaacagtctttcattacctttcttgtgatcataactgttcaccgtctttaatgcaaaagaacatcaaatctcctgacattttgcttaacgcaaatctcaaccccagtctctcagattaagaacatcaagtctcctaataatattattttgtctttcatatctacagaattgtgtataatattattaaagaagagccaaatctcttttaaagattgactattaagaaagagctaaagatcttgatgagttgcgaagcagctttccgatattccgcgagtgcccatagtgggaagatgtttctgtacgtagcatagtgtagcatgcatgtattcatgaacactcctaatatttcctgcaaagacacgacaataacaaagaataattaaactcattacatatacacatcaattttatatttactatcgttagaaacaagaaaagtgag

SEQ ID NO: 10824 - DNA, 1190 bp, Arabidopsis thaliana columbia
cccacaccttgctcttaaagttgtagggttgtgtgacttttgaagaccacacacatgttttaatatctgtacctatgctcccatggatagcaagaagccagacatacattcttccaaatattacatgttatacatcacatttcagaatctttctgaacaatatcatagccttcaaagtctcttgaaattacaagatagagagatgatgatcaaaaaagtgatacatttacaaaatgaaatgaatgataataatatgatataagatccaggaaaatggtaaagcactacatgtatcaattgcaactatataatgtaaaatcccaccaagaagcactatttatttgtttttttaatttactcacacaacacttttaaacacaacccataataccaaacttaacatgacaccagactctttttttgatgcagcaacttgtaaaagaagagaagaaaaaagaagtaaaagttatatatttatacgtttaaaaaccaacccggggttttcttcctccaaaattttgtggttcatcttcatgtgttccttgtgtgtgtcacaatggctgtgaactccggatctgttgagtcatgttctcagctggaagcttagcagcagcagaaccatcaggcatcaccatggcaggtggaggcccagtcattgtctggtactgtgcatgtcccataggttgagtgtagtatatctgtgtatgagcattgtcgacatattcatatccatagtttggatcccagctgaaccagactgaggagggtgacggatctgcgaataccccatgaattgctgctggtttgtgggaatctggtgaaccatctgagcaccgcccacacctggggctgttgtgtaaaccccagcctgtcccatctcaggtttgccactgctaacacttctcatgtggttgttaggaggtggaggcatcatggtagagttgggatggttagaggggatagaccctgcagcatcgctcacacttggagattgtggcacaggcatactgtagggcctaggtgggacaggagcagtgacataataaacaggataaggctgctgatccagtcgacctgcgtgttgatggaaggactgttgaggctgttgcgaagggtaaacctggatgtaagtcgggacaggaaggccgctagacgggagctcattcgcaacagttccagaatgggactga

SEQ ID NO: 10825 - DNA, 1026 bp, Arabidopsis thaliana
ctccatccaatgtctcaacctttacaagtccatacgcattacaaaaatccgaatcttcgcccaaaaacagaggttcttaacgccttacgcggccaccgtaatattgaagtcactgttggcgtgagggaccaggacttgggtgctctttcagctaacgaagaagctgttaagggctgtttgcaaccaacatcgagtcttacttagccgatgtcaacattgcgttcattactgttggtaacgaagtcatccccggaccaatcggtcctcaagtgcttcccgtcatgcagtctcttaccatcctagtcaagtcgatgaaccttcccatctcgataagcaccgtggtggctatgtcgaatcttgagcaatcatacccaccttctgctggagagttcacgtctcaagcgcgagaacaacttgtccccgtgctgaaactattgtctcaaacaagtacgcctattctcgtcaatatttacccttactttccttacgcatccgacccaacgaacatccctctagactatgctaccttcaacactaaggccaccgtcgtccaagatggaccattgggctattcaaacatgtttgatgcaatctttgacgcattcgtgtgggcaatggagaaggaaggcgtgaaagatttacccatggtggtgtccgagaccggatggccatctgccggaaatgggaacttaaccacaccggatatcgcgggtacttacaacagaaatttcgtgaaacatatagtaagcgggaagggaacgcctaagcgacccaacaatggaatggatgggtttttatttgcaacgttcaacgaaaatcaaaagccggccgggactgatatgaagcccatctataagctattttaagtttgaaagctgcttggactttccctattcactaataataatctctgctagtttgttagtgaactaagattaacacatgttattggctattggcttatgtgaaagtgatgagatctggtagcgagcttagttgactttttaataaatctgaaattggtag

SEQ ID NO: 10826 - DNA, 974 bp, Arabidopsis thaliana
agcatactgtaccctaatagatgcattctgcaagcatatgaagccaaccattgggcttcagctgtttgatcttatgcagaggaataaaatctctgcagatattgcggtatgtaatgtcgtcattcatttgcttttcaaatgtcaccgcatagaggatgcttctaagttcttcaataatcttattgaaggaaagatggagcctgatattgtgacatataacacaatgatatgtggctactgctctttgagaaggttagatgaagcagagaggattttcgagctgctaaaagttacaccttttggtcccaataccgttactttgactatacttatccatgtactctgcaaaaataatgatatggatggtgctataaggatgttctccataatggcggaaaagggctctaaaccgaatgctgtcacatacggttgtctaatggattggttttcaaaatccgtcgatatcgaaggttctttcaagctttttgaggaaatgcaagagaaaggtatttctccaagcatagtaagttatagcatcataattgacggtctttgcaaacgaggaagagtggatgaagcaacaaatatcttccatcaggccatagatgcaaagttattgcctgatgttgttgcctacgcaattcttatccgtggttattgcaaggttggaagactcgttgaagctgcattgttgtatgaacatatgttaagaaacggagtcaaaccagatgatttgcttcaacgagccctttcagaatataatcccccaaagtggttgatgagcaaaggggtctgggtacacgataaaccgatgcctgattaaggaatttagagcaaatggttgatgaatatgatcatatggattggtgtttttcaggagtttctatcataatcatcaaggtgcatgcctcttgcactcagctcaaacaagacagtcacattgagttttcgagatacacagtgagcacttgtga

SEQ ID NO: 10827 - DNA, 646 bp, Arabidopsis thaliana
atctcctctaagtaactttcacacttagaatagcttgtagataggcttcatatcacttggattgtataaaccaaagttttgttcagtcccggccggcttctgattttcattgaacgttgcaaacaaaaacccgttcatgctcttgttaggccttttaggcgtcccttttccgcttgctatatgcttcacaaaatttctgttgtaggtggacgcaatagccggcgtggtaaagttcccgttccccgcggatggccatccggtctcggacaccaccattggtaaatttttaacgccttccttctccattgcccacacgaacgcatcaaagattgcatcaaacatgtttgaatagcccaatgatccatcttggaccacgatggacttagtgttaaagctggcatagtcgagacggatgttggctgggtcggacgcataagcgaagtaagggtatatgttgacaaggattggtgtgcttgtttgagacaatagtttcacacggggacaagttgtcccgcgcctgggaggtgaacattcccgcggaaggtggatacgactgcccaggttcgacatagccccacggtgcttatcggatcgaagatcctcgacttactaggttggtagagactcatgacgggaacacttgagg

SEQ ID NO: 10828 - DNA, 1295 bp, Arabidopsis thaliana
tatgttttgcatcggcatatatcttttgattttcttctgaaattctaacgattatcacacatctcatctggctatatcattctccgtcttcgcaacatctttctgtcgcttatatatatacaaccagaaaagtaagagagacatattagacaaattgtatgaagctctctcttaattcgtttcgttgtacaataatgtagaggagacgctagacacattgagagatgcccatgggaagtgtgtgacagcaacaacaatttcatctacgctgttttctacctcatacggtttgacaaacaatggtaattaacaaattccgttacattaatacatggtcgatctcacactgaatattaactcactcctcctttatgtttcgaatattcaacggcgcattaggtattacattcaccggctatccggtcattgaagccaaaatcgcatgatgtcgtcaggatcatgtctagatggtctggaagataaattgacctcagcttgtgcatgggactcacgtgttaaaggcgtattttatcatcaaacaacgttcagtattcctctcacacaagttaaaagtttcatcaacgacatcaaatctcttctcaagatcgattcaaaatctctatgcgggcttgaactctactatggcatcctaatgcgttatgtcacatcctctccggcttatcttggaaaagaaacggaagccatagactttgatataacatattaccgagccaatgatccgttaacaccgcgactctatgaagattttatcgaagaaatcgagcaaattgcgttgctcaagtataatgcattaccacattggggtaagaatagaaacttagcgtttgatggagtgattaaaaagtacaagaatgctccagcattcttgaaagtaaaagagagttatgatccaaaaggtttattctcgagcgaatggacggatcagatcctaggaattaaaggaaacgcgtcaatagtaaaagatgggtgtgcattggagggtttgtgtatatgttcgaaggatgctcattgtgctccggcgaaaggctatttgtgtcgaccgggaaaagtgtacaaagaggctagggtttgtacacgtgttgatgggataataagtgtaattaaaacagtaagtacttaaatataattgcttctaatatcagtaactgacgtcgtctatatgcgtgggtaaatatatattgtgggcctattaatgttagagtgtagcatcggttatgtattatagagtcgtgctatagtgtatgtacgtaaataatttcaatcggccgtgcgga

SEQ ID NO: 10829 - DNA, 631 bp, Arabidopsis thaliana
ggttcaagagaaggaagtatgaaaggtccattgtcaattgctgctgagatatttgaactgacaccagctttggttgttgttgaagtgaagaagaaaggaggtgataaaatggagtatgatgagttttgtaataaggagttgaaacctaagttgcagaatttgtcttccgaaaaatggccaacgggtttctggttcgcgttctttgccatcgtttttactttctgatactgattaggaagatgaaaaatgaagtttttgtttctgttttattagttttgtgactcatatgtggggttaacgacttgtaatgttcttgttctttgatggtgtgtgagagacattagaatttagacctaaagagagtggtgagatatgaatcattgatgtgtagaaaacacagatggaataaacaagtttctttatgagtttgcttcttttttttctttctttttccttcttttgaattttaattctgttagtttgaaatatgacagaaattcacttagaacaagattgtgtaatttctgttggaaattttgtctactaacgtcaattaatatgacggtttatgatatataattgaacatgtagagtttcaaaaacaaaatcttgagaagaaagttacattata

SEQ ID NO: 10830 - DNA, 1147 bp, Arabidopsis thaliana
tcggttcactaagatctttgaaatgatcttgtagctgacattgtagagggctattggcctaaactccatcatacttgttggtgcttccgtctttggtatgaggcagatgtttgtatggttgtgttgctgatttagaaaaccctctacaaagaatctctcaacttccttaataattgtagggttgatatcatcccagaactcgtgataaaacgctgctgaaaatccatcaggtcctggagctcaatgtggtccagtactaaaaacagctgtctttatttcctgaggagtaacatgtcttgtgaggtccatattcatctcctgtgtaacccacttcggaaagtcttagaaaatctgagaatgcagatcagtagtatctggcgtagaactaaacagttcttggaagtaagaaatggcaacatctgcaacttccttgtctcctcttctcgcagtaccatctttgtcttctatggaaacaagtttgttgcgatctcttcttgtctttgtcactgcatggaaatacttggtgtttcgatctccctcatgagtccatttatttctgctcttgtgcttccaaaaaatatcctcttcaatataagcttggttaaggtcctgtttcagcttttgtctctctgcaggagatgaagttccaaaggaaaaagctttatctagattataacgtataatcccctaagattagccaaggctctctccgtcaatttattccaatcctttctagcctctcccaaaggtcatttctgaaactaggatttggaggtccatacacaaaggaaaaatagaaactagtttcattagatttcacaaggcaatctacaagattaggggattgaaataaaacagagacttctagtgaatgcttccataagactactaaaccagcactaaggcctatgggctgaactgttacatgaaagagaaaacctaattcacaagcaacatcacgaacacgatcatcttgttgtttggtttctgaaaggcatatgatgtccgagagatagcagtgtgttatctccttgaggcgtcgaactgtgaggtcaatgcctaagactcgacagttccagcaggttatcctcatggcggctgtggtggtttagggccaccgcgcctctacactaggtgctccactgga

SEQ ID NO: 10831 - DNA, 597 bp, Arabidopsis thaliana
taaaaacttgaaggaaggtgcatgtctcaacccaccggactcagaaacccatctctctggcttgaactctgttgcatcttctccccaaaccgctctcatccttcccaacgcgaaaagaaaaattatgatgactgagtttgcttctaccttatgcccacttggcagcacatctggctttataggagacttgcgttggaaggcaaccggtggatagagcctcattgattcatacaacgccgcatgtaagtagaccaacttgtctaagttctcttggccatttcttccgtcttttgaaatatttttgtcgatgatctctttacgaatctttgttacaacttgagggttttcagagagaagccaaaaaaaccaagagagagcagaagacgttgtgtctctcccagcaagattgaaagctaagatggtgtctctgaggaacttatcatcactcgggttcaagagctcgtacttggttgtatcaagctttatgtgagatgtcaaaagatcctcactttcaccatttgcatgatgatcaatcccctgtgaccttatctcttctctgttagctaatatgtatttcgcagaaacgcgatcaaaagt

SEQ ID NO: 10832 - DNA, 492 bp, Arabidopsis thaliana columbia
ctcaatttccaaaagggtatacgatttacggacagaatcagctaaaaggcaagacatttgtaccttgacacgaaccacttggctcttgggtcgtctaagggggagatggcttccgagaccagaagatgggtggtaatgagaagacgagcaggaaggagaagatgagagaagacgcaatctcttgtcggaattcagattcgagtttggaggtaagcaaggttgcagaggattaagagcggtggcaaaggagctgaaggacgaggagacacgaatggcttgaaccgacgtcgtcgttaatcgcacaactccagccatctaaatgcacccagagagagagatagagactgagattgttcttggttttgaatcttctccgagagatcctctaaggagaagaagatcagaaactgtctggttcagattccagtgatatttctctcatcatgtctctccaattatacatagacgcgatttttcaacattaaatagcgt

SEQ ID NO: 10833 - DNA, 778 bp, Arabidopsis thaliana
ggtactgggttgtatcaagctttatgtgagatgtcaaaagatttgcatgactatctctaatgaaatgatcattattattcacttgtgatctttttacctcttctctcctggctgatatgtatttcccacacactcgatcaaaaatggcaccagcttctatcatcttcttctccatcccaactccgatccagctttgtagcttccacgagaatctaggtttaacgtgcctatacattaaaccttctactattgtgtcgagagctttagcagactcaacctctggcgttttagcagactcattttaaatctcattttgatttattttttaaaaatgataggatagttccattaattaccaaaatgtttgacagaaacataaaattgaaattgtgctcccaattcttttacaaatcttacttaacctaaatcaggaatcaaacttactaaaaactaaaaagaaactagaactaagagttaaaattccttaagtctcatgacatgaagacggagatgagttccctgagccacccaaaaactgaagctctctcttatcataaatctccaacgaaaaatccctcagcggttgcgtcgttccgccaccgctcgtttccatctccgcctcagcgtctgaagcgtttgagacataactagacaccggtctagcaccaacattcagaaacggagctgtagcaacggtaggaatagcccacatttggcccatttgatccggcccaccagtaacaaacgcagtacccatacccataggccaaaacggcac

SEQ ID NO: 10834 - DNA, 790 bp, Arabidopsis thaliana columbia
taggcgatccacccgccaagctcatgaacatgtgttgttgagggaatggtggctgcacatacggcgctgatccgattatttgcggcatcatcactggggtacctcttgaatccaccatgtatggaatagcagttccaggaacatacatgggtgatgacattgacaaaccaggaggaccagtcaatccgttgtagccatacataggggctggagaaaaggagacaccaggggctagacccaaagagtttcccgttcttcccatgtgtaaacctgttgcaggctcgagggacttgccattggacaagaacgaagccatctgaggtacagagtcttttctgtcagcttccacttttgtacccaagatagatatacctggttcttccaatttgtgccccccataggaggctgtactccatgggtgccgcccatagtagggaccctgatcacgtgaatcaatgaaaaactgtggcctgtcattcaaatcaaagtttacttccttgcctgattgttgagcaactgacgatgaggagacaggtgatgcgctttgctgaccattgtgacttaaaaacaatcttgtttccatcttcgactcagaaggtggaggcatctcatcgtcctcgttcatacaattcaaatccaagttgaacttgcttgatcctcgcagactggcttcatgtgaagactctccgacccctagagtttgatgaggagaaaggaaactgtttccaaggagtaagatcttcaacttgatcatctcctacctcagccacgttcagatcgataccacgag

SEQ ID NO: 10835 - DNA, 530 bp, Arabidopsis thaliana
gagagagtaccgtatctcaaagctcaagccgccgtttggcccgtcgcttcgaagtgccgtcgttttccagccggacggtccagggtttaagatcgatggacacgtcgtgaggtaaaataattaacaagtataattaaaaacatggttttaagaagaaaaaaagaaagaacaattatggctatagatcaaatttggcaaacaatagttaagcctatttatggaaatcaaagtcttaaagtcggtaaaaggtgcaaattagatatgcggacaaaattttgaattaaaatgatatgtcaaaagttgtaggaactgaaactttaacagtcaaatatacctttaaattatttttctctaaattagccaaataactgaggagctcaacttttgaatctacatctttcttactatcttactaatattatttgaaaaaaattatttaatgggcatttaagttcaaattagatttaatagtgaagaatttgtacatatcattgttaggtgatcatttatgtggtattgcaaaatatggt

SEQ ID NO: 10836 - DNA, 908 bp, Arabidopsis thaliana
tcttgccgtgtggtaaatgtctgagccagagttaccgcctacgcttgcgagaatctctttgacagaagtaagtaacttcgaagagagcttatcagacagaaagattcgacccattagtgttccattggttggtgatccacagttgatcaagtaattatccacaggtgtgaatccatggcagatacaaagcaagatcgaaatcgttgaaatcaagatgaaagtttcaaacttttcaatacccattttgacccaatagagaataaacctggaaatggaacagatcggggaaaaagaatcaatcaacaagattcaagaaattagggttttataacatgaacttgaaacaaagcaaagatggaaactttttctaaaaaaacaataaaagtatttacctttaagacaagagatttagtatagaagtaacggtcccatgaaaggagctgattcaggtaatgaatagatcaagtaaccgaaaaaaaactcagattttgagtttttgggttttgtataaaatatagcaaaatctgtacttgtattagagagtagaatctcgcgaagaacagattggttatagaagtattgattctttgtgaactctgcaaaaaaatgaactctggtctattcaagagagaaggaagaagaaagaatttactggctgtattaaaaaaatttagtagaaaataaggaatttccagaaaatgattaaaatcgtaaattattcgttgcatttaatatgtcaatggcaaaaagctgtttttaatttttcgtcgaaaatagtaagatgtgggtatattaatttagaattgttaggtgttttgtttcaggtgtattcctatggtggtggtttgcaacaaagtctttgtttgatgatattatcattttttgcgtgaattttgaaaattttgtta

SEQ ID NO: 10837 - DNA, 622 bp, Arabidopsis thaliana
taatgaaaatgatgaaactaaagtaaaaaataagcgaactcaatgctagaaaagagactcctgaatgcatatggtctggccctccatacaaaatgtaactaccccaatcatctctaaacatcgctctgatgttgtagaacttagggtcgtctactagtactcctacatcacgaacggacttgaatctgttgttatcgacaatctccaaattgtgaaagtagctaacttttctgaagcctccgtcggagaagcgaccagatcccatttgtgttgttgtgtgtcggccaagactttgtgaattcacgacctcaccaccccattgcacgtcgtctgcataagctaaatttgggaaaattgtacctggccaatatccaaccaatgaatggttggatcccaaactcagccaccagttttcggactcttgatcctacataattatttataaataacgatatttaatttgtaattttgaaatgtaaaatttgttacgttaaaataaaagtttttaacagcaaactaactaactttccatactgatacagtgatctcaaattgtttaccctcgaatgtagagacaggagtaatggtgcctccaagaataatggtgttacttgtttgtatg

SEQ ID NO: 10838 - DNA, 591 bp, Arabidopsis thaliana
tccatgcatctcaagatccttcttcaatcatacacccatgaattcgcacatatacgttgatgtatatgagattatgaaaaattcacgtacacattacatgtatcttatagacatcgctaagagcatagagagagagagagttgggggaaaatgggggccaaaagcaaaagttcgagtacgagattttttatgttttatcttatactaatatcattgtcgtttttgggtttgctcttaaactttaaacctctgtttctgctcaaccccatgatcgcttctccttcgatagttgagattcgttattctttgccggaaccggttaaacggactccgatatggctccgactcattagaaactatcttccggatgagaaaaagatccgagtgggtcttctcaacatcgcagagaacgagcgagagagctacgaggcaagcgggacgtcgatcttggagaatgtccacgtgtcgctcgatcctcttccgaacaatctgacatggacgagtttattcccggtttggatcgacgaggatcacacgtggcacattcctagttgtccagaagttcctcttcctaagatggaaggttccgaa

SEQ ID NO: 10839 - DNA, 583 bp, Arabidopsis thaliana
ccgggtctaacacggcgcgaattaacaatgttggttggtctcgcctcatcaccattgcagctcaggtacctattacagtccttgacaatgaatttcttcttatcatccacatcagtctctttgactaccattgcaggggaccacacagcttctttggcagaaaacacttccaccattgtcccggggctaaacatggacttattcgattccttcaaagacaacaaattaaagtctacttttaagcattcacaaccaaaactaaacctttaataattttaatcatagcatataacaagaacaaagaaagcaacaaaattttgacagctacaagcaaaaacaacaccggatttaagaaaggatctcttaaccatggaactataacactcaacaaacgaaaaatagagaaaagtttcagccttttgaaactaaagctgaaacctttaaccataacacgcaaccagactcaaaacggattaaagcttcaacctttttgaaagagagcaacaaagagacagtttcaaacattcaagcaaagacccacttcgaataaatcaacctcatacctcaatttctggttggatca

SEQ ID NO: 10840 - DNA, 1116 bp, Arabidopsis thaliana
gggttattgaaacccgctagttcagctaaaagtaaaaatagttcaactttgttaaatatatgaactattaaataaataataatgagacaagacgcttgaattaatattaatctgataactttgaattttcttttaaaatatatttttattagtattgttgaactccacaacaatgaattttcattccaaatataattatactcttttaataccaaagtatatgtttgttttggatcggattcaagtatactaaaatatatgattaatgtaattaagtttgactgaaattttaggaattcttctcaaagttttggaaatgtttagaattttaagattttggtggtgattttagaaagaaaatataaaatgctgtattttctaaccttgaatacttttttgaaaaacaaaaaaagaagttcatccatatccaagtgatgttagaaaagaaaatttaaaatgctgtattttctaaagttaaccttcacgtctttttttgaaaaaaataaattcatgcatatacagtttaaacattatggacaactgtctttataatttttttctgtaagaacccgatcatggtcggctatatgacaatcgaataacgtaagaaaaaatggattcagctaattaaatcaagaaaaccggattgaaaacttaccgataacgtctggaatattccgaccgttgctaaaccgaccggttggaccttgaaagtaatctataccataaggtaaatagttgaccttggccttggtgttcaaggcattgttgttaccgttgtcgaagacagagtctccaaacacgaagtaacacggcgtttgctgtccatgcaccgctggtgccaccgccgcgactgcaaacacggtggccaaaataatccacaatgccttggactctccctcgaccatttttcgcaaatcgaattatacgaaaaatgaggagagaagaaaaagcttgatgagagaagaagaaaagtgggcttattgtattatatggactagatttgtaagtctgatggttagaggggattttgcttagacaagtagaaaattatgcgactatatataggatgaggcagtgagtgaatcaagggagacttggagacctatataaatt

SEQ ID NO: 10841 - DNA, 741 bp, Arabidopsis thaliana
attaatatctattaacaaaatcaaacaaaacccatcaatcaaactagccaaaggaatgattccaaaaccgaaaaatcagatctttaccaaaatatcaaatgttatcaatcaacaaaaaaaaggggaaatttttagggcacaaaccatcgtcggtgttgctgtagttgacataaccataaccaagagaagtattggtagcagcatcacgacaaacacgaacagatacaacctgacacacctcggtgaaatagtcataaagctgagaatcggtgacattgaaatccagatctccgacatagagagaacaaagagcaccgtgagtgactccgtctccaccgccgccgacgccgattccaggggtagcagaagccgtcgcagccccgtcgttaacaacagcaggaggaggaggagaatgtgaagaaggagcttgaacctgagccattttttttgctgggattgaagaaacgaaagctaaggctttttttttggttttttggttttaatgataaattaagagataaataaggttgacgacgacgatgatagatgaggaagacgaagtggaagattgttgtgggcagcacggcgagaccgcagcggatagtgattgagaaaagttgagattatatagttgctcaagtcttacacgacaagagtagtgaaatctgaaaaccctagtcccaggttaaaaggttaaaactttagtttttatttaacggttagagatagataagagaatta

SEQ ID NO: 10842 - DNA, 1637 bp, Arabidopsis thaliana
gttgatgacaaccacttatccctccaaaatctgatttgtcgcccgtcaccaatgacccagctatagcccggatacactacttcccggatcccaattcccacactccgccatgttgaggaccaattactctttgccaccatccaagactgatcctgaattaatcccaccttatacttctttctcacaacttgcaccaagagacttgagatatcatgaagcactcgccaccctatcttagcaataagcgctatattcatttctttcgcaaactgaatgcctaaatcaccatcccatttcggtaaacaaactcttttctaggccaccaaatgttgcttctttttgtccgctatactttgccaaaggaaattcctggctaatctgtccaaactctccaaagtcgattgtggccgcttaatcacttatatagtgtgcaccagaatagatgatatcactgattttatgagcgtcactcttcccgccaggctcaaagttctgcctctccaccctgccaaccgagttgaaactctctcaaggatgtcaccaaaggttgccttattaatcctcttttgcaaaatgggcatacccatatattttcccaattctttggttgactttataccgctctcattactgatttgttgcccaagctctcgcgaaacattatccgagaagtagattttagatttctcaagactcactttctgtcccgacgcaatacaacacttttccaaaacactctgaatcactcggacttgagctactgaagcttcagcgaagagaatcaaatcatatgcgaagcatatatgtgacagttttggccccgactgtgataaacatataggcttccacctttttcctgctattgctccatcaatcaagtggcacaggcgctccatacataaaacaaacagatacaaggacaacaagtctccttgccgcaacccttgccttgctttaaacagctctttctgttccccattccaaagcaagctcatggatggtccctctacacattgcataatccatcagacccatgtattagaaagacctgcaatctccaaggtgtcttccaagaagtcccacctaactcgatcatatgctttctccagatcaaacttcaacaacatgcatcctttgtgtcccttcttacatcgcatggagtgtacatcctcttccacaatttcaatattgtccgtgctaagcctccccggaatgaaactagtttgagaagggcctatcagcttagttattacactcttcaatctctccaccattgtgttagtaatgatttccaataacacattacataaactgatgggtctaaactgagttattttctccggtttgcctactttagctatgagtaccaccatcgcatcatttgtctcctgaggaagatttcctgacagaaaaaagtccaacacaaaacgagtgactgagtcaccaacaacctcccatccttgttggtaaaacacaggctgaaatccatctggcccggtgctttgaaacgactcatactcttaagcgcactctccacttccatagccgagaatggcttattcagcctaatttgctcctcctgattaagtcccaggaacctgcctgctggcagcctctccacaacttcatccacatca

SEQ ID NO: 10843 - DNA, 1347 bp, Arabidopsis thaliana
gtaaatatgattaaaactcaatcagttctgtcggtgaatgcaaaaaaaaaaaaaaaaaactcaatcttggcaagtaacattagagtaatccccaaacttcatcaggctaataggttggttttagttactgaaaagaattgaatctcatcctgtgttcacttaaacattcttataggagttaaactataaactaggagactaaaatgagacggcacaagtaaaatcaaacgactttaacaatgtgatatgattcgttcttgggaagaagaacatttgataaccctgaaaacactagacttgacacaatgaatgcagatcttcgttctaaacaattcataatgctaaaacaaaaccagatctacatgaaacacaatatcaatacaaatgagaataggcttataatatacctgagcagcaacgagaccactgatgtgagccatgtcacaaagcaaaagagctccaaccttatcagcaatagctctaaatctagcgtaatcccaatccctaggatacgcactaccaccacagataagcaacttaggcctgaaatccaacgccttctcttcaagcttatcgtaatcaatgtaaccagtggtgaaattcaccttatacggaagactctcaaagtagatcgaagtcgcagagatcttcttaccaccagatgtatagtaaccatgagtcaaatgaccacctgaaggcaaatcaagccccatgatacgatcgtgaggctgaagcaaagccgtgtaagcagcgaaatttgccggagatccagaatacggctgaacattaacgccccacgctgctggatcacaatggaaagctttgagagctcttgaacggcaaagattctcgatctcatcgatgaattcgttacctccgtaataacgattaccaggaataccttcggagtatttgttggttaaggcacttccgagagcttcgatgacggcgaaggaagtgaaattctcggaagcgataagttcgattcctcgacattgccgacgtttctccttctcgattaggtcgtggatctctggatctacggagacgagagaggtgttaccccatgaagagactggttccatcttctttgtagattgttgaatggatctgagatcggagaaagagggagggagagatctgagatcagagagtgagaagtgggaagagaggcggttgggtttaaaagaggagtagaaaatggggtaaattacggatttgtcctcctttgctaattttggtgttagttggttaggtgtgtgtggtaggagaacaagcttagtgtgttttgactattttaccctcttaccaatatttgtttcccttaattaattatgattagatgga

SEQ ID NO: 10844 - DNA, 980 bp, Arabidopsis thaliana
ggttaaaactttccgggtcggaccaagaattcgggtcacgccctagagcgtaggtattgaccatcacacgcgaacccttggggatgaagtaaccggaaatctcagtgtccttcaccgtctcgtggaggaggagagggaaaggcgggtggagccggagggtctccttgaggatacacttgaggaaagtgagcttctcgaggtgcgtgtcctccacgcgccatctgtcaagcccgaccacactcgttagctcgtcctggacccgtttcatgttctcggggctccggagtatctcggttagcacccattcgattgctaatgccaccgtctccgttcctccgaacatcacatcctttagaaaataaaaaagtttttattttttttggtggtcatataatctcacttatgaaaaatataatgtttaaataccatgatgatgccttttatgttatcgagattaattttggtgactgagttgttgactttgacttcttcttcgtagaacgcaagtaattgatctaccatatcagtctcttcgtcaacgttatcatgttctctcttcttcttgtgcaagtgatcatcgatgacggactcaatgaaaccgtctagagattttcgggctttctcaactcgcccgtttatcccttgcgggtcaatccaactgagccacgacgggacataatccgctacgttaaactcaccaaagagcttagagaactcttgaatgatctcaaggaactcgtccaaacggctttcatcagatgtggatgaggaggaaccgaaagctgctcggaacgttatgtctcttgatagggaaaatgctagtttacatatgtttagtggttttccgacgttggaagcactaaacggaccgatttgtggacctcttcatcaacagagacccacgactcggcctgtttacgctaaagagcatcatgacgtagagttttctcatcgacgccaaaacgggccgtaattgcaga

SEQ ID NO: 10845 - DNA, 913 bp, Arabidopsis thaliana
ccggctcttcttcaaacaaactcgccgtagatcttctagtttcagttcgcgagacgctaaacgacgccgttgccgttgcggcgaggtgtgaaggaccagatttagctgaaggtaagcttaaaacgcagagtgaggttgattcagtcatggcgagactcgatcgtcatgtgaaagatgctgaggttttgattaagagtggtcttctgattgataacggaatcgtcgtttctggattttcgatttcgtcgaagaaggaagctgttagattagaagcgaggaatctagtgattagattacagatcggtggtgttgaatcgaagaattcagcgattgattcgttgattgaattacttcaggaagatgataagaacgtgatgatttgtgtagctcaaggagttgttcctgttttagttaggttacttgattcgtgttctttagtgatgaaggagaagactgttgctgtgatttctagaatctctatggttgagagtagtaaacacgtgttaatagctgaaggattgtctctattgaatcatctccttcgtgtattggagtcaggaagtggttttgctaaagagaaagcttgtgttgctttgcaagctttgagtttgtctaaggagaacgcgagagctattggttgtagaggtggaatctcgtctttgttggagatatgtcaaggtgggagtcctggttctcaggcttttgctgctggtgtgttgaggaacttagctttgtttggagagactaaagagaatttcgttgaggaaaacgcgattttcgtgcttattagtatggttcttcaggtactctttggctcaagagaatgctgttggttgtttggctaatttaacgagtggtgatgaggatttgatgatatctgttgttagagaaggagggattcagtgtttgaaga

SEQ ID NO: 10846 - DNA, 947 bp, Arabidopsis thaliana
gcttagtattaatatccctaattgaaggctatataagaaaacaaaaaaaaaaaccaatcatatagttaatgccaaagttattgaaattgtaatagaatttattaatatagatgtgaataactttccgatttattcaagatttgatgaccggatctataaaacaaaaacgaacaaagttgaccggttctatggaacttttgctcttttatcacatctctatttaaatgctagctatgctaaatataaagttttctatcctataaaaatcattagttttttcagtaagagtaatatatatacctcgagaaaagacacagtgttccttgggtttgatccggtgacgaaacgagcagcctcagtcgctggattcccatggcacagaacgtcccacttttttgcatacaaacattaaaaatcttgttaattaccaaaaagtaaaaaagaagctgattaataagttggacttgtgcagtgaatgaaaccatttattctttacctggtgacgaacctccagatttctaaggaaatcgtagacttggagaggagggagagggagagataaagatgaaccggcgcagacgatgagaccaggcggttgaccggcctctgtgtttgtctgcaccgaaatcctaactccgctattgttggctccagactgttgcgggagatcgagtttgtcagacattttcattatccatgcaaagttcttcaacatgctttctcccagactcatgacgctccttcatcctgctatggtcttcacaagtataacagacgagaaacattttgaaactttacaaatagttgaaaagctttaagtaccaaaagttttgatactagcacttggcgatatactgactaaatccgcatatagtacacattttaagttacttatgcactaagtgggtcgtatcagtataggtgtaactaataatgacctccggggt

SEQ ID NO: 10847 - DNA, 762 bp, Arabidopsis thaliana
attatcgtctaaaatcaatctacaggtctttcattgattctctcatatatcctctcctgtctttacttttttttttcttaacttgttttatacgtctatctatatatgtaagctcgttactagtaattaaagcttagttaagcctaattattatggtattaaaatagtctgtaactcctctcctgattgcttcaccttcttctttactacaggtttcagctcctcaatgtccatggattgcttaagctacttctttaactacgatcctcctgtccagctccaggattgctttattcccgagatggatatgattatccctgaaaccgatagtttcttcttccaatctcaaccgcaactggagtttcatcagccattgtttcaagaagaagctccttcacagacccactttgaccctttctgcgaccagtttctttctccgcaagaaatctttctccctaaccctaaaaacgaaatcttcaacgaaacacacgacctcgatttctttctccccacgccaaaacgccagagacttgttaactccagctacaattgtaacactcaaaaccatttccagagccgtaacccgaatttcttcgaccctttcggcgacactgatttcgttccagaatcttgtaccttccaggagtttcgagttctggatttctctttagctttcaaggtaggctggggagatcaagatgactcacagaaaccgacgcatttatctcagagcatcgcgcatagagggaggagaagaagaat

SEQ ID NO: 10848 - DNA, 783 bp, Arabidopsis thaliana
ataacttgttcgcatgatattaccgagatgtccccacgggcatcttttcacctcgtcgccgacgacaattagattctcattcatccccattgttgtatttatcaatcctactggttcttaagcttatgtatagtttagccataccttgaagattaagctcttgccgattctaccggcgggatgattagctgcatactcttccttggagagatttctagccgccatgagagcaacggcaatggtatcaccaaacaccatctgaatcgccgtagaagtcaccggagcgagattaaacggacacaattctctctgaagaggtaaatgcacattcatatcacaaacaccagcgagtggattcccagaaacagaggtaagagacaccagaaaggctcctttagctctagcgcaagggacaagacggagaagctcctcggtggcgccagatttgctgaagaaaacgagaacatcgcgtggcgaaagagcgccaatgtcaccatgaagcgcatcgagaggggagaggaaagaggaacggaagcttaaggaaacgagcgtctgtgaaaccttgttagctacgaaagcggatttaccgacgccggtgaagaaaacggtaccggtggtggaaaggagaatgcgtgagaaatctagggtttgagagagatcgagatgtttgaagaagtgattgagaagatcttgctgggatttgaagaggttgaggagattatcatgagagatctcttggtggctggatccgcatttttgagggaattgtgatcgattgatgag

SEQ ID NO: 10849 - DNA, 1217 bp, Arabidopsis thaliana
gcttcccggtgttctacggtgcgcgtcgacggagtcgttaacgagtttgactcagaataatgcggcggagatagagttgaagtatctggtgagtcaacacgggtgggaccgtgaggagattgaatagagacgacgaggatgagatcaggagagtgtctcttgttcaagccgaagctttccacatccctcttgctctttttgatgattttttcttcatgttttttcaggtttgtttatttttcattctcatatatgatttacattgaagattattgttttgatgtatatgaagattttgataatatgtaatacaggcagaggttctatcagcacttctttacaaactaaagaattcaccacctgacaggtaaaacaaataacataacataatttctttaagactagtttttaaatgtgattaattataaaagttttaagaatttggcagatatgcatgtctcgtggcggagcaaacaagtgaaactgaaactttgtcgagctcaagtgttgtcggagtagttgatgtaacagctcaaactgaaagttcagtacttcgctattttccgggcgtcgaagaatatctatacgtctcgggtttagctgtctcaaaatctcaaaggagaaagaagatggcaagtacattgttaaaggcatgtgatgttttgtgttacttgtggggtttcaagcttcttgctctaagagcttatgaagacgatgcagctgctagaaatctttactcgaatgccggctacagtgtggtcgagactgacccgttgtggacctctacttggataggcagaaaacgtcgcgttcttatgagtaaacgcttttcttaggcgttttcttcatgtacattttggttaaaacaataaacacactaccatctaattggatacagagtaaatgtgcagaaacatgaactgaactgaaattttagacgaccaacaagatttcaagaaacaaattatccagagaccaaacttttatacaaaagggttaaactaaacggtggcacgaccatgttttgtttctacatctaagatggacaaaagcggcacaaaacgtttttatcctaaataaacgatataaaagccgatcgacactaacgaccttcaataacctggcacgctcccttggagccactcacaacagagtcagtggatggtcagtcacgcagacggtctagtgaggagtgacttgagatctagaggcgggag

SEQ ID NO: 10850 - DNA, 649 bp, Arabidopsis thaliana
gaactcgtatctgacggaaaacagcttatatttcccgtggattcacaacttttcagctgtttatcaaggaatctttggtttatggagcagccattggttggattcacacaattctccattaagaaactgttctccgacgatggtgtgaactgcttgccgaaaagcggagtcatgtcttcaatcttccgagtacaattggttggaacgccgaccaatatactgttttccgtcacgttttggacgggaaactctccgatcttcgccccttggcccgcagcagagcaattgaattggatcggacaaccaagagaaaacccaaagggataagacagagtcaatccaccacatattccgttacaagtttcggtcaaattagccgcggcagaagaaactcgtaggtcgttaaaagatcctccgatcaagattatgatcaaaaccaaatttaacttataagaaatcatcaccatcttcgttgaacgttgattgaatcgatctcaacattcatcaccttcctgtaaacataagaaactcagaaaactactcaccttcatgtaattcatcaccttcgttgaacgttgacttctttctatatatttgtactaatttttttatatatatttataattataattttttttccttatatttg

SEQ ID NO: 10851 - DNA, 504 bp, Arabidopsis thaliana
  unsure (1)..(504): unsure at all n locations
ctagaggagcagtgtgctcgaaatctaaagcccccaggccgtgatcccgccgcacgagcgtccgtttattccggtgctgcgtcagttgggattcagtggtagcgatgagcaggtactggaaaaagttgcacgccaggcaccgcactggctttccagcgtcagttccgcttcgccaatgtgggtagccaatgcggcaacgatcgcgccatctgccgatacgctggatggcaaagtgcatctcaccgttgccaacctgaacaataaatttcaccgttcgctggaagcgcccgtcactgaatcgctgttaaaagcgatttttaacgacgaagagaaatttagcgtccattcggcgttgccacaggtagcgttgctcggtgatgagggggcggcaaaccacaatcgtctcggcggtcattacggtgaaccgggtatgcaactttttgtctacgggcgagaagaaggcaatgataccctttagnnnnnnnnnnnnnnnnnnnnnnnaga

SEQ ID NO: 10852 - DNA, 592 bp, Arabidopsis thaliana
ggtagcctcctctttttgttgctttcagaaatgtgttggtttgcttcattactctgctgagaaaattggtttaagaaacctggactttggacagcctttgctagaaaggacatcatctgttgctgcctctgctccatcacatgaactttctgccccacattctgcagatgatgttcggtaacttgttgttgctgcctcaaccttacaagttcctgcataaggacgttcttatcgcgctgaagtctttccacttcctcttcgagtccaaatttgcccacttcaacgcacgcacccacagatgagtgctgaacttgaggttgttgtggaggctgcacttgtgcaggttttcgccggacaatactctttagtatttgcttttggcctcttaaaaagccctcgtttgcaaactcccagcggtctggatcaacttttctaaaaccctgaaaaaaagaagcatggagaatggaacagtcatcaaccgcaagaagttacttggattccgttgcaataggaagccaacatagaagatttgtataaacataaagaccattaaatacgttaataacaactattctagatatggtatgatacg

SEQ ID NO: 10853 - DNA, 435 bp, Arabidopsis thaliana columbia
ctaagatttacatttactaaaccgccgtgaaagttccccaagaacatcgttaataataaacaccagttcttcaggaccttgcttatccggtgtaattcgagagtaccaaagatccagaacacattcagaaatgaggtgacgagtaaagtgatcaattgcatcctcaacgacttgagagttcactttgcttctccagtcagaccgtggagctgctttagggagttcaggtgttttgtttagagttggtgcattcagagacgacgatggcttgttggtgtaagctgcagcttctcttttcatttcactatcgagagtgtaataacgataaaggatgatcaataacacagcaggagtaaggctaaccagaaccgatgagcttgtcactgcagaagtttaagcaaacgtaaatactcatcagagattgctgagataaat

SEQ ID NO: 10854 - DNA, 762 bp, Arabidopsis thaliana columbia
tcgaaagttaccatcgttctttccttttggtcttctctgtgcgtataggattcaaggtgtcttttaggtcgaagaataatgaacaaacatttcgagaaaacgttggtgttgtggaacatgaccacctgtccgcttcccgatggtcatgatcctcgtctggtgggtccgaggatagaatcggcgttggaaaagtcaggccagtggcgctgccgccggggtcctctctttatcactgccgttggcaacctaacgcagatccctggtggtgacgaatccctgcgaacgctttcttccactggaatcgctcttaaacatgcccacggttagttaaaaatcttctttcatctctttttttgttaattagggtttagattaaacgttagtttcctttacttactgagacagatattcaaagggatttgtttgagtggactgatgagaatcttgctccggctactataatgctcataaccagttctaaggacctgaaaactttagctagtacactttacgacatagagaagaagggatacagaattcttctcgcatatcctccacgagctctagctctccggctaagcattcttaaagatgttcctgaagagttgttctgggatagcttaatggcaggtattttttatggcctctctctcataacatgcatctgataacaagcaaattaagctgttttgaatccacagatgctgctatggaggataacaaacaggagcaacaagacttgttcttcaggactacaagcgc

SEQ ID NO: 10855 - DNA, 513 bp, Arabidopsis thaliana
tccaaccttgagttttatccttcaccttttcaataatgtagttgaagagttctttcttctttttgttgaactgttctggaagcccgagatacttaccctcgcctccttcattatggattccaagtagatgcctcattcttctctttgtatctggcttaacaaaccgaccaaacgtaatcgctgattttcgcaaattcacggcctgtcccgaaacttcttcttagctacttaaaacttctttaatggcagtacaggagcgttgattcgcgagcgtaaagaaaatcgaatcatctgcaaaaaggagatgagagataaaaggtccttgggtacttaggcggatccctttcagctttttattgatctcagcttgctttatcatatgcgacaagacctctgcacataagatgaataaatatggcgagagcgggtctccgtggcgtattcctctttcaggtttgattgtaccatgcggcgaaccatttatcagaaccgaaaatcttaccatcgttacac

SEQ ID NO: 10856 - DNA, 844 bp, Arabidopsis thaliana columbia
gcagctatcatcaaagccacctcccacgacgattcctccgtcgactattccaacgctcaccgtggtctacaaatggatccgttcttctcctcttaatctcaagactctcgtctacgcaatctcttctcgcgttaaccacacgcgtagctggatcgttgctcttaaatccttaatgcttcttcatggtgttctctgttgtaaagtaccttccgttgtcggagagtttcgtcgtcttcctttcgatctttcagatttctccgatggtcattcttgtcttagcaagacttggggattcaacgtctttgttcgaacttacttcgcttttcttcatcattactcttccttcttgtccgatcagattcatcgtctccgtggtaacaacagaagatcgttggagaagacatctgattctgttatccaagagcttgaacggattcagaaactccagtctctcctagatatgattcttcagattcgacctgttgctgacaacatgaagaagactttgatcttagaagctatggattgtctcgtcatcgaaagtatcaacatctacggtagaatttgcggcgcggttatgaaagtccttccgttggctggaaaatcagaggctgcaacggttttgaaaatcgtcaacaagaccacatctcagggagaagatctcatcgtctatttcgaattctgcaaaggtttcggtgtctcgaacgctcgagaaatccctcaattcgttaggataccggaggaggaagttgaagcaatcgagaaaatgatcgataccgtccaagagaagccgaagctagagaaggacgaagaaaaagaggatgagaaagctatgggtggtgtt

SEQ ID NO: 10857 - DNA, 853 bp, Arabidopsis thaliana
tttttttttttaaagttcgaaagcttataaacctttatttctttcttttttttttgttagtgaaattatcagattagagttaaagaacggaagaacaaaagaacaattagaaatgagtactcaagaagaaatggaggagaggctattacgtgaaggatcagatgctgagggtcagagcaataatagggagagtatctatttgagaacgaaggtctggagtgaagtaaataaaatgtggagaatagcattaccttcttctttgttccgaatgacttcgtttgggagcatcattgtggctcaagccttcattggtcactcctctgagttgggtctagccgcttacgcactcctccaaagcacattcatccgcttcctctacggtttaatggtataaaaagctataaatgcaacgttaattaagtccgttacttaaagaggaattagtattttagtactctttgtggtgttaatatgtagggcggtatgtcaagtgcaacggagacattatgcgggcaagcatacggtgcggaacaatatcacacaatggggatatatctacaacgttcatggatcgtggacatggccgtgaccactttgtttctaccgtttattgtacttgcgggtcccattctccgtctattaggccaaaacgtggagatcacaaagaccgttgatgagatatatccttggatgattccgtatgtatatagcttaattttcactatgactatacaaatgtacctccaagcacagatgaggaacgctattgtaggcgttctttcgacattgtccttggctcttgacctcgtggtcacatggtggtgcgtgagtgttatgggtatgggcattggtg

SEQ ID NO: 10858 - DNA, 648 bp, Arabidopsis thaliana columbia
acgtagttttagttgacacgttgtgtggttttttattagatgcagccgatggagatgttgagatttagttcaccggcgggacagcaaagtcaacaaccgtcgtctgtgccgacgaagaccaccgacggttctcgtttggaccactaggttggtgagccacttttttacttccttatttttggtatgtttcttttttatatctatctttctgaacatacttaaaacgttcaaggatgtattattatagagtaaacgtgcaacttcattacgttattttctgtatatgtgagtttatgtatgtcaaaatgacatgatgagattttttgtaaacaacatcttaaaaacaggacatgtgatttttgtaatcgtaaaaactttgggatgcagtttattttctaatcaaaacaaggatatatctaagtaatcgaaatttttttcgaaaatagaactagatgacacttatagattatagatcacacctaattttgaagatgtatctaaaagtccattcaatttttctctgttcccctaataagaaatcatatgttcatattcaaaaaataagaaacacaaaaaaaaactttaagaaaaacacagatgatcaaccgtctggctagagtttggtaaaatattaatatcttatgattt

SEQ ID NO: 10859 - DNA, 488 bp, Arabidopsis thaliana
caaaatataaacccatttagcaaataaaaaaatggaaaacataatttacagaaaaaaagaatgagataatatcaaattgatttcggaaaaaggggaaaggaaaattagcagattggtaattaagtttggctataaataataattagagaagaaagaaaattgagttgaaacgaagtaatttagagaagaaagaaagagacgaagaagatgatgatgattccaaggatggttaagaacaaaacccctgctccggttcaaatcacggcggacgaggttttgaaggaggcgagagagagagaggacagtcgcatcctgcggccgcctaaacagaagatcacagattcggatgagcttgccgagtacagactccgacgtcggaaggagtttgaggaccagatccgcggcgcaaaaacgaactcacaagtttgggtgaggtatgctgattgggaagagtctcagaaggatcacgatcgtgctcggagcgtgtg

SEQ ID NO: 10860 - DNA, 555 bp, Arabidopsis thaliana
taatcaacagcaaccatgttgagcttcagagcacccatggaagtgaaaaagttctgaacacactcagcgacacgagaagcagagcttgaagtagaagccattgtagcgcacctcgatgttccacagtaggaatccatctatgtatgtttctgcgaatctctcaatgtttgggaccatgtctttgaccgttgcagatagtttcttgaagtggaagacgtactcggtttcatattatgaccttgtcaagcttctcagtagctgtgatgatattgatagcgtatcgctctacgaaattctcatacatatctctctcacccttatcgttcaataacttgacctccatctgttaaaagctgaagagctgtatcaagttcaaaatcaataaataccaagttaataaatcacgttaaggttaaggaaaaagaggaatgcagcttaatcatcatatcacaagacatggataatccaagtttccataatttttgtattaagttttgggcctttgagcccattaacaacattatatttaatgcgtatgtcacgctgtgttcaaaa

SEQ ID NO: 10861 - DNA, 1152 bp, Arabidopsis thaliana
tccagtagtatttccctccattagtgttgggctttgccaagaaccgccttcgtaaaccttacaaacacacaaaagaatgttagagaatcactcaagaggtaacacaaaacagataaatatatagtacaagaaaacgacaaaagagtattcaaaaatcatagatataatctatatagatccatcactcaaactaattacattagagttgttaatactgcaattaactagtaattataagccctcataatgccctaacaaaaacaaagtggcagtttggttctgtaaacgatattaaacctaagtttcacaaaaccaaagtaatatacaactgaaacatatgtcttgatacgatgtttgtgtaagaaaaccctaaaaccatcaatatctaagaagattatagaccaaaatcgaaacagagatcatattaaacgaaaagacgatcacacatcgcacacaaccaaaagccagaatccgaaaccccaaataatttcgacagagatatgctagaaactcacagatcgcagaaggaggatcgagaaattgaggaatcgagaattggaggaatcagaggagaagaagagaaacctagacgcaaaaaaggaaaaagagcggacaaattgaagaagactacacgtaggaagacttatatatggtgtcaatcgggcctcaagtccgcgggcctggtccgtttagggatgtggcggggcgggtacgggcccatgtaaggaagcccaaaataatgcgggcgttgcggtcctggtccgtttggtttgcggaggataaaaggctgactcatttttcgccgacgaggagctttagtcaagtactgaatctgatggaccagttcatggagatcctctgttatcagcgtactcgtggcattggagcttcaggagctcgtcgtggttgggatataaaagttgtatgggaatgtgttgagattgaactctccgattgatccggcaaagaagaagaagaacatcagtgagaaggaaacaacaatgatgaagaacaagaagattggaaactagaagaagaagacgacgtgatagagagacgtgagaagaagaatgaaattcaacaagtgaagtgggtttctaggtattacttattgggctgatgaagttgtataggcccaaagtggtgaagtat

SEQ ID NO: 10862 - DNA, 562 bp, Arabidopsis thaliana
ttagcagccgtttcttctgctttaagaacgtcttctccacgcttagcttcaatcattgctcttctctcttctgcttccttgtgaatcgctgcaaccttattcttcatcctctctgcatactctgctttcttcttctctagttgctcctgcattgagaaaaaactcacaaattaacacttcacttctcaatcacattaaaaccgtttcacctctctattgctaagtttattatacctcgattttcttgagttgcgcttcgacagctgctttcttgctgttttcccaagcatgaacatctgcaatcttcttctcagctctgtttcatgtcaatagtcagcaaaatcaggcaaagaacataaaaaagccaaaacctaaaaccagtgacgataaaataaaatgtcttacttgttctctgctttgctcttttcgctttcttcccacgctctgacgaaagacaatctcttttcctttgacaaatcagctagcttaacatctacaaaccaaacaatggaactcagaaactttaacaaacattacatccagaaagaagtccacaattttg

SEQ ID NO: 10863 - DNA, 182 bp, Arabidopsis thaliana
caatatctttgtaatcagggctacttggatccagagtactacatgacgaatcaattaacggagaagagcgatgtgtatgggtttggtgtggttttactcgagctattaaccggtagaagtccgatagagagaggcaaatatgtggtgagagaggtgaggacagagatgagtaaatctcgtga

SEQ ID NO: 10864 - DNA, 536 bp, Arabidopsis thaliana
taaatgtctattaaccggatttagtaatattttgcaatgaaaccaagatattatcattaaggtcttgaagaatatattttgaaacagagctgagaagaagctttcttcaattggatcatgggagaacaacaagaaagcagctgtggaagctgagctcaagaaaatggaggtatgtttgaagttaatatttagttagagattttgaagcatttctgatttagctccgagctttttcaaaattgtggaatttttttttaacaacaggagcaattggagaagaagaaggcagagtatgtggagcagatgaagaacaaaatagctcaaattcacaaggaagcagaagagaagagagcgatgattgaagctaagcgtggagaagaaattctcaaagcagaggaattagcagccaagtaccgtgccactggaaccgctcccaaaaagcttttcggatgcatgtgatctctaatcatctcgatggggaacacatgaaatatggtatttgatgtaatgccgttctttagtttgcttaatgtggg

SEQ ID NO: 10865 - DNA, 1363 bp, Arabidopsis thaliana
ttatgtatcctactttgtaaaattttagttacacaaaagtctaaaacagtttttaattttcaccaaaaaataaagtctaaaacaattttagatcaggtttaagtttgtttttgtcggtttttaaacaaaatctagttcggtttgaacggttttggtttaaacaattttatttaatgtgttagcatatctatcacatttaataaatataaatacggatgaaactatactctttttaaaaaaaaaaatgtgaacactctaggcggctccggtatatctatcggaagtagcaccaccgcgatggcgtggagcattcaacatcggcttttcatgcttcatcagtatgggagtagtagcagccaatctaataaattacggtaccgatagtcaccgtaacggctggcgtatctcgctaggtctagctgctgtaccagccgcgatcatgaccgtgggatgtctattcatttccgacacaccttctagcctcttggcgcgtgggaaacacgatgaagctcacacgtcgctgcttaagctacgtggcgtcgaaaacatagctgacgtggaaaccgagctagcagagttggttaggtcaagccagctagccattgaggctagagccgaactgtttatgaagacgatattgcagagacggtataggcctcatcttgtggttgctgtggtgataccatgttttcaacagttaactggaataacggtgaacgcgttctatgcgccggttctgtttcgatcggttgggtttggttctggtccggctcttattgcgacgttcatactcgggtttgttaatcttggttcgcttcttctctcaacaatggttattgaccggtttggtagacggtttttgttcattgctggcggtattctgatgcttctctgtcaggtatgttctaaataagttatgggttagttatgcttacgcatatgattatgaatactatttaaacgcaaattttgttacgtatatagtaatattttccataacttttatgataaactcaatcatttctagtaaatattattttgaaataaaaaattgacttctgcattaaatcgaaaaaattgacttcagcattaaatttattaatgaaaaataattgcgtttatgagtataaaaatactaaatctgattagcaaccaaaagttgtacaaattttttagctgtcagggaacaatgcaaagctgtaaaaaaaatgatataagaaaactatataaacatatatataccacttttaaaaatttactcgattgaaaatatatacggtcagataaaataaaatacaagagtttagatgtgatgtagaataggtcaactagaccaccacacattttagtttttttttttttt

SEQ ID NO: 10866 - DNA, 608 bp, Arabidopsis thaliana
tagaggctagaggatccccgcattaggtttgctagtttagaaccaatcatcgcagaagacgacccaccctcttctttgattacattttgcaagtcatctccctgttttcgtaagtctcgaactgccttttcaattttaatttcctcttgttgactaatacccaagaccacagaagagaacattatgtttccgatcaggctttctgccaaaagagaaggtatcttggggcgcaagttagagggctggatcaataccttcatatcacaagcatttgtatttgaggatgcagctgcaacaaaggctttccaaagaagcgcagtgacactttccacccgcttaggccggcctacaaagtcttcactagctgctttggtcctgagctcttccaacttagacgcactgaacacgaatctcttcgttatttggcttatcttgttggcattttcgtcaaccggaaacttaaataactcatttgctggtgggtagaaatttgctgccgcaaacacgggatcagccactatgtcgccagcctctcctcgagccatagcagcccaagactgaatgaaagttgagatggaggttgcgtcgcgattttgtgagtgatgcat

SEQ ID NO: 10867 - DNA, 646 bp, Arabidopsis thaliana
tgctgatttcggtctctccaaacttgtgggggacctgaaaaagctcatgtcacaacacaagtgaaaggaaccatggtgagtaaaaaagaatctatcataaaatatatgaaaccattaactataaaaactaacaatatctctggaattaattagggctatcttgatcctgagtactacatgacgaatcaattgacggagaagagcgatgtgtatgggtttggtgtggtgatgcttgagttattaaccggtaaaagtccgatagatagaggcagctatgttgtgaaagaggtaaagaagaagatggataaatcgaggaacttgtatgacttacaagaattgttggacacgacaattatccaaaacagcgggaatttgaaagggttcgagaagtatgtagatgtggctctacaatgcgtggagccagagggagttaataggccaacaatgagtgaggtggtgcaagaacttgagagcatattgcggcttgttggattaaccctaacgccgattcagcaacatacgaggaagcatctggtgatccttatggtagggattcgtttgagtacctggggtttcccactccaaaccctacgcaatattgattaattgtcttcccagtttttattgtttggtttttggtaatttg

SEQ ID NO: 10868 - DNA, 844 bp, Arabidopsis thaliana
taacttaagaaaattacatttcttagttgtgataaaaacgattcctaattaatctgatgaaaagagaacatcgacaactaaaaaaaacagaggacaacagaacatccttcaaaacattcattgcataatcgttcaagtaaataaagcctttctttgtacatgatctgcagcaaaatcatcaatcaacgtcccgatattatcactcctggtgttgatgtatgcaaaaagatttcgaggtttgtaactttttcttcctcaggagattgaattttgggaatgatttatgtacgaagctacttgtttgcaagtatcttcctcgtactgttgacaagtagcttcgtacataaatcatcccaaaattcaacagtaaaaagcattagcatgtcacatgtttcttcttttgtcatgtgtggttcatatagatttcctatgttgtactaaaaccacctgactctcttgacagtggattgaggaggcagttatatggaagatacaaaaacaggcatagctattgcggaagtataggagcccttacaggcattatagtcacgaagatcgctctcatgataggcataaccgcagtagaagtatggtcatgatgatggggagagccgtagcaggagcagaagatacgggagcaatagtcctcgccgcaagagaggacggaggagtaagaggagaagcagaagtcctggtggaaggagacagagaagtcctgttagggatgcgagcgtcgaacagaaaaatgcaaataacaggcaagtgacaattgcactgatgggtacgtcttgtcaatccttatatctcacagcccattttccgctgtgcagatttgtgcagggtc

SEQ ID NO: 10869 - DNA, 1352 bp, Arabidopsis thaliana
ctctttaacatttatctccctaaaacacgagatttaacctaatatagatcataattaaatcaaataataataggaaaaccaaaaaggaaaagagtcacgtttattgtcggtgacccgtagcaacgaaagaaataggaaggtcaacaattttctcatacccgtatataaaacaaatctatctctccttccctctttaatttattaatcagatcttgcccaattcttcaatttcttcaaccctaattcttctctctttctcagatctaccaaacttgatctccaatggcttcctcagcaccaccagtcctcccaatctccaatccccaaaccgttccatccgccgctccttcctccgtcgaatctcaaccaccgatcgctactccagctttccgcaatttcatcaatcagatcaccgaaaccgttaaaaacggtctctctaagcgtcgtccttgggctgagctcgcggatcgttccgcattatccaaacctgagtcgatctccgacgctgctgttcgtatccgcaagaattactcgtatttcaaggttaattacctcaccgtcgctacagcgatcgtcggattctctctcgtcactcatcctttctctctcgtcttcctcctctgtctcctcgcgtcgtggctcttcctctacttgttccgtcccacggatcagccgatcgttctattcggtcgtacattctccgatcgtgagacgttagggtgtttgattttgttcagtatctttgtgatcttcctcaccgatgttggatctgttctggtttcggctatgatgattggtgttgcgttgatctgtgctcatggtgcttttagagctccggaagatcttttccttgatgagcaagagcctgctgctaccggattcctctctttcctcggtggtgccgcctcttcagccgcgcctgctgttatcgccgctcgcgtgtaaatgcgattccgatctaccattccctcgcctgggtaaatctttctatatgattcatttgttgaatttgatacttagattttgtttttttaatctgaaaacaataaacgtgaaaatgttgtggatctggcctaattttggttcttgttcatgggcaatagctatagatgaaatatatatctttgcatgattttgatttgatgaagttttactaccgttttgtgttaatctttagccttttttaatttacaagtgttgttttggaagatatggatttatttcatgatcaaattcaaaatgcaatggatctgtttattagaacttgtagccatcttttgatttgttatgtgactacattgactgcgtgtatacaatcaaaagagtcaaatttggatgcatgtgctcctcta

SEQ ID NO: 10870 - DNA, 423 bp, Arabidopsis thaliana
ttagagaacaagatctttgtgctatcacgatatcgtatcttaccgaaaatatagaaacaatattaacaatacagattttatggagtaactttgatatacattcctgatttaacgccaacgttctcttcacgcaactttgtagccaagtttgtaaaccaaaccagttaaaccggctctccagatacctgtaagtcgccctcaagtttggagcatacaaatttcgtatgcctaacttgacccgaaatgctgagaaacagtcacgtcccacaggccatgtaaagatgtcgcaacatcgagtagtactgcaacattgagacgagctattacatctttaacaaattcatcacgcacaaagtgacaatctatctcaatatgctttgtgcgttcgtggaaaaccggattcgtagcaatatagatagcaga

SEQ ID NO: 10871 - DNA, 1104 bp, Arabidopsis thaliana
aatcacacatatgtccaaaaattgttgaaaagcccaactacagaggtgctatatattaaatgagggattgagataaccaaacctgcaaagtgtcgacgaacagttgcattccagtcagccggagagtgtattcgatgataatcccctggttttaggtatattacacaataatagagccccttcattggactgcaacaaaaactcgatgaaataagttgctgttattttaacacttaagttgcattgtagatgttttattgacctggctgagacgttctcccgtaattttggagatgccaaagagactctcaaccaagatttgtcgctcttatctccaacagcttcttccttagactcattcttaccttcaggttccatgggaagcagagagttatttcctagaagagctggtaccgagtaagaatgtcctttaacttgctcgatcatccctctattcccttttaactccccaaaccttagaacggtgccatccacaggactaacctgatatcttcgaaatcttagagagcaaaactaataaaaaaagtctgcataaaagaaagttacaacattattgttaccagttaccagacaacaaggatcagggtcgataggcctgcaaccttctttcaagctacgaacaaagaaatcctgcaatgaagtatattcttcaagaggcagagctgcttcttcaagatctgaaaacacagaaagatcagtcagggaatcactttattacttttttctctagagtcaaatcaacagcagacatatacaagaagaaagtgatcatacttgaatggaaagctcgagcccaggctttataagcatatggacgcatccacaccggaatttcctgagaggaataagacctaacaattgaaaatcatgttcaacagttaccacaaatgcttcaacaagaagaactcagcagactcataaaggagcccaagctcttgagattgatcgcagaggcagaactccaaggaacgaggcctagacaaccacaatcccacaaatgaacacattgagatttaagaactaatggccactgaagtctgaagagacaagagcaaaaagagttatactttgatatctgggtgg

SEQ ID NO: 10872 - DNA, 1109 bp, Arabidopsis thaliana
cacggttacaatcgtcaaaatataaaccgtttagtgtttgcgtttaccattttaacaaagtggggttaaaaaaaacagagatccaaggaagtaacgacgatgatattagatttcgttgtgggattggtatgcgaactcatgagatattgattttggaggttacattgagaatattaggttcttgtgaggagttttcatggtttcattagctttttcccttctgttcatgccttgttttgctgataaacaacaatttcgacgattttcttgacaaacacatcttttataagggataacaagagtagaactattacatgaatatgtatgtaccataaattcatcaccatctttgtgttggatagccaaatttgttctaaactctcaacctcttcacactaaagtttctctcttcctcctcaaagagataactacaacatttctttgatgaaatcaaggctaagtgtgtccttaacgatgagaaacaatccaaggaatatcacaagcatgatccctgaagacattatcccttgttctacctctacaggaagcttcttccctcctctaacagcttccaacaatatcaatgccaatgttccaccgtcaagagccggtaacggcaagagattgatcaccgcaaggttgatattcagcaacgctgcgaattggtaaagcccgtcgatatttgatcttgccacttctgctcccactgcaataattgccacaggacctgctactttacttgctgtctgagagaagttaaagaatgtttgttttaaaccgtccaaaacattagaagatagccccataaactcccttcccacaaatctaaacgtttccggaatgttcctcggtctcaccttagtgattctaacatttggagacaactgaacaccgatcttccccgtcccatcaaagttcttatccggtgtacccgaatatcgaaatcttcacccctctttcgattctaaacaccacattactcttcgggtttcttttaacaatgtcaacaatcttcgaaacagcgtcaggcccggttttagacagctcagtaccgtccacagcgagaattacatcaccagagagcacccatcacgagaagcagcagaaaa

SEQ ID NO: 10873 - DNA, 742 bp, Arabidopsis thaliana
ttcgaggtcaaggcaactgctggtgacactcatcttgtgtggcgaagatttcgacaacagaatggttaaccattttgttcaagagtttaagaggaagaacaagaaggatatcagcggtgaccaagagctctaaggagattgagaactgcctgcgagagagcaaagagaactctttcttcaaccgcgcaaacgactgttgaggttgactctttgtttgagggaattgatttctattctccaatcactcgtgcaaaatttgaagagatgaacatggatctctttaggaagtgtatggagcctgttatgaagtgtcttcgtgacagtaagatggacaaaagcatggtccatgatgttgtccttgtcggtggttctacccgtatccccaaagttcaacagcttttacaagatttcttcaatggtaaagagctatgcaagtctattaaccctgacgaggccgttgcatacggtgcagctgttcaggctgcgattctaagcggtgaagggaacgaaaaggttcaagatcttctcttgcttgatgtcacacctctctcccttggtattgaaaccattggtggtgtcatgaccactttgatccaaagaaacacaacaatcccagctaagaaggaacaggagttcaccactactgtagacaaccagcccgacgtgttgatccaagtctacgaaggtgagagagctagaaccatagacaacaacatccttggtcaattcgtgctttctggaa

SEQ ID NO: 10874 - DNA, 515 bp, Arabidopsis thaliana
tgatgaggctgttgcctacggtgctgctgtccagggagctattctcagcggtgaaggaaacgagaaggttcaagatcttctattgctcgatgtcactcctctctcccttggtttggaaactgccggtggtgtcatgaccactttgatcccaaggaacacaaccatcccaaccaagaaggaacaagtcttctccacctactcagacaaccaacccggtgtgttgatccaggtgtacgaaggagagagagccagaaccaaggacaacaaccttcttggtaaatttgagctctccggaattcctccagctcctcgtggtgtccccagatcacagtctgctttgacattgatgccaatggtatcctcaatgtctctgctgaggacaagaccaccggacagaagaacaagatcaccatcaccaatgacaagggtcgtctctccaaggatgagattgagaagatggttcaagaggctgagaagtacaagtccgaagacgaggagcacaagaagaaggttga

SEQ ID NO: 10875 - DNA, 1113 bp, Arabidopsis thaliana
aacggccgccagtgtgccctggcgcttaagcggcgaggtaggcgatgtgtattttaaatgtgttattgtattttgttgttgtgtggtttttttggtttttagtaaagagaagatataacaaaaccctaattctcatgagttcaaaaaacctagatttagtgagcccatcatcacattttcaattggggacgattttaacaatttggagaattgtgcataataagaacaagatattaaacagtaaatactttccaaaaagtgactaaaatattctaaatttactcaacagaaattgaaaattcttgacataaaaattacatgtttttaaaaatgatacaatgtttttcaaattttaaccacaaatgattattgtacttcttcctcaaatgtagaaagaaactctatatatattggcttgaccaatgaagcgacacagtttaaagcgtagacgaaaagagagccctcttggaaacttcaccaacatagaagcgagggtaattcggtaatttcatcatcatcctcaaaacacaaactgagaagataaaatcccaaggcaaagaagaaaaacgaagagtcattttttgttcgccgagtgaccttatctctcccaattctctcttcttcaaaagagagagagcagccaaattctcaatcataaaaaccttcacacaaaaaagggtaaattcctttaaaccctatctatctatcgctatctccttcctccacaagtttggcggagaaagagtctcagtagcaaagcggaaatggactcaaagtcggttactccagaaccaaccaaccccttctacgcttcttcggggcaatcaggtttttcttctttctcgtttatatcttctttaatctgcgtttttgggaatagggttttaatcggaaggatattttgttatcaggaaaaacctatgcttctgttgtcgccgccgctgctgctgcagccgccgataaggaggatggtggtgctgtgagtagtgccaaggagttggattcctcatcggaggctgtgtctggtaattcggataaggttggagctgatgatttatctgactccgagaaggagaagccgaatttggtgggtgatgggaaggtttccgacga

SEQ ID NO: 10876 - DNA, 438 bp, Arabidopsis thaliana
tcctcaacgtctctgctgaggacaagaccactggaaagaagaacaagatcacaatcactaatgacaagggtcgtttgtctaaagaggatattgagaagatggttcaagaagcggagaagtacaagtctgaggatgaggagcacaagaagaaggtcgaggccaagaacgctcttgagaactacgcttacaacatgaggaacaccatccgtgatgagaagatcggtgagaagcttccagctgcagacaagaagaaggttgaggactctattgaggaagcaatccaatggctagatggtaaccaattgggtgaagctgacgagtttgaagacaagatgaaggagttggagagtgtttgcaatccgatcatcgctaagatgtaccaaggaggagctggtggtgaagctggtggtcctggagcatctggaatggacgaggatg

SEQ ID NO: 10877 - DNA, 714 bp, Arabidopsis thaliana
ctatccaaaatgttaccagttttttttttttatattttgacgttttcaaaatatgaatactgtatatgcaactattttaccatacacataattcatcaagttttcatcttttctcgttattgaaatgcaatatagtataactagtaaaagcaaaaagctatcgatcttttaactcgttttttgtgatgtatgaaatatgagtatgacattcattaaaacatcaaatagtatggtggcgtacctatttccccaatcggattcattctctggtgtacgcataaagtcccaagtggttcgaccagccaccataaaatgatctcgtccgtccatcctcttccactcctgactctccctcagccacttcatgagatcaagcgcggcagcatctctcatgaaagggaacggtccccacaaaaaccgcatcaagtctaaacccggatagtaaggaacatacaccgcagaagctaaagacgagtctttggtcaagcacttgtactgcttcatcctgttgtggaatattacttccaatgtgaactggtttgtggcataccaaccagaaactccttccatgtttggtagacgagggcctaacccgaaattcgacgttaactcgcacatatcagtccacctgctcaatgtccaacagttcttgagaagctcttcgttaaacaaagctggcacctcatgcatatacacatattttcctttacatgg

SEQ ID NO: 10878 - DNA, 495 bp, Arabidopsis thaliana
cgccagtgtgctgtaaaggaagatttcgatcgctattaccgccagacgcttttagcggtcaaaaacaatacgctctcaccgcgcaccggcctgcggcagctcagtgaatttatccagacgcaatattttgattaaaggaatttttatgtcttatcagtatgttaacgttgtcactatcaacaaagtggcggtcattgagtttaactatggccgaaaacttaatgccttaagtaaagtctttattgatgatcttatgcaggcgttaagcgatctcaaccggccggaaattcgctgtatcattttgcgcgcaccgagtggatccaaagtcttctccgcaggtcacgatattcacgaactgccgtctggcggtcgcgatccgctctcctatgatgatccattgcgtcaaatcacccgcatgatccaaaaattcccgaaaccgatcatttcgatggtggaaggtagtgtttggggtggcgcatttgaaatgatcatgag

SEQ ID NO: 10879 - DNA, 686 bp, Arabidopsis thaliana columbia
tactttgagaccttacatgcacttgaagaaacttgcttacatatcaatgctcctttactgctgctctcaatcgatagatctgaaattctgcgactgatacaggtgatagaagatgcagtgtcgtcttcagcttctggattcagagctctgtcattccagagagacctatgttgtcgttctccaaaggctggacaagtgacagctggttcagaaaaatgagctttcttcataatcctcttggaactcggcaactcaggcggtaatgttttgcgtctaagattattgagcctaagcttgacatccagaacataaggctgaagatgtggatgtctaagtaaatctgaggcctgtgatagtttcatacttgttagcagttaacaaatatttccaatgaagtaaatcaactagctaggtaaagttatacatacagatggccgaacttctgggtttttccgcagcatgcttttgacgagacctcggctaaaaacaagattcagaaaatattactgtaaacaaacaaagatatatatgaaggtacaagcaaaacaaaacttacaatggaccagaatatttggcagggagcggagacacaatcgtcttgtttatcttattaatcagtgcttgcatatcctaaccaagataattaaataagtattaaaaatgaaaatgcatctaagatggatatg

SEQ ID NO: 10880 - DNA, 1029 bp, Arabidopsis thaliana
tactcctagtctcctaatgttattgagaaagatttcatctttttgatgcgatgtcgtcagtttctggcttagcttctatgtgggagctatcttctctctggggatttgttgctgttatctaatgtatgattcatttttacgtttttttcagccactgaatgggtgaaaggcaaagctatggaggatgttctgaccatcaaaaacacgtaagtaccgtctgtttctattcattttatgcagatattaacataatctgttgtgagttgttgtgttatgccaatcagtgttgtctaattggttaaactcattaaatgttgatataccagttactgtgtttcatgactgttattttgttttgaggaacttggtcactggactttgtctgttggtacaatattggttgctggttagtatgccctgtgttcctattcatgttttgcagatttttaacataaatatgaacactcgtgttatctaattgctgcactcattgaatgttgacatacctgagacgaagtaatgtgattattttgtttagatgaacttagttactggattttggtcaattggtctgagattggttactggtttggtttgtatggtatttacaggttttccagcctataatgatgcagacctcttgacttctttttcttagacaaatgtaaacattgtgatttctgtcatggagtttctcaatatctgaagacttactctgaatgtgtgcttctctttctgtgatttattttgccagcgaaatcgcaaagcatctttctctcccaccagtcaagctccactgcagtatgttggcggaggacgctatcaaggcagctgtgaaagactacaaggagaagcgtgtgaagacaaatggtgctgcagcagcaggagaaaccacatcaggcttgattccttttactagtgtgtataccataatgtgtatatgatggtgaaaacatggggagaagtagaagaggatgatacatacaacctatggtataggcaaatgttcaggggatcctctatcctcta

SEQ ID NO: 10881 - DNA, 575 bp, Arabidopsis thaliana
ctaaaggatgcccgagaagtccattgctaatatagaagaatacatgtaggacattcattgatttgagattcaatgaggattttttaatataaaagaactctccagttaatcaacatttgctcctctaccacatagttactccatctgaaaatagagaatatgcaacgcagaactcgggatttctgcgaccaaatccttttcggaaaaccaactgtcaatgatgttcccaataggagattcctttgaatttgcagcccatctgtctgcaagcttaaacccaaacttagatgcagctgacagaagagaaggtcagtcacccttttgaaacatggcatagaatcacgccggcttctcttgcacctctaagtcgtctcccattttccgtaagatcaactcttttgcggtttcaaataaaggtataatggcttcagctacataggtaacatctgtccccatgataacttcgaatccctcacaagccaaacgcttaatgctttctatatgctctttgtttcccattcaagtacgcttgttttcagtttccaagtaaagaagattggaggttcattgtgatg

SEQ ID NO: 10882 - DNA, 658 bp, Arabidopsis thaliana
cagttgtttcggcaactattttctgacatgtatcttatactgctgtctgtgtaattaatctcttagggaagctatggggaagattctggcacgaggccatagccgcgttcctgtctactctgggaatccgaaaaacgttatcggacttctcttggtaatgttgctgactcttattttgcatgtttcaatggtggcttatcatgtttctgcaaactctaatcaagaaattgttctgttttctaggtgaagagtcttcttacagttcgccctgaaacagagacccttgtcagcgcagtttgtatacgccggattccaaggttctgccattaccattttaacctccagtctttactattatgtagaatgaagtttcgtattattgatgttataatgtttgaatagggttccagctgatatgcctctctatgatatactgaatgagtttcaaaagggaagcagtcacatggctgcagttgtgaaggttaaggggaaaagcaaagtcccaccttcaactttgcttgaagaacacactgatgaaagcaatgactccgacttgactgcacctttgttactaaaacgagagggaaccatgacaatgtcattgtcacaatcgacaaggctaatggacaatctttctttcaaaacaacgagagtggac

SEQ ID NO: 10883 - DNA, 575 bp, Arabidopsis thaliana
tctcccagggaagctatggataagattcaagcacgaggtcatagccgcgttcctgtctactccgataatccaaaaaatgttattggacttctcttggtaggagtcgttgacccttttccgatggtctgatttgcatgtttctctggtagcttatgcaaactctaatcaggaaattcttctgttttctaggtgaagagtctccttacagttcgccctgaaacagggactcttgtcagcgcagttggtatacgccgaattccaaggtcttgtcattattattatgcttgctatattttcatattatttccttaagcatctctgtgaaaaatgaagttcctgttgtgattaatgatttaacagggttccggctaatatgcctctgtatgatattctgaatgagtttcaaaaagggagcagtcacatggctgcagttgtgaaggttaaggggaaaagcaaaggtcatccttcaactttgcatgaagaaaatagcggtgaaagcaacgtctcaagtaacaactccgagttgactgcacctcttttcgtaaagcgagaaggaaacacgacagtgtcattgt

SEQ ID NO: 10884 - DNA, 554 bp, Arabidopsis thaliana
ggatccattgctgaacagttgcttgaacttcccaaaagatacaatgtcctcttgtttctatgttgttgctactgcacaagttgagcatatcatctgcgtcttggtaattaagcttcccttgttctggttccgtccagtaccatttcaattcgttagcgaaaaccgcccaattaaagttctttaagaagaaatcgacgaaatcttcgttatctatatttgatctgctaatgcaagtccccaccgggaagctatttcttatctgtcgaactctaacactagctccagaaaatttgctagaatcaacaccagcaaacttgaggataacgtcacgcttacggatctgcatttcaagaaagttactattaagtctcattgcttgtttgaaagcagagtttttgtgttaccttgtcacattgtcttttcaaatgttttattctcgcgagtcgatcgacgggaaaaatctgcaatcccgcgaccatgagatcaatgccggaagaagggccttgaacgtaaaccaaagccttagatgggttcttctcaattcgaaaagaacc

SEQ ID NO: 10885 - DNA, 514 bp, Arabidopsis thaliana
tttctggtattgaagattttttaagaaagtgacacatataaaaatcctccatttaattagtccctagaaatttgtctgtctaatatagaaatttggattattaaataatttgtgcactttaaaaagtattttttgtggaagttttctcaacatattataaactaaaaatgtgcaatcaacactttttgatagagtgagatttaattaacatgattatatataaatttttttgcaggagttgcaatatcggattcagagattggtagagaaatgtggacacaatgatgaaatgtctagagagaatattagtgagatcagaaaagatattgtcaatttccatggcgaaatggttctgctagtaaactacagtaacatcaattacactggtgagtgagttaccatgcatatatttttctaaaacatggaatcttcaaaatctgatcggagaaaatatgtttctataataggattagcaaagattctaaagaagtacgacaagcgaacaagaggagga

SEQ ID NO: 10886 - DNA, 745 bp, Arabidopsis thaliana
ttctttagtgtgtgttagcaaacaataataaccaattagtatttgcaacaaactattttctaatagaatctgatcaaggactctaccatagattttggtgctttggatccattcttagagtcaaaggagcgaatgcctctggtgagtcaaagggcattggctttgtacagtacaacactgaagaatcagctcacaaagccatagaacatatgaaacgaatgtttcttaacgataggaaagtatatacgttggaccttttcttcagagagatttccaagcgaaaaggagatttaatttcacggatatttatgtcaagaatctctccaagtccttgactgataaagatctgaacacaatttttcaagagtttggaccaacgaaaagttggtgtgatcattagggatggttttggatttgtcaattttaagaatccagaggatgcagagaaagctgttgatgctttaaacggaaagaagtttgaggacaaggagtggattcttacaaaatcgaaaaagaagtatcagagtgaatctgaagtgaagcgaggtttgaaacaggctatcaaaaacagatcacagggttcgagtaacttgtgtgttaagaaattggatacacgagtaacagatgagagcctcaaagacattttttcttcctatggaactataacatcatgcaaggtttgaaactctatacacagaaaaatttgaggtcgttgttggattcaagatttttacatttttgaatg

SEQ ID NO: 10887 - DNA, 1621 bp, Arabidopsis thaliana
gaatctacctttttacttacatctctacattcggttagcattgagcttgctactcttttcgttgagtcagatgtgcaatcagcctctgatttaacatcagtctttatatccttcagttccccagagtcactatcattcaaaatcttttccttaacggctttagtgggtaaagcaggcgaagcaacaacaccatctgaattgtcattgctctctaagcactgatccaccaacctttgcagatcttcagtgtctgaattcgagctcttatcacgatctccggtcttagattcattttttatttctgactccaactgtgtgccactactgctaacatgttgctcaccttgctcagtactgacagaggtacaaacagcttgatgttgctcgtgaggcaagccatccgaagccattagctttgtattgttccctacagtagaattttcattcatcacggaatttggaggctgagatactgagggagatgcaacaggcgatttagacatctcatcagcagcaacactagcaagaagattcattccaacatcatccgaaccagccaaagaggcatttgtctcagagtatctgacacaactttcaatcaaagcattcatcgaactgagtgttccgccatgtctttctccagatttgaactcatttcctaaggaagatgtgcctttaacattcccagatgctttatcagaatccttaagatcccctccgcgctcatcaccagcaacaagtggtgaaccagctgcctcttgcgagcctgtcaaaatatcttttaattcattgctttgccaagactcagcattcaagacagagctcacattaggtcgataagaatgatttttttctctcccgttattgtcacatagttcctgcttcaccgcatgcacaggtgaagaaactctgctattcaccggtgcagggtcttccaaagagcctccactcacactttgagcaggacttcgaccacgattcggcagcttcacaatcaatttattaccggaaccctcagtcagaggaacctcaagagtcttttcagatgtcaaacttgattgagaaattttctcagaagggacattcctgtgtgatgagaagcttctactcaaaccagctcccctaggggatgctgacgaagacgaaccttgaaacacattgtttgacttccgatgccttgaagagccaccggaacacttcttcaaagttgaaccagcagtagagcttcttgcatcttcttttccacataaattgcctgttttagcatgctcgctcgagcaagactgactattattgtgcgactgactggagctgctacttttctcatcctttactgcagctaggacttcagatacaccaccagccccagcatttcgctgctgtccatctttagaaacattaccacctgatcccggagaaggagctgatcttgtggagcctggcgacgtggctacacacttcaggttgttttccacctgttgtttgaccgagacagacttagaagcatgtaggtgtgatgatgatgtcttgtttgcctccgcggaaccacctgaatgccttcccccatgactcagtcttccaggccaggaaacaccctggttggatccagacttcgcatccg

SEQ ID NO: 10888 - DNA, 643 bp, Arabidopsis thaliana columbia
tgaactaacaataataatacacatgtggtctgacgataaatctgattttcatacgtggcatactatgtgtgccccattctataaacaaattgctaatccaaaacaccaatcacactcctctctctgtttttttcttttcttttggcgttttccgtttggtaaaagatttcatttttattagcttttcaagattcagagattcctaatttgttggtaaatggaaccactcatcagcccacaaccacgtttccgcctccaacccataccggaaaatccctcctcctcctcctcctccgcctccatcacaatccctcgctctatctcaaacacttccttcttccatgaaatctcccaagaacgtcttctccttcatcatcaagacctcgaacaatccgtacaagacgacaaagaagaccaagactcagactcagacgaaacaaatcgctttttatctcagacaagaccacttcaccgatctcgtacagctccagctatggtaatcatcaaagacttaagaaccaaacctccagaaaccaagaaaccatcaccagtctctaaatccataatcagacaagcgattttcttgctaatcgtctacttaaccttaggcgtttcaatctactcattcaatcgtgaccactac

SEQ ID NO: 10889 - DNA, 212 bp, Arabidopsis thaliana
aatgaaatgtcaatggtatcagttgagattggacatgggagtgttctgatgaagaatccccactcgtttgctcgggaagaggagtctgaagccagctcactctcttcgattgagaacaagtcctctatcagtggcgcatactcacattccgtgaagcgtgttgagattggagcagtgagaggttcatattatggtggacaaacaatgaagca

SEQ ID NO: 10890 - DNA, 1555 bp, Arabidopsis thaliana
cagtttgattaaattgtaagtattatgaatttatgatgatggtgatatcatatatagaagaaaatattatgatattgtgggtgggtcaagtgggtaaatgagcaggattctctaatgtcttaaaaattcgataataataatacagagagacctttttcttttattttctcgatcctcttaatcggcttatcggatccgaatccggacccgaaagcctgaaaacccgacgattaattgcacgatgtccgatgctccgtcgtcttccccggatgccacggcgtcgcactggtgctatcactgcaacaaacgcgtcgtcgttgaaaccttagatgactttgtcgtgtgctgcgaatgtaacaaaggtttcgtcgagtcaattcaaccgactcccgccgcttattcatcgccggcgccaccgcagccactttccccagatctgaatgtagaagactccactattggctcgcatttcctccagatgctccgcttgttagcccacgcgccttctcagcgttcaccaccacgacacctggatgttttatcttacgaagatgatttcttcaggttggagctcaatagtagaaacgaaatcgacgatgacgaagacgaagatgaagatgatggagatgaagaagaagaggatgaggaagagaatttaaccgtcaacgacgaagaagacgaagaagatgatctgaggaggagaaatcgttttcctctcacgacgacgcagtcgagaaccggaagaaacagaattctcgattgggctgagattttgatgggaatcgaagacaattcgattgagttccgtatggaatcagatcgatacgcaggaaatccggctgattacatagacgatgcagccggatacgaagctttgctacagaatttagcagaaggagatggtggtggtggcggaggaaggagaggcgcaccaccggctgcgaaatcggcaatagaggcattggagactttcgaggttagttcttcggagggagagatggttatggtttgtgctgtgtgtaaagatggaatggtgatgggagaaactggtaagaagttaccgtgtggacattgttaccacggagattgtattgtgccatggttaggaacaaggaactcttgtcctgtctgtagattccagcttgagactgatgatgctgaatatgaggaagagaggaaaaaaagaacttctaccgtgtcagattctgctgctgcttcttcttcttcttcaacttctcgttactgaagtggaggaaatgcccccatttgttgttacttttgttgttactctttctctttagattaatctttgcttagtctctcaacactatttggttggttgcatgttgcatcaaagaagcgagaaaacagagaacaaaaaaaaaaaatccggctccaaaaagacaattgttatttgtaagtgtgttgtatctttggcctaaacaatcccatagtggtttctttgattctcagttgttcataaagtttgccgaaacaaaaaggttcctgggtttaggagaaacggttacaggacttcgtgagccttcccgaagta

SEQ ID NO: 10891 - DNA, 915 bp, Arabidopsis thaliana
cctcaaatttcaattaacaattacaacacacttatcaccgaatcacacaaaaccaagcgtaatcgattccaaattccaccaaatctcaatcaacaaactacaaaagcctaacctgagctttatcagcaagatgaacaacgagacgaccaacaggaagaggagactcataagtaaaagagtgattaatcgattccgatctcatataccgagacaatacacgaccgtcggctgtgagaccagcgattgcaacaccgatatggtcatcgactttaaagatcttcctctgatgcgaagaaagctccgattgagctttgttaacacaagcgagaacgacatgagaacgagatctgagtccaattgctgcagatccttgcttcactgcttccatggcgtattccacttggaataaacgacctgttggactccatgtcgtaacatctgtgtcgtattggtttctgaacatctttgcttcttcgtctcgctttcttcttcactcgtcgtcgaaagggtttatagagacgaaagttcagaaacaaaacttttcttttccttcaagccatggatgctctcgatctctctctcgatttaatgggcttctattaaattctgggctttgtattggctcggtatctagcttattgggctaagactttaggcatatgttttatacagactttaggcctatgtttttatacaggataatccttgtatattcttttttttttttttgatgaaatgtgaaattgtttaagaatctttaaatatgtacaaaagagtttggtcaatagttctcagtaaaaaaaaaaacattagacaaaacagagcacactagcttgaatattcttgtatattatttgaaactaaataaaaatgaattaattttataaatataaaactttgcgattttgttattag

SEQ ID NO: 10892 - DNA, 886 bp, Arabidopsis thaliana
cagcttctggggcatgaggagacactaggaaatgtgaagaataacccatccaagcaaaggtattgatcacaaactcatcattgtttttggtctccatgaggaagaaaatgttagggaaaataccaagtctgatttccctgagtctatgaactgtcatggggttcctcagcccacaacagttccagctaataacccttaaggaaggggttttggtggattctgaaaatccacccctccctttttgattgcaggaatgatcttagtttttggtttttgctgttttgaccttccagggttatctcccgcttgggtggcaggatctcttgagccaccagatctaactggtgtcgaagcaacattctcctcactaggagggagggaactagccagtcctggttttcttttaggggacccttgagccaagaccaaattacgtttctgagattttgcacctgtcaggttaatagaacttttagtagcttgcttgttcagaggaggccgaccccttttcttttgaataattggagcctggaaagttgcctcttcttcttgatactcaagaggttccagactagctaaagttctttgaacagaggttgagacctgcagacctgcgttgccataagactcagcagcagaagcaataatcaaagcagcagtttccgccatcatatctctagattcactctgcatcactcgtgctctacgcgctgcactctcatttgggtcagcacacgccatatattggacagtaacttccctaagctcacccatcacttcttcagtggtaggaatcgggagtggaatatggctctctaatgctctgtgtactacaatctctcccgaaggacgtagaggcgattccaatcttggagaaaaaccatta

SEQ ID NO: 10893 - DNA, 966 bp, Arabidopsis thaliana
tcaatggctagaaacgtatcgtcgtggcatccctgtcttgtttgcccgacgagatggttctgaactgcctagcccgcgtcccgagacgctactacgaaaacatctcttgcgtctccgtaaggctcaggtcccttgtgcgtacccctgagctctaccggatgcgatccctcctccacaaggattccatctacgtctgcttctgcgatagggagaattattcgactgatgccacctatctttggttcactctccgtcccacgacagcgacgatggagtatcaattggtcccgctctcgttccctagtcataatttcatgttccgagcttccaccgtcgcggtggattcagagatatactttgtgggcggacgtccaaacccgaccgagttgtggatccttgatacccggtctggcaagttacgtcagggcccgatcaagccggagttcctacgaattgcgtctagcagcgccgtgggagtattcgacggaaagatacatgtgatccaagacttgaaacaagatgagaccgaagaacaggtttacgacctagaaacgcaaacttggaaagtcgtgggagtccctgtccctgacgagaaagcggatagtagaccgaatatggtgtcaagtgtgtcattggaggggaaggtttatgctaaggattttggaagtatcagtgtctacaatctgagacaaggtacaagaaaggagaaactggagttgccaattgatgataggtgggtttcgtgcatgtgtgtggcaaacaatgtgctctttgcttttttaccaaatatgggctactgtggcttgcacaaagcttaacaacgtatggagagtggtactggtgatgtcagcactgcatcgaattgtatggtctcaatgcggaatatatgggaactagctatttctgagagaagatcattagtactagtatatactacaagatatatatatacaagagaagagagag

SEQ ID NO: 10894 - DNA, 545 bp, Arabidopsis thaliana
aggtttcaaagaatgaagagcatttctttaggcaataagaacaaagagataaagatgctcaagaggaaagcaattcaagaaaacatcatcattaaaagaccggtctttgaattcagttatggtttgaaggcggctgtgatagaggaggatgctagtaatagatcgagttccggttcggctgtatcaaactctgagagctgtgcacagtttagcagtgcagatgggagtgagttaacaggtttagttactttattattcttccggttgatcaacaatatgggatttttaaaagtgtccatgtgaactttgtttttccaggtccatctcaatctaatgcgtgggacacaactgtgtcttgcaagaggaggacgtgtgtgggccgtcctaagtcctcttctgttgaaaagctcacaaaggacctttacaatattttacaagagcagcaatcgtcatgtctctcagtttcatcagaggaagatcttctttttgagaatgaaatgtcaatggtctcagttgagattggacatgggagtgctctgatgaag

SEQ ID NO: 10895 - DNA, 872 bp, Arabidopsis thaliana
gtcaaagaccgagacatccagaggaaaatactaaagaatacagtggttctgttaattgaagtataccttgtcgaatatatctaagacagattctggtcgtgatatcctctcatctgtcgcaaagtgaaactcttgaggtatcgttatgtgcttcttggtgttgcaaaagatacccatttctcctttactttcaaatatctgggtgatttgatgtgatttcaagttagattaagagagagaaatgaagtaaacagtattaaactacaccagttcagtagttgtagtacctttttgttcaaaggttttgctttgaactttggtgccttctccagttcctcttgctcaagttctgcagtagtttttgctatagtaggacgagctcttagcattgtttggagcacagggctctttggttcagtaaggtgatgcttctgatcattatgctgcgtggaaaacagaggaatatcagatggcatgaaatcaatttatgtatacatacaacttttctgggagtgaaaagaagctccagacctgcttagacacttctgttgaagctattgaagatgtctctgcatgctggttagcccttgccattgtgtgaagatgaaattcctgcgacagtaagaaatgagatccttgtagaataataaaacagtatcattcagctatgagtcagttctaatgtgatgatactctctgatgtgggtggggagacgttatttacctgaaattctggcagatgtggtgtacttctttgaggtgcaggcaaagctggagctgccaaaatctgcatcacataatataatgcattggattcttttagttgtctatttctgaagtacaaatatacctcggtgaaactagatggatta

SEQ ID NO: 10896 - DNA, 636 bp, Arabidopsis thaliana
gcatgtttacctatccatcagaagacgaacaatgtactccttgggcatattaggtaactgtcttgcaaaaatgttcttcaacccaatcaagctggaatacattcaacaaattattcataaaaaacgaggttagaacgaagaatgcatagctgattagaagctaaattcaatggcaggagacaaatgatggaaggcattaccacatcatatgctcatcaatggaatcatttgagtaacaaacaaatttgagtcgtcctgcttgctcctaaatgaaagatatcaccaaatttgtcaatggcgattctctgaactcatctagtaattcattagcatagatccagtgataagctacctctcttttcaaagcctcttctctggcaatgtaagctccgctagtctggaaattctcagccaataccttaacagactcatcctttggcacgagccctgagattgagcttcctccaacagtgccactcacaccagtcccaaccacagatgatccaccatctttatcaccatcagagctctcaagcttcaccgtggagctttccgtcttaagtttagtgttgcgactcgaaccgttgactccagagctggaatcgagtcgagcggcggtgaatgtgcggatagaag

SEQ ID NO: 10897 - DNA, 1098 bp, Arabidopsis thaliana
ggagaagtcctctgctcttccttgaaaatattcaaaccactacaagggacctctctctctttagaattgatggttcgtttccttcgttctcacctggaggtgatcgtatcgcatacgttaagatgcctggtgtgtttgtggtgaagccggatggttcagggcagcgtgaagtgtacaagggaatggcgttttcgacagcttgggatccggttcgacctggaattgtgtactctagctcaggtccaacgtttgctacagagagaacagaggttgatgttatctctattgacgttgatgcagccgataagtcatcttccgtgaggaggctaacgacaaacgggaagaacaatgctttcccttggccatctcctgatggtaagcggatagtgtttcgttcggggcggactggtcacaaaaacctctacataatggatgctgagaaaggagaaagcggtggtctatggaggttaaccgaagtgtcgtggaccgacacaatgtgtaactggtcaccggatggggaatggatcgcgtttgcatcagatcgagaaagccctggctcgggtagttttgagctcttcttgatccaccccaacggaacagggttaaggaagctcatccaaagcgggacgggtgggagaacaaaccacccgatcttcagcccggacagtaaatcattagtcttcacttctgattatgctggaatctcggcggaaccgatctcgaacccgcatcattaccagccatacggtgatatcttcacggtgaaattagatggctctaatgtgaggaggctaacgcataactcttatgaagatgggacaccggcatgggcccctcggttcatccaccccaacaatgtggagctacaaaggaggaatgattctaggtgctcgttcgaagactgtcactggctcaacaagtaccctacactaaaaggccgaaaaatatcttgttaatatgtatctacagttttgtacccagcttgtaactctacttatagatttgtatgagactgccactgtatatgcataagactttgtattatagagatcgttaatgtgatatgtatatcatattgtcaaacagtcggtgatagat

SEQ ID NO: 10898 - DNA, 828 bp, Arabidopsis thaliana
tcgcaacaaaattaagggctgcagacaaaaaacaagaaccaacaattttattctcattcctcttgagaatccattcccaagttgtgtaaacatcttacaagccaatttagcaagattttcctcttttttcgataaacgaaaatcaagcaaagctagaatcttttcggctaaagaagataaacattgagtacctctgtctgtaaacaagccaaagaagcaatgaaggggctccagacaaacttacatccaccaatgtaactccccataagagcagctgctattttccagttatccggaccaagcgatctcatcggtaccaacataaaagccaccactgttccaacaatcgtcgcaactacaacaaaccaactcacaaattaataaaccactcaacacatcatcaataacaatgtcacttcacaatcaatctttttaactaaaaccactcaaagacataaacttttgttagtcttaagcatgaatccaaactaatcccaatccaaaaacttgcctttaagcaaaagactaaatctttaccagatccaattaagaatgcaagaagcaatgatccagtagatcggataatacgacggagatcagctctaaacaacaacaatggaatcgtatgcggcaagagaaactccatgaagaagccatacgacggcgtttcaaacggaattaaccttaaattgctagcggcgagccaagtaacgtacttgtcaacgcaccactcaccatacttccaattttcgtcttctccgacctaatgaagtcggtaatttcatcagtatacaaaacccctagtttcaacagagaggattgaggtga

SEQ ID NO: 10899 - DNA, 502 bp, Arabidopsis thaliana columbia
  unsure (1)..(502): unsure at all n locations
ttgtttttatcttctaagcatttacgtgttaatgtaataattctaactttagttttccctattatttaggtaacgttggcgaggctcttgccgtcaacgtatcaaggacatctggaagtaacggtgtggtcaccatttctcganttgtccgccgtgccggtggctccttacctatcttcggcattgaacgaagacttattcgccgggttggtgcttctcaacatcaaaatagacggttgggttaggtggaaagtgggctcgtgggtctctggcagttatcgcctccacgttaactgtcctgcgttcattaccgtcaccggaaagttaaccggcaccggtccggcgatcaagtaccagcttgttcagcgatgtgctgttgacgtatgaaaaacaagaagaagaatctttttttttctagggtgttaaaggagatataaaggtaaactatagggctgtagcaaattgttgttgatttgacttattagttaatttatctaaaggg

SEQ ID NO: 10900 - DNA, 1938 bp, Arabidopsis thaliana
tttttgtttgaagaactcattgattggttttacttttactgttttacataagaccagaaacaaataaagtgatcatatgattcagttaacaaattgaatgtgaattatccacaatctgtccccggtccaatcacaacgagttttcataacgtaggtaaaccaaaccattgctaaatttgtgacacataaattatagcaaaatatccaccttgttatctaacattacttacattaaataaaacaggtgtctcattggctaaaaaaaaaacaggtgtctcaatgattaaacaatgaatattttctactcgaatttgattaaacaatataatcagcgtttagtctgaccacatcccattatagaagaaggtaaactagaaaccttatcaatcccagactcgaacacaatccccattcccatgaaaaaatgcgattcaatgtggcagtgaaacgaccaaacgccaggattatccgctctaaaacgcaacgccgtccagccaaacggttgaaccgcaaccgtgtttttctttatcgggtcgacccggttataccttttcggatcctccgactcattaaactttccttctccgtacccaagcacccaaaaatcatgaccgtgtaaatgccacgggtgcgtttcactgttgtttgcgttcattgtattcgcgttttgtaaaatcacgtccacggttgaattgaatctcaatctgtagattccatcgctcgtcgtcgcgttagcgttaaggggtttcgcgaatatgtcgtaatttcgagaatcgtagttctccggtgccgtgaaacgccagtcaaacgcgtttgtgaggttttgctttaacgcgattaggtacggcgttttagggtggtgataggaaacgttgttgaccgaccaacgtctgtatccgttgacttcgttttgtgtattcagaagcacaatgactttgtcagaattctccggcagcgcgtgaatgaatcctcgacgcgccttgattgctaggctttgtgcaagacgggagcgcgtgtcgttccattccggtacgatattggatgattccgacgtgggaggacgccgtcgtgggtggttcgggtagtagttgagtacagcggttgccggtggagttgtcgccggacggctaactatgcttgaggtgatccaatagtttcgtcgagggttttgatctgccttgagaagtacggaataagtttcgccggagtatacaaagagattcttcaccgtgaatggttctacgtagtgtccgtctgcttcaacaactgtcaaattatgtccctgttgtttaatttaacccatcttccattagaatacgaaaaagaaagaaacagagaagacaatgaaaatgattggcttgattctcaagctaagtacctcgatttggaaactgagagcagagagagccgtcaagctacctattcgaagcctgtatgtctttccgggaatcaccgtaagaataaaacgcgaacaatcagcgtttgagacgttacatactccagacactaagcttggaggagtggttaggttgtttgagcagttgaatcttcctcttccttgtatcataagcgactgataatatatccaaataagaatcatccataaacataaaatttgatcgatcaaacaagaatctgacttttgagtgatggaaaaaagaactcacttgtggctcaccgacccacttgaagggtatggatgctaaaccggtggctttctctgacatacttttgtgataccaatcagttaacaaaaagttccggtcataatcgtatgtaaacggttcgggctctgtggccggaggagaaacttgaatcattccgattaatccagactctctctgcatcccatagtgtgaatgatacatgtatgtaccaggctacaaacaaatttcaaaacttaacataaaaacataaagaaagattgaaactttaatg

SEQ ID NO: 10901 - DNA, 165 bp, Arabidopsis thaliana columbia
taaaccaacgaattgttatcggcaaaacaacaaattaataaaatcgaacgaagtcttacaaacaatatattgccaatcacaatccgtcacgaatcctccaacggcaggatgtgtaaggctaagcatttgaggcgaccatcctgtcatgagatggcctcatacttg

SEQ ID NO: 10902 - DNA, 591 bp, Arabidopsis thaliana columbia
ccctgaaaacatcactaaacatcactctctatttgacgttttaaacttcagttcagttcgtatacaaaaaaaaattcaatgtaattcatatccatagccgccaaatctgacacttgagtcttttcaagaaaacgtactatatctactagatttcatacatataacacttttgacaaaaaaaacaaaatcattataaatttataattaggtcaatatgaaaaagcagggatagaaatgagattaagtcaatccacaataaactgtgttcgtcgtttatgataattaggtataactgccttacatttatttttagatatgtcgaaacaagttttaagccagctttttggaagatatataaagataacttcagaaattatcactgatttatcttcttctgattcattatccacgtgtttaacaaaggctctgatttaaatttctccaatatagaaatcaaaaactgtttaatgtttaaatttctatgaacataaaatgacatatgctcaattcttgaattgtgctagttgcattatgtcttgtagcaagagtgtgatgttagaatgagaagagccccttttccacagctttgtg

SEQ ID NO: 10903 - DNA, 477 bp, Arabidopsis thaliana
gtaaagtcaagcaaatgatcaaggttattgaagaagatgctgactcttttgctaggcgagcggaaatgtattacaagaagcggcctgagcttatgaaactggttgaggagttttatcgagcatatcgtgctttggctgaaagatacgatcatgccaccggtgttattcgtcatgctcagcagactatggctgaagccttcccaaaccaagaccctatgatgtttggtgaggagtcacctctcggttcttccaccgatggttttgatccacaaacgcctgacagttatccacctatccgagctcctgtttacccagatgatttacgaaaaggtgcttttgggatttcttcctctcatttgagtaccgttaagcgcaatatagccttcatggaagaccctcagtctgtgagtagcgggaaaggttttaaaactgcaaaggcaaggaaaggactgaatttcaataatgttgatggaaaag

SEQ ID NO: 10904 - DNA, 876 bp, Arabidopsis thaliana
ggaaagaaatccttattgatttctcagatttccagcttagaaaccaaagattctctgtgccgtcaccgtgcttccactgttctccggtaagactccgccacttttctcacatccgccgtcatcgttcgcctcagatcgtcagattccggcagaaaaactttgaaggattctttgattctcgggaagatcttcatcgggtcttcaagtgttcttggcaaaaaaaccttctcagatcgtctttcgtctcttaacgcgacgtcacggtgtttgttatgccttcgagacaaataactcgcaaaatattctcgatagatggtcagttccgtaaatacacgacgtcactatcgaccccgagcagactcacactgttaagaggggcccaccagatttctcatcatattactggtgtctcctgaaccgaaagtatctcctgaatcgctgccacccagacacacttgtgcttttgagatctttttctcagaatatggacttttctttccacttcccgacattcttatagatttcatgcatgagttcggtattgctctcccgcagttgtgtcccaacgtaattagtaccatactatgccttctcactttggctgaagaagatagtttttggctcgcactttccgacttgctccaactatatgcggtgaagaaaaattgtacaaacaggactttcttcttatcacctctgaaaggctttcgagtttttgacgacttcccaaaaaagatgaactctggaggaaatcttacttcttctttcccgtgaacgagctcacctacagagaaaagactgacttatttgtgttcgaatggacagctcgggccggtagatagtttgatctaggatatcattttcactttatgttgc

SEQ ID NO: 10905 - DNA, 736 bp, Arabidopsis thaliana
  unsure (1)..(736): unsure at all n locations
ctttgaacttatttatacttctgtctgagttttgtttgatctcaaagacccactttaatccaattagcttagctccgacgggaagatcaactagattctatgtattgtttctttcaatagatgaaatttcttcttttcacgcttctatccattcttttgactcttttgcttcattgtaatcccaaggcttttcatttaacatcatcaagagatactcactttcaatattagcgagcaagacgtagtctccaagtattttggctttgaaacttgttgttgtgatactcttagttggggctggattatttngcacttgttggacaatattctcactttcagtactaggagaattgttctcttgctatgagtcctcatcattctcgttttcatcacactcttcttctgtttcttctctacttccttcgttctctccaccagcttcttcttcttctcttagaccattattcccaaactcttcaaggctgactttaaacatgccagcattatcactgttttcaccatttaagttactccacttccatctcttgctttcatcgaagacaacatctctactcactattattcttcggtttgttgggcccaacaagcggtatgattttgagccaggctcggttcctaagtgtacaaatgttcgtgatcggtcatcaagtttcttaaggtgtggagtttctatttttgcatagcctccaaacacacacaaatgctcaacgtttgg

SEQ ID NO: 10906 - DNA, 2029 bp, Arabidopsis thaliana
tcgtctctccggctttcgatcagtgattggtaacgtgaaccctccccctcctcattagcattcatcacaccaactctcgttcgctgaattcaaatgatcaaaatatcaaaacacagccataaaccctaatttcgattattgcaatagctagaggagttagaatcgtacaatatctcagattaacagaaaaaagagttgaagaacgacgaattctcaaaaaaccaactaatcaagtaactttttgaagaatcatcaaaaaatcgaatctagacaaattacatcaaataaaaatccaaccatacaaaagcatctaaattccaagagagtactgatcttacaataatcaaatactagaacgaagaatcgagctccagaagttgcatcaatcaccagaaaaatggatctagcacaatcagctaacggttgggaaatagaaacaaggaattcaaatcgataaacagaattaagaatcgaagcttcttagaactttagaaggaagataaacacagtgaacaatttttgagattatgaggtttttctgtctcccagagagtggaaatcggagacgaccataagccaccgatttttatttttccggagatagatagatattagaaagatttgtctcgggccaacaaaaaaaaaaaggaaattaaaaaatcgtaatatctgacatggacaaaactagaggtcccgaacgttcgagaagttccacgtcagagcggatatttccacatcatatattggcgaggattagtgacgtggatggtatatcaaaaacagtcgttcaggaggctagtggcagattattaagatctttttgaactgacacgtgtaatggtgggtaaggaaaacgtcaagtggtaaactcatctggaccgttgaatagattttggcggaagagactagcgtttaaagattttatagatgtagttaatattgggcttaccatatgggccattcaaaaagattttaacccaataaaaaatattcaaaaaactatcgtcgacagcagggttcgaacctgcgcgggcgaacaagtcagatttcaagtctgtctccttaaccactcggacatatcgacttgttgtgcagaatcgaacgtaccttttatataattgttacaaaaataaaccagcccaataaaggcccataaatggtggcttcgcttgaatcttctagttgacactaaaggttctctttacgactccggcgcgtgtttcgttatcgactttagtaaaaaaaaaactcggaatctgaatccgatcaaatctgaacaacaccggcgacgaatctctgcggcgtagatttagatttcatcccggggagacttaaattgatgcagtagtgaaatatcacggcgaagggatggtttgttggtaaaagagccaattgaaatcagttatgtcatcgggaggagccggagagtataacgaagacagacatctgttacgatccacgacggagatgaagtcggcattggcggaggagagggtgatctagatgttgaactcagtctccggctatcagaagtggagctggaggagttagggatctgttcaagcatatagatcggagattttctctttccggtcgtcgtttaagttttaaacggatggagaatatcagagtcgatagagagcgccataatccttcttcttcttcagcgttttcggctgctggagaagaagatggtggtggtatcagtaatttacatagcgttgatgatcgaaatgacgagtacgggtttgatgaagaagttctcggagatagtgctccacctgagtgggctctgcttctcattggctgtcttattggtgttgccgctggaatttgtgtcgccggcttcaataaaggggtacggtcatacatcagatctcgatgtatattgattcgattgatttacaaattgagtgctgattctatagagtagtatttttgtcttaggttcatgtcattcatgagtgggcatgggctggtactcccaacgaaggtgctgcatggcttcgtctacagagactagctgata

SEQ ID NO: 10907 - DNA, 609 bp, Arabidopsis thaliana
taagttcaagtgcgaccacaggcgcgttattacaaaccacaaaatagaagattacaaacacaaaagaggttcgtgtataactcatatgacatatttcattacaaacataaatgtttcccatataattggagaaattgtgagagatgtgttcaacaagtacttacggtgactactctacttgtttccacaacacttagttcgtgaaccacaataatatgtccaatcaccaatctcactcagcataaattactatggaaaaaacaaattcttaaaattacctctaattattgtttactttatctcgtttgccctacatactacaataatatttcaatcaaataaaccaataatcattgaattattcaaaaagattccgcattataaacctttcacttcatggattataataatcaactcattataaaagcacatctaaagagtttataaaacaacaaaacacaattatttcaccaaggttcatcaggataatcgaacggtacaggttgaagaggggaagtcttgcctagatccgagtgtacgaaaccatatttacgcatcacttgattatcagcgagattaatggctttgatcatcccattccaacacgtg

SEQ ID NO: 10908 - DNA, 433 bp, Arabidopsis thaliana columbia
cttttacttctcgtgtgctctgtcttgacttccagcatccttgctaagaaccacgtcctctcttctttctttacttgtggtttgggtttgattttgttactgctcgtttactcaactctgagatttgagttgcatcataaaagatctctctctctctccatatctctatttttatgttgtgaaagttggtttattttcatgtaatgaaagtgctgattggctgaacatttgcaggtcaaaggagccaacataggcgatgtattccttgtatctgatgttgtgtttcatgatagaagaataccaattccggtaggttcatcttcctttctttcttttttccatctttagtgatgattccctttttgccagttcatcttgcaagttcctgagcaatgtttgtttactctctagatgtttgatctgtatggagttg

SEQ ID NO: 10909 - DNA, 1258 bp, Arabidopsis thaliana
aaaactaaacaaaccaaaaatgtctaattttctaaggaagaagctacacctctgtttctcctcttccggtggtctctcaccgtcgattccttcctctccgatcatcgtatcaaatcacaacgctcaatctcatcctcatcacactccctcaatcttcatcaacaacttcaactctctttacgatcagctctctgtttcttctcccctccaccgccgtcacagttccgagaaccccgccgggctgttctccactaaccgccgcgaagaagaagaagaagacgaaaccaccacctccgtttcgaagcttttaagcggcgggacggcgataatgaagcacatagagtcaccggatccgtacagagatttcggaagatcgatgagagagatggtggaagctagagatttaacgagagacgtcgtcgccgatagagaatacttgcacgaactgttattctgttatctctatttgaatccgaaacatactcacagattcatcgtctctgctttcgccgatacgctcctctggttactttctccgtcgccgtcgccagagcattttttatcctaaatttaaattttttcaaataaatatttgggctttataaggcccataataattgtagcaactcttactatactcattgctgtatctgatcatttacttcagtcttcagatatctgaattatccacaaatctaaaattgagaaaacttaaaaaagttcccaatttcgaaaaatgtcactaaccgcacaattctcgccgccggtcaccggaataaccaggagtctccgggatacaaaaccgtcactgtctaatctccgtgtatttccggtttacactgagataagaactatgacgacgagtaatctgaggaaatcggcgtgttttgtggctaaggctatagaacagagacgagatacagctggatctgaatcggaatcagaagcgactccgtcaccggcggaagagagtggaagcggagaagataaggaagtggagattagcgcgataggagcagagataaaagcagcgatggagcagaggaaaacggcggaggaagagaaagggaagaacgagtttcttagtcggagttgcggaggaagtgaacgagattgagtggccggcgtttcagatggtcctcggaactaccggcgtcgtgctcggtgttatcgctggctctagcgtcgtcttgcgcactggcaacttccgtcaggctgaactcgctgatcgagagttcatcggaagaggggttcaaga

SEQ ID NO: 10910 - DNA, 446 bp, Arabidopsis thaliana
aagagagttcttgttgttatgcatccagattttaagcacttgtctcctaacaccagtctccgcacagaactgctcaaccgccacgtcatcatgcttctgaattctccaccccaacctctccgcaaaggctaacatcttctctttctgttccgccgtgaacttcgttctaaacctcttcgtggtcccgccgctgctgctaggatttgatgtatcctcctcgtcccccgatgccgcgggtggcctgtaagcgccgcgggagatgttagatgaagatatccaggcggctgatgcggctgcggcgggcggttgtagtacgtgggaactctgtgggctctaccgccgatgctttcggtttccttgcggtggaagttgcggtggcagccgcaagctgcacacttaagagcgtcgagcgttccatcttcacctggaagcataaactcgcaaca

SEQ ID NO: 10911 - DNA, 856 bp, Arabidopsis thaliana
tgtttgttaccattgtagttacgcttcttcttcagagcttcacttccacatcgacaccagcaggaagatcaagttgcatcaaagaatcgatagtttgagcagtcgggtagagaatatcaatcatgcgctggtgtgtccggatttcaaaatggaacctagcatccttgtgaacgtgaggagacttgagaacacagtagatacgcttcttggttggcaatggaacaggacccatcgtctttgcattggtgtttctcgcagcatcaagtatctgcttgcatgagtcctcaataagaggcacccagtatgatctaagcttgatcctaatcttttgctttggcgccatctgataacacaaaaataaatcaaattaaaccaaacacaatgaaactccacaagaccccttaaaacaaaactctattgtggcaaatcttatgaagataccatctaaagacgatcaagatttctatacaattacttctcctttcctgtatatacaagatgatatctacttgaaggcatttcacacaaatgagactctttatcgctctgaaaaaacgtagtaaaccaaagaagtctattgatctgacaaagatagacattgaagacatcaaatttgaaaatttgcgtatcaatttctagcagtgacctctaacacagcaatgggcattggtgttagaacagatatgatactttttagcgctgtgaaaacgtagtaaagcaaaaaagtctactgttttgacgaagatggacacagaatttagaacacaccaatgcacaagtactcgtaaaatctgtattctagtaagtgagctgtaacagtaacggaatataccttatccgcgtctacactgatgga

SEQ ID NO: 10912 - DNA, 508 bp, Arabidopsis thaliana columbia
aagttcctgagcaatgtttgtttatctctctagatgtttgatctgtatggagttggtctccgtcaggcattctcgacacccaatctcctcaaggaactcaatttgaaggtatttaatagactcaagatgctacttactcttttaactatttcaattttgacaaaattggggtggttcagattggcaggttatctactggtgactcgttggatatgtccacgcaagatgaaacattgatcattgccaatgatgctacgctaaaggacatggaggtagtgtaatgttaacaattcttattactgaatctaaccagaaaatcaatgaaactgttgttttgaaactgttttggctctggattcttcagggtgctgccgtggcgtatgtggctgatcttctgaaaataccagtcgtgttcctcaaagccgtgaccgatctagtggacggagataaacctacagcagaagagtgcttgcagaacttgacagttgtgacgctgcattagagggac

SEQ ID NO: 10913 - DNA, 926 bp, Arabidopsis thaliana
tcaagttcttccatgattagaactaaaatcatatatttcaatcctaagccgccgtgggagtgacaccaagatttctcctccatgaattagcgctaaaatcatcggttttcaattctaagtcgcttcgaggagtgacatcaagatccctccctgcattcttgatagtttccaattcttgttcgtatagatccagaaaactcaagattttgtagctatggcacaagtcactgttgtcgtatccaagaacataggcctcatctatcttacaacgattttgtggttgcaaccatttggtttgccctgaaaacgggttcaaaaccactaatcggttttccttggtggtgcatagcaataaaccatcacagtgaaaggcttgagatataatagcttctgaactactataggggtcgattaggctacgttcaccattaaacaaggaagccacgtccatctcagttccattaggattgaagctcactgaataaaacctaaaattctttagcataagagcatggtactgccttgctgatttagcaaaatgttttctgatgaatccacgatctttgagtaaagcgtacaatcttttgcaagtagatcgtattcttcttagacatgtcaccggaaccttagagaatatctcttctatcacatcctgtggaagatcgaagagcaactttgtttctcttgtgatttctgacctcatcttacttaggagaaagcgacggtaacgaaaatcttagttagggttttaattgatttcataggtaaattcgtaaaacataaataaaaatctttgaaaacatgacaactaagatttttactaataccagaaagttacagagcaataaataattattacttttttgttcaaaaaaataattatgctttaaatttcagaaagtgaaattctacatatactgtagatc

SEQ ID NO: 10914 - DNA, 1881 bp, Arabidopsis thaliana
actttctggtcatcatggattaacttacatgtcttcccactaagttatgtttatgttcaacgtcttttgtgctacagtacagcgatctagcagatagagaccgagctatcgttatagagaaattcaggcaagcaacaatcaactggaaccagcaacttaactctgtggtagaagaaggtttggaagagagtgaaaacggaaaagaagaaaagacatctcatttggtagttgtgaccgatgtttgccttccgttactctcatcaggagaatcttctctatccgcacgcgttctcataaactacgagcttcctacaaagaaggttggttggtatttttcttaatcaatctgcaattgtcaagtcaaaatgtccagaaccttcctcttattcactacttgtaatgaccatgtttcaggaaacatatacaaggcgtataacaacttgcttagcttcaggttcttttttttttctttcaaaacaaactctttttgttcatcaaacaatgtcacttaacatttgagacttttctcttaaggtggaatagtcataaacatggttgttggaggtgaagtaacgactctcaaaagcctcgaagaaagcagtggcatactcatcgctgagatgccaatcaatgtatacagtagaaccaatcaatcaaagaaaaagcaagaaacattctgctgtttttatcttaggttaatgacttcaaatgtgctttcttattgcagatttctgaaatcttataacaacacatggatctccgatctgaagaattctaaatggggttaatggctcttaagccttttgaaggactagaggagatgaatggtggattgataacgctttatttgtttgattgtatccagatgtctcttgaccattgcgctcaaatcatcaaagccaaacttattgtaaaaccagtttctttttttcttatattattaaagaatgttgaaacgaaagaaagttttgttctttctcttgtgtatattatcaacatacatgtacatcaaattgcaattttcttttgtagctccctactagttaacctatggtttagtacgtaattaccaaatcattaagtgaaaaaggaaacaacgcataagagtttttttttaaaaagtaccgttacgctgaaccctaatcacatgtggaaaaaggaaaaaggaaacaagagaaaaaaggaaatccctaacacatcattaatgtttatagaatagcctcatcgtttaagtatcttcgatcgatcatcacaaacaaaaacctagagaaacaagaaatacagagagagagagggctatagattgagaaatacgcaatttcatgctctctgatttctccgatatcggattctcttcttcgtttagaatcattacgctagccgatggattcggttctgttcgcttagccgttacgaagattttgcgaagacttgggtgataaaaacggcaattgacgacggagatggcgatagagagggaagattgatgaggattcatcggagattattggtgagtaaccgttggttatcgttgactggtcaaacctcttcgttagccgttacgctccaaatttttcacactttgatttgttgatttgcagtcgctcttcgacaaaccgaacgagaaacgaacgtgatggaagatgatgttgatgactcttcttcgaccaagatgagccctttctggagaatcgttccaaaaattacagcgatcgagatgagtgacgatccagaagttaaagaatgattacgtgtcgccggtatttcaagcttcaaagtcatgatgatggagcttcaatccggcgaggagctgcaatcgacgacggcggtggcgatacagagagagaagattgaggagtggcttatacgttctggtggagg

SEQ ID NO: 10915 - DNA, 1104 bp, Arabidopsis thaliana
catacacttctttggatcactcaatatatcttgcttagcatctgacgtcaagttctctgctctagaaaggctggtgactaggtgtcccaatctcaagtctctcaagcttaaccgagctgttccacttgaaaaattggctactttacttcaaagagcacctcaattggaggaattgggcactggcggtacactgcagaagtgcgaccagatgtttactctggtttatctgtagcgctctctgggtgcaaggaattgaggtgcttatctggattttgggatgctgttcctgcctatcttccagcagtttattcggtttgcagtcggcttacaactttgaatctgagttatgcaacagtccagagctatgatcttgtcaagcttctttgtcaatgccctaaactgcagcgcctctgggtgagtccattttaacatacattaacacatgaatttggaataggtcattttactgtatggtatgagaaagcttatgttcatagttttcttaaaaaatttgaatgatatagagcaatatatctgaattataagcattaaagcctttttctttttgtaactgtgctctaacttattattgactacaggtgcttgactacatcgaggatgctggtcttgaggtgcttgcttcaacctgcaaggacctacgcgagctgagagtgtttccgtccgagccttttgtcatggaaccaaatgtggcattgacggaacaggggcttgtctccgtctccatgggctgtccaaaactcgagtcggttctctacttctgccgtcaaatgaccaatgctgcattgataaccattgctaggaaccgtcccaacatgactcgcttccgtttgtgcatcattgagccaaaagccccagactatctgactctagagccactggatattggatttggagccatagtagagcactgcaaggatctccgtcgcctctctctatctggcctcttgaccgacaaggtttttgaatacattgggacatatgccaagaagatggaaatgctctcagtggcatttgcaggagacagtgacttaggcatgcatcatgttttgtccgggtgcgatacgttgaggaactagagataag

SEQ ID NO: 10916 - DNA, 846 bp, Arabidopsis thaliana
aagtctttctttcattagactcttggaacttgagacacaagccatcaagtcttgtgcttttttcacataacctctatgactgatcttttgttctgcttgttcttggaacagttcaactactggtgagagaagaaccatgaagcgaaggcttagtggtggctttatttgtttgattgtatccaaaatatctctgaccaaaatcatcaaagccaagcttattgtaaaaccaatttcttgtgtttcttattattaaagaatggtgaaaagaaagaaagttttgttctttctcttgtgtatattatcaaaataccatgtacatcaaattgcaattttcttttgtagtttcctactagtttaactcacaagtatataatcagaagcggtggtttagtaattatcaaataaacccatgagtgaaaaaaaggaaacaacgcataagagtttttttaaaaaggaccgttacgttgaaccctaatcacatgtggaaaaaggaaacaacagaaaaaaggaaatccctaacacatcattaatgtttataaaatagcctcatcgtttaagtatcttcgatcgatcatcacaaacaaaaacctagagaaacaagaaatacagagagagagggctaattgctgtaacttgtctggatgaacacaaagtgtagctttcctgtaagctcgcttcacggctgctgaagttatgacttctgttaacggtaacggttgccaaccgctctcggaacagaggatctggtttacaaacaatcaaatgtgaaagatactctgtctagaagaaactgatttggttctgattttgtttaattcctacaccattgcagcccaaatcttgaat

SEQ ID NO: 10917 - DNA, 1025 bp, Arabidopsis thaliana
tgtagccggaaaatgaaagtaatattattcaggaaccccctttagtccatagcttgaattgcacatacacagaataatttcgccgtagtgatgtttgttttgtcatatgtaatcactactctctctcttttttgttggatctgatgttgtgaaacctctacactctgacaggtatgtcttctgttgttcgtactcccacaacgttgctcccaagggaaaattcattgcatttgtgtctacagatgcagagactgataaccctcaaaccgaactaaagcctggaactgatcttttgggtcctgttgatgagatattcttcgacatgtatgatagatacgagcctgtcaacgagccagagttggacaactgctttatttcaacggtgagcgagatctctttagattttattgctgcctactttaagtttgatgggttttaagtgtctaaccctgtccttggtccttacagagctatgatgctacaacacactttgagacaactgttgcggatgtgttgaacatgtataccctaatcaccggaaaggtaaagtttgtgaaattcgctacggatatttgttgatgcggtggaaagacatctcaggtttcctcgacatttttcacaacaagttttgtttcttcttatgttgcagcaactggacctaagtgttgacctgagtgccgcaagtgctgcagaggaatgaagaatcatcaccagatcgctccctctctagttgattttctaaaagcttgttttgctcatttctctgtttccgactcttgctttcgtgttcttttttggtttgaactttgaatacaaaatcagaatgatccttcatgttttagaaactaacaaccatgtgtctccgtttgatgttggattctcggttaaagacttataaatgctctttaaaactcaactatttttcagctccttacttttgtttctctttggagattttagattgatcttgaatatgatttacaacgaaatttcagctaaccttgtgttgtttcttttatatgaca

SEQ ID NO: 10918 - DNA, 535 bp, Arabidopsis thaliana
agtgatgcaagtaagctattccttcagcaacatcgctgcatatattcaccaactgaatcaaatctaagttcttgctcgagtactctcccgggtataagtgcctctccaagcttccatttggcatcagtggcagaacaagagcgttgaaaccaggtttgctgcacgtagtgatgatcctgatcaagttcctgtgtcttgttctcttcaagatctgacattctcttttgaaactccccgagaactccagtgcggtctttggatcaagtacttttaccgcgaccttcgtgtagtttctgagaactcccttataaacatgaccaaatctccctgaaccaatcaagctagaagcattgaaacctccagtagctgctatgagctgctgatacgatattctcgggtacttcgggtcattttggttctgtattcctcgtcttcacctcttctttggcatacactgttagattcttccaaatcttgatctttggccaaagggtaccgaacacacacagaacaggagttgcgataacgataacag

SEQ ID NO: 10919 - DNA, 547 bp, Arabidopsis thaliana
tgaatattattctaaaacaaacaaaaaaaaacgtaaaaagttgagactcccttttattaagcggcagggtttgttgaccacactctcatcatctatctctttcttatcttcactgttttatcttttctttcggattaaattaaataattttttcctccataatttatactcttaactctcatgaattattggtctctctattatagttttttaagtaacaatctaattgtagtacggatgtctcttgagatgttcaagaattaagaaataaagaaagagggatcggagaatgaattttgaggatcaagaagaagatatggagatgtcaggtgttaatcccccctgcggttacgactctctaagcggtgagggagccacatctagtggtggtggaggagtaggaaggagtaaaggagttggagcgaagataaggtatagagagtgcttgaagaaccatgctgttaacataggtggccacgctgtggacgcgttgttgcgagtttatgccatccggtgaagatggaacgctcgacgctcttaagtgtgc

SEQ ID NO: 10920 - DNA, 489 bp, Arabidopsis thaliana
ctctagagaatcggggtaatgcgacttcataaactcatgtaagacttgaaccttcattgacaagaacatctgttggtctccttccgcttacaatctctagcaggagaacaccaaaactgtacacatctccatgtgtcgatgcgcgtttccccatcccgtattctgatgataaatgacttaaccatttagtttaaagactaatgagactacttagtaaaactttaatgatgttgtgagaattgtgtacctggtgcaatgtaaccgactgatccacataacaatccatctgttgagccaaatgacactgaatcatctgtagaaactgtttcttcaacaccttgaaccaatcttgaaatcccaaaatccgtaaccagagcggtcatttcatcatcaagaaggatattgctcggtttgagatcacagtgaacaacttttacaggtgaatagtgatgcaagtaagctattccttcagcaacatcgctgcatata

SEQ ID NO: 10921 - DNA, 561 bp, Arabidopsis thaliana columbia
tcaactgtcactcttctatggcatacttataatcttgtcaactcatgtttcaaacatccaacatactaaatatcaaaactctttagcttgctgggattgtgaaatgtccgcgccatcgtctcccaagttaaccacctttcttttcttaccttttgtagactgattaaagaactgtcacatcactcatcttgtcttttgtaaactcactcatcacgagggagtttggcgttcaagcaggtccaacatatccaatttgctacgaagtcaagtatttagtgagtcacagatgtaacagcgatctatcaacctccaaatactttgtttctttgtccagagaagaacgaaaacttttcatttttacgaaatatttacagtcttagcaaaaaagaagaacgaaacagagtacctaagctacagcctacatatgaatccgaagatataatcaaacgtaagacatctgaagcattgatgttaaatctcgatgacttggaaaacaagaaagagattttcagaacgttttcaatttcaaatcccgaaacggagaatattactggttggaaa

SEQ ID NO: 10922 - DNA, 511 bp, Arabidopsis thaliana columbia
gccagtgtgctttaaagtcaacacttcagcaatatgcatcactttgactttctgcccttcccgttgtaatcgcccactgatgtttagcaggcaactcacgtcagcaccaattaaatactcagggcggacttccatcaggtgcgcaaccttttctttcaccatctcgccggatatttcggccattttgaccgagaacgtgccgccaaatccgcagcaggtatcctgttcagcaaaggtcaacagctccagtccacgcacatttttcagcagcgtaagtggctcgtccttcactcccagcttacgggccaggctacaagatgggtgatacaccgctctcccttgcaaactggcacctacatcgactacccctaatttattaacaataaaagaggtgagatcctgcatacgcgcggcaacctttgcggcacgtgatgccattcaggttcatcgccagatacgtcgggtaactttttacggcataggtgcaagagccagccggtgaaataatggg

SEQ ID NO: 10923 - DNA, 610 bp, Arabidopsis thaliana columbia
  unsure (1)..(610): unsure at all n locations
gtatacattctttagatggaatttataatctttcttttcatattgtaagtatccccaatgacagattcaatatgctcaagtagaaaccgttgcagcttctttcttaaatcttcgactttctcgttcgtttctgttctgtttaagttcagatcatcgagccaatggtttaaagctttaaggtggacgagaagagactcttttccatttgtttcttccgtcttcaccaagaaagaccctttgttcaatgaattctccaaatatttcaagaaccattggctggaaacttggactagctcatccgctagactcgttgaatccttcagactgcttttaccttctaagctacttcggtctgaaacagaacaatgtttcgttgcaggcggtttcggcctttgtaggatggggttcttgaacttgttgtctccttggggttcagtttctcggatgagttctgcataacaatgtagtgatgatcagcagcatcacctttctttccaggctctttaaataagttgaactgagaaaaaccagtcactaccgcagcttgaacccaagatgttgcatttttatttactactaatctacacgagccgttgtntcgattttgagt

SEQ ID NO: 10924 - DNA, 589 bp, Arabidopsis thaliana columbia
gtgatgaataaagaagaaaacaatgaggaaacttttcatccactaaaatgtgagaaagaagaccaattattattcatctaattacccaacaaagaataaattacatattagttggctaaaataagattaatttttgaagaatttactaatcgaaaaatcctaatcaaaccgaaatttcgatcgagcatagtagactgagctggccagccgctatgatgtcacaattcactaacacaaggaaaaactaaagaacaaaattgatcattttgacgaagcctcatggagaggaactaataacaaacttgtttaatgtcctctgcttcaatgaggaatggtttcttgaagctgagggtaagttgaatgcgaaaagttttggggaagttttataagatgctcgtcgcgggctagaccacgaaaagccataccaagcgaataacctaaagcacgagaaaccgagactgccactgcatttccaatctgacaatacctgtagatagtgagaagaagtgaaatgatattcgcatttgcttagtagtctgaaactattgtcctggttcttataattcttccaaatgaacaagagcaagta

SEQ ID NO: 10925 - DNA, 631 bp, Arabidopsis thaliana columbia
tatcaaatcttagcaagtatagattttgacgttattaaaccaaatataaatatagagacacttcttgaaatcactattttattcttgaaatacatactcttgaatactcccgatatattagggattttgtgtttccacgttcggctttgggattgttggatttgtccaaaattgggcatttttaacctttgaaatgctatccaatatttccaagggagtgatatctccagtcacagtcactttctttgcagcaaaatctatgttgaaagatgttacacctacaagtatcaatttcattagttataaaccagcattagaccaaaaccggttcactaaattaatagaatagaccggctcaggtatggacaaaataacgaaatcattcagagcctacagtaaattggaatcgaactcagttctcgtatttgataattttcttatcacaaactggagccaagaatttatttatatatataaaaaattcatataataaatttcgcccaccggaacatttttagaaactaaaccaaaaaagggagcagatggcattctcgtaaataaactaatcaccttgcattctggccaagtgtttcctaactttgccttcacagcctctgcagtggagagacac

SEQ ID NO: 10926 - DNA, 801 bp, Arabidopsis thaliana
tgattgattacaatagtccgtaaacgaagacaaatggatactaaagataaatttctaatcaagataacttttctataacaatatcctcatctaaagataaaaccaagtataaagatatttctcttaaatcacgtctgttttttcttctcgaaattttgttttcttgctttttatacacacaacgaaaatttagcgtaacacagagagacgatttgtttttttctatctccacaattcaactctttcttttgtcatactcaatgtatgtagagcagaaaataacacgtctctttttttatcacgataaaacaaaggaccatccttagttggaaattcaaaccctagtagtaagtataacgttttaaaatcgcaaacgcgcccgctatgttatgtcccaccgttttaatttcccaacttccttgacaatgtatcacacgatccaaaaccacaaacaaacaaaacacacacaaaatgaaaaacatataattgctcattgacccctcaagctgatgagaaatatcatcaaaaaggccaaaacagaggacaacaaaaacagcaagcagcaagaagaagatgaagaatggtttgataatcataaactgtattatcctcactataggaacatgtggaggtcctttgttaactcgtctctacttcaccaatggcggaaaacgaatctggttcatgagcttcctatcaaccgctggttttccaatcatcctcatcccgtctcttggtctccttcctcagccgtcgccgcagcaaccgcaaccctaacaacgcggaaaacaagcgggaaac

SEQ ID NO: 10927 - DNA, 227 bp, Arabidopsis thaliana columbia
  unsure (1)..(227): unsure at all n locations
cagcccttgatcgtcccacgatttgatcaagctcattgtgaaccgtcgattgaatatctggatgaaggaccatcctagcaagaatccactcgatcaaaacagccaccgtgtcaatacctctgaatatcattacctgttgtaataaaaacccnaaattgcccatactttagttacttaaaatggcatatttaattatccaaaaatcatagtatcaatgtaattaaacg

SEQ ID NO: 10928 - DNA, 919 bp, Arabidopsis thaliana
tcaaaagggtttcattccaaatttgttttctttacttactttctagtttagaggcttggtcaggggttagctcagccgcgaacgcattgatgctatgtttgtagctatacaagagcgatgctctagcgtcttcttcggattctttaaccgattgaagataagaatgatgatgttcttcaatttcatgaaaggctttatcacctttatgttctccaaaatagacaatatacacctaccaacacaaaaaaaaagattttatgaaaatgtcaggaattgattaagaattaaggacatcagaatggagcagccccatatggtaacaaatatatgcacaattggaattaagaatcagtgaacattaaagtgtagaatgattattttgactctaaacagaaataggaacctgtttttcttcagcacatgaggctaagaggggaatgagaaagaggagagggaagagagaagtaagcttcttcatggtcttaaacttgtatcttttgtgtttggtggaatgttatagccctaatccgttgtaggggtttgatgggctatttataatagttaaagagcaacaaatcaaaacgtatatatagaaattaaaaaactatcctaactaattaatcgtgttgatctaatgactggatacgtcttgcaaactacagcttcatgttgaccactagaaccgttacaaatggtaagaaatctatttttatttataacatatcatattttgaaaaacttgtttcggtaaattacatactgattaaggttatattttgttttatgtacttacagtcgcggattacatttagaaaataacataattgtgataccccatttctgaaataattaaaatgatatgtacgtggagaggcctataataatttgatttactatatcaggttgaccagaaaaacaa

SEQ ID NO: 10929 - DNA, 492 bp, Arabidopsis thaliana
aaaaggtgacatgggcaatgcatgctctttgttttcagcaatgcctttgaaaagtccggcttcttggaatatattgataggcgggtatgtgaattgcagggaaatgaaactagcaagaacctacttcgatgcaatgccccagaagaatggtgtctcttggattacaatgatttcagggtacacaaaattgggagatgttcagtctgctgaggagctctttagactgatgtctaagaaagacaaactcgtctatgatgccatgatagcttgttatactcaaaacggcaagccaaaggatgctctgaagctattcgctcagatgcttgaaaggaattcatagattcagccggatgagatcacactctcaagtgttgtatcagctaattcacagttgggtaataccagttttggtacatgggttgagtcatatatgaccgaacatggaatcaagatcgatgatctcttaagtacctctctaattgatctttacat

SEQ ID NO: 10930 - DNA, 455 bp, Arabidopsis thaliana columbia
tagaaatcctttcccacaatgtagattctgctcctaagtccatctttcgtgtctacgtcagaacacactgccactttattctcctcgtccaacaagaagcttgtcacattcactagacatggtaaattaaatttaccataatccactgttaagagaaagttgctccacgacaagtctttggcctcatcaatcttattggtgacccaaatcctcatctcatctgacattgcaagaattttttgttgcaacacggcgattttttcgttcccaacagctgatagagccgcggtatggttagcattaaaactctgatatggaagagggagacgcccaaatacctctttgctaaaatcaaaataccgcatgaaaaaacctttttctttagatccagaaacccagtaagtatttcctttcaaagacacgccactggaatatacgatcatgtcacgagtgat

SEQ ID NO: 10931 - DNA, 887 bp, Arabidopsis thaliana
tgtaagtaccaaaatatcaaaaaaggatagcgtcagtggtttatgcatgtcacttcattaatctaatggttgtgtctgcaaatcaataagaatttgagtggcttaccgtacggcctagtagaaatgcagctcctgagccaagtgtagcaccgactgagtccgccacaaaaccaattggcagcccaaaaaggtagccaccaccgagctgaatatatcacagcttcaaccaaataagatttctcaattttatagataaaccagtcactctaacaaagaaagttgagagtggatgatagcggtaaatatatcacacacaaaagaaatatgtatatataccgtgagaaccgaggcaggaacagccaaaactgttagaggaatgtacgcaacagctctgcagacatcgcaaaaaaaaaagagaagttcagtaccaaggtaatctcatgttcctatatctatggattaacattagcaatgaaacagtgattcagctaccaccgttagtgtagctcattgctatattactcacgcaagaatctaactagctccatagctcaagaaacaagaagaaaagagacttacagggcaaaaggtccccaaggccctagatcttgttcaacccataacaaaaaatccttcaatagctgaaaaataatacaaaggaaattagtaagtttcagatcataaactagctaatactacaaatcacaacatcaaatgaaacgaattcaaaaagggcatttgctttctgacaattagttaatcaatgatagtaaagatcaatcctttttcattgctaacacaaaagagcgacatttacgagaaattcaaagaaaagcatgtcaatttccagagatcatcaaaaacccatgtcagaataccacattgag

SEQ ID NO: 10932 - DNA, 538 bp, Arabidopsis thaliana columbia
ctgattttattatcataccaattcttggtacaacgatgacacaatctttttagcttcatcttactttacagaaactgaaaaaggtctataaacaaagaaagaaacaagaactaatcaaatcctgctctagtggttagtgatctatatcattttaactgatacattcttgaggattggcatagaagtaatcttcttccttcggtctaacggagataactttccgatgtgttggttctcccattcgtcgtccttgatgggcatccttgacagctactgcaaactgatcccaagagagcgttttgttgttatgcaagtctaaaagctccacaagtctcttccggtctagcaagattgttttcttaaacccaaggtacctgcaaaaagatgttcatttcaagaatcttgctgggaattagcttgaatcagattttcataatacctccgatgaccttcgacaacttttgccatgtttccataataggtaggaataaaagtgttgctggctacagatactatgaaatctagagctgccatttga

SEQ ID NO: 10933 - DNA, 587 bp, Arabidopsis thaliana columbia
gaaaatgtcaatagacgaaatatataatgatcaaagccaggacaaatagagtatcacataccgcttcatcggcttgtccactgaatgtgatcttctgattgtgttgcattcccttctccacatttacttcaagcaccttcttctcagagacaaccttctctcctttgcattgtggacacctgtcccgatcattgatggtctctcctgtgcctttgcaatcattacaagcatgctgcacctgctgcatcattccaggtccaaactgcctgatcgagatcttcattcccgaaccttgacagccaccacatttcattgaagctccagactttgaacccttgctgtaatcataaagcaaatattgtcagaaacagtaaaaatttggtaacaaacacaaagcaatacaacaactgtgaaagtataaagtaaataagaactaacccgttacactttgagcacaaagccttcctagaaagtgagagcttctttgttgttccgagataaacatcctctaaggaaaccttcaagggatgaacaacatcttcaccacgcctctgcctccttccccggctatgacttccgaatgggtg

SEQ ID NO: 10934 - DNA, 383 bp, Arabidopsis thaliana columbia
  unsure (1)..(383): unsure at all n locations
tgttcgggttgtgggatgtatggacatttgattcacatatgttcccagagagtccatgaggaaagcagagcgntgccatcgaataatgcggaggtacctaaaaaaaatggtgttgagatatataagggtggagtgcatgatgaagatggttttacgacggtaagaagatcggcgagtaggatggctgctctagtaaaaaactaggtagttacaacgggaagctcaggtggcaattcgggaagatttcttaagaaaatcccaaaaataaacgctcaagagaatattgccttatctcatagttttggaggattagaggaagatctgattattccggacttgagggaagtgaatattcaatgatgagcagatatgaaaatttttaa

SEQ ID NO: 10935 - DNA, 514 bp, Arabidopsis thaliana columbia
ctaattacatctgaatcacaagtgtttttagatcgtgaaacactaactaacatatatcatactaagagcatataaacagagaacatacgcatttgcaacttacaagggaatgttaaaaggatgttgttttttcttgcctaacacttacccttacggtttcagttagctttgcggacttctctggtcagtttctggatgttcaggttgaggaaccgaaacacctccattcattcttgcacgtgcttctgcaaacatacgttgttgctcagctgctgcttcctcctcagtcatttgagctccagggttccatttcacgctcctctgtgtgtcctgctatagagtcacaaatgtaggaaacggttaacattaatcgttttttcgtctcctcgttatcaagagtaggagaagaaagtagagaatcattaccattgtttcatacttatgttgctcatacgcagcatagacttcttcaatgtattctcaaaaccaagaacctgtaatgccttgagaacat

SEQ ID NO: 10936 - DNA, 523 bp, Arabidopsis thaliana columbia
ctcgggtcgagctaatggcaaacaatttgaacccggaacaagtttgtatcccgttaattggcccgtcctgtttacagtccttgtgttccttacctgataacacattacaatgatttgtgttgaatatacatcttgcgtgagtataccatctatacttcagctacaaatcatattcaatgaaactctgagatgattttttggtaaaggaactcaagtatgagactatataaacacatgactgaaacttagggatgctcaggtgatctcttatcccaaatccagtctcaaggatgagactagtagatagtcaaggatgaaagaaatataaacaaggatattacagagacgggtacgagcactgacaatgtgaaagttaaacatgcaataaatggacgagaacatgcaaggtacggtttttgcttacaatccaatggcgagcagaaagagggtcacagtcacgcatcgccactgcctcagatttaagtacttctcttctgcataaaacgcattgttgtgggcattg

SEQ ID NO: 10937 - DNA, 521 bp, Arabidopsis thaliana
ataaagaagcagttgaagctgctctagaagctgcggaaagttatgattatatgactaatgggtaacttacattatctgagcagttcctggaatttagtggatgagtaagctctaagcagatgtatgatgcagcagacttaaaacccatatatttctacttattgcagttgcagccgtagggctcctgtatcagttgcagcaggaatcgtatatgtcattgctcgactttcttatgagaagcatctgctcaaaggtcacatttaaatctcaatctatatagcagcccttaaagcaaagtctgatcagctcttctctttctctaacatattgacacataatgagttgcaggtctaatagaagccactggagttgcagaaaacacgataaaaggaacatacggggacttgtatccaaatctgccaacaatagtacccacgtggtttgccaatgcaaatgacctgaaaaaccttggagctccttagatctttatgtgcgaggatcaaacaatctcactcaaagaa

SEQ ID NO: 10938 - DNA, 500 bp, Arabidopsis thaliana columbia
cttcttcggttacttttacttacttgatagcttatccaactcttaactatagcatgtgcttaaggagaaactaagaactcttatactattacttagaaattattattttgcgaaaattccactaatatcttcgggtaataatttatctattaacatgccgatttcaaatgcttggtatttatttataatatatacaaaacaaaacaaaaaaaaatctataaaacccaccctgaaaactcgatcactttatgtccattccgagaactctctccctcattaattaaaatctttctcagagcaatcttctcacaagtttctaagaatctcaaagcatgaatataagtagaacagaattcgcaaactgtaaaacccttataaatcataaagaagaagtcgaagaagtcgagaaaaagatggaaatagaaataaggagaggtccatggactgtggaagaagacatgaagctcgtcagttacatgtctcttcacggtgaaggaaga

SEQ ID NO: 10939 - DNA, 504 bp, Arabidopsis thaliana columbia
ggccgtccgaaatagatgatacactgattgtaaagcttctggcagctgcggaaatgtacaatctgagtaggctcagattattgtgtgaatctcacatctgcaaaggcatatctatcagctccgtgtccaagatcttagctttatccgacaaatataatgcatccgaactaaaaagcgtttccttaaaattcactgcagaaaacctagcaggtacgatcaagatccagtttatgagatcacgttgatagataatcttcttcaagtttgatttttttactgtcttggaaattatagctgttctgcagacaaaagcatatgaagatctgaaggatgactgtccaaacctccagtctgagctactaaaggcggtcgctggttatgacgacacaagtagcagcggaggaggaaagtctcagagtgtttgggctcaactctctaacggtggtgagaccagtagccgaaggtcaggcagcgaaccacttagaagtgctcttcacatgttgt

SEQ ID NO: 10940 - DNA, 614 bp, Arabidopsis thaliana
cccgcgtcacaacttgccttgcttgatcgtgtaaaccgaagtatgtgcatctttacgatactcagacaatgcagtaatgttgaggaaatgaataggaacttttagagactgtgtaacgttttccgccaccggaaacagcctgtaatccgtccccaccgcggaaaactgcccgtaagccacgttgaaagacatgttcaagatcggtgttgtctctaaagcacaccttataccctcaggattagcccaatctgagctcctaaaacaaaaacagaacaacaatcaaatataaacattagatacaaaaaaaaaatgttatggatgggagaaatttattacttgatgtgaagaggagacatgctcatgaagaaaacagttgtacttagaggatcaatgttatggtccacccaatctcccaatgtcctcaacaccctctcgtacgctattggccgtttgatctcatcatactctgtgtcccatcatcgaacgatccacgtctgtttccacatcacaaatcttcaatcctaggatatcaatacataagtatgtgtgagtgtgtatctataacattactacttcaggactttgatggagcagtattcatcacagatgtacta

SEQ ID NO: 10941 - DNA, 1041 bp, Arabidopsis thaliana
tttattctttgttctcttgggtttttttcctgaaaaattctacttaatttccactgcaggaatttactatggtataggaagcagacaatgacaagagacacgtttgctttttaaatttagaggagcacatcacattatgtgatgcaaatctcccaaataggatgtacggttgagacacagatcatatatttcagaatcttattttggtctgagtaatatatttcttcagtttgtctgtcttgtgctgttagcttgagctttggaactgcgttaagaatgttcttgccgactaagttgaaccatgtcgtggtttatccgttgttacaaagtaaaatgcgttagttgtttacatgtgttggtaattagacttttgatatattgtttagctctcattttatatactttctttgcatccctcagatgacattacttttcttcgaagaagtatattacttgtgatgtgttctatcataactggtccaaatagtcataattgttagattgttgcttcacagatgaaatccttccttaggctatgggttgggactaactcaataacttccaattgtctataacagaatgcaatacattgcatgccatatattacattgtgtttgcaaatgatttataaaaactagtataagacaaaggaagggaatcaaacccttctttattcgtataatgtgtggcctatcttaacatttctacataatttcttactctaatatcagcaagcatcattattagaccgacttgcagcttccggtgacttttctgttttcaaacattgtattggtggaagagtttttgtcttcagttcaccgtgtgctttccagcagaaaggatcaagtgaacttgcttttcctgtggctggcttaagctcgatggtcgacagtgagattcctgtgcatggcaagctatcactgcaggcaaagcgtacaggttctttggtgtaggtaccttttatgtttatgtagtttatgtttgatacagcgactgctgaagtttcattgtggcatccgccaccatcgcagtaatatt

SEQ ID NO: 10942 - DNA, 778 bp, Arabidopsis thaliana
tttttggaagaaaatttggaggtcccattctggatcatcttttaccctagagtcctagacatgtattcccacgccatttgttcgttgatcataccagtattgccggggacaaagggtaagttctttaaactttcacaagattcgacttctaagtgttccagggattcgagcaccactctgtcgttgcataagctccttaattgtggaagatatttgagttttatgacagttagcttaggtagcaaagactcagcacaaaaatcaactggcactgaagaaaaattgaagagctcctccaacctcaaacatgagacaacctttatctcttgtaggtttggcagagtacctgctaagatttggtctgagaaaagacgtttaagctgtcggcagccagagacttgaagtagttttagtttctgaagtctcatcccgaggaaaccattaagttctccgatgctttccagattgacattgtccaaagaaagttcctcgagatttggaaagagatccagttgggactcacaaccactcgcaaggcttaagctgggaaaatagtgaatggacagtgctttcatggcaacaaagctacttttgctcttcgttaccaagttctcgaacataccattaagaccctcacaatagttcaagtctagtgatgtcacatgttgcagtagcacccaatagatgcatttgagacattgacatcactgattgctaggcaacttcacaggtgccaggaggtgaaacgatcgaataggtgaaatagaactggactttg

SEQ ID NO: 10943 - DNA, 1000 bp, Arabidopsis thaliana
ttccagcactctggagccggtaataataacactcaatccgtattggagcaactgggacagtcccacacaagcaacgttcctccaaacgctgtctcgttgcctccatttcccggtggtagagagtgctcgatcgagcaagaaggaagcgcctcagacccgcatagccatcttctctttggagtcaatatagattcatcttctcttttgatgccgaacggaatgtcaaaccttagaagcattggtattgaaggtggtgactccacgactttacccttcacatcatctaatttcaacaatgatttctcgggtaatcttgcaatgacaacaccttctagttgcatagatgaatcgggttttctacaatcctcagaaaacctcggttccgagaacccacaatctaacacctttgtgaaggtaaagttttatttcttttccctacccaaaatgttcttcttgtttgcatgcatagcgatgattccggaaatgtttttgtaggtgtacaagtcagggtcttttggaagatcgttagatatatcaaagtttagcagctaccacgagctgcgaacggagcttgctcgcatgtttggcctcgaaggccaattagaagaccctgtgagatcaggctggcagcttgtatttgttgaccgagagaacgacgttcttctcctcggcgatgacccttggccgtgagtttattaacttatccctcatttccgcatttggttttgtccatttccatgtttatttacctgcatttaccattatcgacagggagtttgtgagcagcgtgtggtgcattaagatactgtcaccacaagaagtgcaacaaatgggaaaaagaggccttgagcttctcaactccgcgccatcttccaacaatgtcgataagctcccgagcaacgggaactgtgacgactttgggaaccggtcagacccgaggaatctcggtaacggtatcgcatacagttgggggttcattcaactactagaagtagaggga

SEQ ID NO: 10944 - DNA, 501 bp, Arabidopsis thaliana columbia
ttccgtgtattttctgattacatcctgaaaacaaaagaaattgccttcaaagctcataacataatctagggtcaaaaccaatgacagtatattattacctgagtctgtgaactcatctggtccaccaggagctctgagataaaaactctcggtaaaggaccgttaacgccgctgccaccaggaacagcagaagcattaggaggtgcaaaccacaaagctctaagctttttggccggaaattttagctcatccatcggtgtatatccatagtcaaggaaaaagcttgcaagcgagtcaatcccataaccaccaatctaaaacatttccatagacaaattccaataatgagcaacttaacattgtcaaaatggttacaactttgaagcagccaaaaatgtttatccccaaacgttctgaaagcgagatgatcatagcaaagttgctggtcatcaacagatcgaacaagctccaagacggatttaggcgtcgggtttcgattta

SEQ ID NO: 10945 - DNA, 1499 bp, Arabidopsis thaliana
cggtgtggaagaaatctggtgtttacgatgcgattttggcgtctaggtatcagattaagaggcatgatgatttgattgtggcgttggtggagaaatggtgtattgagacgaatacatttgtgtttccttggggtgaagcgacgttgacgttggaggatatgattgttcttggaggattgtctgttactgggaacaatgctttggctccggttaaacgagatggtatgaaggaggtggaggagaagatgaaggaggcgaaacgttatattgaggtgagtttggagaagaaatgttgtgttagtatgtggatgaaagagatgatgaattcagggaatgagattgagcatgaggcgtttatggtttcgtggctttcgcgtttcgtcttcactaattcgggtgacgtgttgagagagaagctgtttccggctgcggttcagcttgctaagggtgttaggttggctcttgctccggcggttttagctaggatttacggggatcttggggttttgaaggagtttcttactggttatagtgagaaagagacagtggtggtgaagtctccgtttcagtttgtgcaggtttgggctctggagagattcatggcgttgcagccacctggccagccgagtcagttaaagactggtgaaccgcggatagcgcggtggcatcattatggtggtggtcaggatgtgtatggctatcctgagaatatcagagcggtgttggactcggctaaagagagtttcgactatcgtccatatacaaaacctgtgaataacttcagattcccaaagttttactttgaagatgactgttgggttcgagtaagacctgatgagaacattgtagcctttggtcggtgtttgaggtttgctaaactggttggtttggattgcattgaaccttattatcctcaccgtgtggcattgcagtttggttatgatcaggatgttcccggcgtagttccagctagaattgagacgccggaattggcctggaaagattatatccgtcccattgctgatggaatgttgtactttcctgctcggcttcacgaggctgatgttacggttgggtacattcggtggtggaaactttctgttgcggttttgcagttaggggctgagaaaattttcaaaacgcttctggcttcacattcaaaacagaaacctgtgactacaacaacaactgctgcaacgactcctacaaaggtaacaaagaaaatatcagcagcaaaagctgagggaaaagatcaagaggtggtaaagaagagggaaatagagacaaaaagagagacatctgttactggatcaagcatcgaggtgagtagagcagatggtcgaagccatggcagtagtagctatgcagggagtctcacgggttcagagcaagcaactaagcatcctttcaagaagcctgaatgggttcagagatcatcacatagaccgaaaaagagccctgatagaagttctgatgagcctgaatgggttgagacatca

SEQ ID NO: 10946 - DNA, 583 bp, Arabidopsis thaliana columbia
  unsure (1)..(583): unsure at all n locations
aatggcttctcgacattgtttttcactctcctaagtcatggttaacaaattactcaaaaaccgattagtccgccaccaaaaatcttgaaccgagaaaccagatctgaatgcgcaaatctcccggtttgatggttaacgaagttagtcaaacaatcattatgaacgttagatataataacacaaaatccaaattaaggctaataatagagtgtgcatgggaattatccgtaaccatgagccttgtagtactcaagattcgagaaaagtttcatcgtataacacgtccttaccgtttccggcaagattgatcgttttaccgtatggcgtaactagcgagtacatcgtaatttttgtcgaactggccgcttttgatactgtttttaacgtagttttcgcattgagacggaaccaccctacaggttccggcattgttggtctcggcggtcaatctccagccctcgcagtaggaagcgacggaagagcgagattcgtcggagctctggagcttgatgaaggatgagacgtgtgaagagatcgtaggattaattatgacagcgaataaaaagtgaggatgangaaggag

SEQ ID NO: 10947 - DNA, 572 bp, Arabidopsis thaliana
tcgactctagactccgttgacccgattctcatcttccggtgctggtagattcagatccaaatccagtgacacgaccgtcctagctttctttttcgctggcatcgccagatgatcctgatgaccgtccgatatttgatcgaacgacatcgaagacagtgatagctccgtgttggccgcagccgtggccaccgtcacggtgggggctatcaccgccggaacaaccacagctcctctatgccgtctcatgtggccacctaaggcttgtccggacgtaaactcggctccacagattccacattcatgaaccttatttttacttgccttaccgtacacgacaagtgatctactgttattgttcttgaaaacagttgtggttgtgtgtacaagtgaaacggcgtcgtttgcatacgtgttcttcttgaggtcaaggttggagtaaaaagaggcggctttaggtttcttgtggctagctctgtgaccacctaaagcctgaaaagaagggaaggtccggtcacatgtcttgcactgataaacgtagtaaccggcttttccaccactgttagaagaagaag

SEQ ID NO: 10948 - DNA, 552 bp, Arabidopsis thaliana columbia
caagaccacaatcaaccatatcaaatgcaaatccaacggagatttactatccaactccgtgaaatccatatccggtgtgtttggatcagaaccagtagagggattcgacatgatgagatcatccaacgtttgcttataatcagagatcataacaatgtagttcatcacataccttgtcaatggatgaatcgttcctccagggacaggaactatcgaaggttcgcgaagaaccgcattctcaaactccgaaagtatacctctcgctgcttccgctaacctcgattgaatctcaacagcctgagctctaatagcatctgatgaatctgagtcaaagattgcttcaatatccggcaacatatccgttaaagcatcatgtaaatcaagaatcttgaacagcttctcaggtgatcttctactgatacttatagcttcagggaaagtgaaaagtctcagagcagaagccttcactgtctccatgaaacaagtctcatccatggcagtgcaaataccatcaaagagctgctcacatagtctcttctcactagagaaaac

SEQ ID NO: 10949 - DNA, 564 bp, Arabidopsis thaliana columbia
tagtaactggcgccagtgtgctctacagggatagcttcgtgaggctgccaaaaaggagtcagatccggacggggaactacgcgttgtttcgggcgaaacgttgctctcttaccgaatgccgcaggtgttgcagcgttttcggcaacgcgccccaaaagtgcgtttatcgttgcagtcgctgaactgttacgtgatccgtgatgcgctactgaatgatgaggccgatgttggcgtcttttatcgtgtagggaatgatgatgctctgaatcgacgagagttgggtgaacaatcactggtgctggtggcttcaccgcaaattgcagatgtcgattttactgagccgggaagacataacgcctgtagctttattatcaacgaaccgcaatgtgtcttccggcagatatttgagagcacgctgcgtcacggcgtgatcacggtggaaaacaccattgagcttataagtatcgaaagcatcaagcgttgtgtcgcggcgaatatcggggtcagctacctaccgcgctttgcgtggcaaaagagttggagtgcggagaattaattgaattg

SEQ ID NO: 10950 - DNA, 567 bp, Arabidopsis thaliana columbia
cgactctagatctagtaacggacccatatttcactctaaaggcggcgatgaaggatttattcgaagatgtgcgcgcggtggcggaaccctctggcggctggcgtggcgggaatgaaaaaatatatcgccctgcacaacattcgcggcgaacggctggcgcatattctttccggtgccaacgtgaacttccacggcctgcgctacgtctcagaacgctgcgaactgggcgaacagcgtgaagcgttgttggcggtgaccattccggaagaaaaaggcagcttcctcaaattctgccaactgcttggcgggcgttcggtcaccgagttcaactaccgttttgccgatgccaaaaacgcctgcatctttgtcggtgtgcgcctgagccgcggcctcgaagagcgcaaagaaattttgcagatgctcaacgacggcggctacagcgtggttgatctctccgacgacgaaatggcgaactacacgtgcgctatatggtcggcggacgtccatcgcatccgttgcaggaacgcctctacagcttcgaattcccggaatcaccgggcgcgctgc

SEQ ID NO: 10951 - DNA, 523 bp, Arabidopsis thaliana columbia
taaacataaatattattcgtgaagagtttttacagataaaaatgtgggaaattttctttctgtaaatgttttgttgtttgtccctctggaaatatctgaaagcttatgtttaccacttatcaattctttcacacctaatttgtaacgtaccaaaaacaaaaatatatatgttataatattatataacaccctattgttcatatatatatccctcaacaatgttgtaaaacaacttagaatttcaacaaaaaccggttaattgcaagcaaagataagcaattctcgggttttgtgttactctgtagttggtttctctatggattcttcactatcttggagcttgaaaacacggaaaattgctagatttgtatctcctgcaagtcacacaaagagtttaacctcattgatcggtccatcacattcacagagagagagatggaaaatcatgcgaaaagattggtgtccaaaggtgattcgtgttccgggaaaggcaggagcagcaacaccaggaattagacgtttg

SEQ ID NO: 10952 - DNA, 756 bp, Arabidopsis thaliana
cctgatgaagatgtttttattttgtgttgtaaatataaccagccagggcctcgtgatgcaatgattcaatgtttcatcaaaagggataaatcaaagctaacatttcacctttatctttgtttaagtcccggtaagctgttttaaggacttagcctgcttctttatgatgttacttagtttatgtctaaatcaagttgaataatgttttaacagctctattagtggagaatgggaaaattcttctttcagctaaaagaactcgtagaactactcgaaccgagtacattatctccatggatgctgataacatctcaagatccagcaactcttacctcggaaagctcaggttcgttttcagtcctagacatagtagtttgctactgttgaatattatggtcgtttatctattgttcaaataatcttttgtgattcccatttaatcaagcttaatgaggtttctttatctctctctcagatcaaacttccttgtgacaaagttcttggtgtacgacacgcaaccaccaccaaacacatcttcgagcgcacttatcactgatcgaacaagccgaagcaggtttcactccagacgagtttctcctaaagtaccatccggaagctacaacattgctcaaatcacctatgagctcaacgtgttgggcacacgcgggccacgacgaatgcactgcatcatgaactccatcccaatttcatcgctcgaaccaggcggttcagtccctaaccaacccgagaaactcg

SEQ ID NO: 10953 - DNA, 1692 bp, Arabidopsis thaliana columbia
ggatcccttcctccttctctaagaaatccgtttttgttctctccgccgccgctttatccaccgctattgcgtattccgctgttatcccttctgatcatgatcaatcaaatcgtagccctagcggaaacagccgtatatacgagtctatcgaggacgctgttcagaaatccggtaattcgttgaggagagtggttcatcatgctagacagaccggtgttgcggtatcggttctgtggcagtcgcttaggtctgtgctctcttcagctaatcatgaggtgcgtgcgggattcgagctgcgtgtggctgctcttttagccgatatagcgtccgcaaatgctgctcgtagagcgctctcgttggagctggcagtggtgcggtggttgattggttactggagacggtggccattcccggcgacagaattggggcacaggacgaagcggctagggctctagcttatcttattgctgatccaacggtgaggaaagacgctctaggaaggcccgatgcagtgcccaagttactgaagttcgtattctcgtgtcaaccaaaaaacaaaaaggtccgttttgcttccactagttgcttgaaatgattaaatttcgagtgattacttgttctcgttattaaatggattagtctggttagatctaatggatagatactagccagctgatatgactctaggtaacatttttggatttagaagaatcaaagcacatatctatgatcagcaagtagttgttgtagaaaaatgagttttgtatatcgctagggttgtttatcatgtgtcaagttgtagatttctctttctcattaacacactagaagctttttgatacatctgattcttgatactgttatgcttctggttgtgttttgccattgatatatagcttttctttgggagcagcattcaagacgtagttcattcgatatttctgattctttgaaaggtaggagcatgcttgtggctgccataatggatatcgtcacttccaactgtgacactatagaaaagacacctttcaagtcatccttgcctggaaatgctacgatgagagatattgctgctgcaattcaagtaattgaggaaggtggtatgtattttgatgagccagaaaaagatgatgacagtgacgatggaagaagtgggattaagggaattggaattaaaatccttgaaggaaccacagttctgggattatcaagaaccagtgggcttgcaccgttgggtgaccttaatgctaatgcgggagaggagactcctaaaacatttgcattgcttagtaaacatgataattcttcacaagctaatttgtcatctgccgtcattcctggcctttgggatgatttacattgtcaacatgtcgcagtgccatttgctgcgtgggcactggcaaactgggcaatggcttctgatacaaatagatctcatattcaagaactcgatcgtgatgggcaagttgtcatgacagctttaatggcaccagagaggactgtgaagtggcatgggagtttggtggctcggctgttgttagaggatctcaagcttccattaagtgattctgtttccgactggagttccagtttacttgccactgtttcacatgccagtaaaactgaggatatctctctggctcaagttgcgttgtctgcctttttagtttctgtcgacagaagtgacaaagc

SEQ ID NO: 10954 - DNA, 772 bp, Arabidopsis thaliana
tgcttaagatacttctcttcaatgctagctatcctgtcccaacgaacataagcttccgattctatttccatggctctttgagatggattttgtgaattactctgttgcgcctgacaaagactgagataggcttctctcgtccttttcaccaaatttcccattttttccttcgccaagcctcgaagttttggtttaagagccttgagcttcttagtgaaccggaacagggacgacgtggacatgtgtataggctctgtttctctccaaaaattttccaccaaaggtttaaactcctccatatcggccacagcattcacaaacttaaaaggcttatttcctctcacttgtgcaccagagttcatatttaaattgatacgacaccgtaaatggtcagaacaccctcccgcttcaaaaacattataagattgtgggtagaccatcttccaagcctcattcaccataactctatccagttttttccaaattgggtcattatctctcttattgcaccaagtaaaaaggggcccgtgagatgccaagtctgagaatgagcagtagttcaccaaagactgaaaatctcgcataccggaggtaactgctgggtgatcttccattcgagagtgctcatccatatccaaaatctcattaaaatctccaaaaattatccatggtttatcacgaatgatcggagagtccatatggtctcgaagatcattccacaaaatctttcgttcctctgcaaagtttgaagcatatacaaaagagtagaaaa

SEQ ID NO: 10955 - DNA, 693 bp, Arabidopsis thaliana columbia
tacccaatttccagtttcaccctcagatgattattcaacaacacagaccgatataagggtattttcgtcattcaaacgaagaatacaaaatgttatataaacgccagtaacggttaactataccggtttacgttttccctcattgttgacaaagctaatcttcgagctctgtatcttgtgatgatctatattgtctaatctttaacattcacatggtggctagattcagcctttattgatacagcaatacatgtataaagtcctttcttccttgtattggtttattcataacgagacatcctattacatcagaatgcaagatcattgaccaagggtttcctctagaatccagcaatattgatcgtgcgtttgcagctgctagcttatactacatctatccaggttcagagaattgcttcgatattgataaccaaactgatcctcatgagtctatctgttcctttttgttaattaattgaacagttcacaacaatagacaaaatcagttaatattcaacttactaatggatcaatgatactatcagatgaaaaaaggcttgcacggagatggtaatgccaataacctgttcgaaccagaacatgtttcaccatttgaaaatgatgacaaaggagacccaagaatactgtctgaagataacaaacttgagttttaaaggattcattagaaacagt

SEQ ID NO: 10956 - DNA, 487 bp, Arabidopsis thaliana columbia
gatcccccgagcatactctccttctgctgtgtgcattagctagccattggagatcatggtgttaaaattatgaaggatatggattctccattaagagaaatgacaatacatctcttggcctttatcagcaaaggcgctcaacggcttagagagtctcagagccacatatctcatctgttatgccctccagtagcgaaagaagagtttgattcctgcaaaagaccgtctttcatcaataccaaacacggatggttttcgctagcacctttagtttgtgttgggaaaccaagatcactgcagtatctatcgcgactgctctagttgttaggggagacactacagaacatcctgggtctgttcctcaatcgcaattttctagactcagttgcgatacagatatatagagtggcttctctattgttgaaatatctgtgcttacaagcagagggtgttgttacgagggcagatgaagtgggatatgtcgata

SEQ ID NO: 10957 - DNA, 602 bp, Arabidopsis thaliana columbia
agaactcaccccatgtcatgttgtgtctatttttgaagatttcgtagagtttcttggcgtttggacggatggttactttgtgtcccaagtatctcctgcaaacacacatgcatgtgcatattagaaaagagagggaaaaagtgatgttaagagacacagctggactaagagttataccttctcccagctaagattcgagccatgttgccgttgttgtttgtgacaaatgcgtcgctcttatcacagacaatgaagtcaagagcagccatgcgtgatgagaagtttgcaaacggagccagttctttcttggaggtcagtgtctcttttgtatgaagattcggaaacagagctcttaaaggtgccaatgtatcctcccctccgtatacctcgcctgatgcaacgtacaagtgaacctctttcccaaaacctaagcctctgagcatcagaccaatctcctctggcgtcaggggacatctcccgtgccgccgtaccttttcagggtttccgcctgcacattgcaacaaccccaataatagaattaagaagagttgatactgcacctaacattcatttatggtaatcaaattaagcaatgcatgatg

SEQ ID NO: 10958 - DNA, 1052 bp, Arabidopsis thaliana
tcaaacacaacttaagattgtaaactcttattgaatgaaatgaaggaaaagagagtgagagacacagtaccctgtagccttgaagaccatggagactggttgatgagagatcagcagcataccatttgcctttttgggcaccaatgagaggccacataacaccccatgagagaattgctccgatgagaagagacacattgataagatatggacaaatcattccaacaccaacatatgtagcagagaaatcaaagtagaatttgttttcataggctttgagaccaaatgtagggaagttggcgaaaccacaaccgtcaccagtagcaaagaaccattgaaagaaaccccataagaaactgaatgagaagaacttgcccaatgctctgacttgcttcctgtgttatacatagagaaaaaaaaagtgatcaatattcaacagacaaaagaaagattgtaatgggggcatgatgaaagattcttactttgcgagtttggcaccttgaggtgtgtggaagctgttaatgagatgggcagtggcagtaccactaggatatgtcaatttgaagtccacgatcatgatctttcgaagaggaacgacggagaaaagaccaagaaagctaacgacaaagagaaatcctatcatccaacccaaatgtggattctttatgttcaacggagtattgcttccgcagattgtttagcaacaacatcactcattccaaacagataactaccaaacccacctgttcaaacacaaacacacaatctttaagccaaactatggtcgtaaatacaccaagagagaaccaaacatattggaaacaaatttcattcatgtaactataaaattagttatggttagcaaacacaaaatattgttaaggtaggtattaaatcttgtgaacatgttagatgtgaattgatttctttaaattaaaaaccaagccaaaatctaatcataacgtataccacaaactaaagttcctatataatagtatgaaattaaaggtcatgtgccaaataggttcccatttgacacacatggtgggcat

SEQ ID NO: 10959 - DNA, 579 bp, Arabidopsis thaliana columbia
ccacaatccccaattccaatatctaacaccataagaaaaatagacaacatgtgactaataatacgggtctgtctttatctaaatcaagaatttccaaaaactttaacgtacctgagttacaatctttttcctcatatcaatgtgatcatcatcttggggaataagaagagagccatgagaatgtccttgtgaggcatgagtatgagcagagccagtgtgagcatgttcctcctctccgcctgtactcaccggcagagtcttaccctctttcgccaagcgagatctgttcaaataccctgaagcaaaggattcaatcaacattgtcaagatcgatgcagccatggcaacgagtcccgtcatcggaaaatctccccacggtggttcttctccaaggcacgaactcgtgagactctcggtagcatcgggaagaatgtggacaaagccggtgcgtagaattacgccggcagcgaatcgcttcacgtacatgaagaaattgctctccgtcttgaggccaaaaataggtaaacagacggcaaatactccggcgattaagatggaaaagaaagctatgatcttgta

SEQ ID NO: 10960 - DNA, 655 bp, Arabidopsis thaliana columbia
  unsure (1)..(655): unsure at all n locations
cttcacaaggtgacggtgagaaaactgaccaaggtaattcacttcagcctgcaaaatcatcaaaactgaagattaatgaaaaacaaacaagaaccaaaattggcatattttaacttatagcattattaccagccactcctggtgaccttgccaaccatcttggttaagctttttgacggcaataaccaaacccgtgcctggtcttgaggcagtgagagacttctcatcaatccatcctttgaaaacacaaccgaatccaccttcaccaagcacactgtctggtctaaaattcctggttgctgatttaagctcagcaaagctaaaactcttgagatttggagactgtaagatctcaccctcagttcgagggcttggtcttacagacacagacgaagccttgctcccaagacttcctatatctttggcgtcatacttcgtactcgctcctaagccaaccaaataagaacaaaaaaagtattagtttcgtcatacattcgaaccaaatctgacagaaacacctaaaaccctaacctcagattggaaaaatcaaaactttaaggtaatgaacaacaaatctaagtactttgccttgacagaataacagagggacagaagcgaaaagattcctacgagnaggctcatagtttgtgatagg

SEQ ID NO: 10961 - DNA, 591 bp, Arabidopsis thaliana columbia
aagctctctcactaagctttcttctgcatccaatttcaaatccaccgttgaatctactccgacttcgtttgatccaacggtggtcaccacccctgcttctgtttctcgcccaatcttgaagttgatgatctcttccccgaagaagaaactgaccaagaaatcaaaagttttcgagaatgaagaacagaaggaaacgacgaagaaagagagaagactactgattgttgtttttctgaaagtgattttggtgattgggttggttctgggtttggaattagggtttagttgggtgcttgaagaggtttttaaacctgaatttacagaggagattgtgaggaacgcttatgagagaactcaggctgatcttgatttgggggtgaagctgagactcttggaagatgaatttaagggttttgttacgagtagaaagttttcgagatgcacaggttctgattctaaatggaaaatcaatcaggtagttattaacttattattagcttaaattttcacaaagtttctatttttctttgactgattcgaagattacgtttctaggatggaccaatgttgaactcaaagtgtgttctgtac

SEQ ID NO: 10962 - DNA, 104 bp, Arabidopsis thaliana
acctgtaatcccagctatgtggggagccgaggcaggcggatcatttgaacccaggaggttgaggctgcggtgacccagattgtgccactgcactccagcctggg

SEQ ID NO: 10963 - DNA, 1612 bp, Arabidopsis thaliana columbia
gagttgagacatagatttagctcttaacgccttcaaacaaccaatgtgccagttaagctgactggtaatgatagacaaaaagatatcatataaaatataaagagatgctcagcatatctatcactacaactcctatgacacaaacgtcaagttagaatccccttaagaggaagtataaaatgaccaaaacgggaaaggaaggtatatagcaggaaatagaagctatcataaactccctcaagtatgtctccaacccccattcgactatgaatttcgttattcattttagaaaaaaaagtgactactagactttcagtcattgttcctctgacacaagatgcttataattgtataaagaactaatgctaattattgttcctgtatttattccacatacacaaatagcacaacatagaattaggaaggttggggcgtcttcacaatctttacgaatgtatcggtaattgagtagcctgtgaatgtatctgacagtggttttggacaatatagcacagattgattttttcttatttgggaatagttacttaaagataacaatatcacatattcaatgtcaccgagacaagtaactgagaggtaagaaacagtcacaaagtctaatgagcaaacctgaatgcggttgcgatgagcgaagtttgatactgcatgatgctgcatcaatccctccagctctctttgcctttccatctcagccatttttaacatatccacccacacttgcctaccacacaacttgcgtatgcctcttctagcatgttcattctggatgctgtttggattaacaactattccatcaagtactctttcaatctgattagcaccttcaataggttgttcttccctgagatcaccaagagcaggcctctgctggctattcatctgaaccatctcccttatgatcctcaccctttcttgttcagtttcaccaagccattctgctcttgagctgttggttgcttgggaagcagaatcagtatgctgacctgtcccagagctcgtccactcacgaaaaatctgtctaactctttccctttcacccatccccagatcagaaaaatgctcgctctgaaaagggccgagatcctcactcgagttatgtgacccaacatgactctgggtgggagaccatccaccaagttcattctcacccagattaacactatctctaacaatatcatgtgcactaatattactgtcacaaccatttcccctcatagtattagatggtgaagaaacactcctcctctcaccatctctctcacgagcatgacccatcacatgatcatcctcaagttccctccacatctgtaggagtgaggatgcccggacgcttgaccttccctcattttccctttgtctagtcgcctgaacctcagagtcccgacggaaagatgaatcgatcaccaaaatattttgcagaccagcgatagccatttgatcaatctttaactgtattagcaaaaagcctaattatctacaaaatatacacaaaaactggcttctccagatagaattagatcatctcctatggtgctcatcaatttcaatacctcagatatttcatctgaccacgactcttaaagccgcgttg

SEQ ID NO: 10964 - DNA, 586 bp, Arabidopsis thaliana columbia
cgttaaagcacatggaagaatgcatagacgagcaatcaaatttgtttgtgagggctagtaggttataaatgatttgttatcaaaacatccatgtttattgcttaaatatgaagaagctctcatgagcttgactaactgtgcaccggtgatgccgactgagatgatgtctcttttgcaggattatgaggatatgttctcgctgaataaacctattggagtactttccatatgtatctcaaagtcacgtttggagactttgagaatatccactctagatcttgcaagtgccgaaattgggattaatctctcttcgggagtctatcagtatgagtgagtataacaactagaatctcaaccggatcataaatgcctaagtattgtatccttattagaagatacaaagacaaagactcatacgaactacgactacacgataaggctttgagaagcaagaagaagctttattagtttctagcagtcaaatatgactagatgtcatgtgtatgattgagtataagaacttaaaccgcaaccgaatcttaatagcctaagtagtgtaccttgttagaagatcaaagccaaagac

SEQ ID NO: 10965 - DNA, 468 bp, Arabidopsis thaliana columbia
ggtagacctaacgctacatagaaacagtacgttgccggagaagagtggtttgcggaagtagctcagatagcgataaagatgttgatgggaaaaggcaacttcggtggccacggagagcgtgacgttactagcccctctgtttcctctgctaaatcttacaccagtaattgcctattctgataattctataattaatcggggactgttgtccggtatcgtagacgtataggttcgatacatcgcttaatgcatgagtctgaacgagcattatatatttggtcttatactaaaatagagcacgatttgcatccaaagattttctctcgtgattgatagagacaacaccatggtgttcatctgataatgttttacacaatggattagtattaactaataactagataagatatttacaaaatattttaaagaactctgctatatagagagataggggggaaaacatgagct

SEQ ID NO: 10966 - DNA, 832 bp, Arabidopsis thaliana
ggatccgcgagaagaatactgagaaagtgtgttaccttgagaggtttcagcaagactgagcattgaagcagggtcgacctttgggtgggagaagatggtgggctccaaaagaaaagccatcggtgtagacagtttggagcaagtgcaccagccaatgtgctctacaggaaatttggactcaccgtggatacggttattgcagccgctaaagacttttgttaagctaagctctcttttacacatcataaagacattttctacgttgttcaagtgtgcctttccacatacatttacccggactcactcactagtcactataaatcaatatcgttatgtttttatcttacaataagtgaatttgaagaataaaatagagctttgatggatattactattatatatgcggtctagtagatgcgtgttgttattatattattccttgaagattactctttgcttttttgtaccccatggataaatgtgccttggtattaagttgcaaatttgatttaattaatccctaaacatgttactagttagagtttgcacgtgacgatcttgggcagcacctaaacatgtatttgtgtgcgtaattttgtaataagtaagtgcatcgagtttgatgaatcagtatttgaatgataattcgatgaaagtacatttgttgccataagaaccctaaagtaagatccataaggatgatgaaagcttcattaataataaaagtaaagttaatctacctataataactaaattaatcaagagtgaaactaaatctgtagaaaattaaatgtaagagatagagactagagtgattaattaagctttgact

SEQ ID NO: 10967 - DNA, 545 bp, Arabidopsis thaliana columbia
catagcagatgggtatttgaagccttcgaagcttggtttcatatttcttatgttcttatgtacaagcaaacaattacttttgtcctcgttcactggtgttacactaatacgataatagtttagtctacagtatgagacctgcatcagttactaaatcgaaaagaaaatgcaaacgagtgcttcgatctgtggacaagtacacacaaaaattaagatctgacgatgttcttaaatagaaggttgcaaaacaaagggaacaagtcaaggataacgatgtcgaagggtatcaaaagctaatagaaagcaaacaaaaaacaccgaagaagccaaaggttaggacaaaggtagcaacaaatcagtattcagaattggagatgacatcgtcgatctttagaatcatcttaacgacttgcgtcgtagcaaaatttgttgctgttcccgatcaatgtttcaacacattttgctcctcatatcgtttgtcccacgtcattgcaatctattccatagaagggaatattctcctgttcatcaaaacccaatgtttg

SEQ ID NO: 10968 - DNA, 541 bp, Arabidopsis thaliana columbia
aaatcaaacacaaatattttaaaatattcattttctcggaagagtacgaagattgtttaatcgaagataatatttaatgaaattaatttctcaaaacgagaaattcttatttccatttttaaaagttattctatgtattattcatatcatgcttatgcatcttgggtccaatcttgatttgtacaacggcgtttcgagatcatcgttagccatttcctcttttagacgacgtagtcatcatgagggagatgttctgtaccgttgagatactccaacactttcttcatcattggcctatcttctggagatcgtctcacgcagagaagtcctgttttcagaaccaataacacttcttcagagactaaattctttttcttgattcttttgtcgcatctccttaagagatttccgctcttgacccctcgaagcacccagttcactaaactgatctctaccggttcctttgtcggctctatggctctccttccacaaacaatctccatgattaacactccaaattcaaacacatctgtggcacatg

SEQ ID NO: 10969 - DNA, 546 bp, Arabidopsis thaliana columbia
ttgatcgcaatcctgtctggaaaagcagtacatctaaattccaaacttggtcctgtcttcttggaaagagttactaagagaggcacattcgattgcttaggcttcaatggcttatcctcatcttcatcttcttcattctctgcttcttcctcatcatcttcatcatcttctttgtcaccagtcacaagattagtcatgtgtacttcaactttaacagtctctccttcatattctctagtcaatgtcacaatcttccctcctggtttgtcttccatttcgaaagggaagccacttggagtttcttcaacctttattcaaacaaaagaagaaacagagagattacacaccattgccattgaaacagagcttcacgaaacacataaatcttaataaacaaaatttgcagaaactaaaacatgaaaatggtaaggatttactcgatgataatcatcagctttctcggcgtatccaatctcctcttcaatgattcgaagaagcggatcagttggagaagctctctttttggtcgatgtggtaaatggaaca

SEQ ID NO: 10970 - DNA, 378 bp, Arabidopsis thaliana columbia
ggtatttctacgagaagaagaatccttcaggtcatcgagcgttggcacagaacctggagcatgtttcatttaccatttcccctagttaaaagagtcacaaattagatatctaaaagaactactcaagcaagagatccaactccatgaatattgaagaaaaccttaccccactgcaattcacttcctggagatgaaaattttgctgcaggaactggcaaagtgagaggcagcttcagtttcttaaactcctcccaagattgtggtagatctgtcaaattctggaagaacaaaaatgtgtcacataagtaactggttctgaatcactacgcagtaactgatattgtaaaagatacgtacttggctctcgtaaaaggagta

SEQ ID NO: 10971 - DNA, 744 bp, Arabidopsis thaliana
gtctcctcgtgaaattgaaagttttatatacctcctcatattcatcataagacccactaaaggttgtgatgagcgtgcaatcacagctccacttcctgcaattgaggttaagatcaaaatcagtatatcattttggaagcaatacaaccacaattaaaatggaagcaaccaaaagtccaaaatatctgccttcctacctggctgacaccatgtgatcacaggtaagcgacatcttgcccggaaagaacacgcctggagcagctctgcatcactatcagcaacagtgacttgttatttttttattatttatcaatactcaaataggaacatggtctttacacgcaaaacgagatatggcaaaccagtgaagaggattattctggaaagctcgtaaaatatgaacatagaaccactcaaaagtctaggaggtattgatagagacttctttaaatccctgacaagatattggtgtcctaccttatggattttggaatcataaaagcaaatggataagtctgacacaagttgtaattggagttcaagtcgcttattcgccacagctcattggacaatgtgaacgcaccatcttcaatcatatccattgatgctcgtattgaactttttccgagaagacggaaatattcattaagcaatctttcctttgggtttgcgttaccaaatttggaaggcccgcatgcaaaagtatatagatcccaaactctctctggcttggtacatcgggtc

SEQ ID NO: 10972 - DNA, 647 bp, Arabidopsis thaliana columbia
gactctagataagcgggacatagaagcatcgagtaaatttcatatttgcttttgtccacaaaagggaagtcgtgaatgggactgtcatttaatttttattaaaagtagggaaatgaaccaaccaaaaaatatatgttcaatcgttttgttaacctttgtctcaaaccaaacggtttggtttggttttgtttgttatactattacttgtcacccgaaagtctgaacccaaatatgatattgttaactcgattagtaagactgaaaagctttgtagacgtggaaagatgaacaaagcttaactcgattagggtttttgtagtttcagcatgtatgctgcagctgtcggcttctccagagcagctggaggaagctccggcgacagaggttaaaggcatacaaactacatggattcaggtaagtcagaaggaggatctcaaagaacatggccatcgatctcaatgatcaaacttcacaatggaggcatgcatctagccaacgagaatctccgtagactcaaagggtggtgggtcaacagtcaaaaagtcatacgttcaagcagctcaaaaacatgtttttcctaacaaaagtttgtggttgatgaagtagatggtcaagggagagttgttgtcccaaaagaggtttttgta

SEQ ID NO: 10973 - DNA, 474 bp, Arabidopsis thaliana columbia
  unsure (1)..(474): unsure at all n locations
taagctcttcacgagtttcttctgttgttttagttcattttgtaagatgacgataccctctcctacatgtagaaaaagaaaatgaaatcgggtgttcttgaaagagctaagactgatcaaataaatagtaagaccaacctctccgagggaggtttaaagactctacttctgcaagctttctcctgtaatcttgttcaaacctatccaaagcttgcaactcgtgatataactcctgataaagccaatgcaagttagtttcaaatctcccagaaaaagattacaacagctcattgaaacttcaacatggaaacatacagaagtgattctggcaagagtgacgagctcttgcatccttgcctctgcatcatctttgagcagtttatgctgtgagttctctgtgtcaagcctgaaacgttatagacccgtgtacaatgaaaatccactggcatgtaagtgactanaaagcattagata

SEQ ID NO: 10974 - DNA, 1231 bp, Arabidopsis thaliana
cccctgtgcgggtgatgaaggtatctggggtggtgccttagtaggaggcggattcggattagtagtgctagcagcggctttggatgtgtcaacctccactcttctccggacataaacaagtcgaccgctagcagcattagtagtggctggagagtccactggaggtttctttaccccaattgatgatactgtatcttgttcgatggccttttctgaatcttttggtgtcccctccggaatctccatttcactgcgattaaggagaaactaagaagaagcttacaaataacaggttcaaagaggatctgcggtgcttcaatatcaaccatacgaggactcaggattataattattggaatctgatcagtgaataatcaatcggaggagcgcgaagcaaaacaatttacctggagaacggagatggtgatggagatggatcagagagagaatacgagcagagcagttccgctccgagagatggtgttttcctcatctcctcgctagctagagaggagagtaaagcattgatgggccagtttaaggcccattatgtgcattcacgggccagtcttactccctctacatactgtatagcatcgcattctatggcccatgcttttcagtcacgttgataccaacaaaaaaaacacaagtgaagaacaacactcccgagtgaaattgttgagtttcctttggtgagtttttgcgagtttgagaaaaacaagagatttggacactattccgacacacatcgtgtaaggcttaattcaaaactatcaaccacaaaaaccagatgagaacagaacacaatttttttttttggtcaaaacctggaaaacagggtacgagacgtattggtcattgctgtgagacttggaagcgagggaaacaaagagagatttgagatcatcgagcttcttctgagtaaaagctctgcaacaaaacacacacacacaattgataagatcgattttcaaattagaaattagagagtgaaagtgagattggttccgatgaagacctggaagcagaagtgaagcgatgatcaacagaagacgaattcaaattcccattttcgacggggttttttctctcctcagttctccggcaggtttcgtcgtctctgttcttctattattttctattgatcttccacttcttcaaaattacaacttcaaccccttaaaatctaaatattcttaatgtacctcattacttttagttgtgagtt

SEQ ID NO: 10975 - DNA, 830 bp, Arabidopsis thaliana
ccattgcatccaaactcgtcgtggaagtggcgaatgatcaatcattgtttgaaaaatctttgcaagaccctgttttgagattggtgcttgaacaaaatctgaagtacgtttccagtagtattcgttggttgatactcttttgagaagtaactctatcggtgctttttctggataattcgcccagaaaacactagattcgatccatttcttgaccatacaatcttctttcgttaaatgtagctcagggaaactctgtttcgttatgtttaaaagtctctcaggtaaaccaagaaacattccgatgaaggagactttaatcgtcttaccttttgagattttccggtttattggtttaatctctaaccggataaacaaatctctgtcgataaccggagctacttgttgccatttatgaactaaatcaacggctccttctctcaccgttctttctagtttaaaaactgtgactttctccggaaccctaacgagttttatcttccaggcaagaatgactccgtagcttccgccgcctccgccgcgaatagcccaaaacacgtcttctcccatagcttgacggttacggtacactttaccgttggcgtccatgatttgagcgtcgattatatgatcaatggataaaccgtattttctcatgaggttacgaatcctccgccgctgaaatgtcctcggcgccgactttaggacaaactccggcgggaaaagcgtggactttgcttttacttgcaatgttatagtaaagctgacctagtgaagctccggattggatccaacggtttcgtctttcatgttgatatcgattttgttgaagt

SEQ ID NO: 10976 - DNA, 2508 bp, Arabidopsis thaliana
gcagactattttattctaggtttcaatgaagaggatgcagtgaaagaggatgtcagtcaaaagaagcttgaagatccttcgctctatcactatgcgatcttttcggataacgttctggctacatcagtggtggtgaactccactgtcttgaatgcaaaggaaccgcagaggcatgtgttccatatagtaactgacaaactgaattttggtgcaatgaagatgtggtttcgcatcaatgctcctgctgatgcgacgattcaagttgaaaacataaatgatttcaagtggctgaactcctcttactgctctgttctacggcagcttgaatctgcaaggctgaaagaatactatttcaaagcaaatcatccttcatcaatctcagctggcgcagataatctaaagtaccgcaacccaaagtatctatcgatgctgaatcatctcagattctaccttcctgaggtttatccgaagctggagaagattctgtttctagacgatgacattgtggtgcagaaggacctggcaccactatgggaaatagacatgcaaggaaaagtgaatggtgcggtggagacgtgcaaggagagcttccacagatttgacaagtacctcaacttctcaaatccaaagatttcagagaattttgacgctggtgcttgtgggtgggcatttgggatgaatatgtttgacctgaaagagtggaggaaacggaacattacagggatatatcactattggcaagacttggtaaggcattggaaatttctcaaaagaaatacatataaatatttttggatgatgaatggatgtgtcaattaatatatgattgatgcagaatgaagacagaacactgtggaagctgggatcgttgccaccggggctgataacattttacaacctgacgtatgcaatggataggagctggcacgtactagggctgggatatgacccagcgctaaaccaaacagcaatagagaatgcagcggtagtgcattacaatgggaactacaagccatggctgggtttagcattcgccaagtacaaaccgtactggtccaagtacgttgagtacgacaacccttatctccgacggtgcgacatcaatgaatgaatgaagagatggtggaggtagtatacatgatgaagcactcaaaggaaactaaataagtaaaaattgttttcagtttaccataatactaggaatcagcagacaatcacacatgacgattaattaaatagaatctcttgtttttctcaaactcagaaaaactcaccaaaggaaactgaacaatcttttcactcggagtgttgttcttcacttgtttttttggtatcaacgtgactgaaaagcatatgggccttagaatgcgatgctttgtctatatacagtgtgtacagtgagtaaaactgccccgtgaatgcacataatgggccttacactggcccatcattgctttactctcctctctagctagcgacgagatgagtaaaacgccatctctcggagcggaacggctctgctctgctcttatcctctgtctgatccgtctccatcaccatctccgttctacaggtaaattgttttgcttcgcgctcctccgattgattattcactgatcagattctaataattataatcctgagtcctcgtttggttgatgttgaagcaccgcagatcctctttgaacttgttatttgtaagcttcttcttagtttctccttaatcgcagtgaaatggagattccggaggggacatcaaaagattcagaaaaggccaacgaacaagattcagtgtcatcaattggggcaaagaaacctccactggaatctccagccactactaatgctgcaagcggtcgacttgtttatgtccggagaagagtggaggttgacacatccaaagcagctgctagcactactaatccgaacccgcctcctactaaggcaccacttcaaataccttcatcacccgcacaggaaccaacccctaccagccataagttagactgggaagagcgttaccttcatcttcaaatgcttcttaacaagcttaatcaatctgatcggaccgatcatgttcagagtaaagctcctcccaatatcactctaattcctgaccttgatgcgcttttgtttttatagatatgtttcctctgttattagtgctttggtcactttcctccgccgagcttagcaagcatgctgttgacttggaaaagaggtctattcagttctctctcgaggaaggtactctactcccttgcgtccactctctcacttcctaccattgctgaaacatatctgtttggcacagatttcggtgaccctccctaagtggaatattcatgctgctggctaagccattttttccatatccgcttaccactatataggctttagtcacatgcttttaggtttgtagctttggacccttctggaatcaagtatttgctagaaataatgttgttgatcctctggtgcagcgagagagatgcagcgcgtagcagc

SEQ ID NO: 10977 - DNA, 969 bp, Arabidopsis thaliana
ggagactcacccataagcatcacaccattagtggaaggcaaatacaagagagaattgagttttgccttacagcgatgaagcatggcgcagagttaagtagtcagtcctccctacagatcggaaaaactgctgtaggaagcacccctgtaaatcagatggttgagagagcgagcaaaaatcaatttttaatcaacaaacttgatgccacgagggcatgctcaagaagaagtaaatgcatgcttctcacagcataaaagaagaaggggatttttgtccagaaactggaatgttgtctaacaaaggacgtctcatgagtgagtctgaatcttgatggatctatgcatagagaggagccactttagtgacctataaaacaaaggtttaatttaatgaacaagaactcgcctaccgattgaaaactcgtaatcatgagaacatgtctcctgctcccactttttccagccacggatctgcagttacagaaaatgatgaatagctaggattacgaaagtttgagataagaaaatcagggcttgtcgtaccttgagtctgccaagcatcatggtgatgaaactgtagaggatatgaaaggcagccatgaagaacaatagaatgtgtagctggtgcaaacccgtggcaggtatgagtggttcatgaccctgcggacaacaaaaaagtgttagagagatagagctagagcgtaaattttttagtacaagggaagctagagatgacctcatcgcagcgggaagaggtcgtagcagcagctagacgtctgcggtgggtcttgtcttggtcatgagtagaaggagctggacaaggtaacatagaggctgcagccttttcaggaatacaaatcttgagaatgtactgctctccgaaggtgagcaacaaggagatgaatcctagaatcatcagctctgcatccatttcatatatcttagttttcttaaccaaatacggtaggag

SEQ ID NO: 10978 - DNA, 538 bp, Arabidopsis thaliana columbia
ggtcgtgggtgaacagaagctgctacaggacaggttagactgccgatccttatcttgagtctctcgagcttaatttaattttgattttaagaccatttgtatgttgcactttcacattttcaggtgagtgttcgtgtgagagacaatgcagcccactccgtgaagagcattgaggatttgctggaagaattcaaggccaagactgccgaatttgtatgagatccgactcatgaaattcaagttctgatatgatgttttttttttttttttcaaattagggtcgacccagatttaagtgttcatctgtttcattaaaccatattaggcctcaactatattaaagtttcgattacattctgcgaaaactctatgtttggtccccttttagtatcattttatggaagaaaaaaatctgggccatgattgttagaatgctgtccgaggaggccataattgagcaccctgagtattatattttgtgtggacttaacttgttccacgcatagccttgaatcctgactacgaagctctacgcgat

SEQ ID NO: 10979 - DNA, 417 bp, Arabidopsis thaliana columbia
ggatctggctaatccgtttcagatgcagataagcttccttcagttagctttgagatgaaaggaggagctgcttatgatgttttcagccccatacttgtcttcgacacttccgatgtatacacatatcttctcatatcatcattttatcatatttactatatctaaatatattaatctccattgcattaacagggtagttttcaagtctattgtttggctgtcttaaagcaagttaatgctgacttcagcatcatcggacgttcgtttttgttctttttttcccacaatcaacacaatttcttcttgtacattttaaccaattcctaaatcagatgaaaatttttctttatgttagaaaattcatgaccaactacagaatcgtccacgatcgtgagagaaggatcttaggatggaaaa

SEQ ID NO: 10980 - DNA, 634 bp, Arabidopsis thaliana
cgaaaaggaggtagaaaacgccgttaagttcaccgtcgaaaagtacgggaagcttgacgttctctttagtaacgccggcgttatggaacagccgggaagctttctcgacttgaatctggaacagtttgaccgaaccatggcggtcaacgttcgtggtgcggctgcgtttatcaaacacgctgcacgagccatggtggagaaaggcacgcgtgggtcaatcgtatgtacgaccagcgtcgcgtcggagatcggtggtccaggacctcacgcgtacacggcgtctaagcacgctcttctcgggctggttaaatcggcttgtggcgggctagggaagtacgggattagagtcaacggcgttgcaccatacgcggtggcgacggcgataaatagccgtgacgaggaaacggtgaggatggtggaggaatatagcgcagccacggggattctcaaaggtgtggtgcttaaggctcgccatgtggcagaggcggctttgtttctggcttcggatgattcggcttacgttagcggtcagaatctggctgttgacgggggttatagcgtcgttaagcccatttgaaggagagaatattctataaatcaacacttattaacgccttaatattttactttcaac

SEQ ID NO: 10981 - DNA, 567 bp, Arabidopsis thaliana columbia
actctagaggatccccgattgctcgaattcccgtcgtttctttcgttgagaagccccatgtactgctcgggatccgcatctgtacggtttggggttggagagagtgtgaatgtgaagccgaaacctccgttgcttgttgagcttgaagggattatgaagatgaaagaagtgctaaaggaacgaaccgtcgtattggtggagttactgtcgagcaatctcaccggtttatggtagaaagcggtaccaacaacgtccgagtttcgatcggtgagcctcaaaagtccgttggatgtgatggttgaatctccttgcatatgaatttctgattggtttcctttgaaaccgtggaaaatgaactctgttgtcgtctctgttgttgctacatgagctctaacaaggaagagcaccaacaagagagagaccatggattttgctctgcccataagtgatcgatagggataagagggataccacaaacacaattgaggtaggaaagtgaaacacaaacagaaataacggctttgggagatgcaacagaagatgattcttagaaggagaagtgagttt

SEQ ID NO: 10982 - DNA, 545 bp, Arabidopsis thaliana columbia
tagagagatgggtaaactgtgaaccataccaaatgagtggagaggatgaccttagcaccattctcaatcaaaaacttgatggtgggaatggcggctctgattctagtgtcgtcagtgatattctggttgtcatcgagaggtacattgagatcagctctaacaaacaccttcttccccttcaaatctacagaattcagatctccaacactcttcttcgccatcgtaatcactcccctggcgccctttccgcgcacggagtggaccgttggacgccacgtggaccgagaaacgagagtcaacgacggcggagaagccaaggcgacgtgcggagacagatgtggagggaatgtgtccaaaggaggcgcgggaggagcgtgtaacggcggcgcaccggtggatttgatgatcgaaagagctgcagttgcggcggtggaagccatgtgaagtcaacagatagtgagagtgaaagtgagggaataaggaagaagtgagaggattggatgatattactagtttatggattttgtcttatcgttgatgagagg

SEQ ID NO: 10983 - DNA, 1858 bp, Arabidopsis thaliana
ataattgctgtgtcctttgaaacctatttaacaatgtcgcaaagcaagtaattgcttaatttctctctttcagtctctcacacacatttaacatttttattaattcgtttacaagttgttgttttttttttaatatataaattattattattataatcaccttgcattcataaaattccaataatccgaaaaacgttacaagaccaaacggtccagcacagcacgcaggccgaaagagacataagaacaaaggcccaaacaacacagagagggcccaacaacaaaagagccaaatactgaaaacctgaagcaggccaaacaagcccaagacaaacaaaggaagcccctgcaccttggctcccaacctgcaacaagcacgacaattcgtttacaagttaattacatatctaatgatctactttttctatatttatacagaagaatggatggcaaaatcgtgattataacagggggagccagtgggacaggagccgaatccgctaggttgttcactgaccacggagctcaagtggttgtagttgacttacaagaagagcaaggcaaaacgtcgccgtttcaatcggcaaagacagagcaagtttttaccgttgtgatgttacaaacgagacggaagtagaggacgcgtcattaagttcaccgtcgaaaaacatgggaagctagacgttctgttaagtaacgccggcgtcgttcttttcagccaacccggcgtcttggaaacaccgggaagcatccttgatttgaatcttgaacggtttcaccgaacaatggctgtcaacgttcgtggagcggctgtgtctatcaaacacgccgcacgagccatggtggagaaaggcacacgtggctccatcgtttgtacgaccagtgttacgtcggagatcgtggtcagggacctcatgaatacacggcgtcgaagcatgggctcgtcggactgattaaataggtttgtggtgatttagggaaacatgggattagaataaacggcgtcgcaccgttcgctgtggcgacggggtcacggggatgactagtcacgacgaggagacggcgaacgagacggaggagtattgcgaagcgcagagggatttttaaaggtgttgtgttaaaggctcgacacgtggcagaagctgctctgtttctcgcttcggatgattcggtttatatcagtggtcagaatttagcagtggacggtggtttttgcgtcgttaagcctatttgaaactaaataaataaataaaatcggttatctacttattaaagtgtgtatatttttttcaaccaaataaaaacattattatataggaacaagtgtcactattatggtgcataattcagaggtcaaaccaattcttgagccattaaaaaagtaaaactcacatggcacgatagagttgacttttaagatacatatacccccatgtataaatatccacacatagctctctcgtagctctatccttcaaattttcataacgtctcaacaatgtctggaaaaaggcaatttcctcatctgattttgtaacctttctgctcaactttatacccatatacataaatgtgtgtttctaatgatttgttttttttttccagattggatggcaaaatcgtaattattactggcggacgaagcgggattggggctgagtccgttcgattatttaccgaacacggcgctcgagtcgtgatcgttgatgtacaggatgagctcggtcaaaacgttgcagtttcgatcggtgaagacaaagcgagttactatcattgcgatgtcacgaacgagacggaagttgaaaacgccgttaagttcaccgtcgaaaaatatgggaagcttgacgttctgtttagt

SEQ ID NO: 10984 - DNA, 521 bp, Arabidopsis thaliana columbia
taagacgtcgtatggactattagcgtcacttccataatccgtgtcacctgttaatgcaagaagtatgagttggtactctagcgaatacactatccataaactttgtaaaagaaagaactgtattgataatgccagaaggaaaactaagaacctcttcaaatcgctctgcctcgttcgacgatgcaacttctgcaacaacagctggtggagcaggtccaatgacatattctgactcttcttctagctcagcttctctgaagcatttatcatgcatatctatcaccctggttattccataataaaataccacgacaatgatctttgagctgataatcaattaacagtacctaagttcagcttgagcttctgtcagcttagctgctgcagcaagtaactcagctgatggcattgcaggtccaatcaccctacaatcaaattatcacaccatgttttatcctctaaccaattaatatcaagcacactagaattaacacaaatagaaagcgtggtcacttttcttt

SEQ ID NO: 10985 - DNA, 522 bp, Arabidopsis thaliana columbia
tgaggcagcttcccgtatttaaaaactagaagaagctggctagggtcatatactcatatcaattattatgagtcaaatcaaactctataaacctctcaattaagacagtttctgtgatatttgttgaacaatgtctcagattcgagaggtttacgatgaagctggaataactggcttctggaaaggtgtaattccaacattgatcatggtacgtgagcttatgattttgaagcttctcttgtattgtttgtctaggtgcattttattaataattagatgtgtgtgtgtgtttttaacccacaggtaagtaatccgtcaatgcaatttatgttgtacgagacaatgctaaccaagctgaagaaaaagcgtgccttgaagggtagcaacaacgttaccgctttggaggttcagactctagcattttgctttcgttttttttgaataagatgtttacttgctttccaacttcccatgattgtgctttctatttccacagacatttcttctcggagctgtggcgaa

SEQ ID NO: 10986 - DNA, 408 bp, Arabidopsis thaliana columbia
cgcccttccgctgcagatatcttgttcactcaatacggtttatcgacctctcaatctattatacctttcggaggcttagaaggctcatacgcttgcgagaagagaccgttagactgtagtaatgtccccacgggcatcttttcacctcgtcgccgaagagaatgggcgtgtcatgcatgggctgacatggattctcctaggccgtttgggtggcggtatagtcgtcctgcgcacgaaataccgagatgtccccatgggcatcgattccacccgcctaggttggatgggcgtgcttcgttggaaagcatggatccgcctaggctgtcccgagtgtgagcgaggtgtgagtgtcgcgcatgggcatcgacaccttgcggctaggaactggaacgatacgggtagcaaaga

SEQ ID NO: 10987 - DNA, 236 bp, Arabidopsis thaliana columbia
cggtgccttgccatggttcatgctgaaaatggagatgcagtattcgaaggacagaaaagaatgattgaactgggcattacaggtccagagggtcatgctctttcaaggcctcctgtggtaatttgcgtcaacattttccattttattatactggctccgagacgcagtctagtctcctatatctgctcttgcctctgtcaagctttgtcgtcgctagtagctcaagatccttgttt

SEQ ID NO: 10988 - DNA, 1103 bp, Arabidopsis thaliana
gaaacaataaaataccaagtattaactattgctccgttacagtgaagggaatagataaactgaacagtagatgattttctgaccagcttgatgaagatttcttcatcggtgttcttcttgttagagagctgttgcatggactcaaacactttggtgtcaactttcctttcctcaacctttgtggcttgcagagccttcttcttctcctccagaattttctcatactcttctagagtcatctcctatatgacaaaaccatatcagttcaaaatgttagcaaacattctacttcaaacttaactaaacctcaaaagatgtttcaagagctgtaaatgattgtaccctggcttcagcttcttcagcttctttctgtgctttctcttccgcagtgagttctttctttgcttcaggggtttcatcctcacctccttgcttctcagcaacagggctcttctcaacctctgtggtaggttcctcagacgttctaatataagaacaacaaaagtttataaacaacctaaagttaaagtcatatggataattaaagtgaagacaaggatgcttacggagggatatcatcttcagtagtgccccagtttccacgacctccaccattacgtttcatgccagtactatcaaacatcaagttaacataaatgaatcacaaacagaagaagtcaaacaaagtagtaactaaagtagtggacagaacaaaaagaaagcttacccatgacctgtcctgctatggcggtcataattcctcggtgggcgttcaacatcaccagattccccgttggcaactccaccacggcgaggtccttcacgaccaccgccaacacggtatccaccaacagacccaccacggcttgctccatcagcatcttcagaaggtctcctgtatcctccagaaaatccattctcatttccaggagcatcattgttcctgttgtcccggttgtatccaccattacccctgccacgggaaaatccacacgtccaccagtcccaccacgacctccttgaggagcattcctcgactccctcactacattcataacaaaaagctttcaatatatatacttatcctaatctaacaaagtatt

SEQ ID NO: 10989 - DNA, 737 bp, Arabidopsis thaliana columbia
gatgataatgatctagggcttggttccgaacttactcccaaaacatatttaggaagcctctcgaccgttccagcttcaactgtggttctgatcctagtctgagagccgttgtcgttagagtcaggtcgtgacttattgcagttggcggtggcggtgcggtgcaaaaagcaggagctctggaccagcagttccgcagtggctgaagggagtattgtcttttgcttctgtaagcattgagcttttcccggcagagacattgtcgaggatactcgtctgagagacatccaatctacatgtttcaggtgtgagagacatgcgtgccacagggttaaagaaatctttttcgggccctttcaaatcatcgtcatcatcacagtgaaatgtcgaggtgggtgaagagggtaaaccgttctgctccattgcttcaacttcagctaatagatctgaaactgattcatcacactcgtcggggtcagccacaatggccggccacccagatgcttgagccacttgggtgttgtctgaagtctgagtagctgtggcgtgatcagctgccaactcaattggctttacagacggtgcagctaaaacaacagtattctgctgaattacttgaggaagctgtcctccagtaaccacaacacttgaagtggtagtagcagcatcggttgtacttgtggttgtggtgctcaagtgacacagatgccctttgacagaaccatgaagacaagactgga

SEQ ID NO: 10990 - DNA, 641 bp, Arabidopsis thaliana columbia
  unsure (1)..(641): unsure at all n locations
gatcgtaaagttcttagctgtttcagttgggtgatcttgcattcgttttatgctcggaaacctcttgacctgttaccataacaactgaaaccaatcatgaaaatgctcaaggaaaagttgagtaatctcaaaaaaggctaaacattgagagaattctaccttaccactttatccatcacttctgcataaggtacaagtttcttcacattccaaacatttccatcaaatggcataaactcgatgaaccggacattgattggcttgtcgcgtgtcaactcaacaaaatcacaaatctcatcatcattcaatcccctcatgataacacaattgacctgtcaaaaccaagaacgatttgcaaaaactcttgaacatcaaatatcgttctgctacattcaaacagaaaacatgaagaaggattaataaacatactttcacaggattgtatccaagctcaatagcagtatcaatcgatttcataaccctatcatgccctttacgtctagtcagaaactcaaactttgctggaaccagagtaccaagctgatattcagcgaatcaagtctgcattccttaagccttggtagttttttcgcgagagtgataccgttggtagtaatagcganatcttcacccttttaact

SEQ ID NO: 10991 - DNA, 595 bp, Arabidopsis thaliana columbia
taggtactggctcaaagttttgtccgagcatttgccagacctcgttgatacggtaactgttaaagttaacacataggatttcttttccatcttcagtaatgttactttttgggtggtgaagattctttaaggcctggtacgtactattattctatggacatgattataggctgtagcaagtgaaggaggaaccgaggatgcgaaaaggcggggtgatgcttttgctcgtgctttttctgctcatttggcaaggtttggttcatcacaacagatacctctctgtcaagtcaaggctgtgcaattttgaccacaatctatcaaacagaaaattcatagtacagcgcttcaagaaaagcttgttttttctgtgctttgcctttcactgacaatttttttggttgtagattaatggaggagccagctgcatatggaaagctggggctggcaaatctcttggaacttagggaagaatgcttaagagaattccagtttgttgatgcctatagaagcatcaagcaaaggtaaaagatagtcttatctctcccctgctttgagttgctcttatgctctctctttcttcgaaattgatagggag

SEQ ID NO: 10992 - DNA, 720 bp, Arabidopsis thaliana
catttgcatttggcttctaattcactgtactttgctagtttgctataaacttactgaaatgattgattcctttccttaggtctggaacaatctatcggaataggtcggtttctccagactgtccttatgctcctggagtatggcttggcaattgcatcatcaacgtactgtcttacatttttcttcaccgagcatagcatggctcaggcaacttctagctactctgtgcttttacccatatcgttatttgttttttctttttcctcagttacttcatactgttagatgatctttactgatggatagatgactttgttgtaatcgcagaatgttattcttatggtccacttcttctctggtcttatccttatggttatctcatttgtcatgggccttattccagcgactgctagtgcaaattcatatctaaaggtgtggaatcttctgattttctgacctcggtgagccttgaaaagactaggaactgattctttttcgttatgctttacagaacttcttcagattatcaccaggattttgcttctctgatggattggcttcattagcgcttctaaggcaggggatgaaagacaaatctagtcatggggtgtttgaatggaacgtcactggagcgtccatctgttacctgggtttggaggttagagtcttccctgttcttcacctttttttgttctactcctttgaaaacctgagaaatag

SEQ ID NO: 10993 - DNA, 699 bp, Arabidopsis thaliana
gtcaatcctcacagttcatcagctgtcttcaccaattaaaggcatagaaactttgcaagcaaaccatgatcctattggtatccacaaggctcctttgtcagagactatctgatccacgaactcaatatccatgtgtcaagacttgtccctctccggtctccagaggaatatgataaggccttgagagatggtcctgggaaaggtggtgttgcggctgttgttgatgaacgtgcttacatagagcttttcctctcaaacagatgtgagttcggcatagttggtcaagagttcacgaaaaacggatggggatttgtgagtattgttctgaatataaacaactccctacttgtttgatgatagataattaaggaagaaacatcaggaagttcttccatgcataactttttagaatttgataatgcgatagtgatttatgatatgtattttttctctcccactgttcaggcatttccgcgtaactcgccattggctgtggacgtctccgctgcaattttgcagctatcagaaaatggagatatgcagagaattcgggacaaatggttgcttagaaaagcttgctctctgcaaggcgcagagaatagaagtggatatgctggagcatatgagcttttggggattatttgtggtgtgttgagtggcatgtgttcttgcctttgcagtgtatacaggtgttgatga

SEQ ID NO: 10994 - DNA, 393 bp, Arabidopsis thaliana
tttaagaaatgtactttttatccatgatcgtgaacggcaatttgaatccggccatatcattctcgttacttgcggtattagtcagaatcccaacattaacgagtgccccgataagatctataagagatatgttggagatatctttttaaaaaagtaatgttttgaaaaaagtgaatgaagtttataaagaagctattacttaccaaccaaggtatcgttgccaacaacatcatccacaatgtagtcaaatggagtgaacttgttgagtaaaccggtttctcttggtgtggaagaagtgacaatggtgtgatccatgaatagaatgcgaaactgatgaggagttgtttttattgcttcgcagttaggtcgaacgagaaacgtagttattgtttt

SEQ ID NO: 10995 - DNA, 608 bp, Arabidopsis thaliana columbia
gttgaattcagtttttaaaggtgatggctagtaatgtatttgatcatccacttcaagaattagagggtgaagataatggtgtaaagagcgagaaagcgagtttattggaaacatctggttctgtagatactactcctgaggattctggtcatcgttcttctgatgggcataggggttagtcctctattcaaccttgttattgcactttgcccattgttactttctccgtcgtgttacctgtattctgaaatagaggataaccactgattcaagattgtatgttcttgaaggactagaccactgtgaaactgcacctgttggtctctatggagatatgcttatcaatgacagtgagattcagtactctcggtccttgacagagaaagggtctcctgcgattcataatcttaaattagatagattgtcggagcaagaaaaggtaggaaactaaaccctcatgtattcagttgagcatgaacataagacaaacattttatccacatacatattgtcaatggtgttaacttggatattacaagtgaagaactctatttgtgctgttagaacactaggatatgttcttgaatgcggtacctgaaacattatat

SEQ ID NO: 10996 - DNA, 484 bp, Arabidopsis thaliana
tcctttactcgatccagccgtatctttcccgttacttgcggtattagtgagaatcccaacattcacaagtgcaccaataacatctataaaaaatatgtcggagatatgtgtttaaaaaaataaattttttgaaaaaagtgaatggaatttatgaatatgccattacttaccaaccaaggtatgtttgccaacaacatcatccacaatgtagtcaaatggagtgaacttgttgagtaaaccggttgctaaaggtgtggaagaagtgataattgtgtgatccatgaatagaatgcgaaactcatgaggagttgttcttattggttcgcagttaggtcgaacgagaaacgtacttatctttttccattgattctgttggatcctgtcaaagtagaaggcagagaaatgaggtccgatggttgcttctatttgggtgccctgttacaaacaacaatttatgggtgagggatacatgggttaataaaaa

SEQ ID NO: 10997 - DNA, 613 bp, Arabidopsis thaliana columbia
cctttcttctgaagaagattacccaatctgaaaaaaaccaagaagctgacaaaattccgaattctctgcgatttccatggagttatctcttctccgtccgacgactcaatcgcttcttccgtcgttttcgaagcccaatctccgattaaatgtttataagcctcttagactccgttgttcagtggccggtggaccaaccgtcggatcttcaaaaatcgaaggcggaggaggcaccaccatcacgacggattgtgtgattgtcggcggaggtattagtggtctttgcatcgctcaggcgcttgctactaagcatcctgatgctgctccgaatttaattgtgaccgaggctaaggatcgtgttggaggcaacattatcactcgtgaagagaatggttttctctgggaagaaggtccaatagttttcaacgtctgatcctatgctcactatggtggtaagttcttgaaacaatctgattcgttaatactgagaacaatgtatttgtgaattgtttgatttgtggatttagccttctctgtttatggttagagtaggtagatagtggtttgaaggatgatttggtgttgggagatctactgcgccaaggtttgtgtt

SEQ ID NO: 10998 - DNA, 528 bp, Arabidopsis thaliana columbia
ctcacattgcgcaagaggaagtcatctgctgcggatccacgcatcaaaaggatgaagcagggaaagggagttaccggttcatcttccttcgatggaattcgatttgtctctacggaggctgaaaagaggtatgctcaattctctcaacgaaatttcattgaggaagtagaactgtctaggaagacaaatgaggcagctagggagtttataaagcaggcaggactgattcgaacggttactaagttcaacccgttcactcagaatctagtgtttgagttctgggctaatctgcccactatgaaggtagacacgtatatggtcaaagtcttggtgcgcaatcgggagtatgagctctcacctgggaagatcaacgagatgtatggtctccttctgttgatgctagacagcagcggatggatatcgctggtctggttgatgaacaagtggctgaatttctcactggtgggaaagtcagtgttctgagcaagcttcaggtgagtgcctttacacctacgagtttggaactgt

SEQ ID NO: 10999 - DNA, 571 bp, Arabidopsis thaliana columbia
ccgtcacattatcatgccccttcccatggattatttggagaatttggaaaaatagaaacctcatgttttttgaaggaaaaacattctctgctttggaaaccataaagaaagtgagagaggatgtggatgattggtttgctgcgtaggaagtgtagtctgaaagaaattctcttgaaacagagactagccctactggttatgtcacttatgtgttttctggtacaagtcaaagggctcagtgtaatattggcttctcctggtctaaaagaaactttgtggcagttgtctactgagttctaagagaggaatcaggacatgttttgctgcatagtcatccggcattcacaaacattaaaactaaattggaagcccattttctttgcgttgtctgggcggtggagagtatggttagccgcagagttgtctgtgttgtggaggacgtggttctagttggagtggttaataggcctcaagcttggccatctttcaggtttcaaatggtgtattctttatctcctataaggaaagaacactattacgaacaactagtacatccagatgttaaaaatgg

SEQ ID NO: 11000 - DNA, 585 bp, Arabidopsis thaliana
tgtgtttactcataggagcattgatttttgtagcatttggctgcagaaggaaaactaaatccggtgaagccaaagatctctcagtaaaggaggaacaaagcatttcaggtccattctctttccaaattgattgcactacatgggtggctgatgtgaagcaagcaaatgcagttcctgtggttatctttgagaagccattgttgaacataacgttttcggatctcttgtctgcaacttccaacttcgacagagacactctcttagcggacggcaaatttggtcctgtttatcgaggtttcctccccggtgggatacatgtagctgtaaaagttttggttcatggctcaactctgagtgaccaagaagcagctagagagctcgagtttcttggaaggatcaagcacccaaatcttgtcgcattaactggatattgcatagccggtgatcaaaggatcgccatttacgagtacatggaaaacggtaacttgcaaaacctgcttcatgatctgccatttggagttcaacaacagatgattggccacggatacatgggaagaagaactgacaatggacccgaaacatagg

SEQ ID NO: 11001 - DNA, 525 bp, Arabidopsis thaliana columbia
agttagcactgaagctggtatagaactgtcttccacttctagtagcattgttaataccatcgcaaagtgataagcttcctccaattgaaaacgatcttctcacgttttctactcttcctgagccacagtagtttgccaaatcactttgtgcccttggaagaaaaatgttatggtttcttctagatctggaactgtcttgtcttccacggaggtcatagctcgattcagaatctggtagaagattcgtctctgtttcttgatgaggtggttcagtgataagaagtacaggggcacgacataaaggacagttcttgtgagagagcaaccaagtgtcgatgcaatttagatgaaaggcatggctacactttggtaacagtctcagcgactcgtcttcttcaaactcgtttaagcagacagagcattctgtgccgtcgattatcccttctccgtttttgaatccaacgactgtgatcgagttgatcgcggaacggtggagactgacggttgtgatttgccaacgtgatg

SEQ ID NO: 11002 - DNA, 600 bp, Arabidopsis thaliana columbia
tagtaatctttgttctcacaactcttcatgtaatcatatatcttcacctccttttggtcatctttcatactcgaccactccgattttgaaacataacccaacaatttcggtgtcaatgttcctgattcatcaaacaaacaacaacgaagttgtcaaatggaaactatttcacaattttgaaaatgaaagtagctaactttcagctaaaaggtatgaaattgattgtgaaattatacccgtctgcgagacaaaaacgaaggaagaaggaccaaaatcatcaacagaaccaatctggtgctctgggcatttaaaaacagcatcagacgcaatcggaacttgaagcgatttagcgtgacggataacggaagcttgagtatcgatgtcgcagttatagtgcacgattccgattcctccaagagcagccattgcagcagccatgtgggattccgagacagtgtccatcggcgaacgacgcatgggatcgagagtgggacgcgcttgctgagacgcgtggatagcgagacggcgtcagtggaaaagtcgatgaagtgtggtagaaatatacatcgtcgtaggtgtatgagtatcttgtgagaatac

SEQ ID NO: 11003 - DNA, 872 bp, Arabidopsis thaliana
accatctaaacgataagagagaacaattcccaaatctaaattaacaataaaatccaaaatattagatgttcatctagatttcagtttggttttggttatggtttcggttcgggtttccgattttaatcaaacatattattgacttgttataaaaataggttttcgatcgagttttctaaatcaattattttcgttttggtttggatcgggtcaaatcggattgtccggattggtcaacaaaaacttagttaatttatcagtttaaccagaggtggtgggctagtggttctagtctggtggaagagttgtcttgtttggtctaggctaggtatcaattctcctcagatgcacaattgcttagccatgtccctttggcacatgggaatggacctattgcttaaggcctatttgaaaacatggggagaccttacccataggataccctctcctctggaattagtccataggttcaaggatttactctaagttaacaaaaaaaaaaattatccgtttgagccatgtttaaattataccaaattttaagttaaaaacacgttacatagatagaaacttaacattaaattttcctaagaacaaagatttgcattacaaaaaagaaaaaaaaaaacaagaaacggagaaaggaaaagtttgatattttcaagagtttacacactaatctgcttatcgaagatccaactaaagcaaacctcatgggtcttcttaagcttcttagctctctcgtctgcacgctcttgaaggcgtctaatcctctgagctaacccacacacaaactcctgtgcacgttggccctcacccgtcaatccttctagcttctccaatctccaccgtccaaccaaaaactccaagat

SEQ ID NO: 11004 - DNA, 447 bp, Arabidopsis thaliana columbia
cgaaactcgaaaatggtataaaatcttttacattttaccccaaaaaaaaaaaaacatatgatataacagactgttacctcccaaaaggaagaaccacgaccatttatcgttcctgaaccatcaatcattagaccaggcacacctgaaaaactaatccacgtttgagatttggggttggaccatgatgtgatgttgctaggtgcgacaatgataccatccaacttcaaatacataaaataaaatacaaatttgttggtgttaacatttcttagataaattaattaactatgaacatacctgaagttttatggaggtagatttacaaggacctttgaactcaataggttgaagtaaatatgtttttccagagggaataaaaagtgtatttatgttttcttctccaccacatgtagcgttccatgcttgtaaaaaagccttttaatataa

SEQ ID NO: 11005 - DNA, 158 bp, Arabidopsis thaliana columbia
  unsure (1)..(158): unsure at all n locations
ataacactccgccgcggagagaaacttctatgtgatcattcntctctgcgtcaagtacaataagagagtcttgcttttacgagagagtgaacgaagcaggaatcaatcttttcaaggtcccagaactctgtgcggagaaaaaaccatcgccagagagg

SEQ ID NO: 11006 - DNA, 623 bp, Arabidopsis thaliana columbia
tgaagcttatatggagaatactgtcggctcgggattctttgtgggttcaatggctctctaaaaacttgatacgtaaggaatcgttttggtctgttaagggaaattcttgtatgggatcttggatttggaaaaaaatacttcagcagagagacaaagctagtcaactccatcgaatggaagtacgttctggaacttccacatccttttggtatgatcattggtgtccgcttggcagacttcatcaactgttagggccacggggaataatagatctgggtattgcgagtcatgctacagttgctgaggtcatgaatactcatcggagaaagagacatagagtggatcttttaaatcagattgagaattacatagcgttggctatacaagacagaggcacggagagtgatcgctcactttggaaacaaaaggaggacagctttaagtgctctttctcttcttcaactacttggcagcgaataagaaccataaacccaagctgcgattggtatcggggagtctggttctcttctgctactccgaaattctcgttcatcacttggcttgttttcagaacagacttgcgacgggtgatttgcaccacttgaggataagataatattgtt

SEQ ID NO: 11007 - DNA, 447 bp, Arabidopsis thaliana columbia
catcaagcttaaaatgcttcaaagtcccgtttcctattagctcaaaaagctcgagaacacagtctttcatatgcaagaactcaatactatcagcctccaagataaacttatccaaactaatcccatcgaaataaacactcttcagcgtcgggctactcaactcaattgtcacttgcgcatccgacattgcaatctcgagactcacaagttccaaactctcgatcatcggacaagcactaagcaaaagattcaaatccaaagctgaaatactaacataactcagtgacagagacttcaaacaaggaaacctctgaaaacttggttcaacaccagtaatagaattatgagccaaaaccaaagcttcaagcttctgcctcccacagatttcaagaatgttaacattaggagtcgtcctgacattataagacaatctccgcaaagtgtctc

SEQ ID NO: 11008 - DNA, 612 bp, Arabidopsis thaliana columbia
  unsure (1)..(612): unsure at all n locations
ctttgttggagattgttnggggaagacagtgatgagaatgtttacaacgctattgaggttgaggaaaggcctcagattcgtcctggtgaaatgctgcttgctaatgaggaattccagaaggaaactggaggatatgaaagtgagtctgaggaagatgagcttgaagaggaagcagaagagtttgtgccagagaagaaggcttcgaagaaacgtaaaacttcaagcaaaaaccagagcaccaagtaggatctctacgaaaacttattcttagtcacctaaatgtctatttgttgttattcaagtttgaagataatgtaggaggaagaagtgtaagttagatactactgaagaatctcccgacgaaagagaaaacacagctgttgttagcaatgttgtgaagaagaagaagaagaagaaatcattggatgtacaaagtgctaacaatgatgaacagaataacgatagtaccaaacccatgaccaaatcaaagaggtacgtagacttttgctttgtcaaaactcgcttgtgaatctttaatcctcttgaattatctctactagtcatttttccattttcttgcttttgtgattgcaggtcacacaacaagaagag

SEQ ID NO: 11009 - DNA, 232 bp, Arabidopsis thaliana columbia
tcgagacgaatgtggttccagaagaagtgaagtatgtgcctgtgatggagaagggtcggaaggcgctggaagaaatcaaccaggagatgggtttagcctttgatgagcaagatttgcagtattatactagacttttcagagaggacattaagcgtgatcctaccaatgtggagctatttgatatcgctcaatccaacagcgagcacagtcgacactggttctttgctgggaa

SEQ ID NO: 11010 - DNA, 659 bp, Arabidopsis thaliana columbia
atccccgtcggtggtggaactcggaaaagcaacaaacgatccggttcttctccgtctagtaatctcaagaaccaaaccgtcgctgagaaacctgatcatcatgggtccgggtcagaagaaaaagaagagagagtttcgggtcaagaaatgaatccgacccggatgttatacgggttaccagttggagatccgaatggtgcgagttttagttcgttgttggcgtcgaatatgcagatgggtgggcttgtttacgagtccgggtcgcgttggttaccaggtatggatttgggtttgggttcggtacggaggagtgatgacacgtggactgacttagctatgaacagaatggagaagaattgaagaggcgaagggtaatttggtcaatttgacatagatgtcttttttttagtcatctcatagtcaaacataacaacaaatgatgtcggtccatttagcgctgtagtcatttttttcactttgttttcgtcatttccacccaaattggctttagtgagtgttatttagaaaaaaaaacatttccgcaaactctagcgagttttatatgatgataagtatttgatgaatatctattcctgttggaattatattattgtcctaatgtgaaattaagagttgcatatatctattctttgtaagga

SEQ ID NO: 11011 - DNA, 607 bp, Arabidopsis thaliana columbia
tgaatgtgatgacagagagagcagagacttacatgacagacaaagattttaaggaggaaagagattctgggatggttcctgtaaagttgttacctgaaagaaacctgtgaaaatgtaaagattgtaatacaagatgttgaataagaaaaaagaggggatttgcgagttggaaaatgggaaacatacaagttctgcaatgaaacaggcaacgtggatgggatacttcctccaatgtgattgttgctaaaatccctgagacaaaacatcaaaaggtaaaaataaggagagaagcagattaaagaagcaaaagtcataaacgcaagagaggataaagtacattgctttaagagaggtaaacatgtttaagccaacaccaagctctcctccaagattggcactgatgagaattctgaaaaagggtgagagtgttgttagaagaatgataaagaaaagtaagaagaagaagatgggaggtgtcgttttttacattgtttctacttgggaagcattacatagaacaccttgccagctctcaccacatgggtcacatccagatgcaaccgacccggggagaagaggagactccagtgcaaggaagagactgtta

SEQ ID NO: 11012 - DNA, 536 bp, Arabidopsis thaliana columbia
  unsure (1)..(536): unsure at all n locations
nnnnnnnnnnnnnnnnnnnnnnttaaaggcgcgtttggttacggtttgtgcgttttgctgcttattcctccagtttatgcgctttcccgtggcgattaaggccaaaaactttataaatcgccgtcaccgccagcataaagatgatgccaacaaacagcgacatacgcgtatcttcattaaagtacatgccgatcaaaacgcaaatcaggaatgccattgttacgtaattggcccacgggaacaggattgagcggaacggatggctggcaatcgccgctttatgtgcacgccgaaaacgcagctggcttatcaatatcacaaaccatggcaccatccccggaagcacgctggcactgtagacgtagacaaacacacgctgcggattgggaatgatgtagttcaggcatgagccaattagcagaatagcagtagatactgccacacccgcaaccggtacgccgtgacgggaaactttcgccattgccgccggtaactgacggtttttcgccagtgcgtagactttagagnnnnnnnnn

SEQ ID NO: 11013 - DNA, 520 bp, Arabidopsis thaliana columbia
gcaactgatggcccatacagattccgtaaacagggactttaccgagaagctctttaactgtctcaacagcatatggcacagcagaagggtctccaggaccgttgctgaacaaaatcccatctggattcattttcagcgcctcggcagctggaaatgtggacggaacaacagtgatttgacatccgtaagatgaaaggcgtcttaggatgttttgcttgattccaaaatcgtaagcaataacctttgaattcaagagacaaagtatagaaagagagagtaagaaaagtatagaaagagagagtaaaaagcatcgataagagcaaaagtagagaagtaatactcactttgtaggatttccatctcgtgaattggtgttgaaatcccattcagcgtttgttttgtcaacccattcatagggagatttacatgaaacatcacttattagatcaatacctacaaagattcaaagattcaaaaaagcatgcagaaggagttcaatattccaagtgttatattataa

SEQ ID NO: 11014 - DNA, 1524 bp, Arabidopsis thaliana
tacatgcttgacatggcgatataatgtttttttagtctaaagttctttacatatgcaggtagctttgctgattcagattggaaaagaagcactggattcagacattgtcccaatgattctcgaaaccaaagacaggagggtgcttgcaaagtatactagtttgcctgcgtcgcctcatggtctttgtcttgtgtctgttaagtataaggaagatcatctaaagcttccattggattgtcctgttactagttctggtagacatcacactataacaaaatgtaaacttcccttctattgaaacattcttctgtttgacataagaaactgaacaattagaacattgtctatttagtatttacttctctgcaagactacaatcttcacaggatcaagcttgacattttgagtggaaaatcctgatactatgtctcaaagaaacgaagctcaaccatgaactcattctgttttggggagtacgaaacaacagccttggcagaaagaagcacttgaagagcatattcaatagcaaatactgtcttatctacagtcacagggttagctccgttcctcagatcgatctcaattccagactccactttgaaactaaacggtccaacaatctgcaaaacccgtagaagattgttatgaatcaagtagctgaaactatgaatttgagaatttctgtgtctggtagactgtttgctcatagtagaatatcgtttattctacctgttgctgtagagaaactaatacttcagggcagattttctgaaatgcttctaaactaggctgccgagaatttaaaagatcttgtgcgacgctagtggcaccggtaagaaacctcaaaccatgcggaaagtctaatctagcatggaaacgggtgagatcaaagaagaatttctggaagtttccatattgagctgtgagtgatgcccgccctaaggcatcagccatgaatccggaatttacagatggaaaatgaagagagaaccctccaacaccctcagaatcattttcaaattttgatctgattgaattttcaccaaatgctgcggtcatcacagagcctgtgggattaatgaaactcttagtaacagcaccaaaaagatcataaaaaagacccgtgcttccaaacctgaaggctcaaggctcactcatacataaaattttcaatcagaggaaaacaaattagctattcaatagtcgaaagaaaccaaaatatcccaaaaattcccatttccatcactagttctgtaacatcaaatattggaattggagaactcaaatgataagagttgaacaaaacttattagagaaatcacaaaactttcagtcttgacaataaaatgcttctgaaataagttgaagaaacttatcataccgataatcccagatactgcgacatgaggactactgaggaagacatcatagggcttgcaagtttcgagctttggagtggtacccctccagagatcatgtttgcctataagagactgcagattcagagcaaaccaggaagcagtg

SEQ ID NO: 11015 - DNA, 500 bp, Arabidopsis thaliana columbia
  unsure (1)..(500): unsure at all n locations
taaagatgaactggagatgcagaagaaaaatgccgagaaacaggcgatggaagataacaaatccgacatcggctggggcagccagattcgttcttatgtccttgatgactcccgcattaaagatctgcgcaccggggtagaaacccgcaacacgcaggccgtgctggacggcagcctggatcaatttatcgaagcaagtttgaaagcagggttatgaggaaccaacatgtctgaacaacacgcacagggcgctgacgcggtagtcgatcttaacaatgaactgaaaacgcgtcgtgagaagctggcgaacctgcgcgacaggngcattgccttcccgaacgatttccgtcgcgatcatacctctgaccaattgcacgcagaattcgacggcaaagagaacgaagaactggaagcgctgaacatcgaagtcgcagttgctggccgcatgatgaccgtcgtattatgggtaaagcgtctttcgttacctgcaggacgttggc

SEQ ID NO: 11016 - DNA, 508 bp, Arabidopsis thaliana columbia
aacctagagtgtgttaagaaacattaagaacacgacattttggaaaggattacagtaacatgaatctattccaactaccttgacatcggaaaactctacataattagcttcacttagataatttctgcttctatttctctggaaagacgatttatcatcaccactgagttctcttgagacagccatcaactcatggattcggtcagcataaccactgccggaagcaacaacattccaataattagaaacagctaaacagtattcaccatttaagcgtctgacatgagatccaacataaagcattacctgagtcggttgagccgcctggaacttatagaaagtgttcccaacgcctgaaagagagatataatgacactagtgtgatatcttatattgctaagcatctcagctcttcctaaggtcgagtcgtcaggtcttagatgcccagagaagaatggttcgataatcagaataactgcaactgtggccccaagatacttcagcagaa

SEQ ID NO: 11017 - DNA, 430 bp, Arabidopsis thaliana columbia
gtgctatcggttttaggtggggatgaagaatccaacatttgtctttcatgtgtcccttcttcttgcaatgatcacacacccataccttcctttcttcacctttgtagatccctttgtgagccgtgataagttcgcccttaccactaaacaacccgagagatccttgttccttttgtacttgagaacaaacattttcaagtgaaggaagcttgtcggctcgaagaagatgtttgatgagatcgttgaaggcgggattgagtgtaagaagaaggccgaatactttctcttgttcctttctctcgttaagaatggccggatccacggtacttggtcgaagcatctcaagttcagcccatagtgacctaaactttccgaagtgtttagtgaactccaagtctacttggctaaggttgttactggccttcttgac

SEQ ID NO: 11018 - DNA, 555 bp, Arabidopsis thaliana columbia
tccctcatttgcttaatccttcactcgtttccagaacttctccgagatctatccagcaagctgcttctaacgccggcatggcattgacgccggaatcgtccacagtaccagcgtgaactctggatgcggagatacgacgacgtattacgagaatggagctgatcaagttgaagccgttgaatatttcagtgtatgattatctgggcggccacgatcacgtttgatttatctcgacggtcatgatcacgtttgatcttcttttgagtaagattttgtaccataatcaaaacaggtgtggtgctaaaatcttactcaaaacaagattaggtaccacagagaaacaatcaaatggttgtgaatatacattataaggttttgattaatgtttgtttcactgatttagtgaagtttggtccattgtatacaaatctattcaagaaacctagcgcgagatcatgtttcgtgattgaagattgagatttttaagtattcgtaatatttttgtaaaatacaaatatgtttctgatcagctattattcgatacgagatacatgg

SEQ ID NO: 11019 - DNA, 434 bp, Arabidopsis thaliana columbia
agaaaacgcaagatcaatctcttgggtacttgttgcatagaataggaaaaagtacttaactttgtagtttaattgaacattaagtcaaaatgaaaaatctcatttaaaaaaaaaaagtttgaaaacgcaattttcttcaaaaaaaaagaagaagttaaaaacataattacatagaaaatgattaaaataaaatgatcaacgtgacgatatagagacagtagatcaacttaaaactgttgcaatttcccatcataaatagtactaatcatataattaaacgttatgaaaagaataattaacctgttgctgaagagagacgatgtgagagacgcagccgtagatagggtctctgagacgagcttgagcctcaaagcagattgaaacgacggcgtctggtcgtttatgctcgggacatggtggaggagtttggagac

SEQ ID NO: 11020 - DNA, 1252 bp, Arabidopsis thaliana
attcggcggccatgacggggccttcgagacttcattgcctggcactgcaatcctactgatttgttggattctactgataaggatatgttggatgccaagtactgggagatcagtatgtataagtcggccctcgagggaagaaaaggagagctggccgatggagaagtggagaaagacgatgattctgaagttcagattgggaataagctgagaagagacgccttcttggttttcagggcactttgcaagctgtccatgaagacgcctcccaaggaagatccagagttgatgagagggaagattgtggctctcgagttattgaagattctgcttgagaatgccggtgctgtctttagaaccagcgataggtttgttttgtttatcttcttgcattattataacccacgttaggtagattaaactatcatatctctagattcagtcttttttccctcagctttcaacattctgcttgatagttgcttggacagaatgtaatttagcttttggtgtttcttctgaaaatttggcatcaactcattatggaacaggttcttaggcgccatcaagcagtatctgtgtctctccttgctgaagaacagtgcttcaaatcttatgatcattttccagctttcctgctcgattttacttagcttggtttcgaggtttcgtgctgggctgaaggcagagattggggtgttcttccctatgattgttctaagagtattagagaatgttgctcaacctgatttccaacagaagatgatagtgcttcggttcttggacaagctctgcgttgattcacagattttggtagatatcttcatcaactatgattgcgatgtcaactcatccaatatatttgagaggtatgatctaatatcttgttgtggcttatctttacgccctgaatctatttattttgtggtatcagagctgcgatcattaactagtgcgaactatttgaagtagcattcatttctgtattggttttcttgaccttgtttttaggatggtcaatggtctccttaagactgctcaaggagtgcctcctggtacagttactaccttgttgccacctcaggaagcagccatgaagcttgaagccatgaaatgcttagttgctgttttaaggtctatgggagactgggtgaataagcagttgcgtcttccagatccttattcggcaaaaatgctggaaattgttgatagaaatcttgaagaaggaagtcatcgagtagaaaatggtaag

SEQ ID NO: 11021 - DNA, 410 bp, Arabidopsis thaliana columbia
gttcgccaaaccgtcagcaagtcgatttgttttcctatacacgtgagatatatggacattccagtccttcaataaaaagccatatcacaaacataataggaatgacagcagatgagtattaataatctctaccttaagaaaaccaactacaatctctgaatcgacctcgagttctagcctttgaactcccttttcccatgtaatgttcataccataatatacttcctaaagttctgctaacagagcaaagcatataccaatgttgagtgaaaacacttgcaccagtcttctggctcattcctcattactcccctcacagctgctagtccagtatccctcttgaagtaccaccacatatctagctttatccatccattacatggtcagatccaaagacttcaacgttctgt

SEQ ID NO: 11022 - DNA, 608 bp, Arabidopsis thaliana columbia
ctttcttaatcaacaacaatattcattatacttttgaaatcataaagtgacaacagatatacactaacacaaaatacatactcccccgttttaaattaagtgtcgtttaagaacctaagttttgcgacgtaagttagaaattacgaaaaaacgattcatgaataggctcttggaagaagatgagagactcagattcaaaaggtttgaaatcttttattagatataaaagaaaattacaacaaagttgattttgattttcacacaaattctcgtgtattacttctacgactctatgaaattaggagacatagtcaaatctataaactcagaaactcttcgtctcttcatagatgatccagctctgcagcttggtgatggagtcatcagatctatcacctctacatcaacctcagtcgtcgttgaggtgatatggttccttcttttcctacactctttctccatagcttcagtggatcctatagttccatgtgatacttcatcttcaacaatctctactaagccaaaacaagtgaaacttgctaatctgtcattgaatacagtctcgggttctttctcagtagctctaatggatcgacagtgatatgtga

SEQ ID NO: 11023 - DNA, 248 bp, Arabidopsis thaliana columbia
gatccctcggttcgaaggaagtcatcgtgatgggcagtgtccaacgttctaaacaaggagtgaaacgtagtgtcatatcttccatcacaaagatcaagaccaccaacaaaactcactattcttctggatcttgatcctccaatcggcatttcactgtctacgacgacgatctttttgtgatgagtgaacatagttgagattcgcaagttttggacaaagcttccaccatcataatggttgcgaggaca

SEQ ID NO: 11024 - DNA, 558 bp, Arabidopsis thaliana columbia
caagtttcttaaatctctcctcttcccataactttactgttttttatatactttctaatgattccagcaattgattctccttttagtatgaagatcttagtaaagagcttctaattatagacggatccatatatagatagctagttaccatatatttgactacaatcttgattcttgattcctagctatgaattgttggaggaaaatgtgagttcttggcattctctacttgtttacttttagtcatgtggcttaatgatgatcctcttgacctctacaaatgttgctattcatctccataactcttttcgtgtgaattgacaattgtagcagttatttgggcgtttgcttcgtgtgaattcagcccgatatattgagataaaaattgtttgtattcttctaagtgatatggtttcctctttctatgaaacagcatgtcctgtgaactttgagtttatgaactacacgatcataaccagcaaatgcaaagggcccaaatacccaccaaaagaatgttgtggcgccttcaaggactttgcgtgccttacactgaccagc

SEQ ID NO: 11025 - DNA, 510 bp, Arabidopsis thaliana columbia
cctcttgcaacaagtcttgccttgtatctcttggatttaacaccagttataccagctttgattttgaataaccatttgcaactgatagcctttctatcctttggtctgtcaacaagttcccaagtagcattctttgttaaagaatccatttctttacctatagctccattccatagctccgagttttcatcctttttagcatcatgaagacattgtggttcttcttccacattcagtacctcatatgtcattaatgcaaatgaaaattgagaatagtctttcattttagctggagctacaatctgtctgcgagttatatctcttgcaagttggtagtttgttaaaccactcggttctggtgactgagtttctgcaggttctgcaggttcttcagaatcttcttcagattcactttcactgacttctactggatcagtagttactccacttgcttagagctgactcgcttcttgaccaattctgtaataacaccaaaatttgatgttgatg

SEQ ID NO: 11026 - DNA, 985 bp, Arabidopsis thaliana
tgaagtaaggtagttttcgcatcaacactcttcacatcagacaattttcttaaagctgtcagattaaaagcctgagcatttcccctcgcggttccagcgttcattctattacctgctttcaagattgcttctagcagcttcatgaacagcccacgagcacggagctcgttgcacgcggattcaagtgttagtaaagatcccttttgttgagcaacctcagagccgtagttaatcttgaaaagcataacgttgaaccggttaaacgcggaaggaactgcttttaagatgtgaaacagtagagaatctgcataagccaatgtcatcggttcaccatcgaaatctatgatttctgtctgttcttctggcgttggagctattcctgcaagcttctcaagggtatcagactcagcatcatggccttctgttaacaagtcaatgatctcttctttagtcatccccaaagatttaagcacaattgctttgttctgagatttccgaggatcaaggatataagtctgattatgcggtacactgtttgagactgtctgattctgcggtacactgtttgattcacttggttttcgagcaacgtatccaaacaaagcctccatgagatcaccatcaaagctacccaagaaacaaatattataaccgcataagaactcaaaatcatacagtacttaagaatatcacattccacattatatagactttaatacttacttgaaggagccaccatcaatcttgtgccacaccatagaacggcttgcatcagggttcatcttatcccaatgtaaaggcttgagcttcggctgcgtcggatcctcagttgttgcctacggccaaatgaagtctcacctgactttgttggtccttttggattaccagggggtttaggtgggcccttcttcgacattggaggaggtggtggcggtccagctcctttcttacctggtggaggaggtagtggtggtgcagcaggtcc

SEQ ID NO: 11027 - DNA, 445 bp, Arabidopsis thaliana columbia
gcctctacggatgcttttaaaatgaatctataaaaaatgagtacaaaggtgtcatttgcaatgtttctattgttgatggaatgttgagtaaaggagataaggtttcgattgctgcgtcgggtcaatcttatgaagtgttagatgtcgggattatgcatcctgagcttacttctacaggaatgcttcttactggacaagttggttatatagtaaccggtatgcgaaccacgaaaaaagcacgtattggagacactatctatagaacgaaaaccactgttgagacctcttccaggtatttatatatagtgtcttgtgcaactccagtaagcttcttaaagctcgctgacttgagtttaacttgtggaacctaggtttcaagccggtgaggcatgtggtgttttcaggcgtttatcctgctgatggatctgatttcgaagcgcttggt

SEQ ID NO: 11028 - DNA, 574 bp, Arabidopsis thaliana columbia
atgaagattgtcaaaataagccttagagttggcctcaaaagcagctctagggatctgcgcagaacctccagaaccgggcgcaaccatattgcctgcaccaggagcagtgccactgcttgaaccgctgctctgagctaccgaactagcttttgcgctgacattcttgtccattttacgttttaactcttgaaaatgtgagcttgtttagagtgagtttaagactagattattttttgattggtagtgagaacaaatgtggtggagaggtgggatgattttatagatgagatttgttcaaatgagtcaaattaacaattcccaaggtatcaccattttggtataatatcatatcgtgaagagcaatttagttaattgcaagggaaattggaaaagggcaagtgactgtcttggaaagctacttggaataacgtttagtaattatttttgtttatcactttttaaattctccagtttgtatgctcacatgatcacttactagacatctgacatcaattgatatttgtggaccgacttcttctgtacaacataacatatagtacatataacatataga

SEQ ID NO: 11029 - DNA, 587 bp, Arabidopsis thaliana columbia
  unsure (1)..(587): unsure at all n locations
tctaaaactctgatatacccccactagattcctcaccagatttttccgagaaaatttgtcagtttctcgggaaatcaaaaggtggaggactcataaactacaacgtcggactctatcaaaggtaaatgaatcgtctcttcttctcactttctccatttccccacaaagttttatcctttcaacaatttgattttctgggtttctctgttttcatatgttctcgtcggtttcgcaaatcaatcggcattttatagaagaataatccaactttcgtcagtgtaatgctcttgagactttacaaaatttggcctttcttgttcgtatagacattcagggttttagagattctgaaagtctgaatcttttttccgatcaggtgtgaattgagagacaatggcgacagtgagtggaaggagacgcaaaaggaagatacaattaagcaagcttttcacattaacaggtgctaaagcttgtttcaagcctgaccattcgaaaattggacgatctggtttctctcgtgtggttttctgcaaccaacctgattccnctgaagctgaatcaaggaattactgtgacaattatgtgag

SEQ ID NO: 11030 - DNA, 450 bp, Arabidopsis thaliana columbia
taggcgatcaagtcagagtgagttcctatttgccctaatgttgtcatcaaatccttgtgaaagaatacttgatcaatttatttctgtgtattgcattgatttaatatttcatgtactgtctgtaaaacttcgcatcatagctttacttacttctgtgtatttatgtatgtcaaatctgtgtctgtcagtttacttttaacgttatgatttagagtgagctgttttaactccattctccttatccatatgtttcaacgatctgccctggtttcttatacattcccatggtttttcatctatcttgcaagcaaagctttagtttgtggtttaacatttcaatggtttctctcagattctttagctgctgagtggacccatggggaagagttccaaattggtacggccggcaaatactggactctgatgccattaaagatgacaaggtgtggt

SEQ ID NO: 11031 - DNA, 514 bp, Arabidopsis thaliana columbia
ccatactcggccgtgtttagctactcttgttcaactgtttctccctgtccggtgttattcccgcttccgttgttaccgtgaacttttatctccaaaagcctttcaacaggttgcctgcaaatggggcatcgatttgtctgaaacctcaataccttagcacatccgctacacatacactgcaccaccaaacccaaacaatttttaacatctatatatatgtccatcatcacataatagtagtaaatcatcagctttcacttaccatatgtcgacatggaagaacagtggtgtctcgtggttcagacaaacatataacacattctttaccaggatcattagcatcatcagctgaatcatcatccccctcaactgtattcccaatcccataaatctcctgcaactcatatctcgttccattaacccatagtatctgcttcaccactctaatcttaatctctcctttatccttctcataaaccgcttgagtaatctgcgcattcttcgaccccgacct

SEQ ID NO: 11032 - DNA, 614 bp, Arabidopsis thaliana columbia
ttttgagtgaagtgaaagaaaggggtttaagggttagtgtttggttccttaataatatcattgatgctaagtataggcacggttataaggttgatcctgctgagagtataggatggataatagctaatgactgcaagcctgatgtagcaacatataacattttgattaatcgcttgtgtaaagaagggaaaaaggaggtcgctgttgggtttttggatgaagcatcaaagaaagggttgattccaaacaatttaagctatgcccctctgatacaagcctattgcaaaagtaaagagtatgatattgcttctaagttgcttctacagatggctgaaagaggatgcaaaccagatatagttacgtatggaattcttatccatggtcttgttgtttcaggccatatggatgatgcagttaatatgaaagttaaattgatagatagaggagtttcacggatgccgccatctacaatatgttgatgagtggattgtgcaagaccggtaggtttttacctgccaaactcctcttctcggagatgcttgaccggaatatcttaccagatgcttatgtttatgcccgctcatagatggatcatcagaagtggtgattttgat

SEQ ID NO: 11033 - DNA, 619 bp, Arabidopsis thaliana
gatgacccgagtaacattgatccggaaagcgatctcatggagaaacgagctgtggctgttttgcacgagctcttgagcttgactatccacaagaaaaccaagaggaactacttgagaagcatgagagcggagctcaacattccgcacaagttcactcgtctattcacgcgataccccggcattttctacctctcattgaagtgtaagacaacaactgtgatcctcaaagaagggtatcgccgaggaaaactagtggatccgcatcctctcactcgtcttcgagataagttttatcatgtgatgagaacagggtttctttatcgggcgagagggctaggcatggtctctaaagaggaacttttgcttgataggccagaggatgaccttgaggaagaaggctctgaagaagaagagattgtggaaggaagtgagcttgaagaagattctgaagctgaatagcaatagttgttgaatctaattgttgtatgttaattcacacagagcaacaatttatgtacctgcattttatctttttgaagtaacggaacggagtttaaacaatgtaagcacaaagtccttaaaatgatataaagagagattgtatttcaccaagaaagat

SEQ ID NO: 11034 - DNA, 566 bp, Arabidopsis thaliana columbia
tacgtagggatatgaaccgtctgagtccgagatccttcatggtttccgtgatggtttcaggagctgctccgattactcggagctggtcaagtttctcctgaaccaattttttctcgtagttgatgtctaaaccggtggttccattcaacgtctcacccatacggtacggtgtttccattatcaagccagatttttctccgcacacgtaagctttgatacaaaattcgttagttgttggcatttagttatataagcttctttactagtactatccaagaaaaagacattccacaattatgatccaataacattttttaattttttgatcaatgtggtcatgtggatagtggatactggatagattggcaaaaatactggagagttgcaagtttttctttcatttctaatgttggtagctcataacttgtttgttggtagttatatgtcgaaatcagataacttaggctgatttatatcggtgtcctaaacccctaatacttagtacatagtccctttctatctaatttccatgtgaggatgttttatatatatatatatatatataa

SEQ ID NO: 11035 - DNA, 546 bp, Arabidopsis thaliana columbia
caccatttccggatcctcttgtagtcaaaagaaatgatgactatttcactcgtaggaagctgaaccgctttactatttcgaaggagattagacataggaaaaaaaaccttacccgaacataatcctgaacttgagatttgtcagagtccataacaacttccatcacttccccaaggcaaccgctatctccttaattgtttctttagtatagtagttaacgggaatattccttacacgaaccaaaatcggaagaaacatcaaataatcagaaggtggtttctcattccatcgttgcatcacaaccccccaatcatcttgagtccatacacatgttttcaaaatttcctctaaatcttcctcaaatttaaagaaaaactgaaatcggtctttggaaagagctacaccacgaacccgagaagctagacgtcaaatatgaggcatatctaaaatcaagttagacatcctctgattttccggattcaaaaaccatcccggcaaactgcagctgtttctttcaactgagcaaaattagggaagattagatag

SEQ ID NO: 11036 - DNA, 349 bp, Arabidopsis thaliana columbia
attttaactaaaaaacctgattaaaagagagtatatcggagcgtaatcgagtacgttcgcctttatcgcacttaatcgagctcgagacgttgttaacgacgataccaccggggaagattaagtcacggttccgagtcgggtcgatttcgactaacctggaaccgtcgggtgtggttttacaagcggagaaacgaacatcggagcagagatcgtaacctaatccgattacagagacggctttctcggcggcggagtgagcatcgaggcgggtgaaattgttaaaggccatggatcggagagagacgatgatgaggaggaaaattcaaaagattgtggctgtgtgttgtgg

SEQ ID NO: 11037 - DNA, 575 bp, Arabidopsis thaliana columbia
gctacttttcaagatggttgccaatggttctctcatggctttctctcgatttaaagtagggctggtttcattccataacatacagcttcacaaaaatgcaatgcaggtaattggttgctcacctgttctagaagtcgagcaatgacagtgtgtgttgaaactgaaacagctgcgaacttttctgtagcatgaccatgaaacttgagcgaatgttgtgatgcttaaagttccatttcgtgtctctttcagattcttgggcttcttcttgtcaatgacaatggtagcacggcaagctacatacgcaaacaccatctggtatgccattgtatcctgtagaaagccttactggggaatgtatattcttgttttttttttgctaatgttcaagctatataaggtctcccgtgataaagaaattggttgtcaggagacttttgttaatttactagagtatgagaataaaactaatgataagtattggttttgtgcatatatttttgtttgtccaatctgagcattccatatgatagctgcaatctggtgtttaaatggtttcttttgtgatgtttacagta

SEQ ID NO: 11038 - DNA, 605 bp, Arabidopsis thaliana columbia
gtagttctcgatgctatttgttcgatgcttgcctggtcttgaccggatgtttgaacccattggaaatggttcctgcacatttacaaatgcagtaatctctcatcaaaaacagctaattgaaagggaaataggttctctcattaggaccaactatgaacctaatttatgtgtgtcacgctatagtgaatacataactaccagatgatatgattacttgcaacagaaagaggttatagtttgaataaggatatcaattgagcccttgtcttccttacctgatcaccagcatttggaccagcagtgtggaagagaataggcctgcaacgtttgtcttcgttcatcaaacttgagttctggaaatgggcaataagagctgatttcccctgaatccgaccatatgcaagcgatgccaccttctcgctgttgaacttttcccatttcttaccgttgaatgcctgttaaggttttaaacttgtaaccaaacgcttttttcctttttttctaaagaacaatgatacatcatctacacaaattgatcataaaaaggtacaaagcttataccttataaaacggaacaatattttcaggttcgataaggttgatga

SEQ ID NO: 11039 - DNA, 623 bp, Arabidopsis thaliana
tgattccattcctccatcaactgtttgttgtttgtgaaatggtatgattatgaaggagacacgtttgtcctctgctaagctacaaacatcttcatgcattgttgagtaaggtgaaatagctgttaaaggttgtacagcgacaaaggcagcgtgttgttcatagttctcaaaggcgttgatgatatgatctgattgagcttgagttctgttaagcgcgggtcgtcctgacttacgagtgttgtggacaatcaacatcgcggatgcgcggcccgtgagctcaacaaggtggagaacgtagatgcatataggagatctctttgtgggatgtgaagcttcaagaaggttaattatagtaggaacattacgcggtgtgtgaacgcaaaccaatacccgaagctcgctgtctggcttcgtttgttggattgttcgtctcttgtatgaaacagatttcttcactggcttgtaaaggattgttacaataggagtaatgactccagtcataaccaaggccacaagtaccatagtagcaaatgtctcatcatccaaaaccttttggtcttttccaacattaagtacaatcatttcaacaagacctttagtgttcaagagtagtccaagagtga

SEQ ID NO: 11040 - DNA, 326 bp, Arabidopsis thaliana columbia
tgatatcttgaaaatctttgtgtcaaatgttgttgaagataggtccagagagatagcaatcagacggcttgaagttgtactctctgatcacacttcaaagaaagtggaaataaaattgtcagagatgagagaactccaggcattgctcatctcttgccttaagcaagaaagaatctctgacagtatgttcaaagtccttggtaaggtggtgaaccacgttgtgtatgagatgtccaaacaccaagatgtcgcatgggatggtctacgcgattatattgcatcacaaagcaagacaaagtttcagagagcgggttatatcttccagt

SEQ ID NO: 11041 - DNA, 1255 bp, Arabidopsis thaliana
gctcttaattttccaaaaactttcttcatctcgataagcttgaattaactctcgtctgagaccatgaatttgttgaagagttgaagtttgatcggagtgggctgcatcaatggttgtggatagctccttaattcgcagtgcagaatttgtgttattgttgcatttccaggctgagatctctctcctgcaacaaataatccgttcctgcactgtcatgtcttcaatttccccaaatcgattccaactctgttttatcacatcttcaaattccggtattttacaaagtctcgtatcgaactgaaacattttgaaacctttttccgttgttctcttaatcttgatgatggctggtcgatgatcagattcaatcatctccaaatattcaacctgagaggccggaaattgtgctcaccattggtcatttgccatcgctttatctaaccaactttcaactgtatgtgttcttcgtttcccaacccaagtcatattgttcccttgataaggtaaatcagacactctgcaaacttgagtcatgtttctgaaatcgactagactccaaggttctctcggtctaccacctcttttctcattagcattgagcacttcattaaaatctccacacattaaccatggcccatctcttttaattgctatgcgttgaagtcgttcccataagacatgtctaagttgccgaattggatgcccataaacacaagaaaagtaaaaagatatatctttattacttatcttacaatctatgagtcttggatcaacatcattaaaacatacagaaacagattttttccataacaaagctagaccaccaccaattcccaacggtaacacacacttcacatagtcatatcccacttgagctgcaacatcacggacgacatcatcggagttctttgtttcgaccaaaaagagtaagtccggggaataagttgccttaattcccttgaggcgtcgaactaccagggaccgtttaatatccggcagttccaaaaggatgtatcattgcggctccggtggcttattgccacgtaccatcaccgttgttgtggggtagttgacgtactccatgttgttcctgggaacgtcctggtacaaaaacagttgcggattgactgcttcagattgacgacatcgcgtttgatgacttgatgtctgccctcgagcatacccatgtcagtcaaaaccagtggaaacttgaaattcccgcagaagagagatgccaggtcgacttcctcttaga

SEQ ID NO: 11042 - DNA, 523 bp, Arabidopsis thaliana columbia
gataagctgtataatctaaaacctcagacaaacacaatttatttgactttaaaccatcaaagtatcctaaaggaccaacaaatctaaacaaaaactaaacttatcttggaaaaaagcaaataaagccacacaaataaaattcccaagtctcagagaacagagtcatagccattgatctaatgtacaacacccaaaagaagagaagattgattgtttgggctaagaaaacagaaagagcgtaaccaaccccgtagtagagagtttcagataaccttcttcttctcgaaaaacgtcttcaagtgcaaaaactgcatcccggcaactcctatgcagacgaaaaacgagagaacactcaaccacgccatttttgtgttagtggaccggttcaagtcttgcatctcttcttccctgagaccacaccacaatcaagtcatatacacaatatcttcataataccaaacaatagatgcagaaaagtacctatctctaagataatacatctcttcatgaatcgagttacagt

SEQ ID NO: 11043 - DNA, 948 bp, Arabidopsis thaliana columbia
ctagtggatcccctgaattgtttttggattggattgaaccagacaagacaaacaaatttgtccttcataaaccaattatacctttttaaaaagggtcctttcaccaaatttaccctatttatatttgtttttgtcggccaacgggcaagtgacattattttatttatttatatatattgttatatagtgtacactatgttttcacaaaatagaattttattttccaatcactttagagaactcagtccaagaggcaaaagcattcattaatgatagattaagcgacaattttaaaattaaacgtctcaaattagacagagatgactccatggcccaatggataaggcgctggtctacgaaaccagagattctgggttcgatccccagtggagtcgtttctcttttcaacacgaaaacgatgatgtattgaaaccatacttgttttttaagtgaagagtaggagaaatgcagaaacagttaagaaacttcaagtattagagacaacaccaaaaggttttaaaggatccgtacaatgagctctcttcagactctaagaaactaaattctaaagaagctgaaatgtgagagttgagcatatgcgcggataataccatacagccccgagtcttacttattagaccaatgaaatgctgctttcacctccgggaggtttcctcacgccgccaaagtagtctcgggactctgactttccgtctgcgaaaatgttgtttccgctcatttcacggagtttagctgagcttaactgcttatccgcactaccaggtgattcatcgcctttgaaaatgccgttgcctgtgagtcctgaaacttctggttatgtatctctttgatgtcttcacacaggttctcactgaatagtatgtgctttgtctcatgcaggctgtggaatagagagaaatttactgattggtgggcactagttgagtt

SEQ ID NO: 11044 - DNA, 758 bp, Arabidopsis thaliana
tctaacaatgcggctctcgtttctaaagcttggagacacgacggatctaacgctagggttttgttacagtcggcgattgattccgcgattcttccggcggatctgtaagcggaggcgcggtgcataaagcactgggcgagaaatccctgcggcgcgccacggcgactgtctaagatttttgagaaatggcgaatcgattctgtgtagagtcctgcgtcgagagcggcgagtgcggcggcgcgccgtcttaagagtagcttgatgtgagataacacgtgagcgatgctctcggatcgtggctgagatgcggaagttacgacgacggaggagggaggagaggagccgccgtcttcggaggagaagagaatgaagctatcgtcagaccaacaaatactctgacggcggaaccgagcggtggctaagcgtttaccggtttgaagaagaaccattgcatcctccattaaacctaaatggcaacaagcttgacccaaaaccaaatatctgtagcagaaagaagaaaaagatccgaatcaaaaaatccgggtcgggtgaaaatcagaaatggtttttttgtagagtaaatgacctccattgcccttgttcgtcgcagtttttagtgagaccagccatgactttcttcttcaaatcagagacagagaagcatttaaaagacgagtcatgatgatgatgatgactaggcaaatcgttgagaagtttgacagattcacgagaagaatgagtaaaagaaagctcagatg

SEQ ID NO: 11045 - DNA, 569 bp, Arabidopsis thaliana columbia
tttgtttcatttgatatagatctcttggttgatcagtacttagtttattttcttggaactcttaaagagaacattgtctgaaaattccttttaacaagacaaagaagagaacaaaaggcaaacatcacaattgaatcacacagggttcactaagggataaaagccaacactttttgatgatttacacgaatctgaatagtgggaaaaaaactacaagtaacttcatttgtttccagatccagcaggacttggtcctccaaacagataatcaagagaagatcctccaccaggagctgcatgaaccttagtagatggcctgtcctgttctcatcaacaaacatttttggtttttatcagtttccaaatcaaaagtcaattctttgatctcaaaactttgtaaagactaaagatctcctgttaccgtgagaaagttccacagttttggccttctgatctgaagtaattattaggacttcctctaacacctgcagatgtcttcttgttatcagtgactgtggtcgtcgtggtggttacggtctccaccggtccatcggtggtagttgtggtgg

SEQ ID NO: 11046 - DNA, 589 bp, Arabidopsis thaliana columbia
ttttcatcattttttatttgcaaactcctgaaagtcccttcaattctctagttttgacgtggattcttctaattcctgaaagcaatcttgcatttgctttttctacagttggcacaaagaataagttgaaccatctttctctttaaactgcttttgatgaacttaaaaaatcttgtttggtttcagattgttaggttcaaagacaaagagtctcatcaaatattcctcgaaccagagggccgagatgttcctgagatctatgtgcaggttgatgcataccttagttatgttttatattttttgttatcgtcttagtgaaaaagtgtgaaggatgagaaagaaacctagcttgtcgcctatatgttaatatctaaaacatatgcttgtccagaaatttccttatgtatagtaagagcaagcctgaagtttgttactgctcagtggtttaatgtgggcgtttgtaagtcgagttttcaagactagagaaaatatatcttagctttgttgctaattatcaaggcgtggtatatatcttcttatgagtgtaatgtctttgatatcactagcattctcatgaattggtaatttg

SEQ ID NO: 11047 - DNA, 574 bp, Arabidopsis thaliana columbia
  unsure (1)..(574): unsure at all n locations
ccctcctttaaacttgtgcagccttcaagatttaatctcaaaagatttggtgcttctgataaacccatcaaggaattcaagttactcgagtggctgagatcaacccacttcagattaggtgcaacctgcgacaaccaaacaaaatttaacaccataagtctcatacactatgcaagtccaattaaattgactggagaaatacaaaccttagtacagctccatagagtggtaatattgctgtaaggtaacctaagatcgatgagattattggggtaaaagtctggtggaagttctgtccctggaaatttcacccagtgaagacatcggacaatattatcttttggaaattcaagtccatcaggtaagtgtaacttgcactcagttttagagtgagtaggacaaagagaactgtagactttcaggtaccgtagactgctcataccgacaaaaactgctctctttaagggcttttctccatttcagacatgtctaaaacaattcctctaaccttgtctcttccctgttgatcaagagacaactacaacaagttattgcaanaacacacatatatatg

SEQ ID NO: 11048 - DNA, 497 bp, Arabidopsis thaliana columbia
gattccactactactgtaattttgtgtggaataccagtcaaacagaatcgttataactgttaaaaattagtaaaactgtataaagtaattttaattcgcgggaaatcaatattcggaagcaactttaacaaaaaaaataaagaaatgtgaagagaaaaaaaaaactctgaaaacttcctttataatgtcatcatcactgcgagacccaaagatctaaacagtttctctctctccctcacagggctctctcatggcggactaatctgtctatttcactggtgattctgtttcactatctgagaatttgtttagagtttccgttaccgagtcgatgatgagtgaactcgatctcggaacgagtcagaggatgacggaaacacaccgcacgacgacgacgtttcttgatttgctccgacgacagatgagcggtcacgatctcaccagaaggaaacggacgttaaaagaacggttgagattcaaatgcatcggatgctgtg

SEQ ID NO: 11049 - DNA, 460 bp, Arabidopsis thaliana columbia
gagtaccctgaaaaaaaatatgatattaatgagaaagagacaaaaccatacaattcatcatttatcggatgacattctcttaacctcacatactgtgttatgaaattaaggaccacatattaaaagagaacttacaatgccttcactgagtacatcagaaatatcatttggatccaccagaaattctcgtttcccaggcttgtcaatggactgtgtgcgaacaatttttctgcccatttcttgtagcatacggtgcatctccacacaaccccgtctgacatgaatgatggacttatccactaggttttatagcccaatattaatacccaagtctgtgagcaacgacgtgatggttgtgacttccatatgattgaaaagacatgcgatatgacaaaatatcgctttatcctcttcgactcctaaaccatcatagctgattcatagtattatctcaatttta

SEQ ID NO: 11050 - DNA, 662 bp, Arabidopsis thaliana columbia
gctggaaatgagttttgttactggtcataaaaaggttctgcttcatggcattaaacaaggctcagtcagagaggtgaaaacattaaagtttaacaaaaaacaggagagtcaagtgcaaatcttgatgatttatgctcaaacaaggaacaaagcaaacacaatgcaattggagagcaatgagaacacttcagtctctccaatcattaagaagttgcaggaagaatatgcatatatttttgaggagcctgcagctttacctcccttcagggagaaccacaatcataaaatcctatcaaagaagggtctgaccctattaatcaaagaaagaccctatcaatatgcggtgcaccagaaaaccgagattgacaaaaaatcttcgaggatatgttatctaaaggcaccattcagaagagttctagtccttatgcttctcctgtcgttctagtaaaaaaaagatggcacttggagactctgcgtagagcctatgttcaaacaaaacccatcccccgggctggaaagaatgcccgccaagttctgataaggaaggacaaccccggaaaggctcgacgaagggaggtagattcagaggactgaatggagtcctattaaggaccggttcccattcctttattgaagacttatggacgactgggaggggtgtg

SEQ ID NO: 11051 - DNA, 505 bp, Arabidopsis thaliana columbia
gtacccggggatgaggtagtcctatcagagcaaacacataaaattatttgagataaattagtttagtaggaggacaggtaatcacgattgttgattccaattataccttctttgtagggtctgaaacaggtttatctctattattaccattcctagcgagtgattcaggcttactcccgagaggatttgtaagatcatctagtgatggtatattttcggactcacaacgcctcttgtgagaaatttgtatatcttgggcaagtgatgatgaactgcttcgacgcttcaattcattttccttctgatgtggaggtgagccaacaacagactgcactccactgcaaaaaacagacaagcacaatttacaaaatctaaatttcagaacaaaagtcagacataataaaagaatgtaagcatgtaactaactcctcgatgataatggaaagaataaaaatgtggcacaatgaaagcacattacctacaatacaaggacaagaaactagtg

SEQ ID NO: 11052 - DNA, 497 bp, Arabidopsis thaliana columbia
ggactaggtttcagagaaattgaggagttcaacgatgctctctaggcgaaacttagttggcggatacttaaagaaccacattcccttctctctcgtgtcttgttggggaagtattgtaatacatcctctttcatggactgctctgcttctccttcctttgccgctcatgggtggagaggaatccttgcagggagggacttactacgaaaaggccttgggtggtctatcggacagggtgatagcatcaatgtttggactgaagcgtggctatcaccgtcctctccgcaaactcccataggacctcccacagagacgaatagagagctttctgtccatgatcttatctgtcatgatgtgaagagttggaatgttgaagctattaggaaacacctacctcagtatgaggatcagattcgaaaaattaccatcaatgccttgcccttgcaggatagtgtggtttggttactgtgagatcaggggagtatacaccaagacgg

SEQ ID NO: 11053 - DNA, 423 bp, Arabidopsis thaliana columbia
  unsure (1)..(423): unsure at all n locations
gaacctcgaccattgtttcctccttcatgcttaatgacttgaagcttttcgccttgtcgtctcttccaaacttccatacggtccttccaagcaacacttccataaccatattccgcaatatctttctgaggaaccattgatctcgcctgtgctgaaaacaacaaacaaaaccatttcataactcattagaaggtgaccaaatcatataagaagaaaaattgtaggaatcataaaagtaaacacatacgaggtgcagaagaatctgtaaacggtgcaggatagacgcgattcccatatcccgttgaaggaggcacgataagagcatgacgatcagaatacatatcagcatcctgaaaacacatagactaataagaagaagaatcatctaagcaacaacattgtcagagnagacaacaatttgga

SEQ ID NO: 11054 - DNA, 565 bp, Arabidopsis thaliana columbia
gtcttgaaacaagtcaaattgtttgcgacacgatcaggcagatgtctctccgccttgtcaaaagatatcagcattgttttcgatctacccagcagcagagactttctcatacggtctgacatatctcctccattcatattttcatacggaagccacaccacctaattcccaaggtatatcagcaacattagatcaacagaagtatacacaaagaagagtagctgatgaatatgaaagataaacaaacttacatcagttggcttcatgacgtccaatgctttgcggtaaaagaccacatcacggtttgctgtaggaccattttgcttccccttccacttaagcacaaatgggaactgatcatggatgggctcacgattcagctttggcctgccaatgtttaagtgatagtaactccaacactacaggaaacagaagataaggaaagaagattaagtcaatgtattcaatgctgaaactagcagagacattctggataggttcggtaataatatcgtcttggatcaacagtttaaagaacaggaaatgaaaaaccttaagtacctgt

SEQ ID NO: 11055 - DNA, 509 bp, Arabidopsis thaliana columbia
gtggtaagatactgagattggtgaaaaagtgatcatgggctaaaaagaggttgtagcccaagttcacctttttttaacttgggccaccaaatttatttgggcttaaaagaacgtaaattattttcataataatgtcctttactcagtagtaatttcaaatcatttctctcttctcatgtctcatgaaacaacatcatctacatgatctctgctctgcattagtaaatcaccacgaagcttagtgttaataagtagctcaccaaaacaaaaagatgcatcgcctgcaacatgaacagaagatgcatatgcagaattggaaaggatcagagactttaaaatttctgatttttctttagggctaatatacgtataataagaccatacgagatgcaaaatgttaataggtaagtcgaaaatgtaaaatacatagaaagacgaatataggacctcttaaatcttacaaaacatttgaaaccaatcagtcaaaaaaccaaccatgtcgttttggc

SEQ ID NO: 11056 - DNA, 477 bp, Arabidopsis thaliana columbia
tacatcacacgctctgtttctcctgttcttgttctctgtctgaacaatgttgtggcaaacgtttttttcctctcttctcttactatctctgcttttcggatgtaacggagatgaatctttacctgaagtaactgattctgaagaagctccaatggacaaaagagaacgtgaagccttgtactctgcgattcaaggatttgttggtgattcttggaacggatctgctctctatcctgatccttgtggttggactccaattcaggtttttcttacaagtctctctttccttaaaaaacttgctttatagttgctctagagttatgttttgtacggtcaagtaagtccttaattgtcagagactcttgaagatagtgaagagcttgagcttataatgatgtagaaacttttgagctttagatgttgttgaatcaatcaaacttaacttcgaaaaagcctttgaaatgatgtgtaaagact

SEQ ID NO: 11057 - DNA, 517 bp, Arabidopsis thaliana columbia
cctcagttgcaaccacatagtcatctggtttctcctgctgcagcatcagccacattgcttccacgtagtctcctgcgaaaccccagtctcttgaagcctgtatatttcccaggaagagcttggtctgcaatccgaccttgatccttcccaaggcccgagtgattttccgagtcacgaagttctcgcctctgcgaggtgactcgtggttgaagaggattccgttgcaggcgtacagaccgtaggcctctcggtaattgactgtgtaccaatgagcagcgcatttggacgcagcgtagggagatctcggatggaagggcgtggtctctgactgcggaggaggagttgacccgaacatctccgaagagccagcctggtagtacttgatggcgcggcattgtcaatgttgtgagatctgacagcctccaggagacgaagagctccagtagcgacaacgtcagcagtgtaatcagggatctcgaaagagacggcaacgtggggactgagcagcaaggttgta

SEQ ID NO: 11058 - DNA, 576 bp, Arabidopsis thaliana columbia
cacttactattttttttccttcatataatcactatataacaagatacacaagaattatacgccgtgattacttattaactacgatccatatttttttgtgtcttgaatctgattcttcaaagttataaaaataagccataattgggaatttgatgatctctatcataataaaaaacgtaaaattaactaaaagagtgagttcaaaaaatcataaacagagagtgattttgatcgttctatatacactctgttaccgtgttcctataaaatctcacggaactcgaacacatacaaaagcttcagttaatggccgttaacggaggtcgaccgttactaacgtgtttagcttctccgttctgcatttgttttggtgacttacaatcgtgaaacgccttcaacaattcctcaaacgacggcgttttaagttcttctattgatccaacagttggaatgttgtactctctcttcctcggtgttgagcttgttgcttcatccacctgtgttgatgttttcagggaatttaatttacggttaacaattttgtccaattcaatcatgtatatatgatgattatat

SEQ ID NO: 11059 - DNA, 685 bp, Arabidopsis thaliana
aaatattttcaccatccttaacaaaatccatgtgaaggaaacacccacctggaaacgtccataagacaagctgtgccaagattgtaatcctgctagacttagaacaatctcattaaccactgcgtcttccaaactctgtaacatcacacagttaagaatattgaagaaaaacaaaatagcacaaggatataatttgtgtacaaacatgaataataaggttttccacgtgaaacaaacaatttactgagtagcacacagctatattgtctgcaattactgcttactatatcatgtattaattttctgatctgaaacaggcgcaacagcattctaaatacttacgacctattcaaaagttacatgcaagaaacggaacaaacctggaaagcattaatcatgaagaccaaatagtttgtcttctcagcaatagtcaagtctcttccctacaatggtaagcaaatgatatataaatatacgattggtttagcaatggctaattatgatttatcactatgcctccaaatatatagcgaagtcaattccaggcataagacaatgttataaatcacaggtacaaaccaaattatcacaaacaggaacaacactagaatcacaaaaactaaaacaacaggtagaatacaaacctctttaaggcgaagaaccttctgtagaaactttttgaata

SEQ ID NO: 11060 - DNA, 547 bp, Arabidopsis thaliana
aggatcccctaaaggattgaggtcgttttggttaggtttggatgttaacgtcaaaagggatttcatgaaagtaagcattgcaaagcttataggttttgtcaagggagtacatcatagaccgggacgagatgctttgaagcaaattctcgattctgccaaggaagacagaaaatggacattttggatgtgccgaactaaatgttcgaagaagttctctagtgctgaagaatgtaagaatcatcttgaaaaagaacatgctgcagattataaacctttttcggaaatggatatggccaaaaggatagggaaagactggactcgtaagatatcgcttggaagttgggaaccagtggatatagcagctgcagttgaaatgatcaaaaatcggctcccagaggtgaaagcgttttcatataagaatggatggtcaaagaatggcctttagctgaggatgaagagcgcagtaagttactcaaggaaatcaagtttttccttgtgatgttctgtgaccttaaaatcctcccttgtagcattcgagactggatga

SEQ ID NO: 11061 - DNA, 527 bp, Arabidopsis thaliana columbia
tctctcccttggagacaactaactgtgaaacaactcctaagctatcgttaagaacttcagttatagcaccggttattgcctcggcttgctttgaaggcaggccttgtgcttctaagctcctaacctgaaaatcacataccaaattctccattgaaccatactcttaagactatatctaataatatagcatcctattgaattttatcaatccggtctagaataatatcattctattgtctcatttcaaaatgcaagaagttccttgaatcaataccttgcctacggtttaagcaatcagataagacaattcaaagcaatgatggtgatacagaaaccaaaataatcattggaaaaagatttcagtagatcatcaggtaagtaagaaaagaagagaacaaggaagggttattaccaaagctagtgtatcgacaagaaacaaacgtttcccattggttttgataagctgagatatgaatctggcgtggaattgtctgaacgaagcatatgatactaacgatgaagaagag

SEQ ID NO: 11062 - DNA, 802 bp, Arabidopsis thaliana
agagtacttatctgttttggctgagttagatgaatatggtccgaaagaggtgaagagtcaaaaggatgtcgaaagaataatcgaagatgcagagtcaagaatcgctggaggtaagagtctagttgcttctcctattgtaagaagcgaaccaaaagctaaggagtcgaagaaaaatccagactcgaaattgaggtcgttttggagaggtttggatgatgagttcaaaaggaacttcctgaaaatggagattacaaagcttataagtttcgtcgaggcaatgtatgggaaagagggacgagatgctttggatcaagttctcacttttgccagggaaaacagaaaatggagattctggatgtgtcgaacttgttcaaagaagttctctagtcctgaggagtgtaagaatcatcttggacaagaacatgctgcagaatttaaaccgtcttcgacaaaggatatgccccagacggtaactaaagtctggggtcataagatatccgttggaggttgggatccagtggacgctgcagctgccgttgagatgattaagaatcggctccaagatgtgaaagcgtttgcatatgagaatggatggtccaaagactggcctttagctatagatgaagagcgcagtaagttactcaaggaaatcaagttgctccttgtgtcattttgggagcttaaaattctttcttgtagtattcgagactggatgatgcagtttccggttaagcatcttgcacaatttgaagtttctgagcatactcttactaccgagtgtcgcctagtggaaacacctcag

SEQ ID NO: 11063 - DNA, 492 bp, Arabidopsis thaliana columbia
gatctccatatgtattgatggcaaaagtgcaataatgcaaccagatatccactgaatatgtcactcccagcactgctctttcataaacctccacgactttgtccattgcccccacccgagcctcatgatcggcaaactttttccaatagccataacacagaggaaattcagctaagaaagcatcatagaccttccggatttttgctatattgtcctgtaatcagggcagcaaggaaaacattaacaatctagagcaaattaatcaagtagctgacagtaaaagttagaaaaaatataccgaaagatgacagcgacttatggtgtacaaataaaaacggaatactcattcttaagattcaaatagcaaacaagttttggaaacataatccagatgacaaacatttacgtcaccacgaaggtcagaggactcagagcagagtacatagggaaaaccggaaaaataagattcattatgtaactccacacatacct

SEQ ID NO: 11064 - DNA, 578 bp, Arabidopsis thaliana
caccacaccagtacatcgttttctgtctttttacattatgacttttctacattaaaccgaggcactgagactgagacattgagacttcgtttgaagtctcaccaataccaaagttaccaagaaataaaagaagtaaaatattacaaacaaaaaaacacattatatccaattttatgaaactcgaaccacaaaactctcacaaaggatcagtaataaaaagaaaaaactctcacttacaagtaatagttcatgcccactttgatcaaacaaatgtgaggaatattcaacatcacgcctgggctccggcaattcttcctcaagaacgagtacgctacgtttaccaccagctgttttacaaacactgagttccgctttgccttcacgtgaccgtgtccgacaatgtaagccacttcagcgtccttagcattcaccagatcaaacagctcttccttcacctgcggttgcctgaacttggtgtccattggtctgaactgaaacatccttctcatgctcagcctcggaagctcttgctcatactctgctctcagtttaagtagagccggagacttgctgtttgt

SEQ ID NO: 11065 - DNA, 364 bp, Arabidopsis thaliana columbia
accaaatctacataaagtagaccaaaaccaagcttagacatcatcgataattgtacataaatgtagattcatagaatatagacgaagagtagtacctgaatagcgctgtggaatataccgccaagaccgatcccgtctttgaagaacctattgatctgaacaatggtgttgttagtcttctccgatccactgttcgtcacatcgtatatatgcagaacaacctccgtcattgattctatatttaccaagcaacacgaaccctaatttcctaccaaaaagagctcgcagattctctctatatagagcttttggtgaagaaggaaacctaaagactcgtaccaaatccacttctccgtttaacgaa

SEQ ID NO: 11066 - DNA, 473 bp, Arabidopsis thaliana columbia
tgatgtttaagcagctcaattgagcaagttctgataccctgtgcatggcaggccattataaagcctcaatatgtcgaccacatcccaagagcagttaaaggcaatgttggagaggtccttgaccagaaggatgagagagataagaaggcagagctctgtgctgatctggagctgaaccaggtcattgaccgtgatgttgagaatttatctggtggtgagctgcagaggtttgcaatcgctgttgttgccatacaaaatgcagagatttacatgtttgatgaaccatctagttacctcgatgttaagcaaagactcaaagctgctcaagttgttcgttctctcctgaggcctaataggtttgaattcccagcttctgaagtttttttttcaaaagggataaaaaataaggtacttacattgtttttttattgttgtttttttgtttcccagctacgtcattgttgtggagcatg

SEQ ID NO: 11067 - DNA, 411 bp, Arabidopsis thaliana columbia
gtttgagagaccctagctagatactgaagataagaaaagataacaataattcagaaacgaaaaaaaagggaaaggaataatctcgattgaaacaagcaagcttacttgcttctcgaagagagggacaacagtatggtcaactaaaaatctcctaaggtgtccaacaatggcttctaatgctttaagaatctttaaagcttccccttgcaaatccactatcctctcatcctgtgcagcataaaacggtgtttcctctggcagaaaaaagtagagaaataagaaactggcaacaaagacaccaattttagaaaaaaaaacagacatgaattgaaatagcaaaaactaaactttaacaatcacaaacaaagagatcaattaggtaaaaacagaaaactgcagatgatagataat

SEQ ID NO: 11068 - DNA, 587 bp, Arabidopsis thaliana columbia
cacctgttttcttcctcttaaagtcttctctatatattttcaatataatccgtctttcttatacataaacttattttgtacgatcacataaaactgtaaacccccacacagttattggccgtcggatttaattgaaggattagctatcagagcatctcgaccgtcggttttctgttctattccaggtctcggcggcgattcccaccgaaaacctccaagtgacggtttcctcaagctgcctgcgtcgtctattccggcggacagccgaaaattagtagcgaattctacttcctttcatccaatctcagccgttaacgtctctgctcaagcttccctcaccgctgattttcccgccctttcaggttctcccatctctctctgtttcgtcatatagcagatcgttcacatttcagaaaaagcaatttaggtttaagcatctccacaaatcgtgttgttgtttttttctgaccatttttacaatctctttaactttgtgtttgcgcagaaactatactgaaagagggaagaaataacggaaaagagaaagcagagaacatcgtgtggcacgagagttcgatatgcagatg

SEQ ID NO: 11069 - DNA, 729 bp, Arabidopsis thaliana
ctgtgtatatctcctgttttactcaaaccaactattttggtgtggcacatgaatttgaacggaatcgggactcagggccaatttttttcatattttccaacaggataaatacctgattctgcacaatagtttcttggttgtgtgatattgttctttccattatcgtgttcttcttattttagccgttttctgacattttttcaatgattccagagcttgggcaatgtaagtggagaagaaatcaagatggttacggaaggtttgacaagtttgagtaaatttggagagaaaggtcctcaagaaagaatgcacgaacctgtagaaattgttgaaaggtaagctgatttggatccaaagttgaatgtgagtcttttgaatgtttgtgacttgtgattcatggttgtatgtgtcctttttgctacgacagaggaaaacggcctgcaaatgaagccggtaatgatgtgggtacaaagaaggcccgtacagagtcatcaggttgtgcacatgggatttgagggaatcactttcatggcctattttagtaaaacaagagtatttcttttgtctattagccaggtacaagtttttgttggcttattaaggctccttaacatgtcacgggacgaaaaagagagaaacaaaacaacaataccaagacattgatatgcaaatgggcctcataagtagaccattaagaatataatgcataatgaacccaaattacgccgt

SEQ ID NO: 11070 - DNA, 427 bp, Arabidopsis thaliana columbia
tcgtgatatcacttcggcaagatggcagtaaaacaatgaagagttccaatacaatttattaaagacattggaatacatttcttcaagaagcacataccaaaatccttgtggtgtgtaggatcattcaaaccctctatgaaaggaccaagaacgaaagtttgggacattgattgtgtacatgttttgtatcttctccactcgataccgaaaaatgactccatgaccgtgcacctgactaaaattgaaatagatgaattagaaacagaactgatatgaaatggaggtctgaattaaccaaagtgtgttgccaacatggatactttactttaagtgacgctctatccatgagtaaaagagaatttttggccacaatgggacaacttcaaatactgattttatctgatgaacaagtgtaagaaattgttga

SEQ ID NO: 11071 - DNA, 543 bp, Arabidopsis thaliana columbia
ccgtgattgaatcaataaacccatgtcgatactttaaactatatgaacggtcacaataaacccatgttctctcttcttctactccacggctaaccttaatcttaggcaaaccagaaacacaaattacaagaacaaacataaaaaagaatctcttgtcttgtctgctttcaatcctcatgtctctaatcctccccaaagtagagaaattataaaactttagacaaatattgccacaaccggtgaaaatggagatcccggttcgagaggagagaagatcctcctcatcctctgccggaccattacaacaaaccatctccttagcagctgacgacgccatcgatagcggtccatcctctccgcttgtcgtcaaagtctctgtcttcgaaacagagcatgagacgaccaagcttatccacgcgccgtcaactctgctcggtgaaccaccggagacgctgatttcctcccattcaaagctttagagatgctaaacttgtttgtgtggttgaaacgtctaagctttgggaaatagctgcacctatagct

SEQ ID NO: 11072 - DNA, 614 bp, Arabidopsis thaliana columbia
tactatcataagacgagatttaagaatgttggattactttctaaagccatctcgccattatctggctggcacactatcaaattttctacatcaacacctaatgctttagaatacgctggatcaaaggcatgctctgcatcaacaagcattgcattgcctccaagcttctgcacagtcagtaaactatatttcaggaacataccgtgatgatgtaaagattcggatcatctaatcttagtagttgacaagaaagatacctgcacttcagcaatagcatggagtgctagcgtggtcttgccactactttctggtccatatatctgcaatatcaaagttcaaatcggtgagaccacagttgccaattttatatgatcaaaaattctggagtttgttttaaagcaagttcatacttcgactacccgaccctttggtaggcctccacctaaagcaagatcaagagtcaaaataccactcgaaaaggtctccctgcaatacaaacatacacaattatttttacaaaaaaataaatatcacatggtggaatcaagatgtgtagtccatggtattggacttgttccctacaacgctcttgaagagtggacggaataagacac

SEQ ID NO: 11073 - DNA, 941 bp, Arabidopsis thaliana
gggtaagaagaagtcagacgagagtgctgctaccacaaaggtgaagccaagtgggaaagatgcttcgaaagattctaaaaaagagaaattgtcagtctcggctatgcttgcaggcatggatcagaaagatgataaaccgaagaagggctcatcatctagaaccaaggctgctccgaaatctacatcttacactgatggcatagatcttcctccttctgatgaagaagacgacggtgaatctgatgaggaagagagacagaaggaagcaaggaggaagctgaagagtgaacaaaggcaccttgagatatctgtgactgataaggaacaaaagaagcgagaggcgaaagacagattagctcttcaggctgcagagtcggcaaagagggaggctatgaaggacgatcatgatgcattcacggttgttattggaagcaagacctcagtgcttgaaggagacgacatggctgatgcaaatgttaaggatattaccatagaatctttttctgtatctgctcgaggtaaagagcttttgaagaatgcttctgtcaggattccacatggtaaaaggtatggcttgatcgggccaaacggaatgggaaagtctacactgttaacgcttctagcctggaggaatgattccacgtgccatctgaatattgatgatcttcttgttgatcagagatatggttgctgatgtacacagtgctctgaatgcagttgtctctgccaatgaagagttggttaagctacgggaagaggctgaagctctgcagaagtcgtcttctggagctgatggagaaaatgttgatggtgaggatgatgatgatactggagaaaagcttgctgaactgtatgacaggctgcagattttagggtcagatgctgtgaagcacaggcatccaaaattcttgcggggttaggtttcacaaaaggggttacta

SEQ ID NO: 11074 - DNA, 612 bp, Arabidopsis thaliana columbia
gggttcacacaaagatatgttgctccaatattatcacaattgataaccggagctattggcaacggaattttgagttcatagagtaaagaacaaagccatcgtacctccgcagcacaattggcaacagctcaatattctgactcgaatgaagatcttgcaacacctcgttgtttgcgtgaggaccaagaaatcgggttagagccaagatagatgatatacccatttatggagatattatcattcgtgtcacatgtccaatctgcatctaaaaatgcatgaagagtcatgggagaggaggcatgtaaaaatatactctgtgtgattgtgccagctagatatcggagtactcgtttcgcggcctgcaagagttcatgtgttggcttatggacaaactgtgataatttattgacagcgaaggagatatcagtgcgtgtgaaggagatatattggaggctgccgacaatagaacgatattgggaagcgttagggagaggatcccactgtcaagtatgagttgaggtgaggttggtaatgccgtagtgactggtttggcgtcaagcatattgtgcttaataagaagatttgtgatgtatttttgctgcataagatgaa

SEQ ID NO: 11075 - DNA, 859 bp, Arabidopsis thaliana
accaattattacacgtgtcaactgatcctcttcccacgtgcttaaacgcatcgaaatcgctcttcagatcgcgagtgcggttcacttcctccatgaacacggtatcatccaccgcgatatcaaatcggaaaatattttgtttgattcgaattgggaagcgaagcttgctgacttcggactcgccgttgattttggaggtgataagaagataagaccggctccggcgggaactattggatacttagatccgtgttacacgttaccggagaatctgagtatgaagactgatgtttatagttacggtgtcgttttgttggagattgttagttgtagaaaagctattgacgtctctcgttcgccggcgtcgatagtagactgggcggttccgttgattaaggaagggaggatcggagaaatatgcggcggaggaggaggaggatcgggtgttttccggggaatgagtctacggttgttgcgtatggcggcgagatgcgtttcatctgacgtggaatcacgaccgtgtttcggggagatcacggcggagatagtggcgtgtttggcggaaccgttgaagagtttgccgttatggatgagcgttttgcgtcgggttgttaaactgaaacggcggaaaaaacggttgagagaaacgctgacgtggccgggtcaaacttgccgcgtttggtgagagtttatgaattgcgggtcaaatatcgaatcgggtcgggttaaaaggttgggttggttacagaaagaaaacaaccatctaaatccaagcagaagaacaatcgctaaacagaatgatatatttatcggttgtagtaagtagcatttaattttgtgatcccttcggataatgtaa

SEQ ID NO: 11076 - DNA, 570 bp, Arabidopsis thaliana columbia
gtttatgtatatgatctgtttgtttttcctgcaaaaaagaatattgttgaagggttattcactcttgtatttgcacgagcaattactagaacctacttggcgaatgaatgtgaagcttcagattcagtccccttgaagatttactaagaccgctgcctattgcatttcatttgctgaatcaaaatccaccataacacgctcctaacttcctaattagatataatagtttactaagaccaactcaggaatcacaattttgaggatccctgtataacgattcttctgtttaagttggcatttttaataaaatggccaggcaggtaattcaaagcatataaacagaaagtggtatgcaataccaatatcataaatgttgcaaagccaagatttcccttccgcagcagctcaacacatgcttgtgctgaagaagttgtttcaacaacaatgtaatcaaggccggcgcacgcagttgatatggcgacatcgtattttgctgcataggacagccatgtcagtgattgttagtttcgctgtatttcttttaaaatcatttagacaagcaactgggga

SEQ ID NO: 11077 - DNA, 604 bp, Arabidopsis thaliana columbia
tagattagaatttaccctttctctggaaacttaaaccccaaagacaaataaacaatggcagtagaaaagatctaacctgagaatagcagtcgatggcatttgcaaattctttatgtcggaaagcaacatcacccttcttcttgaagttcagcgagtcctgcatctgattggtccacatctggaacgaaagctgaaatttttgcacagaaaaaagcaggcggaaaaagtaatcagattacaataagaaacaaggtagcccaatcccaaatacacaatgagacaattgtgattaagaaagaaacctctgttgctgcaccctcgtcatctttatagctaagcttttcaagaatctcatgtatggcagttagatctgttcttaggcatgcttctccaagtggtgaaaggggtgtcgttgaggcgctgcttggtatgcccatcagttgatgagaaggagtcttacatgaattaaccagtttctagttagtgtcggaaataatattttcgaaagcaaaacaagataagcaaccataagatacaagagctggcgaaagataaatggtagtaggaaagccctcaagatcttctgtagagggacattgcagta

SEQ ID NO: 11078 - DNA, 523 bp, Arabidopsis thaliana columbia
taattaggtcatcatcagctggattgttgttacctttatcccggttatctcttaaccgtttgttttcttcttccaattgagaacaacgttctttagcgaaagtaaatcggctttaaccgttttcaattcacggaggagaagcttggctttagctgctgtagccatggctacatcacgtgacgctttgagttgagactcacgtgggtttggttgtgttagtggttgccatggactgcttgatccagaggattggtgataattgttgttgtctgaatcgattagatcagatccttttcgtctgatttgtgaagctacgatcgtacgaccttcctcgaacgctttctcgaaactatctccgatatgattcagagacgttgtgatcttgtctatgcttttgcgtatggttggattcgagggctcgaaaatgacgtcgttttgttgttgttgttgttgttgttgctcttcttcgtcttcaaggattgatttagctttctgagctaagattcccagaaccacgactctc

SEQ ID NO: 11079 - DNA, 551 bp, Arabidopsis thaliana columbia
taagcttctaggatgcaatcaacggcgggatcgacaatcttgagaacgccggtggaggaggcgttgatgagagggctgaggatgatctcggactcggcgagagagtattcggcggctcctccgtcgtgaagtggtccaggaatggaggatccagattcagagtcggcaacaggagaggaattttcaggggatctaaggcgttcgatgacggatttgcactcgtgggcgagcttggagtgcttacgccaggagggttcattaatgaccttgtccaaagcagggataacaactcgacctaagcgggaatcgacttccgtagaagccattccagattggtagccgtgacttcaacgaatcaccaatttagatctataagaggagagtgagtatctatctatgtagcccagagagaactggataacaacaacaagagcaacgcctcctcctctgcgatccaatcaaagcagtattcttatcagggagtcagtgaattacagacatctacgaagatgaagcagacgagacaaaataagaaatggtgagcttgagtg

SEQ ID NO: 11080 - DNA, 530 bp, Arabidopsis thaliana columbia
gaaccgaactaaaccatctcttggacttcatctcacgtaagaagatacatttgataagcgacgagatctattcgggtaccgttttcaccaatcccggattcattagcgtaatggaagtcctcaaagacagaaagctcgaaaacaccgatgttttcgaccgtgtccacattgtttacagtttgtctaaagatctaggcctacctggttttcgcgttggggtgatttactccaacgatgattttgttgtctccgcagcgacaaaaatgtccagtttcggtctaatctcttctcaaacacaatacctcttgtccgcattgttatcagacaagaccttcaccaaaaactacctcgaagaaaaccaaatccggctcaagaacagacacaagaagctcgtctcgggtctagaggctgcaggcatcgagtgtctcaagagcaacgccggactcttctgttgggttgacatgagacacctattacaatcaaacacgttcgaagccgagattgagctatggaaaaagatcgtttacgag

SEQ ID NO: 11081 - DNA, 660 bp, Arabidopsis thaliana columbia
ctagtgttataatgcatcaagttaaagtataattaaagaagtgtctaacttggttctttattttgtcaattacatcttgtaactcattgacctttaactggagatgagcttgctttgcttccgtttcagccatacacttgtttttcatttggaaacatgctaatttggtcttattcatgtttcgacccattgccctcattcgaccaggattgtcaggtccaagtagttggctaagtgaatcttggccttcaaaacaagcagatgatggcgtatcacttttgacaatctctgatgcctctctctatcaagtacaagatacggattcacatgttatgatctaattctagcaatgaaaataatagtacaagatcttgtaactcacaatcttttcagccgcattttatttcactagtgtaccatcttttctagtacgtgacttgatccacacctgaagccttgacatttaactgggatttggactctcctttttctaattcagaccaaaaaaagtttacaaatagctagtaagtattcaaaagtagtgactgagtttaacatgtaacataattgtagtatgattccatacgtctgctagtctaacattcgtctcggctagtggtgtgaagatctgtttgctcttatagtaataacttagttaat

SEQ ID NO: 11082 - DNA, 576 bp, Arabidopsis thaliana columbia
agtcttcgacctattatcacgggctatgatagagcgcttgttaaaacgctataatatagttagatagcgttattcggacgctacaaaaagtcaattttcttgtagtgttccaaattctccatccaataaaagagaacaaacttgcatcctttcttggatcatggttcaaattccggagtaattccacattttgtataagtgagttgagcattagaatgttaccttaaggagattgaagaggtgtgtgctgccatacttccctgctaactctacactggaataggagatgattaacatcctctggtgcttctccacagctctgacatgtatcatctatagtcaccttacgtttcttcagattatctgcagtaggtaatgcattatgaactggcctccaccaaaaattcttgatctttggtggtgcattttgcttccatatattggtaaacaaatttgttgcagaaggtaaattcaaagggtgatatggcatgttgaggtggagataattgacggattagataataacctaacttgacagaatagttacattctgggtgaacagcaggacattgcatc

SEQ ID NO: 11083 - DNA, 650 bp, Arabidopsis thaliana columbia
tcccatctgacagtttttggatgtttaagttgactagttctagctgtttcaggccaggaatatctggaaagctgtgtaaagtgacaggtcgaccgttctctttgtagctgaacctcctgatattgagtgtagtagatttgttaagctccgagatgagccgaggagcttggtggacacttactgtccttgtagcatggatcttttgctcagtactaaaggagaagtattcagcatatccttcaaaatctgcaaaaacacgaaatctaatgtctcccgtgattgatatattcataagttgcatttccacgcttgaagttgggaacaacaatgtaatacgttgcgtctgagaaactttctgtataacaacacccatgggattcttagccccaccgtagtatgatagattaagcctgcctagggtagacctctctgcaatggactctggaattccttttagtctcttgcattgttctagaagcaactcgtcaagctcctcggcacatgaaagatctggaagttgtttgagattcttagatcccgtcacatctagtttcctcaaatgccaaacttctgaggagtggacccaaagaatagttggatatgcacattgctatagcgaaacatgactgatggtcaaatagtagaaaggg

SEQ ID NO: 11084 - DNA, 787 bp, Arabidopsis thaliana
tctaaagactcttgatcaaccatttggcatcctgcagattgctgcggataaactggctgtcaccatcgttgcgcgcgttattgcacatcgaggcgtagtgctggttgatttgcagacgcggaatgctgtcactgttgagttctaccgtccagtgaccgttatgcttacgcaccagcacatctggaatgacatactcaggttcgccagtctggatcgactgcccggggcgcggatcgagcgactggatcagattgacggcttctttcagcacatcttctttcagacgcgtgacgcgcattaaagtgcggaagtcgtgattggctaacagatcgagatgatcgctaatgatcagtctggcctcttccagccacggcgtggtcttatcgaattgggagagttggatcagcagacagtcacgcagatcttttgccgccacaccgaccggatcaaaccgttggatccgcttaaggacggcttcaacttcgtcgatgtcgatctcttcatcgcctatactttcgagaatatcttccagcgggacagtcagataaccggtttcatcaacggcatcgacgatagaggtagcaatagcgcggtcagtgtcggaaaacggtgtcagctcaacctgccacatcaggtaatcctgcaaggtctgcgtcgtttcgccctggtagaccggcagctcgtcgtcaatgtagtcaccgctggtgccggatggtgtaccagcggtgtaaatggtgtccaactggcatcgagcggcactcttccggcatctctttttgttcgagcg

SEQ ID NO: 11085 - DNA, 1117 bp, Arabidopsis thaliana
ccactagcattattttctaatttgactacgaatacagcctcgtacttagctcctggtgttagattctccgtagttattgttcccactattttaagccagtaaactttattcaacgtcgcaatttcaatttccgcagagctgcaaacataattaaatcaaacatagatgagaaatagaaaggaccagataacaaataaacatctttacaaagaataaaatatcgtaactagtttcacgaaatttgaccaaaataacttgataaattgttgtaattactaaaaagatgagggaacccaaaactaattctgtaaattacacaaaacaatttttttaaaaaagtggacctaaatatcgatttctagctaggtttcataaactcttatttatttttatttcaaatgagaaaatgacatatatgttatttctagaatccattaaaaaatattttttgaaaggaaaagtacttttgacctcaaaaaataatgataaaagagataaaatattactttggtgcctcgttgatggtactccaagtccatttttgaggtttctcagaatgtgtgatgtctaaatcccttgcagggaccatggaagggaccacggaacttccttcctgactcgcttctctttctggcttccttgcagggaccatggaacctccttgaggattcgcttctcctttcggtttctttggagggacgatggaaactaatttacgttgcgcttctatttcattgtttcttctcacagccatattctccagtaattgttgaatcttgatgaccattgagtttatgaagtcattatcggtcctctcactgccataccatacaagtaagagatatcaaaaacaaactgtttattatgtatatatatctttaggccaaaagaacataaaaataacctttgttcagccaagggcatgcctattgatcccgggatagactctaatgcttccttccatttctgagttattggtagcatgtgtcgattattgcgttccagagccctgaaattatcgccaaattttccttcaagaaattttacagcggaaggtttaactttgtagaagatgggaatcactatgagacggccttgatccttgcgttccttgatc

SEQ ID NO: 11086 - DNA, 468 bp, Arabidopsis thaliana columbia
atctagaagatctcatacagaaattcagtgtaattagaagacagatcgaaacaaaattagcctgcgacgtacctatcggcaaaatcggttgctctctctacatattgcaggatagtgtgcagtacgcgagatttacaagcccagtcaggaattgagcaggcatctctgcgcgactcgtttacggtgctagaatctgagtcttcgtctgaatcacatatggccactaaaagagcaggctgaagaaagtagataataatgagacaacttttcagtatgatgaaactggtgaatctaaatgctttctaagaagaaaaattgcgtagacacacaagcaatcttggtaaccctgaaagcctgtgacaagaaaatcagaagaatgggaagcaactgatgtcttggcgcgacagttagtagtgtcatcggtggcacgactagatgctcattttgtcccgatagatcgagtacgat

SEQ ID NO: 11087 - DNA, 556 bp, Arabidopsis thaliana columbia
tatatgcacacttctaacacaaaaagtaatatacataaataagtatcttctttatatctttacaagagatttaagagattttactttaaaaaaaaaaaaaaagagtttcatagataagagatttactttcagaaaaaagaagtagaaaacatctggaaacaactttgatgagaagatgaagaagaagaattaatttgcttggtaataatgctacaatcatcaagcttaaacacactaacatcttcccggtcgttgaagtaaatagcattctccaaacatccatagtactcggaggctaagaccaagaaacaattgtccgtcgccacaatgagtgccttgtctcccaaggaactgacctcaacccattctaccaaattcttgtccatcttataaaccttaaaacaaacggttctctcggtaagaactcgctttacgcaaaatttcttatagaatcgatgaacaacgcatagttctccacaatactccacgagtctcgtttctttgcaattatcaatttagtagaagtccactggagttgaaggtccgtattgatata

SEQ ID NO: 11088 - DNA, 652 bp, Arabidopsis thaliana columbia
taagtgaattgggttgtgatgagtgataaaaaggcacttggcttttttccaataacagctatttcttgaacatggatgttctaagacagcaggaagatcaggaaaattattaaccgctatcttgctaataattagattttgtaggcatgcaatatgggtggcgtccatgggatcctgcttggatggcagtttgttttggtttacgcctgttcacattttcatacgtacgattgaaactgttttatctgtttctgtagtgactggaatcctcatgctgatcttcaagcaatggctagagctcatcgacttggccaaacaaataaggttttaaattttatctcttagtgctgtcaacttgcaattttgtgttcttttttgtagtttccctaattttccttatattttcctttaggtgatgatttataggctcataaaccgaggcaccattgaagaaaggatgatgcaattgactaaaaagaaaatggttctagagcatcttgttgttgggaactcaaaacacaaaacattaatcaggtaaacttttattgcttgaagcctttttacttgattacaaatgtctcaacggattggagctggaaggtagaaatcgaagaagaacaccttcggttatacttataagtgtgaattaaag

SEQ ID NO: 11089 - DNA, 469 bp, Arabidopsis thaliana columbia
cagctgctatgcaatgaggttcatttttttccaataccaacggcatttatactctctttctgtgttcttgctagttttgcagaaccctttcagcggcggatgttcaggcatcggatgtaagaccgctcccagttttagaagaaaccctgagataccttctaagtttgctcgactccaaggagcacccgtttgaagtggttcatgattttattttcgataggacaaggtctattagacaagatcttagcatccagaatttggccaatgagagagtgatctacctttatgaggaaatggtatggtttgacgtttttctaactctatgctctatcctggttcggctaaatgaattacactgagcatgtctattttgtctttagaactgctttccttgggttttgttgacagtcggttgtgtgtttaacctctgctattccaaaagaatatttgtaagtttaagatattttga

SEQ ID NO: 11090 - DNA, 624 bp, Arabidopsis thaliana columbia
tatcttctgtctaatttatgtgagagatgtctaagaaactgtagctacaaaactagaaaccttatctagcaaatgcaaaatagccatgattgtctaatttatcttctcctcttttgaaacttcaggagcattgaatttacagttctgctttagattccaagtcttgttctgtatcttcagagatgtcatttgatggaagaggattaggcttgtctgtagcaggagcagctactggctcgttgagttccacatcttcacccaagatttttgctgtgaattttcgtgcttcgagatcaagatcgggccattcggttacgattcttcgggcaccctgcagaagaacaccgcattataacaaacaacgctttgtgagtgttgtagatatgaggaaagccatcattttacctgaagctttggttcctttgtcatgggattattgcaaagatcgattgttctggccttggcttttgtggcgtttcacaccaggattcacaccacaaccactcttggggaagtgaaaatataggaacagtatgctgagcataattaggaagacctgaaacaaaataatgacatgcatcaatatgtttgacctggacgctaaagatcagagcatggtgtatg

SEQ ID NO: 11091 - DNA, 612 bp, Arabidopsis thaliana columbia
agtagtctttcttagaaatcaagattggtaacatacaagcacaaagggtttggtatttcaatataaaaggcagaaaagaagtttctttgtcgaaaccttaagagactaatgcatatcatacctgaagcctcactgctctgctggaactttttcagctcttctattgtttccttaacagacttacttacactaaaagctgattctatctgaggcaaaagcatttggaggtgggactcagtttcaggatcactgctgtaatttgataaagttgcttggatgtgttgttggggatccttggaactgtattaccaacacaaattctttcttagagactaaacaaagtaatactaaaagctcctatatttgaaatatacacatgaaatatatcgaacaaagtattatacgagggcctacaggtcagctgacaaaatggcttctctgagtgaacctagctttccagatggtacataatgtgtccaagacccacaaacagtgcatctgaaggtgtggaaatcctttcccagtcatacctaggtaagcactgcagaatttgaaggttgaaaagttgctggtggataatgatctacagcacattgttatgcaaattgttga

SEQ ID NO: 11092 - DNA, 541 bp, Arabidopsis thaliana columbia
tcgttgtggttttggaaactgacttagtactcaaaggacgggggaagtgccacagctatgatctggggagcatcgcctcagtcacggtctgatcggcagaaggatagagttgaaaccaatcctgaacaactggctgctgcttctgctcaggctgatatatcctttttataaacttgcttttttcagattgatggtctatgtgtattttagttatggtttggttaaaacaagagtgttttgtagtcttccttcactaatttcgacacagaatgacgatatcaacgggcagaactacacgggtcattggatggtaccactcccatcctcatattaccgttcttccttcccatgtcggtatgtatcatcatcattgtaacttctcgatgtttttatcttgttcctcatatttatgtcctgtttctgcctgcagatgttcgaacacaagctatgtatcagcttttagattctggttttattggcctcatcttttcatgttttagtgaagatgctacaaggttagttagctactgctatgagtgga

SEQ ID NO: 11093 - DNA, 849 bp, Arabidopsis thaliana
tttcttttttgaaaagggtaattccaaactaaagtgtgttttttgaatgtcgagatcatgaaatattgcatatagaaaaataaaaaatatgacggaaaaaaacactttcctatgcattcatccaattttagtagagaacagtaaagagcgaaagaatgaaccataatgcgaagacaaataaaaggttcaacgcctattttcgaaaaagtaccttatcaattagttcggttcgtccttcactagcctcaacagctgctagggctttctcgtggaatccatgttgcaaaagccagtttatgtgatcttcagcatccctaacaagtaaaaaacagaataagttagcgaccgcaaggttcaatttacaaagcaatagaataacatggacaagaaatagtgaccacaaaaatctacctgggtttggcaatcacaacatcctttggcgaaacaatatagtacagtggttcatcaccagctgcccactgtcccccagcgtactactacctacactcacatcaattttccgagtaagtattcaaacatatgctttccttcccctagaaaacaaactactttccaacaaatctctgacctgggaaaggagcatgagcaagggaatagtctttcgccttgtaatgctcaaagccgtgtacaggaagagcatccattgtgagttcatcattgttccatgatacaatgcgtatttcaggcctctgggcatttccctggattacttaaaatcagactcaaccacttcccaaaagacatgccaaaatttatgtccctatatctcatacccaacaccaaaacctaccacaaaagagagtacctgacgcgatagagtagtggtgc

SEQ ID NO: 11094 - DNA, 590 bp, Arabidopsis thaliana columbia
ctacttcaggtgtaataaggaaagcaggtaaagacattctatgcagcctttataggagtgcttcagtggatacagtttcattgactagataaagcattggaatcttctgggtcaagtgttttttagcaatttcgttgggaaaggcgagtattataccgatactaatggagtcaaaaggtacgcaatacgtgactacatttaccaatgttttttttctttaatttttattattaccatgtgatatggttttatgacatttattcatatgtatgctcattcggaatcttggcaaatcgagactcagctgcacgttcgaagcacataatgtcgtggtacgttgttgatttggaacgtagagtcgagattcttgagatgacaaataccactatatggaatgaccgcattttttgaggtgaaacatatcagattagcaagtaacaaccatctatttgtcggtacttgtgagggaacaatagaaaatatgttagtccttggcctgaactgataaatgttgagaattaatattaatatattaatttgttgtttatgtgatttttctttcttttcatttttatgcaggaagaaaaatt

SEQ ID NO: 11095 - DNA, 2042 bp, Arabidopsis thaliana
aaaaaaattccccaaactacatcttctccaaagtcaatagcttttcaaagcgcaaaagatgatttgaagctttcttaatcgttgcatgatttcgatttcttctaattgtggaaatttaatatatttaattgcagcaccagcagagatcaagaagatagtggaaggccatgcaatgtcctcctcgagctcctcttgtatttcaaccctcattaagaaacagaggaaaaatgcaaatgggattatctaaatcttgtttggcatttctccatggactatttcaaagccgctgggtgatctataaaaggcctgagaatgtctccttcatcttcatctccaaagctcgttctcaccttacttggcaaacactcaacgaagaaaggagagagagacggtaatggcgatcaagaacattctcgcccttgtggttcttcttagcgtggttggagtttctgtcgccattccacagttgcttgacctcgactactaccggtctaagtgtcccaaggcagaggaaattgttcgtggtgtcacagtacaatatgtttctcgccagaaaacccttgccgctaaacttctaaggatgcatttccatgattgtttcgtcagagtaagcttggttcacttgttcgagactgttaaccaagggatatgaaaaaactagctagtcctaacactcttttgtaatgattcatgtagggatgtgatggttccgttcttctgaaatctgcaaagaatgatgcggaaagagacgctgtccccaacctgaccctgaaagggttatgaagtggtggatgcggccaagacagcgctggagaggaagtgtcctaatctcatttcttgcgctgatgttcttgccttggtcgccagagatgccgtggcagtggtaacattccattttcgcaatggactagtgattttgtcattccaaaactgaagactatagtatgtatataacttattaattgtctttgaacagatcgggggaccatggtggccggttccattgggccgcagggatggacgcatctcgaaattgaacgatgcattgctaaatttaccatctcctttcgccgacataaagacgctgaagaagaactttgccaacaagggtcttaacgctaaagaccttgtggttctctcaggtatgtctgcagctggcaccttatgatgtgcaattctcaaaagagttatcaatttgaaagctgaacaaaaatggtttcttgagtagggggtcacaccattggaatctctagttgcgctctcgtcaacagtcgtctctacaacttcacaggaaagggcgattctgacccatccatgaaccctagctacgtgagggaattgaagagaaagtgcccgcctacagatttcagaacctcactgaacatggacccaggcagtgcgttgacattcgacactcactacttcaaggtcgtggctcagaagaaagggctcttcacatctgactctacgcttctcgatgacattgagaccaaaaactacgttcagactcaggccattctccctcctgtgttttcttctttcaataaagatttctccgattccatggtcaaacttggtttcgtccaaattcttaccggcaaaaatggtgagatcaggaagagatgcgccttccctaactaatttggatcgatcagaccgggtttcggatgattttgagtctacacgtttttctctgcttattttctttctttttcttttttctttcacggaagtttgagctttggtgttgtcttcttctgtttcttccatgaataattgttttttgttgagtaactttacatttgtattctttacggtgactgtgttttgtaatggaaaaagtttgtgtctgaattcatccgttaaacgtaaacctaaattagactaaaattatgattggatagcaaaacattttgtaagcttcgtggtgtttttactatgaattaatagttatgtttgtgtttcacggttaatggttatggttatgaccagttttaataagtgattgtcacggttaacggttacaataataaatgatctat

SEQ ID NO: 11096 - DNA, 549 bp, Arabidopsis thaliana columbia
tattctgtggtcatggatatactggtgaaaactcgaaaatgaaaaaaaacaaatgttgaaacaattgttctatttataattatcttagtctatcgtttccaggctttttgtaagaaaaaacgaaagtcaaccgaagtcaaagacaacaaacctcggtgagaggggtataagagctcggctggctctttaactggaaaaagaggtaagcagcataggcaacgagcattatgcaactgctgaatcttgagagagcaagctctgatgacccagcatgaacctcactgtgcgtgtaatgaagaactgcggggaagagtagtcccatgacagccatcaaaagcaatcccgaattcacaacagcattaccctgcattgcagaataaataagctcagaaacatggtataaattacagaacaacagggacaattacattgaaaaaaagaagagaacaagtgatgatattcctactttgtcaaagacttgctctttctgggaaaatacaagcccgccacaaaagaaggcgcacgaagtacaagtaacatgttagaaag

SEQ ID NO: 11097 - DNA, 521 bp, Arabidopsis thaliana columbia
atcatttgtgctttgaagtggatttgagcgggtttaacctacattgcttatcttgacacaaattatgtaaacaaaaatgttattttgaatcatctcttaacagattggagtgagttttaagtttttggattcttggtttacaagccattacaacaaaattccttctcatcactcttctttggtcgccacttgtttctggcgaagagctctccaaccaatatcatgcctaaagaaacctccaggccagttgatctgttgtactgccgagtacgctctttcacgcgcctcttccaagtctttacccttcgccgtgaccccaagaacacgtcccccagttgctacaacattcccctctgaatctagacccgttcctgcgtggaaaaccttcactccaggagcaactctttcagcttcttcaaggtttttgatgattgatcctttctcataagaaccaggataaccattgcttgccattacaaccaccattgctgaatcttttgaccaatcaagtgatacccact

SEQ ID NO: 11098 - DNA, 541 bp, Arabidopsis thaliana columbia
cattacaaagaggcaatagtttcaacatgttcgggtgagatagagacgcagatatcgtgtatgagtcattgagtccacatcggcgacaaaactctttctcgtctgcaattccatggagcctaactcttctgatgtcttttttcctacattgtactagaaaatgaagaagggttgaagaatgggtgggagagattttggggcaaaaatgatttcaccagccttgttggtgccaggagaagtcatattgaccaaagggaaaggaagctcaaatgtttgcttggaccaacatgtttcttgacattctctagtatccacaaatcaaaactagagaagcttaaagggtttctagcaatggaagctaacttccctttgtattctatcaatattgattcacactcccgaaccaaaacatccctaggcactttgataaaacttagcctctcatatctaacatgaaaacacacaatcaccattcaccggatccattcttagtctaggggccaagcccataatagatggaacatagatgcaaagtccttgg

SEQ ID NO: 11099 - DNA, 558 bp, Arabidopsis thaliana columbia
tcttcacacacaaaggaggcaataaagatttcttcttaaccctaatggaagagtctctactctccacagaagcagacgggttcatcaatggtattgaattgcgacgggatgacgacggagaaggactcaatgggggcaaggaagagaaggcaagtgaaggctgagttatcgaccgtggtcgggaaggagtgctattgtcggatccattcatttttaaggattgaagaagacaaacaatcgagtataaatctgcatcataaaaaacaagtcatgtttctacgtataactcatttttcttacatgcagaaaaaaatttagaaatatggaaaaactaacaattataatgatcaaagatattttgttttgaatcgtgacaacaacgaggttctcatcagtttattgagaaatgagaacaaaaacacaattgaaacattgagtaagcaataaagagttgaaaaaaacctctcagaaactgaaatatgatttctgttgtttggatggatatatatatatatagtttgcattaccctctttttatattgtttaggacaacaaata

SEQ ID NO: 11100 - DNA, 785 bp, Arabidopsis thaliana columbia
cataaatcatatttctgtttctgagaggttttttcaactctttattgcttactcaacgtttcaatttgtttttgttctcctttctctataaactgatgacaacctcgttgttgtcacaattcaagacaagatatctttgatcattttaattgttatttttcccatttttctatttttgctgcatgtaagataaatgagttatacatagaaacatgacttgttttatatgatgcagatttatactccattgttggtcttcttcaatctttaacaatgaatggatccgacaataccactccgtcccgaccatggtcgataactcagccttcacttgccttctcctccttgcccccattgagcccttctccgtcgtcatcccgtcgcaattcattaccattgatgaatccgtcaacttctatggagagtagagactcttccatgaggtttaagaaaaactctttattgcctcctttgggtgtgaagaaaatagcacccaaagatattggacccctaaagagacactacaggagtgtttcaatggatagttgtttgagtgacttactgaagctaactccttctccgggtaacactccatcttcaagattggttgatggagaccagaatgcttccaggctagagtttgatgccaatgattatactgatgatgaattgaataagatagcaaagagtaacaaacttaaagaggttgcattggatcctaaggaagtcagaaggtaagtgaacatgtgtgacaaaattattatttgtgcttttttttttttttg

SEQ ID NO: 11101 - DNA, 1155 bp, Arabidopsis thaliana
attctcctttctccatccaaacaaacataagtttctgagaggtttttctcaactctttattgcttattaaacgtttcaattgtgtttttgttctcctttctccaataactgatgacaatctcgatatcgtcacggtgcaaaacaaaatatctttgatcatattaatttttatcattttcccatttctatttgatattttgtttttttgcatgtaaaaaaatgagttatacgtagaaacatgacttgttttatatgatgcagatttatactccattgttggtcttctccaatccttaacaatgaatggatccgacaatatcactactccttccggatcacggtctatgactcagccttcacttgcctcctcctccttgcccccattgagcccttcttcgtcaacattccgtcgcaattcattaccatcgatgagcttttctccgtcagctcctgtggagagtagagactcttccattaaggttaataaaaatccttcattgccccctttgggtgtgaagagaagagcagccaaaggcatggcacctttgaggagacattacaggactgtttcattggatagttgttacattacttactgaagttgcctccttctccgggtaacttttcctcttcaagttcagttgatggagaagaggatgcttcctggctcgagtttggtagcagtgattatactgatgatgaattgaataagattgcaaagagtaccaaacttcaagagatcgcatctgatcctaagaaagtcagaaggtaaatgaacttgtatgaataaattatatttagtgttttttcttcttcttcctattattattattattattattattattattattattattattattattattattattattattattattattattattattattattattattattattattattattattattattagtattattattattattattattattattattatttttatggttattattattattattattattattattattattattattattattattattaggattcggatcgcgcgatgtcgccgaggaatattcttaatatgtttatttagtgattttatttaaagcaaatggcatattataaattctcgtaattattattatttttattattattatt

SEQ ID NO: 11102 - DNA, 559 bp, Arabidopsis thaliana
  unsure (1)..(559): unsure at all n locations
cctcgagtaacatacattatgcaaattgttgccgatgtcaatttttttaacacacatcaaaaagtgttgttttgatgttgcagggtacttatctgcatcacaaagaaataaaggctgcacaaggcatcaaaattactgcccaggtgaaatggactaactctactataatctttgtcactagcagctggtattaaatatactgacgtttagatgatatcctaaatattttgggttgtgtttaaaagggccttgaacacgcaattgctggtacttccctgcatgtggttggacctgatgatgacatcgaggcaatgaaggagtcggctatggaagatatggaatcggttttgagcaggattgacaaaagtggtgaaggagtttatgtacaaacgtctacattagggtcattagaagcattgcttgaattcttgaagacccagctgtaaatatacctgtcagtggtattgggatagggcctgtgcataagaaggatataatgaaggctggagtgatgctcgagaagaanaaggaatatgctacaattttggcttttgatgtg

SEQ ID NO: 11103 - DNA, 535 bp, Arabidopsis thaliana
taaaacagaatgatccaattattacctttattgccaccttgttgcccttctttgcatagtcaacaggcttgtggttattctcaatcgaggcaattcggccaatatcgatgaactctctgccagggacgcaaatgggggttccaatctgaaaacaaacaagacagataagaaagtgtgaaccctagcacttgtgtcatcatgggtgagagttacagagaatgtaggaaattaaaagcatagataccttaagtataccctcgatgacatcaactccaaggactattgggtctttcttattgaacacacagttaggtaaaatctgaaggacacatgggaagactgcctcatcggctgattccttctttttctcctctttgatattctcaatgtaagccttaaacagatcaaatagatgatagatgatatcagcgcagaagatcttaactcccatttcgtctgcaagttcacgagcctctgtagtaactttcacatcaaaagccaaaattgtagcatattccttttttctctcgagcat

SEQ ID NO: 11104 - DNA, 1095 bp, Arabidopsis thaliana
  unsure (1)..(1095): unsure at all n locations
gcttagtttaaaagcttaccaaagaaggaatcttgataaaacaggactagaccaaaaccttcatcaagaagcaagaactcatgagttcctggaaagcccttaacagccaaaacataagtggttcgtggaccgtagattcccatggctgcagcacttgatctcctccagtgattccggttaacttgtctccaggccaaacaccgaatatggttcccacagtgaaatttgtatccacaatgcttgatccatccaatggatcaaacgcaacactaaacccacctgtccaaataaatttcatattctttcgataactatttttcgcgcgatttaaagaagcggaaatgttagttaagtttatgtaaaaccaaccttccactggacctcccatgtcttgaagctcaggtacttcttcagagcaagcatacttgcacacatgcgagtattgcaaagcctataaaaccaatacacaaatcaaaacctaatgaaccatttttctgatacaaagcttatgacataagttaattcaaaatgtaacaaaaaacctcaaagagaagcttatcagcaagcatatcaacagcgagttgttcatcaccaaaggaattaacacaagctgttccaccgcaagaagctgttctaactttaaaagctattgttctcaatgcttctcccatacacatcagcaaagttctcaatcccttgtcaggagttgcttgtgccaaaaactcttcctatacattcaaaagtaagaaactttaactgaaagatggaatcttcataatacagaatttgaataaagattgagtctttgtgttactcaaccaagctttggccaatttcacatttggtcacagttgaagcaccattgctcttagcttttgtggctttaagttgcgattttggtgctaatcgtagtgaatctccgaagattgagctcgattttagacgctgcttttatcaaattattacaattagtaatcactagtactgaacaaatcctacactgaagataagcataagtgcanaggataacgaccnttgaagctggaggatgtggagtaggaaggaggagagccaatgtagaggatcgttgagaag

SEQ ID NO: 11105 - DNA, 1282 bp, Arabidopsis thaliana
tgccaaattatgtgcatggtcacacaatgccttcaccattttctccgcgcgtggtccttctccgccgattccgtacataaaatgcagcccaaacggccggaaaaccgccgggatcgacggtattttcaaaaacggtagagttttatcaaccatgcgcgtcgcttttgaaaccacgcgcctcaatctcgacgcgccgcgaacttctaatctaaacgagtctttacaattccacacgcttaaaaccgcccacgagtccggtggatactccaagaacttagccgaaccgggccatgacctagacccggatccgtaacaactgccacgtggaaccgcgacgaatgttcctaacgagagtttgttattcaaaacagagtcaatgtcgcgagggaaaaactcggttgtgctaaaccgaagccggtatagtaactcagcatcagacggttcaagcttaattacggtaacccgacgagaaatgttgacccggtgtgcgtaaaccgggttaaccaaaatagacggtgtacgaaactcggcgtaaccacattttccggtgaaaagattgacggaagtgtgattgtcgttttcagttgcaaaataggaatattcagccccgttttgactaaaccaatcttccatagccttcacgagcttaaaccctatcccttgtctcctgaagtaattaattaaaaaaaaacgtgattagtttaagcgttaattactcgtgattggtttagcgttaaatgcgtgagatttaattaaaacgtaccggtgtgtaggagaaacgcggagacccaaaatgtaagcgagtttagtgtaaagtggtttggtaataacgacatcgttttgggatttgttatgagttaaatcaagtcttttggtggtgataccacatgtaacggttttgatacatccccgaatcattccaactaactctttcttctctttcggaccaatctcagccacctattacaaattccaattttaagttaaaaccttctttttatttaatagttaacaataataataacaataaaatattcataataataataataataataataataataaagcttttgggttagttagttcatgtaattgctctttatataaagaaacgggtttttaatatcttcggtttgagttgtaaccagcatgaggcaagaaggtgaatgtcgtttcacttatcattttttaattaattaactataaaacaaaacaaaacaaaccattttttattttgataaacaaacacaatcttttttttgtaagttaataattcgta

SEQ ID NO: 11106 - DNA, 1020 bp, Arabidopsis thaliana columbia
tgttgctttttgcaaaacattcaaacttatagatttaagaaggaaaatcacgaaattcgaatataatataaatcacgagactcatttgttgtttttaaacaatataaaaagaggataatgcaaactatatatatccattcaaacaacataaatcatatttcagtttctaagaggtttttctcaactctttattgcttactcaacatttcaattgtgtttttgttctcctttctctataaactgatgacaacctcgatgtcgtcactattcaaaacaaaagatctttgattttaattgttatattattcccatttttctatttgatttttcttttctgcatgtaaaaaaaatgagttatacgtagaaacatgacttgttttatataatgcagatttaaattctattgttggttttcttcaatccctgacaatgaatgaatccgacaatctcactccttctcgaccacggtcgatgactcagcctccacttgccttctcattattgcccccattgaacccttcttcgtcgtcatcccgttgcaattcattaccattgatgaacctttctccctcagctcctgtggagagtagagactcttccattaaggttaagaaaaacccttcattccctcatttgggtgtgaagagaagagcatccaaagacatttcacattgaggagacattacatgagtgtttcatttgatagttgtttatattacttaccgaagctgcctccttctcaaggtaatgtttcctcttcaagttcaattgatggagacgagaatgcttctgggctcgagtttggtagcggtgattatactgatgatgaattgaataagattgcaaagagtaccaaacttcaagagattgcatctgaccctaagaaagtcagaagttcagtgaacttgtatgactaaattattattagttctttttattaatgatatgtgacattgattcatgtggatgctcgttcataatcttgaaaaaattgggagtcagcgacatgttcaaagcaga

SEQ ID NO: 11107 - DNA, 559 bp, Arabidopsis thaliana columbia
gaatgtcttcgaatgaaagaccataactcaagtacagtccaataaccctctgcatattgtcagagcttgttctggtcacagctcccatcgcaaaggccagttcctttgttctatgcttatatccaatcttcaccagaaaaccgagtttgtgcgagagattattttcggatagagctaaaatcaatggtgctttactcaagaatttgaacatgccgggggaatcaaagccgcattccttcagaaactctatcctcgggcgcagtttcctctctttactagtgctgataacattagggaacacatgaacaatcttaaacacttgctcactcgtcaagccagcaaaagacttgagaaactctacttggccgttcatatgctcaacactataactcaatatggcaggaagtctacgtagcaccgttccagtagcgaaatcgtcttccccgcttagattcctaatgaaatcaaccctaggaatcaactgactatccaagtcactattgagaatcctggccgcctagcaattgtacggattccaccaaaaggttccaagaaacta

SEQ ID NO: 11108 - DNA, 525 bp, Arabidopsis thaliana columbia
atccctgagacgagcaaagactcgccaagactcgtctgtgtcaacgtcgtagaagtttagggtttcaatggaacaaggaacgatcaagatcaaactacctaaaccatcagagataacgaggaggcacaagaaagaggccgatatgggcaagaagataaagaaagaagagaacatgaagagagatttcatcagacggagaatggtttttcgagttaagaagatgacttctgtgatttccggtgtcttcaaccgcaagaaaacactttcaggtgaaaacagagaacagagagatggttctgagggcgatgagaccgtgtttgttaaactcaagcaaaacccaattcagaagaaggggagtttctgggaaagcgcaagaattcgactgaagacactcatcttagggcaaagattgaagaggagaagaaaccgaagaagaagcttaagtgaaggaatggaagaagaggagctgtcaagaagagaatctaatgggtgaagatcaaccaatgacggggtttgcagtatgat

SEQ ID NO: 11109 - DNA, 593 bp, Arabidopsis thaliana columbia
  unsure (1)..(593): unsure at all n locations
ggccgatttgccatcaagctaacgccatcatcaaattgcctctgagtttgcatgtttgagaaggtcatctgtgccaattgttcctctatcctctggtcctcactgactctaacgcgaatcggtggcaaattggatgtggaaggagatgaagaagaagatcctatcgaagaaccagcggcttccatcattggagaatcaggcatcgagctcatatgcatctcctgatgcgaaatcacaccgttagcaaccaaatcccctcgcttattgttctcgccaccaacattagtttcaaggttttggatctcggtctctccgccgctagcttcgtcgagattcaccaaggtattattcacggcggcggaatctgataaaccacgaggaagcaaaccagattgattcagagcatcgacgaaccatgtgtcagatttcgtgccgtcaagcagagatcccatagtagcggcggtctcgagcttgttagcgaaaaggaacaaccggagccgttgcgtacgagtcgccgtcgctgacgaagccgcgcgngtcgtattcctcgatcatgttctccagatcttcatcggtagtgatggtgacgagtg

SEQ ID NO: 11110 - DNA, 476 bp, Arabidopsis thaliana columbia
tgttagtaatctatttgcatgtaactagaaactgataccttagctactccttgaagaatatgaagaagtttggtggcagaagtggagtcaagtccagaagttggctcgtctagaagcaacagagaaggatctacgagaatctcataagctatacttgctctttttctttctccacctgatattcccttgacaaaacctcctccaactcttgtccgacggcatctttcattgtgtttttcaataaatcttagtttagtgtttacaagaaatgtgtctggacatcaccaagaacatgcttgaagaaagtctacgagctaggtctcactataagctggaaatattcaagaagtgtacctttcgaggccgagctctttgatgatcatctctatattggcgtatttttgttccttgctcatgctacttggaagtcttaaaaacgcagcatatgccaaggtctcttccacagtaagttgtgg

SEQ ID NO: 11111 - DNA, 528 bp, Arabidopsis thaliana columbia
ccgtgtacaagaagcaacctaacgatttggggccaggtgaaggaagagctgatttaggttattgagattcgttttcttcaaatggaaaacgaaagggttgagagagaacagagccaatttcaggaagacgagtttatcgattcgagaaaaccaccgccatggaggaaacagatcacggttcgagcgatcgtcgcgagtttattgatagggattgtctacagtgtgatctgtctgaagctgaatctaacgacaggactcgtaccgaatctcaacatctcatcagctctcttggcttttgtttcctcaaatcatggaccaaagttcttcaaaaagccggaatcgccacgacgcctttcacacgtcaagagaacactattgctcaaacttgtgctgttgcttgttacagcatctctcttgcaggtggatttgcatcgtatttgttgggtttgaatagacgaacttacgaggagacaggagtgacaccgaagaaacaatcctcgtggtataaagacccggtgttggatggat

SEQ ID NO: 11112 - DNA, 611 bp, Arabidopsis thaliana columbia
ttcttcaagaaaatgactattgatatgtatctttccttcgcttctcgttctggatcttctccatttccaagtctcgagctttgtctcagcattttcctcttcatctcccttttcgttttctggttgactccaggtggctttgcttgggcactctacaaagctcgtttccatacccgacctgagtccaaaaccggacctgccattcccggcccgtctggtctccccatctttggcctcctcttggcttttgtcaacaacgccttaacacacagaatcctcgccaatattgctgacacttgcaaagcaaaagctctcatggcgttctccgtagggtcaacccgtgtttgttataaccagcgaaccagagaccgcgaaagagcttctaaacagctctgcttttgcagaccggccagtgaaagagtctgcttacgagctgctctttgatagagccatggggtttgctcctttggtgattactggagagagttgaggagaatctcttctacccatctcttcagccctaagaggatctgcagttctggcgagtcccgcgaataatcgggcaaaacatggtaggagagataagaacgcaatggagtgttatggagaag

SEQ ID NO: 11113 - DNA, 1364 bp, Arabidopsis thaliana
tgtatccaagggtgatctgcaaagaaggaaacagaaaccgttttcactttaaatgccggttttctccatctcaaatccaacacaagaaacaagtagcaaagaagatcaaaattcacaagtgacacaagaacagcattattaccaagaacttgctgagcagtcaaacgcttagttgaatcaggttccaacatctgcttcacaaggctctttgcgctctctgatatctgcgaccaaggatctctcttaaaatcaagaactcccctcaagatggcaagagccacaccttgttcagtctctgcaatcaaaaccttgaatcactcagttactctcaatcagcatatacaacttcaaacaagaatcaaatctttctttaacctgcccaaaacggaggaacaccacaaagcaagatgtagaggataactccagcactccacacatcaacccctggtccataatctctcttcaacacttctggagccatataatacggacttcctacaatctctgtaaacttatctcctacaataaagaaaacgttatttacccaatctcagatatctacacaaacttccataaacatgaagatatggcaggatagtctaaaaatagaaccatccactgagttaagaaacactaaaaattgaatctttaccaggtttgaagaacacagacaagccaaaatcaatagcctttagtggagaattctcctttttattagcaaacaagaaattctcaggtttcaaatctcgatgcataactccattagagtgacacatcatcacaacctcagcaatcgttctcgcaacagctgcagcagcacgctccgtgtaatgtcctctagcaacaatccgatcaaaaagctcacctccttcacaaagctccataaccagatgcacgttctcgttatcctcataactagccttaagcttaactacgtttggatgctcaggtaaagtagacataatcgctacctcacgacgaacgtcttcgatatcgacagctgttcgaagctttcgctttgaaatcgatttgcaagctaaagcttcgtgggtttcacgatcagtacagaggtaagtgattccgaattcgcctcgacctaattcacgacctaagatgtatttgtcgctgatctgagtttgattgctcatagggattacatctttgagaacacgtattggagctggggatctggtgaaatctccggcgaatgggtttaatttccgatctcgattgggttttttcggctttgaagatggttttgattcttttgagtctggccttacacaggcgttacagttaccatggctgagttaagaaactcacaaactcagagaaaggagatcaaggaagaagaagaagaagga

SEQ ID NO: 11114 - DNA, 559 bp, Arabidopsis thaliana columbia
acatcgatgagagggtttcttgtgccagaacttggtcaaataacctacttgcaagaactgtatggttttgattcatattgacaatacctgaagatataagtttgatgattggtactgtttggaaatgtttagatgactttgttttttctgtgttgaatgcttctttaggatcctgcgtgggaacattctaatggggacaataccaaaggagataggaaagttaaagaaactcaagatcttagacctgggaaacaatcatttgacaggaccgattccagcagagatcgggaaattgtcaaggattaagacaatgtaagaaaatctttaagagaatgtcatctatccgataatgtgctgagataaccattttgtgtctctttaacaccacagaaaccttcagtccaatggtttaataggaaagttacctccagagattggaaacttgaagcaccttaaagaacttcttattggcaggaataggcttcgaggaagtattcctattgccgcgaaaacatcaaaaaagtgagtttagctaatagtcctaggtagcataagatgg

SEQ ID NO: 11115 - DNA, 325 bp, Arabidopsis thaliana columbia
ccatatgttgactgccttctctatgcagatccaatttcaaccggataaattatactggcttctacactgctatcctagagagaggagacgaaattatatccgcggcatctctcaggtaattttccatcatcttagccaacactttttaataacaggcaatggcatggtagaatcattcctgagtagtatccgttaaaaagttatctagcgtcgtctgaaattaactggacatcaattgtcactagtggggtacatttggatgtcttgcattttcctttccccctcgtagtcctttaataactaaaagtttatgtgtagtgattct

SEQ ID NO: 11116 - DNA, 446 bp, Arabidopsis thaliana columbia
gtgatagcaatcaagaaaggagactccatagctttaccttttggtgtagtgacatggtggttcaacaatgaggacactgagctagtcgttctcttccttggtgagactcacaagggtcacaaagctggacagttcaccgacttttacctaaccggatccaatggaatcttcaccggtttctctactgagtttgttggcagagcttgggatctcgatgagaccaccgtgaagaagcttgtcggatctcagacaggtaacggtatcgtgaaggttgatgcgagcttgaagatgcctgaaccaaagaaaggtgaccgaaaagggtttgttttgaactgtttggaggctcctgttgatgttgacattaaggatggaggaagagttgttgtgttgaacaccaagaatcttcctttggttggtgaagttggatatggagctgatcttgtgag

SEQ ID NO: 11117 - DNA, 608 bp, Arabidopsis thaliana
tcataaacttcctacaaaagaacaagttataaataaaagacctttgtggttgagacaatgagtgcttgatggttgggtttcacaagtaccttttcagtgctatcggaattcacatgcttatcacatctcacccctcgaaaatacagctccccgccagagaattgtttacccaagcagacatttaaactaacttctgagtcatccacatgaaaccctaaaatcaagaagcaagtttttagatgtgttccacaagtccaaatctaactactaccaagaagagaccactcccaatacttaccaagatcaacatccctatcttttccatattcaacaatatagccatggtgagaatctaaagaggttccacagacttccgggaacagaactgacacaagatttgaaccaagcccatcagcaaataacaaacttgcaacaataaccaaaaaatctgcaaatgacaattagaatcttaaccttgagctataggactaataaagtcatcaaccaacttctgaagcatgctatcaaagccaaaatcatcaaggacaacaccgaaattgttcatcgtattaggtctcattattgtggatcttgaatcataaacccat

SEQ ID NO: 11118 - DNA, 1596 bp, Arabidopsis thaliana
ccatacatcccacaacccgaacatatattcgttagtccctcataagcaacataatacctttcaccgttcaccattatcgtcccttttaaaggcttagatagattcacctctacacatactcttgcaaatcttcccctttcaaattataaggtcgttaagttcaccttaatcggtttccctaacccctttgcgatacccatcaagatggacttatgatacaagttcaccggaatgtttgattacctaacccagacaggtgtagtgatgatatcattcctcataggatcaaattccggcgcccacgcttgtacggtaagctagctcccaaacactctccatggacctccagtcaaggctgccaagtactcttcctccaactcaaagcggatcataaaacactgacgaagaagatccatcacatacataacccctcttggtttccacagttccctcaacttcctattcaacaccgcaatcgacatgctttttccaaggacttttactatcatatactgcccccagaaaccgttcatcgcctccagaacctcttctccgatagtaacctctggttccccaccttctccatcacgaaactcaagttgcatccttgccgagacaaactcatcatccaaaatcccaccaacagcactaccaaccacctttcaaacccacgaaccaataatgtttggtgggtcccccggaggtctccccctatccccgatatccaccatgttcgtatcctacacaccagtgaccgtaaacctaggggcaccgctcatctctttttttggattcggaaaattagtctgattagttcattataattttttaggattaaattcatctataactcgaaatatcagttttactataatatgaatatttctatatttattatcctaatttttcactatcatgaacacatacaacaataatatataatatattttgataaaatgtatgtaattatgttacttatgtggtttgaaacttgtctaacttaattgtaacaaataattcattcttcatctagtacaccaaccgcatcctaatatgctagtaatttaagtcaacatagatctctttctttgcatatagccatatagagtctcgtttttttttgggtatgtttaatgttttgaggaccattacatgtaaaaaaaactgtatattaatgttaccaagttatcagaacgcacaaaaatgaaaagaaagaaggttatacgataagttatattcacaaaacataactattaaaaactatccaagtaaaattactaaattaatatgacgttaggtagcaaatatctaaaatacaacccaagtaaattcttagccattatggagtaatgattattgataaaaaaaattttaataaaataagtagagtagaatgaaagtagtgcttgatagattattatgattttttatttcttaaatgtttttagaaaatcatttaagagtgagattaatacataatttaacacaacaaaaagacttttaattttttatcatatagttttgttaacttttacttaattctgtagaatgcacatgcgattttcttgtgtgataatgtgcactcatatggagaga

SEQ ID NO: 11119 - DNA, 527 bp, Arabidopsis thaliana columbia
agtaagattgccaaaacattccgggagatatggtaaatcggttatgggatcatcaagtaaggatttggtggagcgtaacgaacgagagtatcatggttctcttgagtatgacattgatatgctttttcagtctatttctgttaaaccatctactacgaggttgatgagttcttctttccatcatcatgagacgagcgcgagtgccggtccaagcaggaccacaagcccttcgaagagaattgcgtccatgaaaaaaccagggacacctcagtctcctagatttgttgggctctctgattcagtttctttgaagcaggctcttagggatcgttgcatttctaaggcgtcggaaatggctgctcagaaacgggtgtcgaaatctgctgctgcatctccggagggtctcagaaactgacagggtaaagagtttgtataaccaagtttcgaatgaatctactagcagcaggtctgggcttgttcctgtggacaagggtaaaggaagtttggttgagaacctttgatgctgt

SEQ ID NO: 11120 - DNA, 605 bp, Arabidopsis thaliana
gtatccaatagcaatccccataagaaatgttctgtttaactcatcattttctttggctctagtaggtttacaggaagtcagcagtacaccaccgcacaacaaggggtttccttcaaaatttgcttttggaaatgtatcaaactgaccttcactgggaattggcccttcgagactgttgttagccacgttgaaataagacaggaaattgaggtttgttaacgaccaagggatgctaccagataaattattgttggagaggtccagcctctctaagttggtgaggttcgacagttcatctgggatgctgccagacaaattgttaccaagaagctcgaggatatgaagaacctttaactggccaacttcgactggtatactccctgtcaggttattccttctgatgtaaatcgtaggtgggaaactatacagcttattgtattgctgattggttgtaacgttattgggattgagaaaataggcagctctagatagttattttctgttatgttttgagacatcagagcccttagttgatagagttcatttggcagctctcctgtaagtaggttatctgaagatccaagtagaaaaggtctggaagagtt

SEQ ID NO: 11121 - DNA, 549 bp, Arabidopsis thaliana columbia
gtatttgtgagatgctgaacagagggtgagagtgagtgggtaggtactgtaggagaagaagaagaagaaaagagtctttttaggttctatgactttatttatttttctttgttagtagtgttaaagagtctggttgtggtaggaaaaatggtgatagaagagaagaaagaaatcaatgcaatgtattagatgtaaatggttggcatattaaaaaagaaaagttgattttccatcttataaatgtctttcaaagtttccaaatgttgtgaggattatataagagttaagcagaagcagaggcagccaagagtccattgtgtctgagaagaggctcgggtgaaggttctcgtcctctaaactcaacaaacacctgatcataatttggaatcaattgagaatgaaatgcaacaaatattgaaactattgtatgaaaacacaatatagtagtagttagtaataccttaagaggcgcttttcctcctccaagtgcaagtatggtgtttctgaatctctgtcctgtttctttaacagcctgtttgcaacaagaaa

SEQ ID NO: 11122 - DNA, 791 bp, Arabidopsis thaliana
cgaggttgggcagctaaaggttctccatatcctggagcttctaggtaataatttttctggcagcatcccagatgaattgtcaaacctcactaacttagagaggctggacctgtccaacaacaatctctccggtagaattccatggtcactcactggactccatttcctgtcatatttcaatgttgcaaacaacactctcagtgggccgatacccacagggacccagtttgataccttcccaaaagcaaattttgaaggaaaccccttgctgtgcggtggtgtactgctaacctcctgcgatccaactcagcactctactacaaagatgggtaaaggaaaggtcaacagaacgcttgttttggggcttgtccttgggcttttttttggcgtcagtttgattttggtgctgctagctctgttggtgctttctaaaaggagagtaaatccaggagactctgagaatgctgaactggagataaattccaatggctcgtattctgaagtccctccagggtcggataaagacataagtcttgtactgttgtttggaaacagtagatatgaagtaaaagacctgaccatatttgagctcttgaaagctaccgacaacttcagtcaagctaatataattggctgcggcgggtttggccttgtctataaggctaccttggataatggaacgaaactggcggttaagaaactcacaggagactatggtatgatggaaaaggaattcaaggcagaggtagaagttctgtccagggcgaaacatgagaacctggtcgctctac

SEQ ID NO: 11123 - DNA, 310 bp, Arabidopsis thaliana columbia
tgtgctctaaagtttgccagcaggtgggattttcaccggttgttattcgcgaagttaatgaaccgcaaacggtactcgctatggtcagtatgggcattggtatcacattgatagcggacagctacgcacaaatgaactggccaggtgtcattttccgtccgctcaaacagcgcatccctgcagatttatatattgtttatgaaacacagcaggtgacgcccgcgatggttaagctgttggctgcattgacacagtaggtgaggagacaggaattgccggaaatagtagtcttgctaagtgaagcgcatca

SEQ ID NO: 11124 - DNA, 557 bp, Arabidopsis thaliana columbia
gatgtcgaacctcccatttactttttattgaatgataagactagtctatgggctcgggttttacggagtaagtataaaatcggcgacatacatgatagtgcttggatgactcctaagggaacttggtcggctttgtggagaagtgtgaatgtgggactgcgtgaggtggtcaatagaggcattggctgggtcctaggtgatgggaagataattcgcttttggcaagataggtggttgttgtcaacacctttattagaatgggtttcggatcagcttcctgtggaagagagagggcaacgagttgcagattattggatcgagggtgttggttgggatatggaaagaatagctgttttcttaccggagttcatgagacaaagacttctcgcggtggtaattggcgggtgttatggggtggaagataaaatgtcttgggttggtacggagaatgggcggttcacagtgtcatctgcctatttaaccaatcggttgacgagatatcgaaacagtgtatgtccgtttctttgacagagtgtggcgtgtgatggttccggaga

SEQ ID NO: 11125 - DNA, 974 bp, Arabidopsis thaliana
tggaagctctcctgttagaaagttatcggaaagatccaagtagaaaaggtctggaagagttcctagccaaccaggaattgtccccacgaatcggttcatggacaggtccataacttctaccctctggagcttgatcagccaagctggtatttcacctgtcaatctgcacgcaccgataccaaaaatttggaggcttggaaatccatctgaccgaagaaagtctttgttgcttggtaccgtttcgtcgtaaaaattctttgccataatgagagtagaaagcttcttgcagccttgtagaatgctgagagcccctgtaaggttcgtcattttattgtctgaaaaagtaaagaacgacagggattccaattccagtacttgaggagatatctgtcccgttaacttgttgcctgcaaacctcattgctgtcatcattttgcatgagtaaaccgtggagggaaattcgccggtgaagctattgtttccgaggtccagaatgctgaggctctgaaaccgggaaaagtctatcgccgataaagttcctcccagctgattaacccgtaaattcaacttcacgagttttgtgcaattggcgagagaaaccgggatagaacccatgaggttattgacatggagttggaggctactcagtttcgaaagcttacctatatccttgggtatttctccttcgatgtgattagagtaaagctcaagcaatgtcagtttggtgagacgagtaatcccattatcaattttgccagaaagacggttgaccggtaaaaagagttgctcgagctcaggaagattgtagatttctttggggatttcaccagagagattgttgaagcctgctcgaagaacacttagcctcgagcatctgcttaattcttgagagagatcacgctgaaatcattgtaggagaaatcagtttggtgagctcggcgacgtgtgcacatgaaggaagggatagaaccgtg

SEQ ID NO: 11126 - DNA, 479 bp, Arabidopsis thaliana columbia
ataatgctcctgagcctagaatctgtgcagctgggacccaaagaagataagtcaacttgtcttgaaatatctttgtatgaattaatagtggccttccaatgtctacaagtcatggaagcaaatgcaagtgattttacatcatatctcaacatatgaaacacccgtgctaatgcatggccatccaacagaccccagtaaatccccacggtgccagcagatctatttccttcgatattgaaggttaagtccccacataaatcctcaaatgtcaactcatccttctgaaacatttgggtatcttccatttcagaatcttctccactttcaccagccatcaagcgagctcttttcgtatagcaagaattcaattctgatgtttatgaaccaaagcaaaaccgaggagtgataaatgttacaaaagaattaagatgcacaaattgaacataggttacctagaaggactgaagtcaagaaggaga

SEQ ID NO: 11127 - DNA, 587 bp, Arabidopsis thaliana columbia
gttgttgccttgatgtctgaccaaaaagaaggggatttaaaaatggaggagctgaaaattctgacatcaaaggagtctaaaacagaaaacacccaatattctctccaactttggcctgataggaaagtgcaacagattacaaactttcctcatccgtatccgcaattggcttcgttacagaaagagatgatcaggtatcaacggaaagacggggttcaacttactgcaacactatacctaccaccaggctatgatccatcaaaagacggtcctcttccttgtctgttttggtcttatcctggtgaattcaagagtaaagatgctgctggtcaagtccgtggctcgccaaatgaatttgcaggcattggatcaacttctgcccttctttggcttgctagaaggtttagcattgatactgttttttgctgtttcagtgtgccggggtctatatcactgagcttgttgatcgagtgttagcttataccatctggatttgtctgcactgtgcaggtttgctaaattatctggacctactatacgtataattggtgaaggtgatgaagaggctaatgataggtaaagtgata

SEQ ID NO: 11128 - DNA, 577 bp, Arabidopsis thaliana columbia
tccagagttgaattccatccacaatggctcacaaaacacccaatggctccagaagaaaggacctcccgttgtggagcccatctcaccactttgactcgatccgacccaagtttgattggttgttgatcaccagtgacccacaaaactggcctggtgaatggatcaacataacttattacataatagacacgcatagagtaagtagggtaaaccggaacacacaaacccggttatgtccaaatcattacctcttggtaagctctagaccaattgctagctcttctaactgagggttgcccatgaccccaaaactcccaaaggcaacatatataaccgaaccgggaatctgccggtccaaccaatctagacaatcccggtcatgaggtaaaaagcttcctagtgacgtggatccctcttcaagactatgagcccaaccaatgggcccaattggtactatattcgggcccaatccaaatgctgcagtttcaagttcatggacagagttacacaacaaccaatccgttgactcgatcgagttattgttttgaagcataagttggaatatgtttttctgaga

SEQ ID NO: 11129 - DNA, 588 bp, Arabidopsis thaliana columbia
tgaagtttattttttgtgatattttcaggtactcatcagtttattatataatatacagattttttttttcgacatataatatttagatatatctaatacatatattaaaccccatatatatatcaggttggatccaacttatccggatctagattcccgaaaatctgagtcctaacctgttttttttttttttactaacctgtttttgaattggatcggataaccttcaaatattaggtcaaatcgtaattgagatggtagctgcacttgttgataaatttttgagttcttttacattttaatattattttaatatattatccagaaaatataaccatttgcccaaaaaaaaaaggaaatcaagaaaatattgacgatattgtacatatatttatcgtcatatatattcgtctgtgtgtgtaatgtgtttgacgtaccatggattgctacttgtttcagcgccgtccttagcagttgatttgagagaacgatgaagtgggccaatgacgaccaccttgggtgtataggcttcaggtttcactactcgcatccgatttggtactctataaatgcagggtcctgaacttt

SEQ ID NO: 11130 - DNA, 539 bp, Arabidopsis thaliana columbia
tcttatttggtttggttatttggtatgatcttttatttatcgtaaacacggtaagtaaggtgatgcaaatagagaatattgctattgatactgctcttgttcaactaaaggggttgctctcgtattttagaaactacagagaagttggttttgaagcagcaaaagcggaaactaaaataattgcagaatctatggatgtcgagcccaagttccagtgaaaagaaagcgtatcatcaaaaaaaaatgcattttgatgaggaggtggagaaacatggtgaaagtgtgatgctaagcgaggaagagagtttcaaaatcgattatttctatacaatcgtggatcaagctatagtatctcttcaagcgaggtttgaacaatttgaagagtatgggacacattttggattcttgattgatttgagaaagctcaaaagagaacctgaagatggattaaaagcatcatgtatcaatcttgaaacttctcttaaacatggaaagaattcagacaaataattcacttcatctaaatgttaacactatac

SEQ ID NO: 11131 - DNA, 435 bp, Arabidopsis thaliana columbia
caacaagtccaacaagaaatgccgagaatggacatcccggggaatcaagctagcgacaactccaacgaagaagatacactatatgattgatagagagcatattcatacattagcatgcttagtttgtgattaccagaatatattcctaagcactatgagactttatattgttggttacgttaccatgtaccaattacaaaagagaagaaaccagtatatatattctatcagatctcaatccatattattgtatggccaatcacaacaaagaccagaacagaaatgttgtgatgcatgatcttaatgagaaggaaccataaggccaaaagacttgttgagccaagccttccatctcccatgaagtcttccgaggttgttgttgttgtcatcatagagtcttcaaggttttgagtctctaacttgttagacaacaca

SEQ ID NO: 11132 - DNA, 520 bp, Arabidopsis thaliana columbia
ttactcaaactcacagcataaacaatatatcaccctcttcctagaatcatcactaaatacgataatgaatactttcaaaaccccatttctcatcatcgttgcgattagctttctggttcttgcaaccaacgctcaaaacgctcaacaagactaccttaacactcacaacaccgcccgtgcgcaggttggagtagcgaatgttgtgtgggacacagtcgtagcggcctacgcaacaaactatgcgaatgctagaaaagtcgactgcagcctcacgccctcaactggaggatcttatggagaaaacctagccaatggaaataatgccttgttcacaggtgtagccgccgtgaatctttgggttaacgagaaaccttactacaactacactgccaatgcatgcataggtataactatcacaaacagttcatatataatacaagtatttaccaactattatgtgtaactttatgcttttaaaaatttgtggcttagctcagtagctcactgtttttacgatgga

SEQ ID NO: 11133 - DNA, 576 bp, Arabidopsis thaliana columbia
tttcaatggcaagtttgatgaaaatgagatcaaaactatattggatgagtcttatcccaatcgcgctaaggaagttgaattcgaaacctttctccgggtgagtttgttaatgatctataacaaattggcaataagtggattggtccatgtcgtaaactgcgtttactatatgatttgtgataggcctttttaagtgtgcaatcccgaggatcaaaaggcgcttcatcgtttctcaagacaagtactacaacgttccatcactcgataaacgaatccgagaaagcttcatatgtgtcacatatcaatagttatttgaaagatgaacctaacttgtagagctatcttccaatcaaccctactacaaatgctttgtttgatcttgttaaagatggtgttcttttgtggtatacattaatctaaaatctacaaattattctataacatggtaaagtttttagtggtttgtgatccacttcttgtccatttggttgcacagtaagcttataaacatcgctgtgctgggactatagacgaaagacgataacacaaagaaagacttaaccatgggaagactga

SEQ ID NO: 11134 - DNA, 341 bp, Arabidopsis thaliana columbia
cctaaaagcaccttggctcattttccttccagcaatcctcgcaccacaccttttagtattaaccggtaaaggagtcatcgcaacattaatggtacaacaagcagactgccatcccccgccaccccatcggtaacactgttgaaaccttcaggtacacgagccaaccggaactagtaaaccaccaatatccatagaaacaccatttatcaacatctctatacacttcctcaacaaaggacttctctctctttgtactcttggcatattgttatccttgagcttcttctctttcttcaccttagagacaccacctctctgcccaacactacaatgccttctct

SEQ ID NO: 11135 - DNA, 566 bp, Arabidopsis thaliana columbia
gcgaaatgaagctatcgaggaatccagcttttccctgatgactaaaactgcttggcgagcttcagcaagctgtacattgcgaaaaacacaactgagttatggaacaaaatcgccactaaaccgttaatttatgataagcaaatcaagtttaagaagctgtgtgatgcacaaaaacagaacataaagagagaggccgtagatagtatcaatttccaaacaagatacaaacctcaggaaattggtcgctggaagtgattagtatgtcgagcaagtcacctcgaacagccgcttccttatttagggcagagagaagttttccggcattgtcaaccacaacaggggatgaaataacagaaatcaattttctcaaaagagtagatcgcacagttgcagattgcatactcctcatttcagagtcttgctttatgccaagccgctgaatttgcttccccgcaagtaaaatagcttccataactgcaatgaacttttcatccaaaaagttaagaccctcaagccaggtgaggaggagctgtaaacaagagctagttaacaaaaacaggggtggg

SEQ ID NO: 11136 - DNA, 580 bp, Arabidopsis thaliana columbia
tatttcttccatgtgggtctaccattgcatataatattcggtgaaatctttgtctgaacatttattgaatctttataatgttcttttttaggagaatgtggctaatgaattaacttaacagacatgaatatgcaatctttgtatgtagttgattggtcttatctaccttttttgtctaaaagcttggttctcattagttggtaactggtacaataagaattgaatgtagagcagattttgcaagatcatctgctttacgattaaagtcttttaacaaaagaaaacctaatttcatcaaaggagagagatgagtagaggatgtcgtggagaatcccatggagctccaccgaaggagactccccactgagtgctttgatcaactgctgtgaatctaaagcaattgatagttttgtgatgctaagatctaaggctttttgcatggcaaggaagaaggcaattgcttccgccataagtggagagctgacattatactctgtagatctaaacgagattttggtatgtgatgagtggcaatgaagacccatccagacctcatcttgagagtctctcgccattatgt

SEQ ID NO: 11137 - DNA, 828 bp, Arabidopsis thaliana columbia
tgattacaactctaaagaacctaaaaccaattggacgagaatgcttgaaacgtggatcagagtaaacatatcttccacttgaatcataacaacacagattctcctcgagtacactagattgattcacctaacagacactaccagaatcctttttgttgctcaggaaaacctaattgagctctcacgagtcataaaatggccaagaacagtagaatttcatcgatttagtattcaacagattctctaaattccataatcaccgaatctaaatgcttagaactagccaatcaacgcgaagaaggtcgaagtaattaaaagtgaaatgaatcaaatcagaacaatcaaaagagagaagaagaaggtaaggttctatcaccggaaagagcgagaactctgggtttagccatttgtcgacccaattttccagacttgccccaaacaccgcgactcttggccacacgtatcgacatgacgatcgattgcttggtgccttcgattgccgcctcgcaagctcgccgaagctcttcatcgtcggcgcttgacttggccattgttgttgttgcggatccagcaaggaggtgatgaccggtagaagagagaagagaaaaatagtgccaacaacgtggcaataagccttattgtagtgccaagaaaggttgaatctctcttttgttcccatttcttttcttttgtttgaatgattcatgatagtaacaacgacatgttcacaatttcaaaaaggaaacgagcgcaatcaaactcattacaataatctaatgcaccagagattgaccggcggtgggttgaagttttcattagaaagtgaaa

SEQ ID NO: 11138 - DNA, 639 bp, Arabidopsis thaliana columbia
  unsure (1)..(639): unsure at all n locations
tgtcgacccaattttccagacttgccccaaacaccgcgactcttggcgacacgtatcgacataacgatcgattgcttggttccttcgatcgcggcctcgcaagctcgccgaagctcttcatcgtcggcgcttgatttcgccattgttgttgttgcggatccagcaaggaggtaaaagagagaagagaaaattaagcttacggattaagaaagttgaatctctattttattcccatttcagtaaattggttccgaatttacgtggcaagtcattcattattgtagtgccaacaaaaaatttgaaggaaaaaaaaacgttaattaaaaaactgaagcctggacaaaagaatcgaaagaaccgaaccataattgaaccgaacaacaaccgaaccaaaattaaaaatacttatatggattttaaattttagaatccgaactgaaataaccaaaaatatctgaaagatgaataaccaaaatattaattatttttagatagaataaccaaaaatatcataatcataaaaaaatatcaaaaaatatttagaaaataatcgtaaatgtctaaaaatatctgaaaataccgnaaatttggttctatatggatcataactctacnaacagaagaccagaactgaatgaa

SEQ ID NO: 11139 - DNA, 544 bp, Arabidopsis thaliana columbia
tgaaacaaagaaagcatttttctcaccagccagagaggaaagcttcagctctttcagttgcggtttcatcgtccttggagtccgtataaggagatagcccataagcatatatactaaggcctacggatcctctttgcttagtctgtaccatcatactgtttatgttcatatgggtttagggctttaagagcgaaacagagataaatgtgtataccttgtacttcagtttatacaaatttgaagcagaggagtgagctagcaacatgttatggcctgcaatatatgtttccgtacaaacatttgcggtagagtaattcataggaggacaatgtccatacctcattccgtcgccataagaaccaatggcgaataaagtagcttcgttgattttagtccataacttcacatcctccccaaactctctgaagcatacatctgcaaaagcagtgaagtcttctctgcaatataacaaatattctgtattgtctagccagattttgtatacagaatctttaattgtccttttacatgattttgcggttga

SEQ ID NO: 11140 - DNA, 524 bp, Arabidopsis thaliana columbia
ggttttgaagaaccaactcaacacttttcaatttctataacaatttcgagaaatcaaaaccagaattaataaaattaaccagttgattctttctatatggctcgtaccaagcagactgctagaatatccaccggaggaaaagctccgaggaagcaattagcgccaaaagcggcgagacaatctgcaccagcaacgggaggagtgaagaagccacacagattccgtccaggaactgttgcgttgagagatattaggaaataccaaaagagtaccgagattttgatcagaaagcttccgtttcagcgacttgttcgtgagatcgctcaagatttcaaaacggatctgaggtttcagagcagtgccgtcgctgctctccaggaagctgctgaggcttaccttgttgggttattcgaagatacaaacctctgtgcgattcacgcaaagagggtgacgatcatgcctaaagagatctaattagcgagaaggattagaggtgagagagctcgaggagagtgatgattttg

SEQ ID NO: 11141 - DNA, 864 bp, Arabidopsis thaliana
cattcagtctgtctttactctggccgttcttctgatggcaagctatgcaattctttaatgtctttgaatcatcaacagaagcaacagcaggaagtgcatcaacttgcttctctgacaagtaagaatgtgaatcttccaccaccgtttccttgatttcgagactcgggtcacgagaaagttccacacttttcgcatctgattgacctattttactcgatttcttttcctgagctttctctgtcttgtatcctgaaggttttgatgttcttttgattactggtttttgctgtggctcctttggagcggtccgagcaacagcaaggcgctcaatggtggaacttctcagtactggcttagcctttgactgcgcggcttcaggagtcttctcattctttatcgagctcttcactgacttggtcacagtaggagttttcttggacgctaaagaacttgatacactaccaccggaactcttctccgcaattctcttttgcctctgaattaaaagttcctccattctcttctttctctcttcctcctatcaaaaaaccaaatccagatgagagaaggaaactaatcaagaaagacgaaaagcggttacggaacttaccatctcggatttggacttggagacagcagctctacttccccaagcaggtctcttggcttttgacgccgggtcaggtctacttgatgctcttgactttgcatccttccccttggagataccacgactcttcttttcttaccatctaaggtttgttcactgcagaggcctttgtggcagttatcaaatcgattctgcttgttctttgagccaaagtgttagtctcaaagcaatttcaggggtcatggtacaatgta

SEQ ID NO: 11142 - DNA, 502 bp, Arabidopsis thaliana columbia
gagaatgaaacaacaatttttaggcctcattcacggacttgtggcacccggccgcatacacgtgtggcggagcatatcttggtaacacaggttggccaaatggtaaataccaagtctgatgacaatgtacattatgccagagatatgtctccttgtggcggaggcataaattattccagtaactttctggaaataaaagtgatatttaaaatctttgaaacttagattaatctccaaaatctataatgttatctagaatatcatggttgaaaaggaaataattattactaataaaaagattaaccatttttattattgtcgatcaattagttagtatatgatatatatgctgtttagggaaactcaagttttgagttagttgtgtgactctgcatgttgtcctgtccaaagattaatatgctagcttctatagaattttaactgattgtaaaatattccaagatccatctagttgccgaaaaatgtgacaagttcatgtaga

SEQ ID NO: 11143 - DNA, 781 bp, Arabidopsis thaliana
caggaacaaatggtggagccggccgtgaatggagccaagtttgtaattaatgctgcggctgaggccaaggtcaagcgcgtggtcatcacctcctccattggtgccgtctacatggacccgaaccgtgaccctgaggctgtcgttgacgaaagttgttggagtgatcttgacttctgcaaaaacaccaaggtcttgcactcttgcttcgtttttttaaatattttgcatttgttaattaaacatgtttatcatgttaaaaaattgaaaaatatttaatgtctaaaaaatgtgaattttttggttctattgtgaaatagtattatctttgatgttaggtctattgaatatttgtatgtgttttgtagaattggtattgttacggcaagatggtggcggaacaagcggcgtgggagacagcaaaggagaaaggtgttgacttggtggtgttgaatccggtgctggttcttggaccgccgttacagccgacgatcaacgccagtctttgccacgtcctcaaatatctaaccggctcggctaagacttatgctaatttgactcaagcttatgtggatgttcgcgatgtcgcgctggctcatgttctggtctatgaggcaccctcggcctccggacgttatctcctagccgagagtgctgccaccgcggggaagttgttgagattctggctaagctattcccggagtatcctcttccgaccaagtaagtgaactttgcctttagcattttaatagtttctaactagttaatgtcagtcacttaaata

SEQ ID NO: 11144 - DNA, 577 bp, Arabidopsis thaliana columbia
taagaacctgattttctgtttcatccaacgattcaaacgaaaacagagtttttctcagaccagaaggaagttaactccggtggagattgctacggtggtgaaatcgaaaagtttgatttctccgacgaattcgatgctgaatcgattctcgatgaggatattgaagaaggaatcgatagtataatggggactgtggtggaatcgaattcaaattcggggatttatgaatctagggttccgggaatgatcaatcgcggtggaagaagttcttctaatcggattggtaaactagaacagatgatgatgatcaattcatggaatcgaagctctaacggattcaatttcccgtgtagcgttggattacgaagtgctctcagagaaaacgacgacacaaaattgtggaagattcataccgttgatttcgaacagatctcgccgcgaattcaaactgtcaaaaccgaaactgcaatcgtccaccgttgatgaggagaaatcgacggtaagaaggtggtaatctctggagagaagagtaataagaagaagaagaagaagaaaatgacggtgacgacgacattga

SEQ ID NO: 11145 - DNA, 446 bp, Arabidopsis thaliana columbia
tggtggagcgcagtgaagctcttttagctccggcgattccttctgtctcggctcgtgccggtggaatctttctcccgttggtgaaatctctctgtgttgcttgtgggagtaacgttggggatggaacagagcaccgtcttggctcgtggttgatgcttacttgtttccagacttctgtgatctcttcttctatgttcttgacggctatggctgcgaatcctttgagtgctaatttggcgtttaacacgattaagcagacgattggatggactgattgggctaaagctgcgattgtaccaggacttgtgtctttgattgttgttccgtttcttttgtatctcatctatcctcctacggtgaagagcagtcctgatgctcctaagctggctcaggaaaagcctgacaagatgggacctatgtctaagaacgaattgattatggctgca

SEQ ID NO: 11146 - DNA, 536 bp, Arabidopsis thaliana columbia
taaaattgattcttgcgcagaaagtgctttggtacctactttttttaccacctttccttttcaattgagacatcaacacattcactaaaacaaactctcaaactgctctaaacgacaccgtttagttacagataactttacttgtatttaaagtcaccaaaagtttgaatttttatttgtgcctttcacaaaagctttaagcttaaacacagtcaatggccgtccttccgccagaaaaggacaaaaaaaaagcttccctcttttcacaaaaccctaaagaaacaaaaaaaaaaccatcatgaaaacgatctcaatcttcttcgtcatcatcttaatgtcatcttctcacgcagaagacgatgtactctgtctcaaaggctttaaatcatcactcaaagatccttcaaatcaactcaacacatggtctttccctaattcatcatcgtcgatttgcaaactcactggagtttcttgctggaacgctaaagagaatcgaattctctctcttcagcttcaatcaatgcaactctctggtc

SEQ ID NO: 11147 - DNA, 620 bp, Arabidopsis thaliana columbia
  unsure (1)..(620): unsure at all n locations
nnnnnnnnnnnnnnnnnnnnctaaaggatgcgcgccaaccgggttgaagtagcgcacagggcaatgctccagtccggctgggctttttgcagatcggtgaggatctgttccaccatcagcttgcttttgccgtaaggctttgcggtgtgccggtcgggaagctttcaacgtatggaattttgggctgatcgccataaacggtggcggagaagctaaaaataaagtttttgacgttagcggcgcgcatggcgctaatcaggcgcagagtgccgttgacattgttgtcgtaatattccagcggtttttgtaccgattcgcccacgtgtttcagcccggcgaagtggatcacggtgtcgatagcgtgatcgtgcaggatctcggtcatcaacgcttcgttacgaatatcgccttcaacaaacgttggatgtttgccgcctaaacgctcgataacaggcagtacgctgcgcttactgttacagaggttatcaagaatgatgacatcatgaccgttttgcagtaattgcacacaggtatgacttccaatgtaaccgctaccaccggtaaccagaactctcataattcgctccattaggcttatggtatgaaataccatagcatac

SEQ ID NO: 11148 - DNA, 474 bp, Arabidopsis thaliana
tgacgtaatttaattttagatgatctatataaattagattttttcataatttcaaaggttatgaccgaaccagatagaaaccgaactataccggccgagaactacagaaatcgaaattgatgtcaattgtcaaacacgtttcttgataggcacgatacataatggttcggctttgtgcaaggtagcaccaaaggcctcattcatatccacattttcaggaactacgccgttttgatactcccagtcaaagccatagagaagagacgcaagaactagatgcattatcctaaacgcgagtggcattcctggacaaatccgtcgtccagctccgaacggaatcagctcaaaatgattacctttcacatctattcctcttcccaaaaacctctctggctcgaactgcgtcggattcttccacacattcggatctcgccctattgcccacacgttcacaagaaccttatttcaaagcac

SEQ ID NO: 11149 - DNA, 575 bp, Arabidopsis thaliana columbia
cttattttgcagctggcttcttcaccccgtgtctggtacagaactgctgatgatgatatttacgatactgtccctggcgatctcttggatgatgatgatccttggatccgtaccactgattttactcaagttggggcaattggtcgatgtcattcatatcgagtgctcatatctccgcggtatgaaaataaactgagaacagccttagattattttaggatgcggagggtgcaagaggaacgtgtgaggtggcctccccgtatccgtaatgagccttgttttggggagcctgtgtcagatcatttcttctgcattcatcacaaggaaggaatctcttttgagatcatgtttctagtaaattcggtattgcacaggggtgtctttaaccagtttcagttgactgagcgattctttgatcttctaagaaaccaacccaaggacgtcaatatagcttctctcaagcatctctgtacctataaacgaccagtttttgatgcgtacaagaggttgaagcttgttcaggaatggattcagaaaaatccaaagcttttagggagtcatgaacaatctgagga

SEQ ID NO: 11150 - DNA, 524 bp, Arabidopsis thaliana
ttaaagaattgtcgatcaccgctccttgatttgcccttctgtagccatcaccagagccaaaccgattagattcaatgtgatctatttgtttgctatatcttaattttgccttttgcaaaggtcatctctcgtttatttacttgttttagtaaatgatggtgcttgcatatatatctggcgaattaatcggtatagcagatgtaatattcacagggatcactgtaattaaaataaatgaaggattatgtaatggaaaactttaaacatctccctgaaccgttccgcattcgtgttattgagccagtaaaacgtaccactcgcgcttatcgtgaagaggcaattattaaatccggtatgaccccgttcctgctggatagcgaagatgtttttatcgatttactgaccgacagcggcaccggggcggtgaccgagagcatgcaggctgcgatgatgcgcggcgacgaagcctacagcggcagtcgtagctactatgcgttaccgcagtcagtgaaaaatatctttgg

SEQ ID NO: 11151 - DNA, 611 bp, Arabidopsis thaliana columbia
  unsure (1)..(611): unsure at all n locations
cctgagttaagatatttacctcgttaagaaaaagcgtgataatgctaatgatggtgttgggtgcacaaattgtggccctaattgcgatagaagctgtgtttgcaggtatatttgttaattaaccaaacaaattttctctgttaacattcatttcgttttgaatagtttccgttttgaaaaatttctctcagggttcaatgcataagcctgttcaagggatgcagctgtcctgaaagttgtggaaacagaccattccgcaaagagaaaaagatcaaaattgttaaggtaaaactagtctctagtttatgattcttgcattacactcttcttgtgtttttttatcttgacatgtcatgttattggttttacagactgaacattgcggttggggagttgaggcagcagaatcaatcaacaaagaggacttcattgtcgaatacattggtgaaggtaaactatcttgatttggtctttgagccttatgtttgtggtggaaagcgacagagtttttagtgatttgtttcactctatccacagtgattagtgatggcaatgtgacnaaggctttgggatatgaacacaaaggcatgaaagacttttacatgtgtgag

SEQ ID NO: 11152 - DNA, 602 bp, Arabidopsis thaliana
tcatcagatttgaaaacagtcactaaaccctacttttataccatcttcttcctccactgacttcccatttctgcggatcagagaccaaactttaaaaaaaaaactgctttaccctctggatatcactgcccgaatcatgctgctatcaaactgttcgtcgtccttccttctcatctcaatgatcttcctgtgtgagtttgaatgcacagctgggatgaaggtggggcttgaggctggtcggtattctggaactaggcgaccagatctgaacctcactccgcaagcattgcagagggtcttcggtccactgggtccttccctccactgtggggtcttggttgtctcgcaatgagtgcatttgcggactatcacatccgagttgcttgcctccagagtggaagagaccgtgcgggtggtcaggtggatcttgcgtttcttcttggcatgttgctcagaagaagaagtaacactcggattcaggtttgcccagggttgacttctcgggctttaggggttcagatgggaaaatgtagctaagtctcagtgttgtggggcgtttgcgcttgcttcgcatgcgtttcacagggaaaccaatctctgag

SEQ ID NO: 11153 - DNA, 595 bp, Arabidopsis thaliana columbia
gttccatgttgaacatggaaagagtctatagaaactaactgattgtttttaaattcaatatcaaatattaattttttcccggcaactaatagttcagtgtctatgtttataatgttttgatttataaatgtttcattcaccatgtcaagattgataactaggagccttcaggtcccaaaactgttttcaaaagaaaaagaaaaaaaatgatgactagggagaaagtgtacaagtctcttaagaatcaccacaaaggatgcaaaaagaaacaaatcaagacgggagaaaccatcgagcatcctttaagctggagagacctgggaaacgtttgagggtctttgttacaatattgaacacacagatgtcaggagatgaacgtttctggttagctactcgatcatggcgagtgaaatagatagagtttggttctataccaaggtcactatcagcaggcacggtgatacccaaatccagaagaagcgcctcgtctcctaacgaatctacctcaacaagattcttgtaaataactcactcggggatggattaggatccccttgtatagaaagaagatcctcgccttgttgctgcgaaagat

SEQ ID NO: 11154 - DNA, 560 bp, Arabidopsis thaliana columbia
catatatattccatggaaaaaaaatgtactgcgcagaaatgtcctacatgcatggacacacgaaacctatataaaagtggtctttcaacaatggtaaaattaaggtataaacctttggctgctgatcaggcttaggaaattgtcttatatgcacattagcaagtaataagatcagatgctccctttgattagccacattgtctttctgcagaaccatagcataaacaagaaaaattgcatgttagcaagtaataagattaagtgctcctaagattagctgcattgtctttccgccaaaccattaaagaatttatagattactctcaacaaaagcttaatgacaattggcaagcatcacgaactagaaaaattacctgaaatccaaacatttcttgaagccaatcaagcatgtcttcatctttctttttcttgtgaccttctggccaaggaagacctctagtattgcggagagcaagaacagcagcttggatctgcagtaaggattacatcaccgctgataacatattacaaataataacaatgcccaacaagaagaggac

SEQ ID NO: 11155 - DNA, 720 bp, Arabidopsis thaliana
ccgaaaatacgcgacggggctgagaactaaccgagcaacggccaccggatattggaaagccaccggcaaagacagaaccattctaagaaagggtaagctagttgggatgaggaagacattggttttctatcaaggtcgagctcctcgaggccgtaaaaccgattgggtcatgcacgaattccgtctccaaggatctcatcatcctcccaatcattctctgagctctccaaaggtatacacagttaaataatccagttattgatcgtcagttaatctcttcttagcaaatctgtaacgagtaatatacgtgtttatgtgttgttgagggaatcaggaagactgggtcttgtgtagggtattccataagaatacggaaggagttatatgtagagacaacatgggaagctgttttgatgagacagcctctgcatcgcttcctccactgatggatccttacatcaactttgaccaagaaccctcttcttatctcagtgatgatcatcactacatcatcaatgagcacgtaccctgcttctccaatttgtcacagaaccaaaccttaaactcgaacctaaccaactcagtctctgaactcaagattccatgcaagaaccctaaccccttgtttactggtggttcagcctcagccacgctcacaggcctcgactcattctgttcttcagatcagatggttctcagagctctactcagtcagggtaa

SEQ ID NO: 11156 - DNA, 482 bp, Arabidopsis thaliana columbia
tgaatgatttgttcacatatcattgatggatatcaatcttaaaagaaaaacaatatctggcttaagcatcccacaaaaccaccaaacaacaagcatagaaacttgggagttgatgaaatcaaccttaaggcgctgagagagatctttgaaaccttgcacaagctgaggccaaaggcgctctctttctgttgaatccataccttcaagtttgctcatggcctctgcccacattatctaccaccagatacgagtaaaaccttcagaaatatctccgagagatcatatagagactaatttaaaagattcattagacacaagaaagctgcacatttccatgatatagtagaacagatgaagaagatactcacatctgatacagctgcaggcttcacccggtactgtggttcagtcacactgaataaaagatgctacataacacaggatactacagttaacatacacaaaaatcatcaccacatagc

SEQ ID NO: 11157 - DNA, 597 bp, Arabidopsis thaliana columbia
gaggatcagaggatcccccctttagttgggcctttaatatccatcccatggcttccagcataatacagttctgctagcttcacaaagctataaacctacaaaaatattcattaacagaagataattatttgaaaatggttcattatcatgttttgttaagagaaatgagaaataaaattgtctaacaaaatgtaccttgtcgatgcatctaccagtaactatggaagttggaaaacacttagccatttttttcactgttcttctcatctgtgaaacataaaacataaattgatatatacaaaaataagagatttgcaaatcaaaacaaaaaacagaaaattatggaaatcgatcttgattgattataagaaccttgctagtcatgaaagctctgtctggatcatccacgatcggagaaagagtaccgtcataatcaagaaacatgacgatttgtttcctcttgcttcttcgatgattcgttcgaacatgttaagtgctgatggatgtcgtttctgatcagaattagaagacagataaagttaagcattactttaagaattagaaacagactttatgtgaggagaaaagtgtgtaatg

SEQ ID NO: 11158 - DNA, 535 bp, Arabidopsis thaliana columbia
agaagtttgatgctcaaagaattaaacttcgtaatgaattacgtgttcactcttgagacttggtattcatttttcgtcttgcgacgttaagaatccgtatcttcgagtgcccacacagattgtctgataaattgttaaagagcagtgccgcttcgctttttctcagcggcgcggggtgtgcataatacgccttcccgctacagagtcaagcatttctttgcttttctctgttgagattctcaggagaaccccgccgacccggcggcgtgtttgccgttgttccgtgtcagtggtggcgcattatagggagttattccggcctgacaagcgaaaaatataaaaactttatcgttcgctcacttttcaggcaaaacatcttaaatatagtcttttccgtctaacttatagacaaaaacgagccccgaaggctcgttttatcatttactggacggcgacaatccggtcttcattaacttccaggcgaatcactttacccggaaccaattcaccagacagtatttgctgtccagcgggt

SEQ ID NO: 11159 - DNA, 540 bp, Arabidopsis thaliana
gatcccgtgattagtaagtggaaggcatataggctcagtaaactaggagtgattagtaagtcgaagatttacttggaaagacggctggaaatcagctggagctccacccttctcatcaccaccacgtgggcctccacggtatccatcacggtcaccaaatctgggacggtctccatcagagcgaggtggtcctctgaaaacaaaagccaaaacaatatcagaaattagccaatccctcagaccggacaggtcaagggatttaaagatgaaactacctttggcgatcaccaggtgggccaccaaagggacgaccaccgggcttagcagacttcttcaaagtagcagggacaacatcggaaggaaggttaagataagttctcaagaactcaattccttcattagtcagaaaccaataataatgcatccacgcaaatgtctccctaacgtactccttggacttgaaactctgcatgagcttaatcacttgcaggtttggtacatcaatcaacggatgctttgggagattgaaatccttcttag

SEQ ID NO: 11160 - DNA, 547 bp, Arabidopsis thaliana columbia
atgagatgaaaaataatggtaaaatacacaagttggagaatatcataaaatggaagtgatagcagcagtgcagacatgacaaatgactaccccagaatattaaatgaagctaccttgtggagaaagcttggtgataactggtaaacttgatccgtaaagccacttcctgcatccatgatcaaagcccagagatccgtgcaagaagccacactgctgataaataacccatcctcatttcctttttcaatgtgttgtgcaagccttgtatcagtaacattataatgatatctgcacaaagataaaagacatgtcagctgcatggtcatcaacgtacagccgaagaattctcaagtatgatccaagatgtcaccgttgtttcattggtctgtgagcactgtaaatgctgatccattgtgttgctggcatgcccaatctgatcttctttgttggttgttcacctcctcgtccattgtcagcaccccctcttttgaccacttgatgtatgagcttcaaccagacaaacacgaaaaaactttagacattcaga

SEQ ID NO: 11161 - DNA, 582 bp, Arabidopsis thaliana
tgaatgtgcagatttaagatgatatacatgatcatcaacctgttctcacctgatttgaaggcaatgttgcttgacctggtttaggggaaaagtcactaccggcaccacggatcccagtgttactaggtgggcctacgtttcgtgaagtagctggacgccaaggatttgtgtggcttacatccccactagagtcaccaaagttagaggtaggcctaacaaatagagatgaggagaccggggtaagtcaacatatataattacctaatgagcataatcatgatctcctttcacaccagttaccttggtcctgaagcttgaaaacgaggccctgaaccaagtccaacaggaggtgccatttccctggaaacagaaactacttaaggatatctagaaagcaatgcttcacattccagtaataactggagaaggaacagggtcccaactctccaccatgtccaaaagattctccacaaatatactcagacagaacaaagaatgaaggtatatacaatttacttgataagagtattaggattaatcaaaatatagtacccaaggcattaccttgactcgccaggttta

SEQ ID NO: 11162 - DNA, 566 bp, Arabidopsis thaliana columbia
cgtgattcacattctccagactaactaagaacttttgtaatttggtcattaaagctaactagaacaccgtcggcgggaagaggaactttccgaacatcttttcaggaggaagcatggagaagttacaataaacggatgcaagaggagtatgaggatgagttggagagagtggtaagtctagatttccttctcctactgataacttacgttggcaagacaaagaaaataacatagtcggtgttctacatgtaaattgtgtaggcatttcacaaactactttgatcgttttatttagtaacattatctggagttactttcaaattttcagcaaccatgcatcttagtaaaccgtttatttagatttgaattgcagcttgtcacaccaatgaaaatgattataaattactttgaagatacatctcctccatttaatccatgatttcgtagaaacctgttattggagtgtagaaacacttgaacatgcgttcagatctgttgatgctctgttacaggcacgtattaggcgtatgaaagggttttcacagagagaggaatcatttagaagg

SEQ ID NO: 11163 - DNA, 725 bp, Arabidopsis thaliana
ctcttattgggatgttgtccacgtaaaacctatcaatcatcatcatcatcatttacctcccttgattatgatatacttaaaatcaaatattttctccatttcaaattagatgcttttttagttgaatatatataaatatatctaaaaatttcctaaaatgatgactaaaatgtacgtcacccatatcaaattgtgaaatgttttggaattctagtttgtttcaaaatatctaattcttgcatgcatattacatacacactatcgctatttgtcgtcatgaaatgaatagagaagataaaaaataagaagaaggagtgtgattaacgtacacaatttggtaagggttccaaagaagcccataagtgtggtagtgtttggttggattgaaccaaagcaaaaacctctcttctctgtttccttctccatttagaaacagatttgtctgtaacgttaccggttttccgttgttgttccctagaaactcgaagtcaatctcgtcgtgaccacctcctttcgacgtcaactgttattaattacatatatagacaacttatcaatatgagttttgaattagtctaggtataaatgtatataatcaagaatacaaacgtaaaaagcggtgacgatgccgccagtatttcctgaaggcactttgattctcatttcaaagagacctgatccgtagcgtccttggattcgaaccaccacctgtttcatgtagaagc

SEQ ID NO: 11164 - DNA, 556 bp, Arabidopsis thaliana columbia
agaggatcccccaactttcgtgcaggaaagcttcatcttcaccaccatacgctggctttacatgctcccctgtcatgggactaacactaccggccaacataccatagagctcgaaagccatctgacagatacggaaaatcataatcaaacttatacagctaggaaaatgttattcttcacagtagatataatcggaaatcgcactgactaaagtgaatccatacatggtgatatatataacagaggcattctggcatgaatctcaggtttgcagcttctccccatattaatagataaagtcccatgtagagcagtttacgctgctgtacctcttgctgaatagtaggcaaccttcaaatgccaacaagaggataagtagacaggaagtatgaggcatttagtatcatgcataagaactcaaatctttcttttattttggttaagatacaaaaaaaatatgaaaactctttgaggcattacaataaagagccctcaccagaggctgcttttccggcccaagtatttgcaccactttttgtagtttctgaaaagtttc

SEQ ID NO: 11165 - DNA, 657 bp, Arabidopsis thaliana
aaacacatctgtggcacatgtagcctttcccgtgttgactagttctggtgcaacgtgtcccgtagtgctgtgtctgcttccatgtccatagtctcctagtcgagcgtttagctctccgtccaaaagaacgttacttgctttgacatttccgtgtatgagaggtttttgaacctcagcgtgaagatgttgaagtgctgacgcaataccctttataatacaaaaccggtgtacccatttgagaactggtaggtcgttgctgaacaagaaccggtctaggcttctattgataacatactcgtaaacaagatagatctcgtttcctttgctgcagtaaccatgtagatcaacaagatttctttgttttaccttggagattgcatcgatctcggctattagggctgtcttttcttgccttgtgttgcaagtaattctctttacggcaattatctctgtaggagcaagttgccctttataaaaactcccagagtttccctctcccaaaagcttagagttgtcaaaacctcccgtcgcgctggaaatcgtctggtgggagaatttccgtgcgcctccggtgaagttttccgttctacgaaaaaagcaaaccgctaagaagcttaagatcaagattccaaatattgctgatgcagcaatgattat

SEQ ID NO: 11166 - DNA, 527 bp, Arabidopsis thaliana columbia
tctccttggcctagttccaaaacctccaatgaacatggagagcgtgaagggttacaatttcacggaacttgattcagcaacaagcagtttcagtgatctctctcagattggtagaggtggctatgggaaggtctacaaaggccatttaccaggtggtctggttgtagctgtcaaacgtgcagagcaagggtctctgcagggccaaaaagagttcttcaccgagatcgagttgctttcccggctacatcaccgtaaccttgtttctttgcttggctactgtgatcagaaaggagaacaggtgagtcacttattaacattgtaaatttcaagatagtcttgagttgacttgttatgcctgatttcagatgttggtatatgagtacatgcccaacggttctcttcaggacgcactctctggtaagttcctaccttgtcttgtatatataaaagtgttgtgggaggattgagatagatgaatgtgaaactgcagcgaggtttagacaaccactgagtttggcgctgagact

SEQ ID NO: 11167 - DNA, 575 bp, Arabidopsis thaliana columbia
cctagcttgtttacaagtgaagaacaagtgtatggctgaaatggaagagaggcaagtgaaattaaaaaaacaggtcaatgacttggaagatgaaattattagaatcaagaatcaggttagatactttaagagttttaaaatattcatcaaccagttagagttatataagttgactttagttttgtttatgttacagaggccagaagctgaaatgggtgaaaactcagctgcaagagtaacatattccttattcttttcatatcatctatgtgattcttcttatttaagtttataactcttattttctcataattttttgcagagtgttaacagaaattcacatcgtaagtgtgtgtttgttgattggtctgagactgatgaaaatgttggtgagggtcgtattctttcttcagatcctgatgacatagtgatgactgccgtctatgtcctacggacctaaaagtgttagttgaaactgcatatcagacagatgcatttctatggagacctgcacacaagatctttaatatgaaaaaagctgttggacatataatcgcattgctagctgataagtg

SEQ ID NO: 11168 - DNA, 490 bp, Arabidopsis thaliana columbia
agccagtgtgctctaaaggcgttatttggtgagccgaaaagcgtgcaggcaaccgccagtttgctggcaagcggcgttgacgccagggcgtggtggtgatggattacggtgatttcagcgtcaccttgcagcactcaaaagtcagtgattctgtcctggcgagcgagattcagggcgaacaggatcgctggtgattgaaaaactgtctgaatgccagaaagtgtgcttcgtgccgcgtggcagccaaatgcaggatctcacccagccgcagcatattaataccatgctctacgaagcagagctgttcgctaccctggtggatgagcatctggtggatcatccagggctggcggtcagtcgcatcaccgccaaactgctgaccgagatccgccgccagactggggtgatttttccggcagatagcgtaaaactataattgccaaagtaaaacagtgtaaaaggtatgtaacagaccattgactggctgaat

SEQ ID NO: 11169 - DNA, 544 bp, Arabidopsis thaliana
cccacgccccgtcatgtttggcttgaagaagggggcatccagatcgagagggcgtattccgtaacaaacatgtttaggaagcttatccactttgaaaccctgtaaccaccgcacaaaggttcaagctttataccaagattgatggagagcagatctaattttacgacaaaccttgctctcgtggtaatagcgcgtgtatcgacgaaactccaattcctcatcatcctcaggaggctcatcaggcgactcgtagtctgagccttcgaaactatcgaaaccccaaacctggtcatcgctttcactgtttctctcctcttcctcgcatccttcatcggaatccgccggctcaatcgtttcggccttgcgtttcaaagagagatctgcgtccatcacctcgggctcaaccgtatcgacatcactggatttgggatccattttttccccaatttcaaaaaccctagaaattctgaaaaactagtttgagaagaagaaaagtttcgtggtggaatgaatgattggctaacccttagtaaaaagatttggt

SEQ ID NO: 11170 - DNA, 534 bp, Arabidopsis thaliana columbia
cgcccatctttcagaaagtcgcttcttcgcctctctgcagacagatgactctggagaaaatgaagctctgctgaaagaggaaggagagaaaagactgtcaaacctatttggacagtcccaagaatgcctagatgctggtgacatgatctcagaatcgctaagatttcccactaaatcttcgttatcagacttattaaaagaactgtcatcaccgatatagccattggataggacagaagaagactgagtctcgttcctgtggtgacccatcagattttcgcgcacttgacgagtaatttcctttgcaacttctttagtctcaacatcttcaggctcatcaaaatatcccctactgtgtaaacccttggagaggattgggatgatgatacagccttaatatctagagactttcctagactaggcttcaagacgacaattcgggttggctgtacagtgtgttcttcggttccccggttgacataaggtgacgggtaaccagatcacggttccccatccagtctcttgacttgatga

SEQ ID NO: 11171 - DNA, 472 bp, Arabidopsis thaliana columbia
tcttgcctatgggacaacatatgtaaaattaggattgctatgagggcaagagaaaattatgactaagcattataaaccagtactgaccctgtgacacatgatagacatccgatgcagactcggttgcctgttaaaaagaacaacatctccttcttgcaaatggcggtcaactatgcagccaatggccagttcatcagcaatacgcttgcgataatcaccaaccaaagtcctgaaatgaaatgtgttaatgtccccatatgatggtcaaacagccaaacacatgccaatgaccctatgaggactacgcagtccttcagtggtattagcctattaggtatctacttcagttcagcaatagtgtttacctatattcttgaaacaaatcgcagtggtttgatttgttacttgcacgttttcatttctacctatgtcaattacctgtctgtgtgtgtctatagcatgaaccaaacct

SEQ ID NO: 11172 - DNA, 925 bp, Arabidopsis thaliana
tcagtgtcaatgtgagcgctgacatggaagtttgccacaccaacagtgttaccagagacctcagagtttgcttgagccaaggcagtaagttcatggaagtgagtagcaaacagagttggtgctcttttcacttgaaccagatgctcacatatagcccaagctaaacctgatatattcaccacgatgatgtcaagagcactgaaatctcacatatgaccataaaaatgaacatataatagaaaacttactaaaaacatccaaatgaaagaagagaaattgcagagaaactaaccaaaaccatcataagttgatgttccacgaccaagttcatcgataattatcagtgacttatcactagcgcctttcaatatcgatgcggtttcaagcatttcttgcataaaagttgacactccacgcagctaacacaccaaaggaaaaaaagttggaataagggtgttcaggatatcagcagtttttcgttcattgagggctaaacttaaactcacttggcaatcgcctgctcctacacgggcaaagatgcagtctcttatggaaattgatgctttatcacaaggaacaaaggaaccaacttgagccatcagcacaatcacaccaacctgggatttataatggccggaaaccgactttagtcatacgtctatgaaacaaaactgaactagaggaaatcatcatacctggcggatgaaagtggacttccctcccatgttaggccctgttactatttgaaaccaactcttccctctcatctgatttcaaagaacagtaaagggcaaacaaggatttgttcaagtcaaaagggaaacaagaaaaacaaagacgtctcagtttatttccacattcaatacttacgagtctgcaatcatttggtatgaaattccccaatcttgagcttctacacatggat

SEQ ID NO: 11173 - DNA, 536 bp, Arabidopsis thaliana columbia
taccatggcttcccaagctcctcctcaattagagccattgctacatcatcaggatatgaagggaccttcacataaacaaaaaaacagacaagtttagcaatcaaaattatttgggaatgaatgaagggaaagatataattgcagcatcataccttatcacacaacttttgtagctctgtcattgcagcgggtgacaatatatctggtcgaatactacaagcttgcccaagtttaatgtatgctggacccaaggaagttacaatttccctcaattcaattgccctagcaacctcattctgaaaatgatgacagacggaaaatgagactcaaactgcatataaaataattgcaagcaaaagagaattgaaacgtgaacaaagatatacacacctaaattgaataaaatactacaactgtgtactacatcgttttcaaagatttaaaccaacatctattgctcaaatgcactggggattaacacagttatgttgatcataggctctgcataaaaattcacatcatgggctccatgcttg

SEQ ID NO: 11174 - DNA, 487 bp, Arabidopsis thaliana columbia
gagtctagagggtgtcaagatcgttgtgtacatattgatatcttgtatcgaaaccctctttcttgtccagtgtctcaaataaaggtcgatactttagagacctgttggtgaaaaaacttggaggaaactcgcacgtgaaggaagtgagaggcgaagggcttatcataggagtggagctcgatgtgccggcaagctcactggttgatgcttgccgagattcgggtcttctgatcttgacagcggggaaaggaaatgtcgtcaggattgttcctccgttggttatatcagaggaggaaatcgaacgtgcggttgagatcatgtctcaaaatttgactgcgcttgattgaagttgttggaagagaaatgatgtggtgttgaagaagagctaatgttttatattcgatgttgtcttaaattagcctcaagtgtaccggtaaagatgctctgcacaattgaaaagaaataaaatttgacacaaaacttgatg

SEQ ID NO: 11175 - DNA, 523 bp, Arabidopsis thaliana columbia
tgcgcttgtccagagtgtgaaggcacgctcgtcttggacccggttagcttccccaagtggaaactcaactgcaacttgtgtagttgtatcgttttgcttccggaaggtgctcatcgcatcaccaccactagtaaccgctgtcccgagtgtgaatcaggcatcattggggatcgatttcaacaagaaaactactcctctggagaacggagccactctgcatcaaggatgtgttctatgtgacgagttgcttctctcacttgtagaagtgaaacatgggaggtcctttgtgaggcgtggaggaaggggaaggggacgagggagaggccgaggcagaggagggagaagaggctcaaaatctgtcgacccaaaaatgagtttcagagacttttgaaactctaaactttgtgtttatgtctttgcgttacttgcatatcattggaaattcaaaattctgaaatactgcctgcgtttcaaggaacagtttataatctttttagctttacttcgattttttcacatacac

SEQ ID NO: 11176 - DNA, 684 bp, Arabidopsis thaliana
taggatgaacttaactgacttattacttgttttagttaatttgctgaccaagttctcgagattgaaaagaccagtcttgtcttaaaattgacaacttgtgtttttctgaaccaaactaagcaagttgcagtttctattttaactcaaaaaaaaaaaaatggcagtttttgttgttggctctgtggctttaatgtgtcaatgtgaacattaaagaatgctcctatgggtaaagtgtttagaagaccataagtccacatgatgatacatacttcggtggttaatgtgtacaaatgtattgattctccacaccttttggtacattggtctacttagtattaagtaactacacttgatcaaaattttgggaacatatgtgttacctatgtgttgattaaggtattagtgctgatttgcgctttttggaatttttttctgtaagtagaaaggagagcaaagcagcggtcaagttcctaccggagtatcaagcatgtcggatatgaacatggagaaccttatggaggactctgttgcttttagggttcgggctaaacgtggttgcgcaactcatccccgcagcattgccgagagggtaaacaacattcaatctttatttcaatgttttggaagtgtagtgatcaaggttctcttaactttatacattgaagtttagtgatacaacttata

SEQ ID NO: 11177 - DNA, 507 bp, Arabidopsis thaliana columbia
tgggaaaggcgactcctaaccgctatccacttggcgaaaaaggctctctctgaggctttatctcctgccgttgcaccaatcattacatctacagtgacaacaacgtcttcctctgctgaatcaagacgctctacttcctcagctagcgggtttcttaggacgcaagaaacatctacaacttatgcctcaagcaccgaaaatatcgcgaaattgctcaaagggtgggtgaaaaactcgccgaagactcaaaactccgcggatcaaatcgcttctacagaggtaaaagaagtgatcaagagtgatgatgggaaggagtgtgcaggggcatttcagtcattttctgagtttgatcactcatatcaacaggctggtgttcacctgatcatgagaccaaaccagacataactggatgctgcagtaaccaaagtcaatggtctttgtctgagaagtggttgtctgaggattctggtggacagattggtgactattctattggatgaaaacact

SEQ ID NO: 11178 - DNA, 515 bp, Arabidopsis thaliana columbia
tgcctaacatgtcaaaactggccaacattcttgataacgaagcaccaaggcaggagatgagggatatatccccaactgctgctggcttaggattgccagttactggtgggaaggtgtcatggttccggaaatgtacttcaaagatgcttaagttgtccccaataaaaatgacagaaccctctgttacttggaatttggctgatcaagaacctcaatctactgagcaagctaacgtgggtgggccatcaactaccgttcaggcagcgacgacctattcctttgatgttcaaaaggccgaatctgaaactggcacaaaagaagtcgaagtcaccaatgtaaactcagacggtgatcaaagcgacatcaacagcaaggctcaagaagtcgctgcagattctttgtccaatctagatgttgatggccaatcacgcatgaaagggaaagggaaagccagaaccagaagaacacgctctgtcacagatgttgttgatgatgctaaagctttatatggagaa

SEQ ID NO: 11179 - DNA, 422 bp, Arabidopsis thaliana columbia
tctaaatttctttattttcaggatggaccaaaacaatttggtgggggatctaagctgccgttaccagaggaacaaaatgaaaagacaaatttaacatctctttcagcggcaaaggagaaatctgattctgactcagagtatgatatattggactttcccgaggttccaaatgtcttgctgcgaccaactcctggtgctacctctgtaaatgcaccggatgcagcgaaatcagccagttatgaacatacctctcacgacttgccctttgattcagagaatgcaggagtcgaaaaaacggcttccaaaagagatgaacatcctgcaaaagcaagctaaactgtcgtggaaggccaacaatcttcacccattctgatggaatctttcgaaaagaagaattactctccgccatccattgatgcagt

SEQ ID NO: 11180 - DNA, 580 bp, Arabidopsis thaliana columbia
caacttttgcgtttaagacaggtaacaatcttatgatgagaactttgtaatatgttaaccaatgatacaaaaggatcgtatctgacacttaaaatcatttattgcagattttcaatggtgtgttcttgaaggtcaacaaggcaaccattaacatgcttcgccgtgttgaaccctatgtaacctatgggtacccctcttcgtgcttacatttcaaaactttcttttcttatttaacctcattagtaagtggtagtcttaccatggacgactcttgttttcctcagatacccgaacttaaaaagtgtgaaggaattgatttacaaacgaggttttggaaagcttaaccaccagaggactgccttaacagacaattctattgtagatcaggtgcatatcatcaacctatctccttcatcaagtctggttcagttcctaaagtcaatattattgccgttatccctgtcctagaaaaaatgatgtattatcatcaatgttggattcaatttgtctaacagatatggattgtcatttatcatcaaaactctatgtcttctctatatttacatatcgtttgctgttg

SEQ ID NO: 11181 - DNA, 597 bp, Arabidopsis thaliana columbia
taattagtaaagttcaatcaaagcaaggaagcttcagcttttgaaagtcgcattagaaatattcaacgcaagagtaaagttataaaatgatttgattaatcacacgcggttacttagaatcgtttaaataaagttgtggcttgatgtttaaggtgtaaggttttgtatatacaaaatggaaatccaaatgcgtacataattgtttcatctatttctatcccttctgattcatacgcaaatccaagccgttggttcacttgatcaagcttctgtgtcatctattgatgtaaaacgtcatcatttaacggtagaaacgatgccgttttcgggtgattttgtgcgtaggcagcttgccggtggaggtggttcttcaggtggaggagggggaggcggagctctcgaggtggttcttcaggtggaggaagcagtggtggaggaagtcgtggaagtggaggcggtggaaaaagtggaggaggaagctcaaaccgtggtggcagcggtggctctggaggaaataaggctggaaaaggtggtggcagtcgtggtggcgatgatggtgacggtggtggagatggtggtggtgatacggaagtagtg

SEQ ID NO: 11182 - DNA, 466 bp, Arabidopsis thaliana columbia
ggagaatacaaatatcacaaaaatccaaatttcctttgtagcaaccatgagttccgtgggtgtatttcgtaaggaggaaatcgatggaaacccatattttgtgatattaacagaaacaaaagttgatcaaaaaagaagaaaaaaaacatattttttatgtcctgctgcacgtataaaatatctaaagttcaaacgaaagatgctcgagaattatgattatggtgacgataacgaagacgacgataatgatgctgacgaagatgccaaagaagatggcgatggtcatgacaagctgtatccattcaattcttcctctcacttccccaacacaagacgcggtgatcgacaaggcaaatgtttgcttgactgctacctccctggaatctgtaagaaccccgtagttccgcttttcaggtacaacgataaagaaccttattgtcacatatcccagtgcggtgcatgcaaa

SEQ ID NO: 11183 - DNA, 631 bp, Arabidopsis thaliana columbia
agcttacctagaaagaattaagagggatgatggtaccgaatggttgagagataaatccagccagtcaactagctgtaatgagagatatgcagatcagaaatcacctatatctctagttaaactactagaacaacacaaacacaaatcacgagatcattcttcttattcacaaagagtacaattttgttgataccaactccactaaagatggaatgctgaatgatatttataaagcaataacctgctctctcatttcttcaactgaacccaattgaagcattcctctctctctgcaagcttggcgaagttcagcttctgagagagactccacaccttcagccttgatcaacttatcatcctttttaatcctatgaagtccaaggaatggaattgcccaatgattatgtgagaaagaagacattaatttagatatatatataatctgaaatgcgtgtcttgtagagtagtaggactcaatgtcagccattggagacaagaaaaatagcaatatgagtaatgtagaactaactcctgtaatcttttccgaagcatataacgtaaatatgcatcagttccgaatgggctaatacccatgtatttgcacatatttacaatcgggacctgcaataag

SEQ ID NO: 11184 - DNA, 467 bp, Arabidopsis thaliana columbia
cctgcaagttactgtctctcaaagctttcatatataacatgaaacaaggctctatatagatttacaaacacttggtacagagttcttacaaggtcacctaacattcttctttataggttcttcaacttctttttaagtgcaattggtgtcatagctcgcaagacctagtagttctggtccctccaatctcaggttgttctcaaagctgtaccaaatgagctttgtgttagaaaaccagcatgtggtaagggaaaatgttggtcataaaaaaaaaaggaaaaaacagaacttacttttgcataggaatgtgttcaaaaggtccttctactggaattgttcccacaaatcattccctgagacatcactgcagaaagataagacaaagaaagtgtatcaatatcaagtgaacgaatatactcaaagaattgtgtggcatggtacttagcaatgctgggtaatagctggac

SEQ ID NO: 11185 - DNA, 556 bp, Arabidopsis thaliana columbia
tctagtaacggcctgtgctctaaagctctaaagaatttttgcgacgtcgcaaaaaggaaccctcttccaccacggttttaagcgtaataaaacggcgcagatccataaccccaaacctatcgaaaatatcgaatctagaatataaaaacattcatttttttaaatgttccgtgtcgggtactgtctaccaaaacagaggagataacaagtgacaccgacccttttaagtgctttttggacttacaccctgattaccgctatgacgccaggaccgaacaatattctcgcccttagctctgctacgtcgcatggatttcgtcaaagtacccgcgtgctggcagggatgagtctgggatttttgattgtgatgttactgtgtgcgggcatttcattttcactggcagtgattgacccggcagcggtacaccttttgagttgggcgggggcggcatatattgtctggctggcgtggaaaatcgccaccagcccaacaaaggaagacggacttcaggcaaaaccaatcagcttttgggccagctttgctttgcagtttgtg

SEQ ID NO: 11186 - DNA, 585 bp, Arabidopsis thaliana columbia
tgaatcggttctgtacctcaaagacaaatgagctaccatctgttcttgcaagcccagtggaagattgttcctctgagcaaacgctgaggcagcttgaatggtatctctctgaaataacgaaaatgaactttatgaatcaaaacaaaacaatagttagctaaataaccaaaacgcattgaacatatcgcctgttcttagataatgtgtctaaattgtcatatgaaacgaaaagttagtaaattaatcaaacaatgatcagaacttacaaagtttctggtgcgactggtcacgtgaaccaccaagtttgtcatgttaccaattatataagctagcaatccaagattaaagatcatgtagaagagaatgaaggccctctcttctgcattattaccatgtatatcaccataacccgttgtggagaaggttgttatggaccaatacattgctgtaacataccggataagcaaagatttctgtttccagtttgcctccgcaagtgccataaatgtcattgaagggtctggataatgtgcagcaatagaatagcagaagcaggcgccacaatgaaccacaaagagagaaacc

SEQ ID NO: 11187 - DNA, 714 bp, Arabidopsis thaliana
aaatatgtgattgagtattaggtttgtagaatgtaaaccttctactgtgctccaatttagctcagattgttagttttggctcaaagatcttatcttctattatgcagtagtgtggttcttgatcctgtttcagatttgaagtttgattgcttaggtctcgtttagtctttagccttagcatgcattgcgttgtatcaatttggccctttttgcatcacagttctagctaagcatctagttttacttctccattgaactgctagtatgtttggtttcatgactatcgcattgctctagttttgctttaaatgaccaccaacattcgtatattaatcttgtttctataagtgtcttagagatgttattgtgtaatgctgattagcctatgaccagaacacaaacatttttgctagtactacttatattgggtattatgactgacatatgatggtggggttgtttcagattgggaacaggatcataaggaagaggattcatgttcgtgtggagcatgtgcagcagtcaagatgtgccgaggagttcaagctgaggaagaagaaaaacgatgagctcaaggctgcagccaaagccaatggtgagaccatcagcaccaagagacagcctaaaggacccaaaccaggattcatggtcgaaggaatgaccttggagactgtcactccaatcccctacgatgtcgtcaacgatctcaaagga

SEQ ID NO: 11188 - DNA, 546 bp, Arabidopsis thaliana columbia
gggtaccgagcccacttgttgcagcgaatatatgctgctccgcgactaaattcgaatcagagccatctatgtaactctcttcccaacattctcttgttcctccaaacacaaaaggaagattcaaatacttacacatcgctccataaacacaaagacttcccatgaagttgtacagagttcttgaagagcttcccattagcaaaccaggtctttgaaccgaccaaacaacggaactacgagtgatcttctccttcagcaagtcctccaaaacatagtagaaattcttcccagagctctttcttggacactcctcgctgtaataatacaaactcgaaccttctccacgagccattgtctcttccaccaaagacacataatgcttcatccccgtttgaagcgagaaatgctttaacctcttagcgtttgggagaatcgcgtccaaagcgttcatcagcatcgtcttgttctgtacgcaacattcgtcggtatccaatggaaactcccagaccacgtgaacaaaacacgtgactccgatgtcttgtaatg

SEQ ID NO: 11189 - DNA, 619 bp, Arabidopsis thaliana columbia
  unsure (1)..(619): unsure at all n locations
nnnnnnnnnnnnnnnnnnnnctaaagcacagagtgatcatgctggcactgttcaggatgacgacacgcttccacttctacacatgccgcacagagcccatgtgcttcaatcacattatgccgcaggcaaaccccatttttgccgccagcgtatgcataatgtcttccacgccttctgcacactcttctttcactgcgccgcagcgatcgcaaataaacatggctgacgtatgggtgggctgatcgaacagatgacagagcacataactgttggtggattccccttatgcacaaaaccttgctcaagcagaaaatccagcgcgcgataaaccgttggcggcttggcttgcggttcagcttcgcgcagtaaatcaagcagatcataagcgctgataccgcatcctgcagactcatcaggcgcaacacttccaggcgctgtggggtcaggcgcacattacgctgcgcgcagattttttcagcctgcgctaataactcctgcgttgtggtctttccatcgggcactcaaagtgggggttaaaatgtcttactttacatgttcaggaaaacccgagaaccttattgtgcagaatgttgatatctgttttgtaggtaggtgtatg

SEQ ID NO: 11190 - DNA, 583 bp, Arabidopsis thaliana columbia
  unsure (1)..(583): unsure at all n locations
tgggtatccattgaaatgcagtatgataatcttcataggaagttcaaaccaactcgtgatattgagttccctgctcctgctccatccattgctcctattgtagagccattacctgccattgttccttcaccatccccgtcttctcctcctcctcctccaccgccaccagtagcagctccggtacttgaaaataggacttgggagagagaagaatctatgacaatccctgtggaacctgaagctgtaattactgctccagagaaagctgaagaagaggaagcacctgttaacaacagggacctcaccttggaagagaaacggagactcagtgaagagcttcaagacttgccttatgacaaactagagactgttgttcagatcataaagaagagcaatccagagctctctcaaaaagatgatgagattgagctggatattgatagtcttgatatcaacacgctttgggagctttatagatttgtgactgggtataaggagagcttgagcaagaanaacgaggctcatggatttggttcagaaagagatgctgaatctgtcacaatagtatcaagacctgtaagat

SEQ ID NO: 11191 - DNA, 587 bp, Arabidopsis thaliana columbia
tcagcaaactattttttacgaaagtctatcatgtgaccaaatgaggaacacttataatcaggaaaacgccaatgactgaaaacaaaaacaaaggaagaagtatggaaattgtacccaggctggcaacaacagagacacaattcacggcaaggctgtgctaagtcattgcgaacccttcgatcatagcaggttatgacgcatccagatagacccagcagagcaaagaataataaagctcctgcacacaacaaaatcctcatgtaaataaacaccagtagctcatacacacatgtaaaattttagaatcacttggtataaatttctttagtaacaaattttcatgaagagctgtgtaaaacacaaaattttaattactaaattctaatacacttgctttgaaaattcttatttagttaaaaattctacgaggtccagaactctaactgtatattcgtaacgtagccaaccccttaacttttgatctaaatctaactgatcacaaaacccttgcttcacttcctactacgtagaggcaatgaaatcatctaatagcaaactccttacattggaatctaagattctgattg

SEQ ID NO: 11192 - DNA, 547 bp, Arabidopsis thaliana columbia
aattaacaaaagtaatactttcaaaaggaaaatccagtgagttataagacctggttgatatcaactacttaaaactaaagagaagtcagaggtcacctcagaaacaggaaggccaaacgttacaccagagagagtagatttgattgcctcaacagaaccaagaagaggagctcctaaatcaacaacaaatcaggtatcgagctcaatccagtaagtcacaacataactcccccaattagagaaaaaataaaatggtaacttaaggatagtaggccggtaccaacagcgaaataagcatggatatgctgatcaagccacttcaaataatgttttggtgcaatttctagcctcagccattccagaaagtatctgaagacattattacccattgaatgggcaaatactatagaagggccgccacggagttttaaagcagtttcaaaggtcaacctgcaaaaaggaagacgaccagagctcttagcttatcttacataaaaagagaagataaaagacattagcctgataaggactaacttgagcttgtgaa

SEQ ID NO: 11193 - DNA, 581 bp, Arabidopsis thaliana columbia
tactgacactgttgcaggcaagtatccgaaagtgaatttcgattcgcttgttgaagctcatatcgatcttagattgttacagggccatcaaggttatggtgaaaatgatatggttggcaatgcaacagattttataatgcgtatatgcaatgtgaagactctctatctatcttccaacactcttcaggtttgttttcatcatgaaaaacaacttgtaatctttttaacattgttcaaggatttgagttagtgattgcaattgagtgatgataatctagttgttgtggttgtgtttcaggtacttacttacagttgtgatgctataccaatattcaacaacctgactcatttaaccatcgagagtaatcccgaagtaggatggcagtcattgccaggtttgctcaagaattctccaaatcttgaaactcttatcttccaagtaagaaacaaaacccttggaaagcatttgttgactcaatttttcaaagtttaagaatatttcactatgtatgtttcagggcctcatccacaaagccaccgataaatgtggagacgtgtgcttgtgcaaacatcgtgaggag

SEQ ID NO: 11194 - DNA, 455 bp, Arabidopsis thaliana columbia
cgcggcttgtctctctcccgtgatcatccaacaagccacctctacaataacaagagcaccaaaaatgcaatgaagaaaccaaaaagaaaactttccttcctcaattccaagtaaagtgtaaacttacgaagaaaagctgctccaagtgttccaagtccaaggtagacgaatttaagacgagcctattagaagccacatcattaagtagaatgagatcaccaaacaacaattgtcaaacaactaattagtaaagtttggatttttacctttgagacaacatcaacaatgtctttgttgttctgattacttccaaacgaatcgatgagatcaccaaacaacaatgtcatgaaaggtaaagacattccattcccaatagctccgattgagccacatatcatcaagagcacatcagaagaatctgcaaacgcaaatagcttgtagaaaggaactgtgtt

SEQ ID NO: 11195 - DNA, 678 bp, Arabidopsis thaliana
atcaatctcacaaatgagaagtacaacagcatttcaatcaggtagaaagtaaaatcactgtaacctgttcacattgcaagcaactttcacatgaaacaatgttttctctgcagcatgtattcaagatggagcaagaggaatacacgagggaggaaataaactggagctatgttgaatttgttgataaccaggatgtcttagatcttattgagaaggtataaactatgcaactaacatcatttatatggatgacattggctccacaacatgtacaagcacataaaattatcaatgacatcttcttcttttcagaaaccaggaggcataattgccctacttgatgaagcatggtaagtgtaatcctacttttaggggaaggacagtttcacaatactaatccatagtaagaagtaaaactggctcctctaggcataatcataaggttcacccttgcagcatgtttcccaagtcgactcatgagacgtttgcacagaagatgtatcaaacatataagggacacaagcgtttcagcaaacctaagcttgcccaaacagccttcactgtcaaccactatgcaggagatgtgagacaaacacaattttagacgctaaactgaaagtaaatacagtagctagttactaagcacatttttctgtctccaggttacgtactcagcag

SEQ ID NO: 11196 - DNA, 570 bp, Arabidopsis thaliana columbia
caaaagagagctgtgatttagattctggaaacaaatcaccatggaaaaaatagagctaccaattcacaaacatcctttgttacctataactcgttttttctctcgtcacggttgtaacgggtgtggctctgatggttacatttacggaggctaccattgcaatgagttaggctgtgagactcctgcgtttcatagagagtgtgctgagtctttacaggaaataaagcacttctctcaccccgatcatcctcttaatctgcgcctaaatgacaaagcatctacatgtaatcgatgtggaattcatctgcttcgaaaaacctatatctatgtatgttcaatctgtgacttcaagttggatttacattgtgcgaaggatgctgctccacttcctattcttgaaaactacaatctccacgagcatccacttaagctcttcgatgtatcgaaatctctcaagcgagtgagactgagagagtgcaagacgtgtgactctccatttctcattgagaaactatgttatatatgttatcaatgtaaaatactcttccatgcgagctgtgcagagttttt

SEQ ID NO: 11197 - DNA, 600 bp, Arabidopsis thaliana columbia
gatggaaatcagaacagttctcaaagctttcccgcattatccatgtgcttagcaattttttcgaggtttttgcacagtgtctgtttcttagtggtgatgtgcagcgagaaatccaaaccaatatcaactggaccagattgcttgatgggaccgagggttcaaatggtcttgtgtgtggtgacgtagtagagactagtgatgtgaaaaagaaaattattgagagcttgataaagggtgattcttcagaagtagtattggcactcaagcatctgttaattgcttctgctgctattttaaggttaaacctgcaaattgatggcattacattctcacctacatttgtctctgttctcacgaacatttcgaatgatttactgtctgtattcgctgacatgagcgaggcacacttgaattctcatttatttggttggatggtgcagttaaagttgtagaagaactagggagccaattctgcttatctaaccctacattaaacatagatctgtactcaaagttgattgagttgccctgaaggtgattgggaaatgcatacactacaaggaaaagaggctacattggaatctcatgagacaggatttg

SEQ ID NO: 11198 - DNA, 579 bp, Arabidopsis thaliana columbia
cccgcaagtagttccaccgtttttcccaatcccatttcatctgcagcattcgtactttaccacattaagaacgaaacgcatgagaaatattagaggtagacaaagccatatacaccatctagcatttaagacgacttaaaacatatatttctgaaaatattctttgtgaaagcaagtcaaaacaaaattatccttgtaaataattttctgattatatagtacatggaggcaaaatgaagccgcaaattgttcataccagcaaggataccgccctgaattcgaggtgaaaaatactctggtgtcaatgagatattcccactaaaaacaaccaaaacatgacaaattgaccagaacaaattagttcttctgtaaatggcggaacttcactgagcagaacatacactatttgttgacgatgagaggagcttatagttcaaaataaaattaaaaaggactacttagattcttttctactaacctgaatgggttcaagaacatttttgtagcagagtcaaggaatccacggagatagacaaaggtgaaatgaattggttgtctccttgtctccaacgttattgg

SEQ ID NO: 11199 - DNA, 626 bp, Arabidopsis thaliana columbia
attcgaatttgcagagtgattaacgaaaaaacaattgaagatggaggagacgaagcagtcattgatagcatcgttgccgtcgcaccaagaaaaccaaagtcgaaagtagagagagttgtgaggaaaacattcaaaggaacagctcatctatcaaatctgctcccaaccggttctggtattgagttttcaaataatgtgtccggtcctaacccatcaaggtcagtgtcccaccatcaccagtcgctggctcacctgcttcctcgtctccttatgcgccatctcctgcttcctcttctcctttaccgactccattagagacccaaacggcaaggtatatatacatatctctgtcacattttccgctgttttgtaccattcataacaacttgttgacataagcaccaaacttaatgttgcaggttaggtacgggttggcaacgtggagtgggctattagtgatggatggatcgattactttaacggaggaggagaaggaaaagtataagctcaagattcttgattttattcacgcaatcatgtcaatgctcgtcttcttcgcagtctccatgtttgatcagaacgtaacccgttgtttattcccgttccttccgaggaaaccaaggaga

SEQ ID NO: 11200 - DNA, 490 bp, Arabidopsis thaliana columbia
ttgttttttggtttaccggaaaattcaagatggtgtcgggtccccagtacttgagagcagccagatcgtacgtatgtgctgctgcttcttcactgtcatatgctcctgcaattacgcgtgaaagcagttgagattcttctgaccaaatccactctctctttttttttctctttcaatttagtaaaaaacaattgatcttttgtttcagagaattagagcttacccagataaactggtgaagttgtgacgaagttgagatcaaacaacagatcaaagaaaccaaatttatcagttaaagtccagatctttattaaaacaaacaaaatcatgagttacgaagaaaaaaagaagaagacgaaaccttgtttgcctttcttgttctgaatcgaattccaagagcttttgtcccaaagatgagcctcgaatctcccagtccatctatgtctgcaaaatcccacaaaacaacatgcaatcttacaaatgcagtttt

SEQ ID NO: 11201 - DNA, 626 bp, Arabidopsis thaliana columbia
  unsure (1)..(626): unsure at all n locations
nnnnnnnnnnnnnnnnnnnnnnnctaaagatttttacactcatctcgtcggagatgtgacgcgacgaaaaatgatgaggataagaagatgagtaacgcgattacgatggggatattttggcatttgatcggcgcggccagtgcagcctgtttttacgctccgttcaaaaaagtaaaaaaatggtcatgggaaaccatgtggtcagtcggtgggattgtttcgtggattattctgccgtgggccatcagcgccctgttactaccgaatttctgggcgtattacagctcgtttagtctctctacgcgactgcctgtttttctgttcggcgctatgtgggggatcggtaatatcaactacggcctgaccatgcgttatctcggcatgtcgatgggaattggcatcgccattggcattacgttgattgtcggtacgctgatgacgccaattatcaacggcaatttcgatgtgttgattagcaccgaaggcggacgcatgacgttgctcggcgttctggtggcgctgattggcgtagggattgtaactcgcgccgggcagttgaaagagcgcaagatgggcattaaagctgaagagttcaatctgaaaaaagggctggtgctgcggtgatg

SEQ ID NO: 11202 - DNA, 632 bp, Arabidopsis thaliana columbia
ggatgactggcaagagggtgacacaaacgctgccacggaggctagactcatcaactgaatgggaaccgttagagaaggtgttcaggttaggctcaagacaaggtacgtgtctactttgatctctcttctaacgtgaccgtctctcccctatatagtcttcctgaatatgaatagtgtgagagaatttgcattcaataggtatggacagtatctccgagctaatgggggtttaccgccatggaggaattcgattacccatgatatacctcataggtcaaccacacaggattgggttttatgggatattgacattctggaaagcagaaagaagaaagcacccccagtggctgaaccggcttatacgcctctcccccctcctccaccaccaccagagcttctgcaagtaagaaaagatgatcatcaagagcccaattcacccaaaggattctctctcaggtccccaaggttttccaaatccgaggttggatcaattctacactattatattcatcactaaaacaagcagttgtagcatcttatcaaagatcacttacctacacctttcgttttgtttttacattttatgatcagtctgatgacactgtcaggtcaccagtcaaggcagatggggg

SEQ ID NO: 11203 - DNA, 447 bp, Arabidopsis thaliana
  unsure (1)..(447): unsure at all n locations
atctcttcttgccctgacacagatacatctgaatccgcacttgttgcacccagagacgatgatgagaattgagattttctaaactgatcagatccatcaccatctgttccgctttgtaccggcggtggtatattgttcccgccgccaccaccgacaaaagatgttttcccgtaaggagaagaaacagagaacgtcttaaccattgcagaatcgaatttctgattcgtttcttgagtttcacttatctccgccgtcgtttcgaagctgaaagagagggttgtcgggggacttacggcggcggctaaagcagagttgctctcaatagagtaaaccgtgaaattagcgagaaggatcataacagagaccatcaaagtaggagtagcagagaaaacttgttgaaacaaccanacgaacgacgcttgcatttcttttctcacacgatgaaga

SEQ ID NO: 11204 - DNA, 614 bp, Arabidopsis thaliana
ttttgctaagagttagagaagagatgcaacaatctttcgtttggttgtttcaacaagttttctctgctactcctacgttgatggtttatgttatgattctcttagccaatttcactgtttattctatcggtaacaacagctccgctttagccgctgttgctcctcttcctccgacgattacggagttaacaactgttagtgaaacagaggaaacaaacgtgaagtttgattcctcggtggtgaaaacgttctttgtatcatctcctagtgggagtatagcttcagttggtggtaacaacaatggcggcggtggaaacgtcaagccggtgttaagcggaactgacggtgatggatccgatggatcagaacagttcagaacaatcatacccgaaggagtttctcaattgtcatcatcgaatttcgggtcagagccgtcagtatcgggacaagatgaacatagattgtggaattcgatggtggaggaagcagaacgaatgcagtattcaaatattgacgattcgttggatcaggagacgaggaagcggttcgtgtctcatgtagaggctcgagtagaagcagaggaagacactggttacttcaaaacagagctaatg

SEQ ID NO: 11205 - DNA, 489 bp, Arabidopsis thaliana columbia
tctgctgtataatatgtgaattaacctcaacatgatgactgatgtacttacttgtaaagttctgaatttttgtagacttgggcgaaatcgactcctaaagccgcttcttgagatgtggttgagacttcaagcatccaggttgctgggttgtatccttctgtgatcttgttgattccttgaatactctgttgccgagtcaacatattcagtccatgtcttccaaacaagttttaagtatggtgtgtttgtcttagtcgtatttattacctcaaaatagttgatcaaatgggttgattcgtggccaagaggtccaacgtatatctcctcacctccacgcttaagtaggaacaactgcatatatacgcatacccaagcatgttaacaaatgattaaagttctttttcacttttttgttttgaatgtagtttgaatcctcatcaaaggcttcaaagatgtcgatgctaggctggtgaatggtgcagacgactg

SEQ ID NO: 11206 - DNA, 517 bp, Arabidopsis thaliana columbia
cactgaggcctttgatgcagcttgtttcccgctcactctgttctccaactcgtttgatcctggctgggcatctgggatgtcagctactgttatacagggactgctcggtatgcttgttgaaggtggcgcagataatgtgaaccaatgtttccttgaagcttcacgttttggtagtacagaacttgtccgcgtcttattgcaggtaagcttccattcttttgattgcttctagacttatagaaggtctcttttcgtgctcaaatattgtatttcctggagcagattgcccaaatgaacagcttagatgttgatgtggacttagctcttggtgttgcctcgcattattgtaaaatcggaacaatgaagtgcctagtggaagaaggtaatgccattgccttcttgggtcccttaatgagagcagcagagagaggttgcatgcaagttggtcaatggtttgtgaaaagaggttgctgtgacatggagcttccttggctctaacagcggccacttcaagttg

SEQ ID NO: 11207 - DNA, 551 bp, Arabidopsis thaliana columbia
agtttttgcctgtgctaacaggttcagctgatagaactgtaaaatcatgggatctggaaacattcgagctgattggttctggtggacctgaggtacaagttgttttacgctaagtcaaattggtgacattttattttccctctacctttaatattctcattttcgctagactgccggggtccgttgcctgagtttcaatccagatggaaagactgtgctttgtggattgcaagaaagtctcaaggtaaattcttctatactttgatatgcagtatgtagattcttaaattagatatatgttaattgaacaactcatcttttgaaggattcgttcttatgtttactcatttgctttcaaaatacacattcctactcttcttacctcactcctttggtttaatcctgtgcaaatcgtagattttctcatgggagccaattagatgtcatgatggagtggatgttggatggtcaagattgtcagatatgaatgttcacgagggaaagcttcttggttgctcatacaatcagagttgtgtaggcgtgtgggttgt

SEQ ID NO: 11208 - DNA, 406 bp, Arabidopsis thaliana columbia
agaggatcccccatacgagtccgttcactcaatgaattccgtgtgcaggcggatgcactgcacaggaactcaaggaaagattctgcaagacattacatgaggttagaagctttggacatttgcgtcttctgagatacacatactgcaagtatacaatggtattggttatgcattcttaacttagcgacgctctttaacgcaatgcagtattctagaagacaatgcctccaactgagacataccgtgtgactcttggagatgcgagggataagccgtatcacacacgtgagcgttccgccaattgctgagtactggcatctcggatattcctgaagaagctaccttcactactgtggcacatgtgagcaacctctatactctgaatgtgacccttactaaattgtca

SEQ ID NO: 11209 - DNA, 593 bp, Arabidopsis thaliana columbia
aaacatatcagttttatttcctggtcctcatattcttttatgcttacgaatcaccattatttctttacagagagacatattgcttcatttctgagtgcaattgggcaaaagtttctgtctatgtaccgatcgtgtggaacatacattgctttcatcactattctcataagtgtatacctggtcaaacccaattatgtatcatttggatatattttccttctcttgctctggattactggaagacaactgtttgaagaaactaagagacgcttgtggttccctttgaaagcatatgcagttttggtgtttatgtttatctactgcttaagtagctttgtcagcttgcagctttggttatctggatttattgatctctacttttatttgggttacaactctaaagccccattgctggataatgtctgggaatctcttgctgtgttgatcgtgatgcaactttacagctatgaaaggaggcagagtggacactacattccaggtcaatctagtttgcttcatcctggggtttttggattttttgagagatttttggcatggcatggtcagaagatcttgttcgcggcattgtttta

SEQ ID NO: 11210 - DNA, 630 bp, Arabidopsis thaliana
aactcgggactttaatgcgctgtttaagtcgtgatccttccgtttctgtattaatgtcggatcgttctttaaacggccaagcttacgctgggctatgaattgggcccaattcacctcgaagcccattgaatgcggattgggccgaaatgggccgaatccgacatccacaatagccaattgtgaccaacatcaagtgatcttaagctagcactgatagattcctctggaaatataccagagaggctgttattccaaagatgcaagacagaaagtggtaaattcccaaaacaccttggaatagaaccgctgaagttgttgttggataaaacaagtatatcaagactatccaattcgcatattgctctaggaatctctcctgaaaactgattatcagagcctataaaatgaatgatagactttggtaacataggtacttctccactgaagaaattctgagaaatgtttacaaaccccaactctggtagtctccataaccactctggtacctggccttcaatttgattggcagagatgtctaaatactccaaacatggtttggttttgtagaaacgtgggaaactcggaaatattgcaggacgttaaaatcaagtattctatgagtgaggaggg

SEQ ID NO: 11211 - DNA, 1171 bp, Arabidopsis thaliana
ccatgacttattattattgaaccgaaaaaacttaaaccgaaataaaacttgattactcaacgctcactatcttcacaacagaggaaccatcaatcttgtgcaacgccacaatcgaatctccattcttgcaaattcccttcgtcttcgcgaatccgatagccaaattaatcatctcctccgttgcatctttgtttgaatccctagccgaagatcccgtcgccaccaccggaataatcctacggtaaatcaaaccacgtctcgccgcatgagccaccgagtctgagcacgacatctccatatcattcccttgagcaatctctggcacaatcactgacaaaatcggaacgctcggcctgtatttagccacaagctccgccgtgtaaccgcctttggtgagaacaacgatcgccgacgcaaaaacactctgtgccgtcgaaacaactgaagcagctaagctctcgatcggagataacggtaacgaaaccattcctagggttttcttgtggagaatgtcgtaatcgatgaaatcctctgcttctttacagatccttgacattgttagcacggcagcctcagggtgagctccagcagcggtttctccactaagcataacgcagtctgtcccgtcaagaacagcgtttgcaacgtcagtggcttcagctctagtcggacgaggagatactgtcatggattcaagcatctgtgtggctgtgacaactggtttcccaagagcattagccatcttgatcattgttttctgagcaaggaacatcttttcgatcggaatctccattccaagatctcctctagccaccatgaaagcatcagaattctccagaatcttttcacaattcatgaccccttcttgattctccacctttgacatgagcatgatgttctttgagtgttctccaagtaacctcctaacttcagttaggtcagatcctttacgaacaaaagaaagagcgatgatgtcgattttgttcggaactccccattggatgatatcttctttatctttctcagtaagtgttgggagatcaactacaattccaggaagattaacgttttttctttctcctagaattgcagagttctcgcaacggcaacgaacaagaccgaaagacttgtcacaggacaagacagttaagagattgtcccgctgacagag

SEQ ID NO: 11212 - DNA, 602 bp, Arabidopsis thaliana
cactttccgtgcatcctccagtttcccacaagttgaatacataacgatcaaagccgaagacacaaagatgtcggattgataaccgaagacaaaagcttgctgatgggtctgtttgccggagaagatatcaaaaagagacgaacatgctttaatggcgcaaggaaagctagagcgagttgggtatagagaaagcttccgcattgaggaaaaagcgagaagagcttcagcagaatcaccgctacgagcgaggtcggcgatgacagagttccatgagaaaacatctgttttgtcgacatatctgttgaacagcgttgttaggttttgtctctctgtgtgtctctccgtgtggagaagacgagagacggaacaaaacagtgcttttttactccgaaccttcattcattcattcttttgtctcaaagtaatatttcgactaatttgattataagtacttataatcaaacataggaaaagaaatttgcaaacaaaaaaatctctaatttcacactcaaatagtatcagacaagaacaaatatcaaatcaaaatcaatgaatccattttgtttacgtttttcctcatgtcacaacaaaacattcaaaga

SEQ ID NO: 11213 - DNA, 548 bp, Arabidopsis thaliana
tagctatatcttctgcaggacaacaagttttccatcaataaagtcacaatacaagaaaggcagaccatgttgcttctccatcttcttcactataacacttgtgattcttcacacactgtaaccaccgtcattttccttcccggccttctcattcttccagctcgatgagcatagtgaacagcatctgttggaagctcaagatcgaccatgagatcacattccgcatcttccaaaccccaagtcaagagctcgttagtcacaagtaccctaacatccctgttcttgaacttctttagaaccgatgatctccttagcttcctgagatctctattcagttctgcggaattcataccacgagcttcgattgtgttgacgtttagagatgtagtaatagtgttgcagggctaaacaaaaatcaaagtgtcagggatttggttttagagtatgcatggaacagaaaacatttaactgcaaaatttagaaaataaaagagaagagataccattttgagaagatgtcaaggcaaacggacaaacattttaacaaag

SEQ ID NO: 11214 - DNA, 531 bp, Arabidopsis thaliana columbia
agaggatcccgtccttccagtttctgagtgtctcgttggatagttataggggccatagggcgagatgtccttgtggggggggggggcggcggtccctggacatagtcgtttcaggcagtgccgtttagtgcatggtccattagatgggaggtgcaaggccggaaaattgaacacattgattccgctcgttcccgtccttcgcttcagggcctgcccctcggtgtggtcagtactccatactgtcgggcagcgaacttacacttgttcactaattatgacggttcgccagggcctctttcctcctcgattttctgatcactcgtaggggtccggacccccacaaagggggagggagtcgactgaacgtctcagccattggcggaaatttcgcacgcatccgatccccaattcttgttcaccccggatgatcgtgttgggtgaattgtgacctcgtacgatcgtttcgggtgagcaaagccgcttcgtcccagtacttagttatgggctaaagggtccactttggccgagtat

SEQ ID NO: 11215 - DNA, 493 bp, Arabidopsis thaliana columbia
tttatcgatgtttttttttgtaaactcttttttaactggtgtggatcaccaactatgaaatcttattataatctaatcatgcagttgagacaaaaacaaaaaataaaaatattgaaaatatgttttagattttagttaatttataaccttgattgttgcctctctaacgtcgaaagaaccgtttcaagctccgttctcaacatcatttcgtaacaaattgtcaatgtcatgaattaatcttgttttaaaaccctcgggaccaacaaatcgggaagtcaagttccggacatatttatgaatctccttgctctggaggaacgggttgttttctccaaatatccgcgttacgctctccgtagcacgcaactgcgaactcgcctttgctatctccatattcacgtcgggatcaatagagacaataacttttgccccgaatagacttgtccgaaacactttcgaaccatatctgattcagatttgtttacttgtaaat

SEQ ID NO: 11216 - DNA, 884 bp, Arabidopsis thaliana
caaaacagaacttattgaacacatatctgcatgactgcattttaaaaagaaaactagctgtattgggctatgttgtgggcttcgctagcccatgtaggttgaatatctcttgtcatagtaatgaccatctatattgaaataaaattcttatgataacacaaaccatattaaatctgaacattgattcacgcaaatagagatagttggcaccaaaagtctaagacgcacactcatcttcataggaaacccaaaccctaagaaatggaaaattaacagcttcatagttcaaacgcagaataaaaataactacaaaggtaatattcagttttcacataaatcattttccttttttctataacaaatggatttccttttttaaacaggaaaatacctgaaaaagttaaggcaaaggtggctactaaattatttatatatctacgttcccttagctctctgaacttgagtctaagataaagaaactctcgacgacatcttgagaatcgaacgagaatgatccaaaatctgcaaaaattaccccaagacctccaatcctcggcaatgaagatgcctcctcccttttctgcgtcgaagactcaatacttgttccacgacgagtcatcggaaaactctaaaaagagtttggtctccacaactctttctttgtcgtcttgtgaaaaccctaataagaggaagatgaactctgacgaagttctcaatatttcttgcataccaagagactacaaattaacacaagtagaaagaaagattgcacgaatgaggaatctctcgtatcaagaaaaggcagaggacgaatggtacggtgtctcaacagaactaacactcttcaaggatccgtggatcatcaaaaagtactaaccactagc

SEQ ID NO: 11217 - DNA, 546 bp, Arabidopsis thaliana columbia
ttagttcaatgtggattcaatgtgctaaaccctgtcatttctcaagaacaatagctaagggacctgatactactatatgtatctgggacctagatgctgatgctcacgattttgatagtcataccagtgatttggaggaaatctctcgaaaagtatttagtgcccatttcggccaactctctatcatctttctttggctgacatggtgtatagacatggaatgggatagaccaattcccgtagttggatgagtgagagaagtcacgttggagcaagggcagaaagtggaaccggctgtactgggacaagcaatactgggcggggaagctggcaacaagtgtcgcggggcagaaataatggtcggcatgttacagaagtgtcgacacacgtgacttactagagacgtgtcagcgtgtctgactaaaaatgtatgcaactataaaaatgggatttgactatcttgttagtaccgaagcctaccaaccacatgcacactaattctactcgccacatgaagtggaaagagatggctgatggaggaaaggt

SEQ ID NO: 11218 - DNA, 537 bp, Arabidopsis thaliana
gcacttggctctctgataaaccttacaatacgttccctgaaggttcgagaaatgtcactgttgatcctagtacgattacttatccagacggtggagctacggcgttgatcgctcctaatccggtttacgccaccgcggaggaaatggccgatgcacaaacctcgcaacctaatttcaatctctcatggagaatgagtgttgattttggtcatgattacttcattaggttacatttttgtgacattgtaagcaaatcgcttaacgaccttatcttcaatgttttcatcaacaagctctctgcaatctctgcacttgacctctcctcactaaccagcgctttaggtacagcgtattacgcggatttcgtgcttaatgcgtctacgatcaccaatggttcgatcttggttcaggttggtccgactccgaatcttcagtcgggtaaaccgaatgcgatacttaacggtttagagatcatgaagctgaacaatgctgctgggagtttagatggactttttggagttgatgggaaatacaaag

SEQ ID NO: 11219 - DNA, 763 bp, Arabidopsis thaliana
ttttgttgttagtgcaatgaaataccacaagccgtacgatgtctattgtttggtcacagttattaatcaaataccaaatatccaagcttgtctcttaaacacaagtttttactcttaaagtttgcgcaaaatttcattccacaagttttgtgtattcatactcacatatgactacgagatttaacacattgacaaaattaaaagcacaaaaggagaaaattgtagtttcagaaagagtagtctttcaaatctgctctagagtcgtccatgtcaatctcagacatgcattcgtcagcactaataggagggagtttccgagtcttacgcttaaggttgtgtttgtgccaatcactcttacagtgctctctgtattgcttagcctctccaacgaacgtgttgcaagtgctgcacttggtccccttcttttcttctccaccttcttgctttatgttatctgtagtacttatctcttgcttctgcagtttcttgctaagttcaacgacgggatcggtcaaatccttagtctcagtctcagcaggtaacaacggcttgtgggtttgcaatgccatatcatcatgctcatcgtaatgatccatgcttgtgtcaccttctgcatgaactgatacagcgagtatttctagtcttccctggatactcctcacatgggaatcacactctcggaataggcccggttccatctcgcagacctacacaagaaatgtatcaccatgatcagagaggattatagaaaagaagaagttca

SEQ ID NO: 11220 - DNA, 297 bp, Arabidopsis thaliana columbia
gttcaaaaaatgtaagaatgaaacaagatgtgctaaaagaaatctacacaacctcttcaggaatctcttttgccaactgctccaacacacttcccagaactttcagggtggcaaaaactcttttcctttttactgttttccgttccagcctggaaaccaatatcgaacagtatggtcaagcattcggctatatgcgttatggtagacgcacatgtctgttatattcacagaggacagtcaaagggaatagtaataagcgcatagtttatatacatactcgtcagtggaagcccccga

SEQ ID NO: 11221 - DNA, 558 bp, Arabidopsis thaliana columbia
ggtagcggcgaattgagccaagtagagaaagaaacgcaatcggagagaagaaagtgaaaacggggcaattcgtggaaagaagcagactgagataagcgtcggaggctaaaatagcaagacggcctgattcaaccggagaatccatggcggcggagatacagcggagaaacgaagaagccattgaggagagactaccgtagaatcgattgagaatttcatcatcgtctgtatcaagtagagatttgagatccgtgacgagttcatgatagtcagattcatcgtctcctccttcgattcctgcaaggattctagtgagcagaagctcttcatccatggcgattctctactgatagagagagaattttggatttcacagaaattcaggtgaaaaggtttcaaatcattttggatttccgcgatctgttcgttcttattagaattcaaagtgggacttagagaaaggtttggggctaatttagcattccacaaagagcagagtcccagtgggtaatatgatgtatacgaacaattttgggattttaatgaaacaaccctgca

SEQ ID NO: 11222 - DNA, 537 bp, Arabidopsis thaliana columbia
ttcacatttcctcttcccctaaaaacagaactcaaaaccaaaacaaaatgactcgctcctctagattccttggtacggcgtcgcctccaccaccggaagaaatcctcgccgccgaaaccgacatggttgtgattctctcagcacttctctgcgctctcgtatgcgtaccgcgtttagccgccgtagctcgctgcgcttggctccgccgtctcaccggagttaatcccgccgccgtcggagaagctccaccgcctaacaaaggcctcaagaataaagcacttcaagctctccctaaatcaacttacaccgcctctgcctctaccgccgccgccgctgacgatctaccgtgctcttcagtcggagacggagattcatccaccgagtgtgcaatatgcataacggaattttcggagggcgaagaaatcagaatcttaccgctgtgtagtcacgccttccacgtggcgtgtatagacaagtggttgacttcacggtcgtcgtgtccgtcttgtcgtcggatactggtgccggtgaagtgtg

SEQ ID NO: 11223 - DNA, 695 bp, Arabidopsis thaliana
aatgctatagagaagagatgcttggcacggacaacaaaaaaaaattcgatcttcttacttcaacgacgccacaacagcgaaatgcatatatgggttccgcttgaagatgttaattctggagaaatagagcttttgatcgaagctttggatcccgagtacagcgaagtaagtgttttgaggaaaacaaacatcactctgtttctttgtttttcctcattgatgtttttttctggcttgatcgcaggcggattctagtaaaggcttgattgaattggttctcgttgaagcgcgggatcttgtggccgcggatattagaggaaccagtgatccttatgttagggttcaatatggagagaagaaacagaggacaaaggtattatagaaactgttttggaccaaaaagacttcataaagaaaacaaaacttacagatggcttttttctcgtgtgattgttgttttcaggtgatttataagacgttgcaaccaaaatggaaccagacaatggagtttccagatgatgggagctccttggagctacatgtgaaagactataacactctgcttccgacttcaagcatcggtaactgcgttgtggagtaccaagggttaaagccaaatgagactgccgataagtggataattctccaaggagtgaaacacggggaggtccatgtcagagtcacgaggaaagtca

SEQ ID NO: 11224 - DNA, 533 bp, Arabidopsis thaliana columbia
tgacatgacttgcattgcggagaacaaaaatcagtctctcatcactcactcataatcatgaatttgatcttcatcatcttcatcgacccaaccgcttaaacctctctctctctctttctctctaatttctaatggtacttcttccttcgatgacgtcgcttcttctggtgttcctcttcctctacggcgtttctccggttatctccgacggctccgatcaccgttacaaggtcggtgatgatgttcctctttacgctaacaaagtcggaccgtttcataatcccaggtctgtccgcttatctattcagatctgagctttcgattttcagttatttcacgttttttttttctgattttgatttcaattgcatggagatctcttcgcttttcgtgtttctgattcgaattttgaatttgatttccctaataataacattctcgagctctgattcgtaattattggatagtgagaattggaatgacaaatttgtaggtctaattagtgaatgtcattggtggttagtgtagtttta

SEQ ID NO: 11225 - DNA, 1323 bp, Arabidopsis thaliana
tttagcaggattgggttggtttaccagcaggagagttagcatggattttaaccaataaacaatgtgttgaagttcaaaaaaaaaaaaaaacaggttatttaaaattaattaaattaaataatttttttgcttatattatacttttagatataagacctaatcagtaagaaagcaatttgataataaaaagttggttgtttgagaaagataaaaaaagttggatggattaattatcccagctataaaaaaaaattgattggtttaggtaagtttttctaaaataaatttatatgttacttgtgattgtctttcataatctatctgaaattttctttatgaccaatcacaaagttgaaactgaaatgattttaggtaacataacttgtcaaaaacagtttagttcacaagtgatcatctcacattggaaaccatctaatcctttcaagatttgcattatttgtaacaatcacaatggttaagaacaaacgataaaagtagagattgtatatatcgccatgcctccaaattcatatatgcaaatgtaaaagggagtcctaataagaacaatacaagatgccacaaagcatccaattaacactgcaaagttttgaatctaacaatgtgcttattgcaaattgcttatagatttcaccgcaagctaaacccgagatacagtgatactcaggcttaaacaaaaggtctataaagaggacagcaaacgaagaatcagtatctttatttttgcgaaaagagagaaaatgtgaaaacccaagttaaagctctcactttttcaagagcacggcactgcactgcgccatgatctttgatgctcttgtgatcgagtttgtcatgtaaaagttctcaaccacggtttggaacggtgttgtgctcattgcctccttgcactcaggcttcaatgaaggcccaaaagcagctggctctcgctcatctgtgtggactagatttggtgcaacgctctttattcttgatctaacaccttcgattgagttgtatggaagcttcacacccgagacctcggataaggctctcacaatcttccagtcatctcttgcatcaccaactgttggaacagctggaacagtctgttgggtaaatccttcagtattttcataggttccttctttctcagtgaaggccgatgcagggagaattacgtttgcacggtaaaccgctttgtctccatggtgtccttggtaaaccacaaaggcgtctttaggaatcttgtcaacatttacatcgtctgctcccatcaagtagacgaattttgcagactcgagggctttggcggactgttgaatgaga

SEQ ID NO: 11226 - DNA, 554 bp, Arabidopsis thaliana
ttgagttaagtgtgctctaaagccgtatctttaaatcccgcagcgtccagcgcctgacgaatcgcctgtacctggccgtccatcgcggcggaaggggcgatgaagtctgcacctgcagcagctgcaaccacggcttgcttgcctaaattttccagagtcgcgtcgttgtcgacccactgctcgcacagcacaccgcagtgaccgtgagaagtgtattcacagaagcaggtgtctgacataacgatcatttctggcacggtctgcttgcagatgcgcgacatacgcgccaccagtcgatcttcccgccaggcatcgctgccggtttcatcgggatggtgagagatgccaaaagtcatcacggaacgaataccggcgttggcgatgcgttcaatttcgcgtgccagatgtttctctggaatgcgcatcacgcctggcatggcttcaacggctttgtagtcgtcaatttcttcttcaacaaagatcggcaacaccaggtcgttaaggctaagtgttgtctcttcaaacatacggcagcgcaggagatttgcgcaggc

SEQ ID NO: 11227 - DNA, 596 bp, Arabidopsis thaliana columbia
gattaaagtgtcttgatcttcatcattgtttaattgtgtcatctgttcaatccgaacctatgatctgacggagatgttaattcagtaccgtattttcccagatacttcgtctcgctattcaagaatcaatctaagtgacacttttgacatagttgaatattgcatgcctttactagttctttgtgacagttggtgggcttggagctgcaggactgtctgcatcacttctaacctcagtgctaccgaccacactggaagatcttcttgctcttggcctttgctccgctggagggtaataacactgctctaaatttcccctcttcccaatgtctcattactccaccttcttagatcacgcctagtgtatttatatcttgcaactagaggcatatttatgacttttaagaaagactggttgtatgcataacataatctatgtgacaggtatgtggctatagcaaacttcccatatcgaagacaggctataattggtaaggtgaataaagtggctgatgcgttggctcaacagctcgaagacgctatgcaaaaagatctttcagatgcgacgagtaatctagttaactttgtgaatattg

SEQ ID NO: 11228 - DNA, 895 bp, Arabidopsis thaliana
catcaatacaaaaaccaaacctattacataacatatctcaagcaaacacttgaaactgaagcaagcttttgcttaatctactcatgtccttaatcatttattagtaattaattagcaatactaattatctaaagaagttactgttaaatcaacaaatcaatcaaccaaataaaaaaaactcagggaaacaaaattgggattttcagatagtatcaaaaaccctaaatttggagatgtgatactcaaatctctgatcactgagaaatttgattaccgaatcttatagaaaacctctaatttgaaaccctaagattcgaaatcatgaaacgaaaagggaaaagagtaagaactgaccacgcatagcttcgtcttttcgctcttgcattgagggaatatccggtggaaaatggaaatcgtctagaccagcggcggcgccactgcttccacctccaccagctacggcggtcgtcgaaaccaatgaatgagccggagaagcgccgttcatcactcagcgcgaattcaaaatcgaaattgttcagaagaaatttgggatcaacgacgatacattgacggaggagccgtaacaaatcttaaaccgaaattattttattcgaggactaaccatgtaaaccgaattgaaccaaataaaccggctaaagcccaacaacaaaggcccgtgtgaccgaccataaaacttgttaagcttgtcataatgaacaaaagacgttgttctgtaaaatgttctgttttcacttttctcatatacgattaaacatcaaattaaatttggtatgatcgtcatagccatttactgattttacatgagtacaaactctagcctttgtataaactttacctggtcgacacaaataacctttcttgggagcacaatgag

SEQ ID NO: 11229 - DNA, 610 bp, Arabidopsis thaliana
cttctttggaggtttcataatccctcttctttaagctctgttacttctgctttgatccttcgaatgctctggtgttcaacttgtgtggtcttgcgtttagatgagtcaccttcttcagttggcctggaaccttccccaatctcagctcttcttgatgattcaccaatctctaaaattcttgaaaatctagaagtgacttcatctgcaattggtggagagagatgagattctgacctgaaacgtggtgtaagagttgccatttgaggtttttcaaccatcaagttctgaggagtagctgttcttgaagggaacaggtaaagtcttgcagctgcaagctctgcagaattcaaaggaggggtagcagtccttggaggtggagttataggagcaggaaaggagtcatctgacagttgtgattgagaattcatatccgacctgcaaagctcctcatgtaaagccgctcttgtcctttctgccatgtcttgacctctaccatcatttcttggtgcaggaagaggaactatgtaaggacaatgattccgttgatgagtgaacgaagacaccgactacaaattcttctaagacgttcatattggaaacgtatgattgc

SEQ ID NO: 11230 - DNA, 833 bp, Arabidopsis thaliana
atttcttccttttttctccaaatcggagtgtgtttccgacggaaaaccccgttattaggacagttgattcccacggtttctctctgtcacatttactcggtggcattttaccttttccatgtttttcgagggataaccgtatagagaaaccgccatggattgactcttatatatctgtcggaattttatccatttcctgttcttcaatctatccctacttctattccaaaaacccattgatctctgatatcacaacaatgagtgataacgttcgtaagtcactacaagatatcaatttagggattaatgatacgccagttgcattaccgccggaattgtgtggaagagcggccaccatcaactgtttctccttgattgtcacggtggttaacctagagagcagaacctcctggcggttgcgggatagatgcctaggatttggggatttgtaatgaatgtcgtggcaggataagtgggcaacaacaaagttcttttcattttcaacacggaggaatcactgaaacttgttctccaacgtggaccttgggctttcaacgactggatgataacagtccactggtggtacccagtctatacgtgcgtgcttttctacctcctacatgaaaccaaatgtgaaccacacaaatatttgtatgataccaaaaaccaataacgcaatgactctctcagattatagagccattgccttatgtagtgttctctataaaattatttccaaatgcgtagttagtagactcagacctgatttggattcgattagttcggattctaagctgccttcatacttgggatactagtcacttgtgatagaa

SEQ ID NO: 11231 - DNA, 825 bp, Arabidopsis thaliana
ctaaagttttgaacaaaaacaaatcactaaagcctattttttgtgcaaaatttgcgtcagggagaggctgctcatttcattaaacgcggcggtttgttatcttcgttgcgccttattttttaacctgaagaagagaacaatgaaaggacgttgggtaaagtaccttcttatgggcacggttgtggcaatgcttgccgcctgctcttccaaaccaaccgatcgcggacagcaatataaagacgggaaatttacccagcctttctctctggtgaaccagccaaatgccgttggcgcgccgattaacgccggtgattttgccgagcaaattacgtcatatcgtaattcgtcaccgcgtctgtatggcaaccagagtaatgtttataacgcggtgcaagagtggctgcagcgcaggcggtgatacccgcaatatgcgccagttcggcattgatgcctggcagatggaaggtgccgacaactatggtaacgtgcagtttaccggttattacacgccggtaattcaggcgcgccatacccgacaggcgaagttccagtatcctatttaccgtatgccgccaaaacgtggtcgtctgccgtctcgtgcggagatctacgcgggggcattgagtgataaatatattctcgcttacagtacaccctgatggataacttcattatggatgtgcagggtagtgggtacatcgaatttggtgatggcagtccgcttaactttttcagctatgcagggaaaaaaggtcatgcctatcgcagcattggtaaggtgctgatcgaccgtggcgaagtgaaaaaagaagatatgtcgatgca

SEQ ID NO: 11232 - DNA, 729 bp, Arabidopsis thaliana
cctaactctgaaacctccacaacttttgtggtataccaaaaccaagccaattcgttgagctaggctcaccgtttgttactggagtaagccaactcatacgcaccttgaatggatctacggagataacattatgtatcaaggcatatgatcgaggcagaccttcatgagaatcgtaaaaagcccatatctggttatccttaactgacttttcagttcgatccttgtcaaagtcacaaaaatccggcgcagtaacatctaatgtcaaggctcccagtgaattcaattccttgtcagtattcatgcagcatgattcaatggcatttttgtttactgaagaacctgcattgaaaccattgagatcctcagtttccattccccttccgttagtttcagtttcagcaacgatggtgcataactctggcaggtttctgctgattactgatttagctttcttcttcaataaattcttcagctcgtcctcagaaacttcttttacaccagtggacttgggagcaagacaacttgcaatgttgccacccgcaactgcattttccataacctttcttctttttggaggaattgttgatgaaggaccagccgtccttttggtatactctctacgcacaacctcatcttttcgtgacccggtcggtgtagcatgagcagaagttttagttccagtgaacaaccccactcaaaggaatcatattcaccatacaccccattgtt

SEQ ID NO: 11233 - DNA, 575 bp, Arabidopsis thaliana columbia
ccaggataacttggcctaaaacaagcgtctctgcaaacacttttcgccggcgatgggggcgtgtagtaatagttattattagccattgatgaagagaatctcggcgtgttttgagccgtaggaaacttgcatttctctcccggaaaactccattcgaaatctttggcttgatagatgaaatcatctccacattcggatacagccacattcattctctttgatcttgatttcgtcttgtaagtatcaatctccacaatcttgggactggtctcatcgtacgcattgttgttgtgattactctgtttctctacagagattgatattctcttgctatggatttcacttgttgaatcatccaacctctcctataatcaaatcaatccatcaaaacataagttttgactatagagattatgttagaaataagacaaaagaaaaagaatggttattacaagtgagtgtcgaggatgaaacatgttgttgcggttgatgcgttgcgatcggacgctggtttgagctctaatgagagcttgcatgctatgcagcgtttcggcggcgcgtttgcggactaagta

SEQ ID NO: 11234 - DNA, 681 bp, Arabidopsis thaliana
tctgattctcctcttaaggatcatattatttgtatccaacctctcttcaaacaaaactgattgattaatttccttaatatttaataatcaaccaattacactaatctttatttcattaaggaaaagaatagagccaaagtaaggaccacggaggtaatctcgtaaatatctcgaaaaccaatggcattgtgttattccttttactatataaacctcgtccctccctaactctcaaaatccccctgacattttctttctctcacaaagaaaaccaaatcactaaaccggaaaaaatggctggaggtctcgggaaatgcagcaagatccgtcacattgtgaggctaaggcaaatgcttcgacggtggcgcgatcaagcgaggatgtcttcttctttcagccgttgtgtaccgtcggatgtaccgtcaggacacgtggcggtctacgtaggaagcagttgtaggagatttgtggtgcgcgcgacgtatctgaaccatcctgtcctaaggaaccttcttgttcaagctgaggaagagtttggtttcgttaaccaaggtccgttggttatcccttgtgaagaatcggttttcgaggaatcgattcggtttatatcccggtctgattcgacccggtcaagacggtttacttgtcccgatgattttcagaagaattgccacgtggtgg

SEQ ID NO: 11235 - DNA, 968 bp, Arabidopsis thaliana
gtcagttttactgtttaaatttataacatggtgtgtgtagtcaatagaaagtgaatgcaaacgtcaaaatacgaatcttataacctgaggtccaagtttttcttttccataatgcgttcattaacgcaattataaaaaccaagactttaaatacgaaccatgataaataaatataccataatcaaaaaaattcaatcaataataattcatagaaagacagagaaagacaatttcgtaattaactataaaatctggtggcattgttattttctcttcactatataaacttggtctctcccaaacctcacaaatccctcctccacctgaaacattttctctcactttctcgagaaaatataacttcagaacttttcagagttagtttgacttcaaacgtgggaaaaaatggccggaagtcttgtaaaatgcagcaagatccgtcacattgtgagactcagacaaatgctccggcgatggcgtaacaaagcgcggttatcttcggtcagccgttgtgtaccgtcggatgttccatctggacacgtggcagtttgtgtgggtagcggttgcaggagatttgtggtgcgtgcgtcgtacctgaaccatcctatcataagcaatcttctggttcaagctgaggaagagtttggttttgctaaccaaggaccgttggttattccttgcgaagaatcggttttcgaagaagcgatccggtttatatcccggtctgattcttctcggtctagccggtttacttgtcctgatgatcttcagaaatgtaacggagggatcaaaatcaaaagcaagctagatctgatgattgaatctcgaccgttgcttcatggcgtcgctgagaaagctatctggtgatccgcggtgcagattgttgtcagttcgtatgattctgacccggtttgactcggtacgagtttaatcgcgatggaaggaagtcagaagaaggcgagtttttg

SEQ ID NO: 11236 - DNA, 443 bp, Arabidopsis thaliana columbia
ggttagctgaaatctccatgtgtcatggttgtttctagttagaacttagaagtgaccaatcttacttgtggttgtggaacaagtaactctaaataagttgcaacaacaaaacttcttcaaacctacttctcatcaaacctcaaaaccctaactcctctataaatacacacaaactccttcataatctctccatcatcactcacaatcaaacctctttccagtgacaactcaaacccctaatccccaaaatggctcactggttgtcatccctagtcattgcattaacattcacaagctttttcactggtctctcagctagtcgccaccttcttcaatcaacaccagctattaccccaccggttacaacaacatttccaccacttcccacaaccacaatgccaccatgtcctccttcaacttctcttcgtcagccaactgcgttt

SEQ ID NO: 11237 - DNA, 1053 bp, Arabidopsis thaliana
gctttagtttaggtaattaacttccaaatgtatttgcagtgtgcggatttgtcgttggtgctcaattcccctagaatcggtatccagtccatctctcgtgcaacttttatatcagtctctttattgagaagtcgattcggtttccccgagcagtcaggtccctgctcctccattcgtggcattttgtagaggagaatatacattaggagacttccaatggagtttaataaagaagaagctacaagggctagagagattgcaaagaggaagtttttagcaaatgattttgcgggggcgaggaaatttgccttgaaggctcagtttctgtatcctgaactcgatggaattgctcaaatggtggccacttttgatgttcatttatctgcacagaatatcatttatggggatgtagaccactatggtgtacttggtctgaaccctgaggctgatgacgaaatagtgaggaagcgttacagaaagttagctgtaatgcttcatccagacaggaacaagtcagtcggagcagaggaagcctttaagtttctttcacaggcttggggtgtcttctctgacaaggcaaagagagctgactatgacctgaagaggaatgtgggattgtataagggaggaggagcatcatcgtcaaggcctgcaaccaatgggtttcagaaagttactaaagctagcggtaacacaaccaaagtaaagagttcaaagagaggtataaaacgggcaagtgatgcctctgctgccgctactacttctacctcggcccagaaaacaactgctgatgggaccttttggactgtatgccgtacttgcagaacacagtatgaatatcatagtgtttatctaaatcagaacctcctgtgtcccaactgtcgtaagccgtttatagctgtggaaacagatcctccaggttcaggttcgattcgcaagacctttcacgagcaccaattcgactctctccgccatacaacagacggaagaaagaaaaatgtacctggaagagacaacaatggggtgtatggtgaatatgattcctttgagtgg

SEQ ID NO: 11238 - DNA, 863 bp, Arabidopsis thaliana columbia
agcctattacagacagcttgaggggaatatttcaacaagtagcataaatgatgagaaccattagaagagcaattagtagacggacgactcattgttaccttggggagagaagggcgaggacaagtaggggagggacaatattgacggatatagctttttcgagaagcttccatgaaagaggagagtgattttcccagaagatgtgggtgacgaggaattgagcgaggtccggagagggaagggagattccagcagacgcgagggtcaagcgaagctgaagagcccaatgaagcggatccacgttcttctcctgggctgacctaatcagcgacgtaaccgattcccagagactcggttggaactccgacggagccatttgttggacgaccgggagaaacaagttcgacggggactaatagtcgtcttcttcctcagccttttacttgtttcttctcacacgattgcttttctttttctagaggaaatgtcaatttctcatttatatgtgaatataatactacagtatttgagttatgtagacagtctttttatccacttgacttcaaactgatgaaatggaagctgagagtgggtttggtaaacaagtaataatgtttgatgttgctggtatccacaactatgagcaacagattccaagacctcagatgcatcagactttatccattttagttacacagatttgaagcttaagtagtaactttttatacgaggtcccaaaggggagagttgttgttgaatgaagccatatcatatttgattatccaaaaactagccggaaaagctcttaacaagtcttcttaatcgtccatcgaacaaaaagagacttaagggaggaagagaag

SEQ ID NO: 11239 - DNA, 1189 bp, Arabidopsis thaliana columbia
tgtctccagaatacagagtcagttacatacttaagttctgagttgtattcgtttacagattttttcctcggtttttaaagaagctaactgcatgcaggtcgcttcaacgaatcaggaagctaccgctactgatgaaatgaatgaagcatatagcagagtagagctcgagtacaagagatttctattagaatgtggggtgggtgaatcttagactctggtctccttaaggctcctacaagtagttcttgagcaaatcatggctactccagagtctctaaggactttttgtttggtgattactgggacactgcatgcatttaccatataagactttgtaattgtgaatataaagggtggttaaatgcgatttgatttggatacatcacattgtatggagcaaattgggattattaggtaaaagcttgattgataatgaaatgaatataaagtattggctctacggaagtgaaaaaatgaacagaattacaaaaagagaaccaaaaccgtgcgcacgagagtttctcaaagcaaaggggtaaaatatccattcaatagaaacggttctggaaactctgcaattttgggagaggctcaattaaagccgtacatgtcaaaactcttgtcgtcaggtggtcttgtgttgttgccaccttcaggtactctaaagctgtccattggaggtggccctgcggcacgtggtgccgttggtggcaccaatgcggggtggtaggaacagagaagttagatccagaagcctcttgatgtaagacaacaacattaggatttgcttgtggtgagtttcctgtggttcttcggtttgaggaatttgcagaagctagagacgatggatacgattgttgttgctgattcttcattggtgatttgggccgcagcgattctatatcgggagtagtcacaacaagatgcggtgcgtctggaggtggatttcttcctcctcctcctagccacactttaccctccttgtctgcgaagttcctcacataagcctaaagcacacaatatccaaaacagatcaaacagtcaaagaagctccttgcataggtctaaagctcatataaacaggaggtggatagatgtctacagagcgaacatgagatcttacctgtggctcaaagtttgaggacgaaaggccttttccaacagtaagccagccagctcgaatattgtg

SEQ ID NO: 11240 - DNA, 985 bp, Arabidopsis thaliana
taatcaaaactaattttgaatctttaagctcataatcctttcgttataagacataaattagtataccattcatgcaatgataccgtcatagagaagacataatttcttactagctaccaagttttattgtagtgtaccaactagttttaaccttaaaaggatgagagcaaactctcaataagaagttttcgaatactttactttcggataaataactaaacttaggaatgaataatccaaaatatattcacaagattagaattagaggatatgttatatgtataagtaaactagagttactgccacatacattttttttggttggatctacgttttatatttttagtaatcgaactcttgatcaggacataatcaaatcatcttgtggtgaccaatttttagtctcatagccaatatttgattagagaatttttagccattcaacgaccttaaatctctccctagctccatgcaaaccctaattttagaaactacaaatcctataagaatgtctccacaatgcaccacaatctctaccagccccattaataaaccaccgggctctgtttcaataaaaaaaatcccctccctctcatatttacctcccgaataaaaccggagggagagaaaaaacataaaaagcaaaaaaaaaggtaaaatcaaaaaggggaaaaatatataacaacaaaaaaaaaaagttagaaaaaatggcagtaggaaaggttgtggtatctgtggcatcactcctcctagtggtgggtgttgccataggagttatcacgttccgttaataaaggaggcggcgcaatggcgacagtaatggtcccataaactctcatcagaaagcggttcagacaatttgccagtcaaccacagaccaaggttcgtgcgcgaaaacactcgacccagtcaaaagtgatgatccaagcaagcttgtcaaagccttcctgatggctacgcataaggtgattgggggatgagtcga

SEQ ID NO: 11241 - DNA, 944 bp, Arabidopsis thaliana
ctttggcgggaaatttttttcagagaaaatttttagcgggattttttttccgaaatttttggcgggaaaaatgtttttgaaaaaaaaatttggcgggaaatttttttcacgaaatttttggcgggaagttttttcccgaaattttttggcgggaaattttattttagaatgttttaggcgaaaaatattaatacttcattttattaacctaaatcaatttacaaataggggtaaaatggtcattaaaatttaaagagggtataaatgaaaatagtaaatagaaaagggtaaaattgaaaagagatagtgtgaaaagtgaattagaaagaatttttctaaattaagacagtgggtaagaagattaataatgctctcacttgattttagaaagtataattaaaatagttattcagtcggcgttgtcctttatttttccggtaatcgatccaaaatgtattaacatggaccatgatctcgtgtctattgaataaaaaatggcatccactttcaaaactttgagaacaactctttcaagaagaaagagaaaaaggaaagaaaaaaatcatctatttacaaggatcaagtctatctctaactcagaagaaccaaatgtcggatcatcatgatcattggagccgagaagtcacattgatgaaggtatcttcaggacaagggatcgttaagccacccattggatgatcaaatccaaactcttcctcggatttactgagaagagcttgaaatgaaggttggctcaagtatgagagcggcaccaaatatctcttcttctggctctctcctacgtacaccgcaagaaacccttttggatgccgcgatgctgtggagcggcttagaatcttctttgcaccaatagacttctcaccaaagccatatctgttatttttgtacgaaaaggtttttgaagcttattaagatggatgaaa

SEQ ID NO: 11242 - DNA, 554 bp, Arabidopsis thaliana
tggattcaaatcaggggaatacccctccacttcctcacgctcagaatgatcacatccataggaggaagaatgggccatttccttgagactgattttggtggtgatggggccgttctggttgattacgtttgtgttcgcattttatggaacatcgatgaccctttgagatttcaacgcttgttccaatttggtgatgaggcgtgcgtattaaagtttcgttatgagaaactcaggaatttctgttcagtatgtgggatgataggtcacgaagcatcaaagtgcccaacaactaacaatattccaccgccgccaccagcagatgatgatgatgatgatgagggtccagactataatccagaggcacctgctgcgagttcaccagaggaatcaagacccgctgataaacatgtcatggatagtgggaaaaatgatgaatcccctgcgtctaagaagaggaaggtcgagcctgaggcatcttcttcttctgcggggaattttcaagttttccacttgtgtgttgtgcatgaacatgggtatgctcagaggagacagac

SEQ ID NO: 11243 - DNA, 548 bp, Arabidopsis thaliana
caagaatgaatatccaaccacaaatgcaaaacgcatatgatgcaaatgaaaaaagaaaggaactttcttacatgagctgagtctcagaatagccagtgtgatgcttgagagtgctggtccatatgggaacttggcggagagaagatcttgctgcgtagattgcagaagcagctaccattgatggactgaacattatcatcgtatcgtaatgcattacgcctaactcagccaaatagtgcaccatattctccatctgcaaaccaaaacacaactgaatgttcaatatgatgaaatgtataaccatggaagaaactaaaaaaacgctctcttaccttttcgtctgcaatggaagctttgatgaaacgagctaggaagacataatgagtcggaactgtcaagtaccactcaagtgtagacagtattgtcttctccatcaccagaatctgtttgtgactgtatgcatggtctgcaatatcaactagatcctccacctgcaaaagaattatcttttcatttagccgaagacaaaaaagaatcaaaccagaaga

SEQ ID NO: 11244 - DNA, 897 bp, Arabidopsis thaliana columbia
cgatcatcttctaacaatacacagaagctgaaactccaaattgaggactacctcgagacattgtagccatttatcgcttttaccaagctcttcaaagagtaagaaacaatggtcacatcttacgaccttcacgtacttatcaagcgtcttcaccaatggctctctgtcactaatcctcgacataagactccgaaccagcactctattttctctctccgcactctctctctcagcaagtttcctccttgacgaaatcgcaccgcaagttatcctcgtcctcgtcgacctcctcgcatcgccgagatttactgagaagcgaacgcatttgtgatcggtttctttgggaatcgaagagatgaaatcggagaatctcagtgacgaaggtgatgtcaacaagtagtccattgacgaaaagtttttttcttttcctaatcctttaatggcggataaggtttttacagttgcaaccaaaaaagttttgagggtacattcagtgaagcagcaaacaagttgggccgttttgtaaatacagcaaaacaattgggccgtttctataaatacaggaataaaaaagttaaggatctaattttcggggtatttgaacccgacgtgaatcgaacacgcaaccttctgatctggagtcagacgcgctaccattgcgccacggatcctgttgtactgttggcttcattatatatacttaaccggataaaagtttcataacaagtgattatgcaaacaatagcaaccactacacatttataaaatatgaccaagcttagaaaaactaacataaaaatgcgatttgttgcttgcaaatatagcttcggttttaccaccattgaaaccctaattacgtctcttaaaacagaaattacaaaacgaaatttagaaaga

SEQ ID NO: 11245 - DNA, 1372 bp, Arabidopsis thaliana columbia
cctatccactgtctgattcgtcaatgttgtagagtgtaagctcaatctgcatagagaaacaaaacctcacccattgagttggagcaacgaaaggcaaacgtaaatgagacacaaaacaaaaagcttacaccgagagtgcttcgtcttggacattgtttgcactggatgcagttaacccacataatatcactccctgtgtcgacttgaacataatagctcttagcaggtgttccaattccaatttttgcataataaagcctgagataaacaatgaaacagagagatcactgcaagttaactcaaaaatctcagctttttagagattccataaattcctctcaaaaggctcgaaatcagcagtgatcagagacgctaaagaaacaataacaactctttagaggaatctgaaactgacccggggatatcagggcgaccagttccaccaaggggtagatcgattccagcgagaattgtgagctgacgccggtcatcgtgctcctttaaggcggtcaaggacccttgaagccttggataacggtactttacattgaacactccgggattacaagagacggaaacaagagcagtgagaaaccaaatcagcgtgaatcttccgcagatggggaaagatacgattgataaagtcatcttctttcttcttcccacgtgcctgatgtttacagcgtcagtcgtctcggcggagaagttgaaagaaaccaccggaccggcggcgacgacgacgacgacgaggaagttcagaaattacagagtttgtttggtcacttcttccaccaattcccgtattttattattttttatttccagcgtggacttttctttttctttcgacccattaattcgatatttttatggtttcattcaggtaaatttattacatgtaaacttaggtgttactgacgctgttacaactcatattttactgttcagttatattatcctttttgtcgtttcaactttcaattgtaacaaaattataaatcataggaatttgtttccttaatttaagtattaggttatgagtttaagactaaaaaccatgtgaacaaatttataacaaacgaatagaaacaaatatcattcgcaaaccacatttatgtttccttgctctttctctattttacacacattcttccaatacaataattaaatatggttttacatacagaaaaatataaaatgtaatgttgtttgcattataagttctagagggacaaaaacacacttcttctttttttaccacaagcaatttcacttattacgtaacattaagcaagagagacttgagagcaacggcgatatatcataagacttacgaagaggaagaggaaggtacagttgaagggttgaaagg

SEQ ID NO: 11246 - DNA, 556 bp, Arabidopsis thaliana columbia
gacctttgttctcgcctttgtcacaactcctttcctccactataccaaaacttctccttacattttctccctcgccctctccctcatggcctcaagcaccggttctcctatcctaacccgcgtcatcgccaatctcaaaatcagaaaatccgatcttggaaaacttgcatcagccgcaggtgtccatacggacatgatctctaccttgctttactgcttcggcttcattttcttccctacggagaaacctctcgctcgtcctctccacagattcttcagagccctcctcatgttttgcctcttcctcgctcaggtcactttcacttccattgtatccccaatctttcttaattgggtcaacaacgagaaccctgaaggtaaaccactcaaggggtcacaccttgttatgtccctggcatttgtcgtcttgatctgcagtttccaacttggccacctgaatcaatgtacaacccaattctcagtgcattcacggctggtctcttccttccaaacaaaggaagaatgtcgaaatggatcatcacaaaatcaattactt

SEQ ID NO: 11247 - DNA, 793 bp, Arabidopsis thaliana
ccacgcctgggatgatttgatgtacacaataactctttgagctttttttttatcaaagagttaatataacttcattttttataggttaaggttgaaatactatattttacaatacttgtgtatattttagttctgggatttttaataacccaaagagctatactattgtaatcagtctcttgttttcaaaatgtaatgtaataaagcattaccgatttttgaactaaagtgaagaaaaaagagaacattaaactcaagtggtgcaaatatttattctgtgaactaaatgtatattttgtattttcttgtttcaatatcttcttttgcatttaaacatggcgattcttttttaatccaaagacaagaagacttggaaaaaaattgggatactaagcaacaaaggaagataaagatctttaaagaaaagtttcaggctttggattttaccgggactccagcttcaacccgcttgatctcaaagatgagcattctccacatcttcagcacaaacatctcagcttcttcgtctagaattgattgcaacagctcaagcatctgagacgcctgcacgtgttgttgagtgtttgacacgatgaaatctaccagagtggcttcctcttctccgagaaactccataattttctttgagatccatggtctcattctttcgtgcacttggtgcttttcaatgttaaaaaaggtgaaacatgtcagcaccaaaacaaactcacagtcaaggtaaaaaaaaacattgatctagtaaaagtgtaatgagatttatgagtagcttacc

SEQ ID NO: 11248 - DNA, 571 bp, Arabidopsis thaliana
cttcatgctttaattagtttataaattttgctattctagcaaaattacttaatcaaagaaaaaaacacaccacttaactgaagttacactggacacttactaccacttagctgacacaagaggtcaaaggtatggacagaagcaaaccaaggcaaaactaaaccaaagcaggagagaggtaatcggaatcttttatgtgatcatataatgagtctgaaccttcccactatcatgcttactcatcccgtcccatgttgtttgttgggcgatgcatctgaaccctcttagatttgttggataaaactgcttcggcttgctcgatcaaccctctcctcaagccttatgaaaccggctaatcttggtcttttgattagaagattatctgcgctttgaacttgtaatcttatttgccgattgcatcatgcttactcctctaaggagataccttccctgaaaccttactcctctaaggagatacctctctgaaacttgaacccggagaaaagtctcaaaccgcagcctcctctttggagcatttcaacgcagcctcctcaacccaaatgcattgaat

SEQ ID NO: 11249 - DNA, 481 bp, Arabidopsis thaliana
cgagacaaaaaccggcgtgaaagggcttgtggcttcgggaatcaaagagattccagccatgttccatacacctccggatactctaacaagcctgaaacaaacagcaccaccttcgcagcagctgacgatccccacggtggatctgaaaggaggaagcatggatttgatatcgcggcggagcgtggtggagaagattggagacgctgcggagagatggggattcttccaggtggtgaatcatgggatctcggtggaggtgatggagaggatgaaagaagggattcgcaggtttcacgagcaggacccggaagtgaagaaacggttctactctagggatcacactagagatgtgctttactacagcaacatcgatctccacacttgtaataaggctgcaaattggagagatacgctcgcctgttacatggcccccgatcctcccaagttacaggacttgcccgcggtttgcgggtaacgtttc

SEQ ID NO: 11250 - DNA, 571 bp, Arabidopsis thaliana columbia
tttgctaagtctatcttgcagagaatgtctcaaagcacctaaaatatacccatgtagaacacaatggagatattatgagaagactgatcgaaatttttttatcataaatgcagaaagagcctcacatagcattgctaaattgcatatgttcatagatagagacttacttgcagaaacttgttgagatttattgtcgatttgcaagataattgccttgctgctcaaagaactctccctgctcaattcaattattataggagctcgtgtagcaccattctcacccgtcggctgtgtatagtaagtgtagcagacacaacagaggtcagtattagtataagaaaaggagtaagccaataataaccatagactcaatgtacaacttaccagcactggatgcccaattagactgtttagaactgcagactttccagctccctggttcagtatgcaaaaagagataagtaacaaataacaaaatacatcacgcttctccggcacgagtcgctcctcatgtaaccatatatccactaataaagagaatgcaacaaaactagctataaacgatgagtgt

SEQ ID NO: 11251 - DNA, 752 bp, Arabidopsis thaliana
gggtacaacaaaaaacaaaagggtggtcaactcgatttctatcagaagccggaaaagaaatcttaataaagacagtggctttgtcattaccagtttacacaatgaactgtttcaaacttccaaaggggatatgtgatgatatcaacagattacttgcgtcttactggtggagtaaaagctcggataagagatcaatgcactggatggcttggaagcggctgaccataccaaagaatgaaggcgggttaggatttagggacattgaatgctttaataaagccatgttagcaaaacaagtgtggcgaatacttcaagcaccatcatccctgctcactcgcctcttacgtggaaggtactttgaaacaacaaatattctgaatgcaagaaccggaggaagccctctttcatttggagatccattctagaaggacgagacctcctgcagcaaggacttcgaatccttatagaagatggcaaacagacaaacatatggactgattcatggcttccaacacacccaccaagaccacctcaaaaacgtgatgcgacggtcaccaatcatacacaagtcaagcacctaatgcaagatggcagaaacatgtggaataaagaagtaatagaagaactctttgaagcagatgaagcacgattgatacaaggttaagattaagatcacaaccgtcccctgatgtactaggctggaactacacaaagcatggggaatacacattcaaatcaagttattggctctg

SEQ ID NO: 11252 - DNA, 535 bp, Arabidopsis thaliana
cggggtttctacacttttagaacaactctttcaagaagaaagagaaaaaagctcatgtatttacaatgaataagtctatttctaactgaaggaaaaaatgttggatcatcttcattggagccgagaagtcacattgatgaaagtatcttcgggacaagggatcgttaagccacccatcggatgagcaaacccaaactcttcttcggatttactgagcagagcttgaaatgacggttggctcaagtatgagagcggcaccaaatatctcttctactggctctctcctacgtacaccgcaagaaacccttttggtgccgcagatcctgctgcggtggagcggcttagaatcttctttgctcccaatagacttctcacgaaagccatttttattttattttaaataaaagaagtttgaattattatgaagctcttgaagatgtatgaaaagattcaagttattggaatgcttgtcgttggttgatgatagaaataatgcggttatgggtgtatatatagaagtatcgatgaacgattt

SEQ ID NO: 11253 - DNA, 1193 bp, Arabidopsis thaliana
tgtaacttgtcaagtacactaatctgaaggttgatcttgagagaccgagcaaacctaggagttgagaaccataattgtaacctggtggaccaacagagaaaggtatgtctgcggttagatctgatataacggttattcgaacacgaggaggaggtccttctagtctgcagctcagagcctccaacaaagtgggccattgcataccgtgagaaacaccaatatcaataatatgaagatcctttttatctttgggatcctgtgctaaaatctgcaggatagctgagtttgccatgttgttaggcaaagcaaaccaagggcttacctcgtagaacttaagcagagtcttttgaaacatcttcacttccgctgaagcaaaagtaaaaacaggccaaaaggatgatgacacagaggatgaggaaagatgatgttgcaaagcccgaagaccaaaagctgcaacgcgacgattagcatcaccagaagaagaggccagttcagagagaacacaaaggtaatgttgaacccttgatgagttacttgccgtaatggccaaggcacaagggttaagcaacttctctgcccatctcccttccttgttaccatctttggagctcttctcactagacttgattgcttttctcttgctccttgccgattttttcacctgttgtgcctcgagaaacccgtcgtggctccttttcctggactgatcgtttggttgctgaatttcaggtggaagatccaaatcaatggatggagcttctgttaccacttccaggttagttgcttcacaaccaacatatgctgcactaagatcttgactatagctttgaataaaaccatgctccggatcttgagtctgatcccattcccacgtttgagacccatcaaactcgtggagcaaataagaatcatcaaatcctggtaatggggataaggacacagaatcctcaagccagcttaggacatgatctagagtctggtttggtggttctgtttcttccaacaacattgaatagatgatgaaaaaggtataatttgtgagtaggtgatatagtttttaaggtataagataaacaacagtaacaggaattgaaaacaaatggatggagaattctagatgagattcgtatatatattgaaatggcgtgtgatctgcatatataggagtgtgcaaggactatattaattagtac

SEQ ID NO: 11254 - DNA, 691 bp, Arabidopsis thaliana
tcccccttgcatatttttcctgattttatgagcaaaaacgttgtcgtttaattgcagtttcggagttaggtccggaggattcgggtcgaaacatagtggagatcatattcaaatcaagctggcttaaaaaagacagtcccatctgtcagatcgaacggatattaaaagtccacaacactcaacgtacgatccaacggtttgaggattgccgagacgcagtgaaggcgcgtgcacttcaagcaaccagaaaagatgctcgttgtgccgccgacggcaacgagctcttacgttttcactgcaccactctcacttgttcactcggagctcgtggctcttcttctctctgctctaacctccctgtttgtggcgtctgcaccgtgattcgccacggtttccaaggaaaatctggtggcggaggagccaacgtcgcaaacgccggtgtgaggacgacggcgagcagcggaagagctgatgatttgctgaggtgtagcgatgatgcgaggagagtgatgcttgtgtgccgtgtgatcgctgggagagttaagcgagttgatttaccggcggcggatgcttcggctacagcggagaagaagtcaacggtggaggataactcggtggttggagtttcttcgagtggtggtacgtttgactcggtggcggtcaatgctggagtttattcgaatcttgagga

SEQ ID NO: 11255 - DNA, 634 bp, Arabidopsis thaliana
ttttcttctttcttctcaccataaatactactcttcttgaaaacactggtaggaactaatgttagtaatgttagagacaagacagtagcatcggtctttttggtgtctcacaaactttaacattgagagattgcaagagcacaaacagaataaataataaccaaggagacatgacgttaaagtttcgtggaacaaaagccttacagatagtaactcgagtatcatcaaataaaaggaccatacagaaattctacttgttgaatcacatatctaagactgtagaatcagttcttaagaatgctactgtctaaatgagttatcatcaatcaagcatattagaagtctcctgcttcataaaacacacacatccacagatccactgaatctaactgtacacttccttttatacactattcgccatcttcatcatcatcatcaagctctacaatttgtgctcgcctctcagcagctttcctcctgatgaagaacccccatctcattgcggcttttatcttaagccatccaacaacagctctgcctgatcgaccacggtcttcatcataaccttgcataggcgtgtgtagaaacgatgggaaagtatatccatcttctggcaagtgtgttgcagagccat

SEQ ID NO: 11256 - DNA, 996 bp, Arabidopsis thaliana
gtgaactgttcctccgataaatctgtgaggagaagaagaagttcaacttcgatcgaaattgagaggcgctaataatgggggagatcagatttttacctaacgacggagtatatgagcatttgatagaaggaagacgacgcgagaagtggaggagttttgatccagccacaaggttaagagaagtagccggcggggacttgagcgatagtggaaaccggagcgaagggaaatgtggtggatgcggcgtccgatggtgtgtaacggctatggcttcgacggtgaaaaaatcagatttgacggcggagattgaaacggccgacatccccgtgagctcgttgattttaagtctttcgataccagtttaaacctttttaagtgtggactgggagaagaatatatacactacagtactacaaatacaaagcccataaagcaatgttttctaaaccggaccggcgatcggaccgaatgggaccgcaaacgaaagcatatctggattttattgccaaaaaacagtcaagcatagttttataaccaacatttattccttaggggtttgctggattcatgatctgtgttaatttgaaaatttaatcagaatttttggtaattttcaatttccaagttgaaattatgtgctattcaatcaataatttaaaatatttaatccatgattttgaaatttaagctatagattttaataatttcatggatattttaataatttcatagagattttaaaattaaaaaatacgaagaaaaacattttcaatcatagcaaatcaacaaaaagttgtaatatacttgatgcacatgttattttaaccaatggtgcaccagagcaccttggagatgttttaaacacttctaactttccgttggggtgaattcgttcatgacaaagttggtaaaaagattaatagattgtttatattataatgaataagaatatggcaaatggaaaagagtcttcagtatatgagggcttttgtgaac

SEQ ID NO: 11257 - DNA, 580 bp, Arabidopsis thaliana columbia
tcctactataagcatgtaacttgttatataagtgagactttattgtttcgttacaggtttgagctgggattagagaagcctgatccaaaaagagcgttacaaagcgcgttcacgattgcaatcgcttatgttcttggcggttttataccgttacttccctacatgctcataccgcatgccatggatgcggtagtggcgtctgtggttataactctgtttgcgctcttcatatttggctatgcaaaagggcatttcactggaagcaagcccctcagaagtgcgtttgaaaccgcctttataggagcgattgcttcagctgctgctttttgtttggctaaagttgtgcaacattagcagtaacaaaactagtgttgcgtttgatgttttgtgtactttgagacttgtttgttgcatgtcttgtggttattatcaggctaaaacttttggcaaccataataaagtgagagataacaattcaaaatattggttacataattactttcctaagctaacattgcagacacacaagttttcttctgacattaatccattcctgaagatttaaaagaaacagttgcag

SEQ ID NO: 11258 - DNA, 839 bp, Arabidopsis thaliana
ccaaaattaaagcattacatgaaagatagagataaagatttcatgagtcttccaaaatgcataacttcaagaaggttgcaagggatggtagatctattgggacctgcagagattcaagcttgaagactagcttcgagaaatctcggatcaacttgtgatcatagtaagctcgtgcgatcgacgcatagaagctttcgttgaaatgctccaaagaggaggctgcggtgtgagacttttctccgggttcaagtttcaaagaggatatctcttagaggagtaaggtttcagggaaggtatctcattagaggagtaaacataatgcaatcggcaacaaagattacaagtccaaagcacaaataatcttctaatcaaatgacagagattaaccggattcatggggcttgagaagagggttgatagagcaagccaaagcggttttacccaacaattccaagagggttgtgatgcatcgtccaacaaacgacatgggacgggatgagtaagcatgatagtgggaaggttcagactcattatatgatcacatataagaacaaaggtgtgagccgcatcacatagcctatggttcgagatcaaaactaatccactaagcttcaagactaaacttacatctgttggcaaccaatctactctatgtaacaggtttctagtattgtgattgcaaggctcctctaagactaaggtccaacgattgaatggagtccacgaccatccgttatcgtgaagcaatggttcagagcgagagtcccaaaactctgagtaaagcaaatctggatatgggccaattaggtttagagtttttgggcagcggaaatgagaga

SEQ ID NO: 11259 - DNA, 635 bp, Arabidopsis thaliana
cgttgattttatgactagtcagcaacttggacggttccgattgaatctaggatattttttaaaaagttaaataaaaagttaaggatcatgtttaaaccgggggtttgaacccgacgtgaatcgaacacgcaaccttctgatctggagtcagacgcgctaccattgcgccacggatcccttgtgattacaagcaccaaaggatatttatatagtaaaacacatatcgttttattacaaaccgccgccttctcaaagggttatcaacaatctctcatctttagcattgttttgttatcttcttcttcatcacaatttttctacggtcagagattcaaaagagttctttctctctatcttattctccgatcatcatgatgcagcagccaccacccggaggtatccttccacatcacgctcctcctccttctgcgcaacaacagtacggttaccaacaaccttacgggattgctggagctgctccaccaccaccacagatgtggaatcctcaacgcggcgccgccatcagttcagcctacgaccgctgacgagatccggactctttggatcggggacttacagtattggatggatgagaatttcctctacggttgctttgctcataccggagaggtaat

SEQ ID NO: 11260 - DNA, 655 bp, Arabidopsis thaliana
atcataaaccatggatccgagcagtggcggatcttgaacataaatctgtatagggcacaaaatataagccacatttagttagttaaaaaataataaaaaaaaatgagaaaatgtctgggtcacgaactctagttctttgatgtagcatggggcaacttaaaccaattaagctggatacacatttttatcttaagctattaaagaaatctataaaatctgtatagggcacgtgcccactacctctctacgtagatccaccactggatccgagcgtgtaagaccaatacgagtcaaacgctcccaaactaattctcggtagtgaactaccggatcaccatatacaaaagtaataaaaattcgatttccatcaataattgtttcaatatcaataagccgatcagaaacaaaaacgaacttaaccggatagtctttcaaatacataagagcaagaccaccactattaccaatcggttcaacagtttgtaaacgatcaaatcctaataaaatggttagtttatacaagaccaccactatcaccactatggttggaccatcaaaatctcatttcattaatcagcatctaaaccaataataggcctacaggactgcttccaagatttcttcaaagcttcaaaacatacatagagacagtagt

SEQ ID NO: 11261 - DNA, 1105 bp, Arabidopsis thaliana
tccgccgcttgctctgcttacgagctttacctccgtttgcctgaacttagaaacctctggtcctctctctatttccctcactggatctccgagcccgttctcaaaccagctcttcaagctcttgagatcactttccggttaatcctcaccgttgcttctgacacacgtccttacatcaaccgccgcgaatggatccgacggttggattccctcactaccagccagataaaaatcgtggcggctatctgcggagatgaagacaactacgaagagaacgtatcggcggctccggtcagcaatggctggagctcgttgagtttgctttcggagatcgccacgtgtcgtacatcggagagtgttggacagaagatcttgtctacgatcgagaatgagatgcgttggtgtaagtatacgctcggtttaggagaaccaaacctcgccggaaaaccgtatcttcaatacgacgccgtttgtctcccggaggagctacatagcctcaagaacaatccttacgcagatcacatcgagaaccaagagaatcaaatgctctacactagtcatcagattcttgaatcgtggatttacgtttctgtgaatcttttatatagaatcgaatcgagaatcgaagagggaaaattcgaaaaagcttcttcagacgtctacttgttggagagaatctggaagcttctatcagagattgaagatttacacattcttatggatcctgaagatttcttgaaggtgaagaaacagttacaaatcaaatcgacgtttccaaacgacgcattttgttttaggtcaaagggcttagtagagatggcgaagatgtccaaagagctgagacagaaagtgccagctgttcttgaggtggaggtggatccaccggagtccgaggttgcaagaggcggcgatgaagctttactcgaggaaaacagagtacgagaagatacatttgcttcagggaatgcaggccgtggagtctgcagccaagagattcttcttcggataccagaagttggttgcagcgatgattgggaatgcagaggcgaatcaaatagaacggtggcgaacacgagtcctatgatcactgactcaggtgtttatg

SEQ ID NO: 11262 - DNA, 502 bp, Arabidopsis thaliana columbia
ttcttggcatgatcattgcagtactcgggatgatctggtacggtaatgcctcgtccaagccaggcggcaaggagaagaagaattattctcttccaacgacccgacaacagaaacttggggctacttcagattctgatgaacatcgagataaagcgtacaatgtaagtgatcagaaagatcagtttcacacatagcttttcacatcacacatcgctcagtttgagatattcttttgtagctgaattttgtattcttatagaatcaattttttgccttggtaccaaacgatttactcttgcgtgaagaactaagttacatcacattctttacacttttccgtcaatgttccgatgtttgtatatatagattttaaagcattgttgaattgccttagacatctgttgctgtcacagtagacaataagcagagtaagctggaaattaaaataaataagactattcaaggcactggagggatcaagaatgaaaaacagaggaatgtg

SEQ ID NO: 11263 - DNA, 1335 bp, Arabidopsis thaliana
aaatttgattaaatctggccctgtcaagtcccagaaatgttgataaaaaagggcagtcatcccatccggacctggggctttatctggattaagcgaaaacagagctcgtctaacttcctctggggagaattcctttatatgtttctgattcatagcttccgaaattataactggcacatccctaagaacggaatggaattctcgtggatccgaggaggtaaaaatatatttaaaataatccaccgctagactttcaatatccacctccttatccacccacaaaccatcttggttcaataaaccaataatcttattttttgctcttctttgcttagtaatagcatgaaagtattttgtgttcttatccccgagtttaaacgacaattccctgctcttcgatttccaaaaaatctcttcttccctataagcgtcgcataactgccattttaaagctaaaagatcttctgaggacaaagactcatcttcttgggctaagttaattttatcttgcagctctacaatcaacttttcagaatttgtagaatttgatttcttccaaatagagatagttctcctacaatttttaactttttgtaaaaaaagaacaccttcattcgaagggaaagccagccttcgaggaccgattgtttgaatcccggtttatcaatccatcttctatcaaagatgaaggatttattaaaccgatgaggactattctggatcgaagctaggaggggtctatgatcggaaccccatagttttaagtactccacatttgtgtgggaaaaaattgtatgccattcttcatttcccaaagctctatctaatatgtatttaataagttgtcgaaatctacgacccgcaaccctacaactacgccgacccacccatgagaataaattaccatgtgaagggatctcgatcatcccacagtcctcaatcatacaacgaaagggaagaaaagaggattcagatcgacgtttaccaccctttttctcatggtttccggtaatttcgttaaaatccccaatcataaaccatggatctgaacgctcgataccaatacgagtcaaacgctcccacactaattcacggtattgaactaccggatcgccataacaaaagtaatatcgatttccatcaataatagtttcaatatcaataagccgatcattaagaaaaacaaacttaaccggatagtctttcgaataaaaaagagcaagaccaccactagttaccaattcggttcaacagtcttggagagaatcagagcctaaaggcacttgcatattctgaagatgcatacggtcttttttagttccgataaaaaaagaa

SEQ ID NO: 11264 - DNA, 1434 bp, Arabidopsis thaliana
caagcaatccaataacttgaatcttttcatacatcttcagaagattttaaagaatttaatattcgaaacaaaaacaatagatatggcttttgtgagaagtctattgggagcaaagaagattctaagccgctccaccacagcagcctcggcggcaccaaaagggtttcttgcagtgtacgtaggtgagagccaaaagaagagatatctggtgccaatctcatatttaaaccagccttcatttcaagctcttctcagtaaatccgaggaagagtttggattcgatcatccaatgggtggcttaacgatcccctgtcctgaagatacattcatcaatgtgacttctcggttccaacgatgatgagccaacatttttcttcctagttagaaatagacttattcattgtaaatacatgagcttttttctctttcttcttgaaagagttgttctaaaagtttagagagtaaatgccatctttatgcaacagaaacgattcatgtcaatacatttttgatctttcattgaaaaatgaaaagataacaccaatgaccaaaccaattggaactactctaatgatagtttcatgttgattaagtacaattaagtggaacatctaacatccggatccgtggcgcaatggtagcgcgtctgactccagatcagaaggttgcgtgttcgattcacgtcgggttcaaatcccccgaactatatattccggaatatctttttgttttacctgcttatttccaatttttgccttttgatgcactacccccggttcgggattcttgttactctaaccgagaatttcagatccggttttagtatttgtttgctactctgaattagacggaaacaaataacaaatgaccacttttaacttacacaatttatcagtggctggctcttacgtatagtgtgggggttacatttagttgatgtctccagtgacatttgattatagttttcaagatattgtcaagcaaaaaggaaaagaaatttacttttgaattccaaacttctgtttgtattttattctataaataacattgctttctccttccaaataataaagacaagtatacattgcccaaaaaggaaaactatagagacacgcactagttagggttgatgtggactggatccgatccctttcttcaatgatttattgatacgtatctgttacgctgaatatacatatatgcatgtttcttttggtattttagagtactaatgtatattctatagtttgatcccaaaaaaaaacatgtatagtctgtagtatttttatttttttagctaagttttcaaacatgtagcttgtataaagttaataggggtatgtgctggacacaagtctacattctacagactagctagtaaatattaggaatgaggttttcaaatgggtgattaaccaaaatttgccgtgaatg

SEQ ID NO: 11265 - DNA, 676 bp, Arabidopsis thaliana
tttcaatgcacagaacagaataaagtgtttgaggaaagagttggatgaggaaaaaagtgttcagtttccttcttggcctaaagtctcagtgttacaagatcttttaagtgctgccttttatgaagagaaatctttctggaggttaaagagtagagacaaatggctagatggaggggataagaattctaaatttttccaagcttctgtcaaggctaatagagttaagaactcactaagttttttagttgatgaagaagggaatgaacatactgtagctagagagaaaggcaacattgctttaagttttttcaaagatctctttacttcgtcctatcctgctaatatgcaatcaatcttaaatggattccaatcaagagtcactttcgcaatgaataatgaccttactaaagatgtctcagaggaggagatttacaatgcggttttctctataaatgcagagagtgcaccaggtcctgatggtttcactgctctattctttcagtctcattggtctttagtaaagaagcaaataattgaggacatcttgggtttctttcaaacgggaatcatgccggatcaatggaatcaccccatttatgtttgatccaaaaatttcaccccaagaagaatggcaacattagccggatcagcttgtgttcggttttatcaagatagt

SEQ ID NO: 11266 - DNA, 607 bp, Arabidopsis thaliana
tgatcaataattacagttattttccatctaaaggatgatttttttctttttaaaaaaggttaaaaattatatttctggtttataattatttggatcaggagttgctttcaggtagggttaaaaaactggacatgattcatgacttttcagacatcattatctctttttttcttcactcttgtctggaaagagatctgaaaacaatagtttctttatgcttatcacattgtacagtaactctgtttatgtttaaaattttgtctttaattacgcagataatgggattaaaaaacagagaacaaacagaatcaataaatctaaacaaagaaactgaaggatcttgcagtaacagaagtgataacagttcagataatctcagactagatatctcaactgcgccgccatcaaacgacagtacattaaccggtggccacccaccgccaccacagacagttggtcgacacttcttcccaccgtcgccagccaccgcaacgacaactactacaacaatgcagttctttcaaaactcatcttcaggacagagtatggttaaagaagagaatagtatcagtaacatgttctgtgcaatggatgccattctggtttt

SEQ ID NO: 11267 - DNA, 1140 bp, Arabidopsis thaliana
agaggttctcctctcatcttcatacgccaaatcaagttgggaatgtagctcaagaataagcttctccgtatttgttttgttggattttttccagatagatatagtttgtctacaatttttaatcttctgaaaaaacggaacaccctctcctcgagaggggaaagcccatccttcttggacggattccttaaaacctggtttatttatccatcgtttatcaaaaataaaatgtttataagggcgataaggtttgttttgtatggatgcaagtaggggtttatgatctgaacccctatgctgcaggtactccacattcgtgtgggaataaatactatgccattcttcatttcccatagctctatctaaccgacacttaatgaggtcacgtctctttcggcccgccactccacaacttcgttttccgacccaagaaaataaactccctgtagaggggaaatcaatcattccacagttttcaatcatacaacagaaagggaggaaagaggattcagatctcttttttcctcctcttttttcatgattaccgataatctcattaaaatcaccgatcataaaccatggctcagaccgaacaataccaatacgggtcaaacgtttccaaactaattcacggtattgaactaccggatcaccgtaaacaaaagtaataaatacgcggtttccatcaataattgtttcaatatcaattagccgatcactaacgaaaacaacttaaccggataatctttcgaatacataagagcaagacaccactattacctataggttcaacagtttgaagagaatcaaatcctaatgatacttgcatatcctgaagatgaataagatcattcttcgtttccgatagaaacagaaaacctggagagtacatacgacacatctcttccagtcgatgagtggtaagatccgcacccaccccttgacaattccatgctaggatcctcatttattagttccggagggagattgatatcccaccgtactaaaaaataaagagataatcttaatttttttgaaaagggacacctcattatgagggatatttgttgacgttttagaaactctcgtttttgaattcaagaaacaatccaaagtattgtagaattgtagacgtatcac

SEQ ID NO: 11268 - DNA, 763 bp, Arabidopsis thaliana
ctatgtcgatctgagcatatactttctgattctggtctgaactaactgttgtttctgatgtctgaggttgaaactcttttgccaagccatgcgaagtggagtagtgatgaactgtgggaagccgataccttatggaatggaagtcctcctcatcgaatagcacatgacgactgatgtaaactcgacctgttgaaatcagtaagcatctgtatcccttatacttttcattatatccaagaaacacacacttcagagaccttggatcaaatttgttctttgcataatctcttaatgtaggataacagctacatccaaagactctgagagaagtataatctggtttctgaccaaataatacctcatagggacttttgttgtctgacagaactgaagaaggcaggagattaatgaggaagtttgctgtgaagaatccttcaacccagtatctcattggcatgcggctgtgacacatcattgccaatcccaattcaataaggtgcctatgctttctttctgccaaaccattctgttgtggtgtataaggacaggagattaactgttggattccatgttgatgcaaatgattcacaaagttgaggctagtgaactctccacctccatcacattgaaaacttccaattttgctgtgaaactgattttctactaaagcttgaaacttatggaatattggtagaaaatatgatttattctttagagggtaaaacaacagaatctagagtagttgtctacaaagataacatta

SEQ ID NO: 11269 - DNA, 845 bp, Arabidopsis thaliana
ggcatgattaaaatgacaatgatgatgatcggaattcctctagtacctgccagacaggagtgaacaatgttttgagttttagcattggccagatttctatgttcagttatagttatgctaataagctttaggagtgaacaaaatctgagtagtttgattataatgatgtctgaagcagattatatataaaagactaatttacttacatatgagatgattattacaactatcaaatgactatgtctgtgagttgcatccatccataagcacaccggtctctactacttcgagtgattgctgctgctgacttaaccgcaggtcttatcttcgtcattgctttctctacttgaattctcacgccaacatccatctgttatttcaaatggtaccgataactttagggatatagacaagacaaattgatattaataatataacaaggttgtaaagtagaaaccttttctaaagagcattgtgtgtctaagatgtggcagaagtatgacagttgcttgtacaagtctgcttcagtgtactgtaaagtcaagagttagtctgtgaagcaatagagagataggagttataaggttgatgatggtatatacctttcgtaagagggttccgttacagttaggatagtttgggcaaactgtcccccgttcacgttcaccgagtagacgaaagttgggggagcgggttgtgtgcttgcatgactcgtcttcacactgttgaaggcaaaatgtacaagaaaacgtcttagcataaattaagaaggacaaatcacaaatgttcagaactatgaggaaaaaacaaggcgagaaggttttcatacaccattatgctttgta

SEQ ID NO: 11270 - DNA, 824 bp, Arabidopsis thaliana
aagattcaccgagtagtcttctagtcctgcgtatacttcttcttcttcgtttatacttagaagatgaattgtgcaagtaaggcactctttcttctctatttaccgatttagggttttattttgctttgtttctgtcggtaacactgtggtcttttctcctctacagtttccggcgaagttccggagggagcctgtggtttctaagaagtcgggtttgctttacgagaagcggctaatccagacgcatatatccgtaagcaagttcttttcttttctccctcgttcgactcttatctagggttttcagctgtttagcctcttgcacctctctatttgctgcagatattttcttaatacagactttgttgtgataatttatagattgcttttggtaccttgtaggattatgggaaatgcccggttactggtgagccacatactcttgatgacattgttcccatcaaaactgggaaggtaatgcaaccactggagttatttgtcacacagcattgtttgtagaaacttatttaagcctgattcgatctccgggaccattttgcagatcgtaaagccgaaaccattacacacagctagcatccctggattgcttggaacgtttcagactgtaagttcttattttgtatccctataccttctttttcgtttctgaattttgttctctgtctattaaggatcatatagagttaaaatggatgaacttgatttgggtatgcacgctatctgagttattaacatagcagattgcattctactctttacattgaattatatgttcatttgttactaatagcaagacgaaagtg

SEQ ID NO: 11271 - DNA, 826 bp, Arabidopsis thaliana
tttaagaaaaaattggaaaggctcgtaatctcaacttcgcattaagcgaagtctgtggaaccctgggaacctcggtgcttagcactgacaacagcgaccacatctactacagattctagcactcgtcgtacaagttaaagccttcagtatctccactgtaagatttggatgattgttggcgaataccttgaactcaacagaagtagaaatcgcacctaaattagttatgatattagtgaaagcggaatcatgaaaccacttataggtgggccagtggtaggaaggatttcgggctgagggtgaaattcccaataatcccgggttcgaatccccacggctgcaaacaccttaagtggccaccgcagacaatttaaaatcgggctatgcggcctccaggaactactcttgccgctttcgggacgcacgcagtggctagtctgagcccattgggctttgggatacctgggttatccaaaaaaaaaaaaaaaaaaaaaaaagaaagcggaatcatgaagggctttgtcaaaagggatttgggcgagctcaaggatgtcaagagcatttgaagatttaagagatgatataagctcgattctgcataggtctcgtagatgcggaatctcgtatttgtcccccgcaatatagagtgacctaacgtgttgcttctcttttgcagaaagcatagagccgtcgctgtatatgaattcaatgaaagcctctaattcttcgtgtttcatctcacagagagtgattgtctctagttgagccgaagccttgatctcgtctgactccaacatcttcttaaacacctctgatcttgcagact

SEQ ID NO: 11272 - DNA, 1264 bp, Arabidopsis thaliana
tccctaccgaaactaacacatgatgattttagcatggaattgtcaacgggcgggtgctgatcttacaactcgtcgactagaggagatgtgtcgtatgtattccctaggttttcttttttatcggaaaccaaaaatgaccttagtcatattcagggtttgcaagtgtcattagtttttgattctttttatattgttgagccgattggcagcagtggcggtcttgcccttatgtaatcgaaagattatctggttaagtttgtttttgttagtgaccggcttattgatattgaaattattattgatggaaatcgagtttttattacctttgtgtatggacatccggtaatccaataccgagaattagtttgggaacgtttgactcgaataggtatcacccgttcgaaaccatggtttatgattggtgattttattgagattattggaaaccacgaaaaaagggagataaaagtagatatgaatcttcttttctcccattccgatgcatgattgaaaattgtgggatgatcgaggtgccctctcacggtaatttgttctcatgggtgggacacgtagctgtggagttacgaggcggcgtgtccgtcgagtcattaaatctcggttagatagagctttgggcaatgaagaatggcataccatttttcccactcaaatgtggagtactaaaattatggggtccgaccatagaccccttttagcttcaattcagaatagcccccatcgccttttcaaaccatttattttttttataaaagatggcttagcaaaccgggctttaaggagtcggttcatggaggttgtgaggtccctcctcaaggaggagttatttttttctcaaaaagtgaaaaattgtaaaaagtctatttctatttgaaaaaagtcaagctcttcaaactcagagaaaaaaattctaaaattacaaaatcaaattgataacgcccaagaagacgagtccatctctgctaaggaattattagctctaaaaaggaagctttgcgatgcttatagagaggaggaaatattttggtgtttgaaaagccgtgaactttggtttaaggaaggggataaaaatacaaagtattttcatgctattgcaaagcaaagacgagcaaagaataagattattaggctcctgaaccaagatggtctgtgggtcgacaaggaggtgggcattgaaggtctagcggttgatttctttaaagacctttttcaacctctaatccacaagatttccattccgcgattc

SEQ ID NO: 11273 - DNA, 1062 bp, Arabidopsis thaliana columbia
gctttattgtcaacgctttggtttttgatacgatataaagagatacgcttattgctctgtttcgatacaaaccacaaaacagaaacaatggagtctcagtctcagagaggtcaacacgaaaccccgaaacgttctaggttcaccggaatgttccataaactgaaaacgaatcttgttttccggtcgaagctagccgaaataaacggtgcaatgggtgatcttggtacttacataccaatcgtcctcgctttaactctagccaaggatttggatttaggcacaacactgatattcaccggcatatacaacgcgataaccggagcagtttacggtgtccccatgccggttcaaccgatgaaatcgatagcagccgtggcgatttcgtctaccgcggaagatttcggtataccggagattatggctgccggaatatgtaccggaggatcttgttcgtgttggggatctctggtttgatgcagcttgtgttcaatataatccctttatcggttgttagagggattcagttgtcacaaggcttagcttttgccatgtctgcggttaagtatataaggaaagagcagaatttttcgaagtcaaagagtgttggtgataggccatggttagggcttgatggtttggttttggctttggtttgtgttctgttcatagttcttgtgaatggagatggtgaagaagaagaggaagaggaagaaggagatggttcgagaggaagaggaagatggggttcggtgaggaaggttatagctaacgtgccatctgctctgttgatattcttgttgggtgttgttttggcatttataaggaagccgagtattgtacatgacatcaagtttggaccgtcaaagatgaagattgtgagaataagccgaaaagcatggagaaacgggtttttgaaagggacggtcccgcagttacctctttctgttcttaattctgttgtggctgtgtgtaagctgtcgtatgatctgttcccgagaaggagttctggctgcatcggtttcatgactgttgggctgatgaatatggtgggatgttggtttg

SEQ ID NO: 11274 - DNA, 512 bp, Arabidopsis thaliana
ctagaggatccccttgatgcgttcggcaaagaagatgacaagtccaaagcgcatataatcttctaatcaaaagaccaagattattcggtttaagaaggcttgagaaggaggttgatcgagcaagccgaaacggttttatccaacaaatccaagagggttgagatgcatcgcccaacaaaagacatgggactagatgagtaagcgtaatagtgggaaggttcagactcgttatatgttcatataaaagagtagaggcgtgacagcgtcacatggcctacgtttcgagatcaaaactattccattaaacttcaaaactaaacttgcatctggggacaaccaatctactctatgcaacatgtttcgagagttgtaattgcaaggctcctctaagaataaagttccaacgattgaattgagtctacaaccatccgttatcgtgaagcagtgtttcagagagagatcaggcaaagttctaagtagagcaacctagatatgggttaattaggttagag

SEQ ID NO: 11275 - DNA, 846 bp, Arabidopsis thaliana
tatgtacctggaagctctctaaaatcctcgttgaatatggaatatgcactgcgaaagaaagcatgaaaaaagatcgaacttattcagctctaacactcaaaagagaagatatttcatggcctaaaactcaacaatactcatgaggataccactttacagctaaataagaatactagcagaatcttatgcttccagaatcctaagacttttttttcacatctccaagttaccaatgatgatcacgttggagatatctgaaattctaatttggtatctggaaaatgagttgctatgtcagtcagatcaatggaggctaagtgtttttagaaatgtacatacctaacatcaccaggctgtcgtttaccaagattgagcaagatgattgaaaatccagtccctagtatctgaaaccccccgtgataacaaagaaagccatcaaaggagattaaacagaaacgacttgttagagacactacctctctatacaaaatgtctcatattcaatggcattgcaaaaacgttgggcattttcaggaatccagacattgaagataaagatgacttacaaatatagggcccagatcccaccgatgtgcaataggcgccaagataaaccacaaggtgataataacccacatctttagacttaaagagaaaagtcccataagaatgatatctagaagatcatcacacaaccacagatcaataaactatttgtttcataagttcttggacattgcagatgatgcacatatcaaagattaaagagttctcacctggcagcttcaacttgttacgcagaaagtagtataacttcctcttccaccggcttgctgacggtgggag

SEQ ID NO: 11276 - DNA, 672 bp, Arabidopsis thaliana
aacacatgttgctttgtccatgtaacagataaaagaggaaatgagaaatgggcaagttgctcttgagaagtatgtcatcaccaagacattgactaaaccgcctgcagcttatccagattccaaaagccaaccacacgttcaagtgagtatgagagctattattctcgttatttctcccttattatatgctttctatatattcacttaacttaactctctgattgtgtggctaaatttttcttctcaggttgcactcagaatgaggcaacgtggttataaagaaggtttcaatgctaaggatactgtaccgtatataatctgctatgagcaggttcccaaaacagaagaccagctaaatattataagataccctttagttttttctactaaatattttatgcctcctctgtgcagggtaatgctagctctgctagttcagcaggaattgccgaacgtgctaggcatcctgatgaggtgaaatcagaaggcagcagatggttggttgacatagattactacttagcacaacagattcatccggtggtgtctcgtctatgcgcagagattcaaggaacaagtcctgaacgtctagctgaatgtttaggacttgacccatcaaaggtaaaacagctttcactccagcaaatttccgattcatattcagtgatcatg

SEQ ID NO: 11277 - DNA, 903 bp, Arabidopsis thaliana
agacttccctacggtgctataggcaattcaacaagaaggagcacttggtggaacacatgaggatctcttatcattcggttcatgaacctacttgtggtatttgcaacaaacattgccgatcttttgactccctccgtgaacatctcattggtatatatatctctaacctagttcataacttgtctttaatatttcacttttcctcatttcattttgggtcatatcgtacatagggccattgccgaaacaagaatgtaagaacattttcagcattcgcggctgcagattctgtcttacgatcctcgaaagccccaacgctcgtagaatccatcaagagagatgccagctctcaaacgtcacttctgtatatatcatcttcacatatatgaaataaccatcgtatacatgtcataattatttcttcttcaatgtatatttaatcttgcatttaaacattactaaaatatatatattaaaatttaaaatactaaaaacgaccttatttaaaaaatcattagtattaaacgtaaatgcatatagataatatataatctaatatttttactgatattttagggattaatgattcgtatggcggccttaggcctaagaaacaactcaacaattgactacacttcttcgaggtcacctcgagtggtggcactctcatgcaagatggttggaggaggcagtgacggatcgcttgacctatgcgcaagagtttgcattacggatgagagcgaaaatgttgtgttccacacgtatgtgaagccaacgatacccgtaacgaattataggtatgagatgacagggattcgacctgaaaatctaagggacgcaatgcgattaaagcacgcacagagaaaggttcaagagtttctttgtaatggagaaccaatgtgg

SEQ ID NO: 11278 - DNA, 901 bp, Arabidopsis thaliana
caaccactggttacgattctcgcaactggtcgtccttctgaacatacggcttaatccttttaacacaacaaattatatatgtgtatctacaaatatttatgatctcccatatagaaatttatatattttaaatacgtacttgaaattttcatgactatattatgtatttattgatcttccaactttattagggataatgaagcgaccatgattgaaaacattgccactgatatttcgaatatgctgaattattctacgccatcacgtgattttgacggtttaattgggatgagagctcatatgaaagtaatggaaccgatgttatgcctacactccgatgaagtgaggatgattggaatttggggtccttctgggatcgggaaaactaccattgctagaatcttatttagccaatttagcgacagttttgaattgagtgtctttatggagaatgttaaggagttaatgtatacaagaccggtgtgttctgatgaatacagtgcaaagttacacttacagaaacagttcatgtcccagattatcaaccacaaagatatcgagattcctcacctaggagttgtagaagatagattgaaagacaagaaagtgtttattgttcttgataatatcgaccagtcaatacaactagatgctattgcaaaagaaagtcgatggtttggtcatggaagtcggattatcatcacaacacaagaccggaaacttttgaaggcacatgatggcatcaaccatatttacaacgtaaattttccatcagcatatgaagcttgcaaatattttgtatgtatgcttttggacaaaaattctctaaagatggtttcgaagagcttgcatgggaagttgcaaaacttttaggtggactaccattgggttaagagttatg

SEQ ID NO: 11279 - DNA, 548 bp, Arabidopsis thaliana
tttcctttgaatattcaatgtacttactattcttgctaggtgtttcaagtcgtttgttacacgttccatggcggttgaagttttttcattttactaaagtagtacgtatcgaatgataataatatttaaaattaccttattgatacgaaacatatatccctcgacaatacatatatagcggtctttattatttaaatgtagaccgatcgatattgacctcaaaatcattacataatatcaaacgcgatcaatggccgaaacaagcatgtttctggaatcaggctgcccaatgagctcattgccacagtcgacaaattggtagtcaacaatgagatggccttgttgatagccaaaaccatcggtgtctatttgattgaacattgctacatccaaatccaagcctccgttgctgcattggtccactattctcacagttactgcagcatttgttcttgtgttcttccctgaatccatttatacccaccggttaacacaatttttccggctatcatcttttgaatatttcctacacgttgcgttggtaatgg

SEQ ID NO: 11280 - DNA, 589 bp, Arabidopsis thaliana
tgttagtatcaagctgtctgaaaacaccctcctctaagtccaaaccaccgttactacactgatccacgattctcacagtcgcttgcgttccggtcgcagtattcgtcacctgcgttcgaggggacatatgcacacattcaataaatttgtatatgaaaagagcattcagaaacgtgatttttgaaatagataaaagaacttacccttaaacatctatcgcaagaatcacgaccgcgagcaatacacacttactcggtagagatcccagttgttttgtgcaggattgtaaatatggtaagttgctcaaacgttaggtgcggattgagcggctgctttggccgcaaacgcacatagcaacacaaacacacataagctaagtcttgacatttctttctatatgttgttatttgttttttagtttaactttgtggtagataaaataaagaattgatgaaactttatttatagaaaattatatactatgaaatgactagattagcctaacaaaacgcttggagcacgttgtgtacgtatgattttctttggctttcctttgaatattcaatgtacttactattcttgctaggtg

SEQ ID NO: 11281 - DNA, 608 bp, Arabidopsis thaliana
taaatgtgagacgggccagtccattcattaccaattaattttaagtcgtgaagctcattgaacttaacatttaccttgagataagtgtcaattgcacggtataacccatcttcggttacacgagcatggttagggagagcttcgacgagagatataaactccgagagggttaaatcgccgtctaaggcggcttctgctaagtaagagtccacgagcttcgctactttaattagggaagcaccggatttaactccttcgttgtctaagccagcaaatttcttaaccaaccgagtcatgagctcgacatcgagcaatgtcccacacgtgtgactaaaggaaggtatcattagctccttgagtgaagcttgatcaagctgccatgaaatcctcgcctcgagctccgccttgtaatttgcatctgctccgaccatgttcgcggttctgagtagacggaggaggaaatcacaaggaacggaatctctctcaggtgggatgattccgattagagtttcgacgaaggaacgtttcttcatcacaaacgcagtaacagagaagctctctgactgctgctgcggctgcggttgctggtcatcggagtttaggacgat

SEQ ID NO: 11282 - DNA, 845 bp, Arabidopsis thaliana
gtgtcgatttaacgatatcaatcattcatcatcatcttatttagtggatgctatattaattttatatcatatgaagaatttttcacagtctatctggattcatctgtcgttatttgtgatttatctttattttgattgatgcagatttcattgttggtaaaatcatctaagcgtgatcatttactaaaattattgattaaaatctagcgattcttataatattggtagcctgattacgtatccactaaattttcccaaaacaaatttataagagaaacggatatataatagaatcagtctgaacatggagataataaattcccaatcatcatcattattacataagattttgatatatatgatcaatcactattcactaagattgaatgttttgagtttcaacatttagggtaaagaataccacaagccgctagaagtttgtgagcattttgagggatgacatagtgaccaaacgttggagactttatgtaaccacaaagacaagactgctgctctttcagcatctcgcaacaatatgccggtggctgacttcctttgagtatcgccggcaggcatgacatgaggtttgtcacgatgcatgccgctttctcctctataccccaacctccaaccacagttgctctggttggagccagaggtgacatgacgatcataacagatgccacgaataataatttcgtgaacttcatgcctattagctagttttcctctctaattgtatttatttataaaaattatttgagatttggtttataagtacgataaaactatcacgtactgtatactcattttaaatggtgttgagaaattttgtaacaagttcg

SEQ ID NO: 11283 - DNA, 497 bp, Arabidopsis thaliana
tcatatgcaattgagatagatttctcggaaaacgctttgaccggagagatacctttggagttagggaacatagaggggcttgagcttctttatctttttgagaaccaactcacaggtaccatccctgtggagctttctactttgaagaatctatcaaagcttgatctctccatcaatgctttaacgggtcctattcccctgggatttcagtatctaagaggactcttcatgctgcagctgtttcagaactcccttagcgggaccatacctccaaaacttggctggtatagcgatctctgggttcttgatatgtccgataaccatctcagtggaagaattccaagctacctctgccttcactccaatatgatcatcttgaacttgggtacaaacaacctctctggcaacattcctactggaatcaccacttgcaaaactctggtccaacttcgtctagccagaaacaacctcgttggtcggttcccatcaacgtgtgt

SEQ ID NO: 11284 - DNA, 909 bp, Arabidopsis thaliana
ttcagattttttcttcatctgtagatttctgggtttttttttccgtttcgtgaatcataagtgaagttttggatgcaaatctgcgcgaaaaaagttggacctgcaatgagcttatttagatagctaagacaaagtgattggtccgttgtttcagttctgattgtcagagagtttgtttcgagacggcgacaccaatgcgttttgttaaccagatttcgggtaagaaatgtatcgagagtttgtttcgagacggctacatcattttcttatgaagggtgaaattagatagaccaaagattgaaacacaacatttctttcacaaaaatataataaacttgatagcatttaggatcagctactctcactaatcagataaataagaagaacaaacgttttaaaacaatcaaatacatgagtggaagcttcagagttgcaagcaaaaaaagcatggtcttcaggtcatggcccttgagctttctcctactttttatcttcttctctggcaacaatcttgtactttccactttcctgttgctgacaaaaaaaagttaccatcaaaaattgagccctatacaaaacatccacaactacacagatcagaagaaagttggatacaaatcttaccctttcccaaagtttggtatgctcattacagaaaccaacaacaataccaccactcttcttcccttcacgatactcaatacaaagatcttcctttaacccacaagtaacatgaaaagccaacttacatctcatctccgaacactcaataacacaaccgcgtctaaccttacacaaataacacctatctttccatctcttactcaatacctcactacaacaaatcccttctcttccttcaggatcctcaaagtaaacttccggaacaaacaacgcacaagtaatatg

SEQ ID NO: 11285 - DNA, 1586 bp, Arabidopsis thaliana
caactctagatctagaggatcgagtgactatagaccacagcgtcgagatcgcggaggggaaagttgaggaacgcgttagagcggcgttggattcgctggagaaagctagagactgtggtgatgaagataccggagaagtcgacgacggcgacgggcttttatcggcgctgaagtcgctttgtttgaagatggacgcaagaggattttgggggtttgtgattgcgaggaagaaggaattggagaatctccggtcacagattcctgtggcgttggtagattgtgtggatccgccgaagttagtacttgaagctgtatctgaggtttttccggtggataaaagaggtggtggagagaaagtgagcaatgattttggatgggcttgtgttgtgattctggagagtttgattccagttatggttgatccagtgatggggaagtctcggctacttgtaactcctagcgttaaggagaaagctaaagagattgctgagacgtggaaggctagcttggaagagagaggagggattgagaatgtgaaaacacctgatgttcatacgtttctgcaacatcttgtgacttttgggattgtgaagaaggatgatctagctctttataggaaacttgtggttggttcagcttggcgtaaacagatgccaaagcttgctgtttcagttggtttgggcgaccaaatgcctggtaatctttcttctttacctttgattaccattagatgtttttagctatatattggggaagcacaagttgttgtcttttgtcatgggaatctgtgagtagtatctgaaatggaaaatgatggtttttgggttgttatggcttcacacagatatgattgaagagttgataatcaggggacaacagcttgatgcggttcatttcacttttgaagttggtcttgtacacttgttccctcctgttcctttgctcaaagcttatctgagggatgcaaagaaagctacagctttaatcactgatgattcaacaattctggccgatctgcggtactttcctccatttgtgttactcgttttctttgctggatccatttgcagggatctgtttcttctgcactcgcttaccaatgtatgtgtgtatttttctagcatcttgtggcgcgcaaagagcaatcagcacttagagcagtcttaaaatgcatagaagaatacaaactcgaggaagaattcccacccgagaatctcaagaagaggttggatcagctagagaagaccaaaaccgagaagagaaaaccagccgtgattcccgccaacaagagaacccgagcaagctacagcggtccaatgccaccagccaaagcagggcgtatcacaaacgcttacgtctcctctttcccaccgcctccaccaacattcatcagatcccaaagtcactcacctcaatacggtgtaccagcatacgccacatccccacctaccatctacagcaacaggagccctccataccaatactcacccgaggcggttcatggttcttaccaaacctctccggtcagttatccgacagcatatggtacctactgcagtccggtggctgctcaccccctccagttt

SEQ ID NO: 11286 - DNA, 759 bp, Arabidopsis thaliana columbia
caacataacaatataagttgatgtctactttctggggagcacattcatgtctctcttcttatagaggcatgagtcttctgtacttgaagaaccagacgaatgccgaaaatatcacaaagccacatactccagtaattatgagtacccatctgaatgcacctggctgattgaagaagtctatctcaaagttcatcccaaagatcccagcaacgaccccaaatatggctacaacaaacgttgcagtcgtcagaagcaactcgaactggatcagctgattccgcacattatcctgcagatattgaagaggttttcagcatgactcttgtgcattctcaatctggattaatatcagctgtggaagatggaattttgaggtattaccagttgaatgttaatgaaatcttcagtgtcatcaatgtactcctttaactgtaaagtaaagagaggaacacagatgattaaagctgtctagcgaagaaagatcaaaagtaaaaatgagaggagccattaaagtaccgatgtcaacttgtttagagtactatcaatgacgacaaagtaagcttccagcaacatctctagctcttctatattctctgcaccttcagaactccttgcactgtcatgccgactcctcgcaatgctcaagcttttatcaagtcttcgggaatcaggtggagaagaaacaggagacaccggtgcagaaacagatagaccatcatttgacctgtaacccaataaggactggtcaccgtacataga

SEQ ID NO: 11287 - DNA, 1114 bp, Arabidopsis thaliana
ctctcttccaaactcttcttccacgtctcagcaatctccttagctttctccttaacactcggagtaacaagcaacctcgatttcccaatcactggatcaacaattacaggtgttaaactctcaagaatcacaacacaagcccatccataatcattgctaactttatctcctcttgtatccaccggaaaaacctcagatatcgcttcaagcactaacatcgccggatctacacaatcaaccaacgccgccggaatctttgaccggagattctccaactccttcttcctcgccgtcacaaagttccaaaaacctctcgcatccattttaagacaaagagatttcaaagcagaaagaagaccttcttcatcgtcaacatcaccggaatcatcattagaaccatcaccacaaccatctctagctttctctaacgattcaagagcagctctagctcgttcacctactttcccagctacgatctcaacgctatggtcgattgttacctctctacgcttcagagactcgagcgaggtctgagtctggttatctagagtttcaatcatctgcttcaacgcttcagatttcttcatcagattctgctctagagaagtgaagtgatcggagagctcttgccatagaagagtacagctagtcatcaacgacgtctgtttctgaaactcctcgaaactcggctgagctaactcagttaacgtcgcctggatcggggactgaccccatcgccggaatcggaaaagaaactcagactccgttgatttgattgatacagcagagaagaataaactcaagagagagagtgaaattgaagaaaccctagaaatgggaaaaaagtaaagagacgaagaagcagataagagacaagagatacagtgacgtggacaactcgaaatagcgacacgtctcagtggagtctgattaaaggcgcgattattacatattcttctatattgcgccgtcgacgcgtagcttagcgtgatatgcgtagtataagagagttgggtgatgacgtggtaataataataagtactattactatagctttgctttaatttttcgtataaagaaaaaaaaaggtgaaagagataagggtattaggggg

SEQ ID NO: 11288 - DNA, 802 bp, Arabidopsis thaliana
cgttgctcgaacctgggctttcagcgatggcggttacagggctcttcagtattcccctggctcctacaacgaggatatgtttcaggtaacctccattaaacccaacttgtctgtgtgtgttatgttatgttttgattcagttggaagaactttggaaaaatggtttaatcagagattgaatatacacttatcaatgcaccagttggatcagaccaataatttgggtatctccttgtttatggaattaatttctgtgaatctttttggacaaatttgagattctctgtttatctgatgatacggctgttttacactaactgacacaaaagctaaagttggtggctttttgatcttgtggccaagttttgagactctctgttgatgtttctgtgaataatctgtttcttttgtcatttctggtgaaaagggtttggattttgcgttacgtgaggcaagaaggcatggtataaagataatactcagctttgccaataactacgagagcttcggagggaggaagcaatatgtggattgggctcgaagcagaggccgtcccgtttcttctgaagacgacttcttcactgactctcttgttacagatttctacaagaaccatatcaaggtttcaaaatcaaacctttaatcttctctcttgtgcagattcaaccaaaaaagtgcaaaaagtaatggatttttgtttgctcctgcaggctgtgctgaacagattcaatacctttaccaaagttcattacaaagatgacccaaccattatggcttgggagctcatgaacgagtcccgttg

SEQ ID NO: 11289 - DNA, 1088 bp, Arabidopsis thaliana columbia
gctcctagcaccaaatatcccaacattgttagctttctcttcttgtactctgtttctctaatctgtgtcctttgagagttgatggagctgacatatctttttcttgcttagtttggtggcttgttgactgctggaattgtagccttttccggcacgtaagttgttatctttttgtttctcagattcttcagtttgagatgtgtatggtagagcttttgtgctagatgtttgttggatgtcttgtcattgaggttatagtagtgcattcatggatatttgagctatttagatatgatttggactttctagaattcatatctaatctctagcagtagcaatacttgccacaattcttcgtggctagggagattttatcgatttcgacatgtgtccaactctgaagcatttggaaaccattgtatcacttatttaatagcataggtctttgtatttgagttaatgaatggtatttgtcccctttgtacttcctttgatatgtgaaggtatgctctttggagaagtaactatattttagatgcttagtagataactttagttttgtgttcaatagtctatttccgggtatgagtatgtgagaagtttcatgtgtgttgaaatgttgttgcaggtgttatatggtagcgctgcgggaggacagaaagttttcgacattggcaccattcggaggctttgcgttcattgctgcatgggcaactttacttttctaaacaatctcataaccatctatattgtcaagtttgtggtcaagcttatcctacatatgaactcactgtttttttttgtttacctaagagattgcttaataacaattctgtgtcgacaaccattaagcatcttcctttacttgttcagtttgttgctaaagggattatgtaaatgacgaccatattaatgtaatcttattaccatacaatttatcaaaattctacattacaagaacttccaagttccaacaaagatttgtttatattgttcaccggtagtataattcatcatctttcatttcatcttggtctttcctttgaatcattggacatactcaaaatggcacatactcaaaatggcac

SEQ ID NO: 11290 - DNA, 618 bp, Arabidopsis thaliana
actttttagtctttggctcgtttgctctgggatttacgcttgttaacgtctagacatcttttcctcaaccgaatcgtctttggtgtcacctgaccacattaaaccaataacagtacaacattaaaccaagaacagtaaatgcataggaagccggaaacaaaatgttcgtcatggataatatgattagctagatttggaattggtgatgaacaatgtacctctataagctcatctgaggcaacgtatcctatagcttcctcaagtgtcatctgaatagacaagaattcaaaagttaaaccacaaagggcaagaaaattttctgatcaagaaaacagttttcttatgtcatgttaaaagaggaaagggtacatacaagacgaggtggagatagcttcacattttcgtctttcccagcagagcgaatgtttgtaagttctttggccttaactgggttaagctgcagtgcaagggcaagtgagctcatggcatttcgacaatttagtatgaagaggagaagtcgaacaaacttacatcaagatctgtttctcgtgaatgctcaccgataatcataccatcatatgactgttaaagacagacaaacaaaagacagtgcagcat

SEQ ID NO: 11291 - DNA, 970 bp, Arabidopsis thaliana
tcaactcccctcccgtgccatacgcgcgtgggcgtttgaataatcctacgccaccgaaatccgactgcgacggactaatcggcgcaggatatgtttcgccgtagcaagctgtgctaatgcccagcgccagtaagctaagcagatgtctttttttcattattgaggtatccgctgcgtcagagtctgaagaatgtcggcgttaagggcatcaggcgtctcactccagacggagtccgcgaggccaacataaataatgctgccgggcatcggctctacgtgacgcttgttccagtaagccaccggcgctttttgcgtgcgtccgtccgggtaaaccacccacgcgtagctgcgatccgcaccgctgagcaggctctggtcagagagatagctcgccacgtcgcgacctggagtgaatggctgcttgccaggacggctgataagcccgaacaacgtgaccgtggacggcggtggtccgacccacagcgtgtagttgccctgcaacggcgggttaccgcgttcggcaacgcggacgatatcgggatcaagattgattttttgcctgcccgtcactttcaacgcctgaatttgctggcgtaaggcgttaatcgcagcggcatcgtcggcgctggaatctgcgccctgttctgccagccgtgtcagcaacgcctgctgctgacgcaatgctgccgccgttgccagctcttcgctaatcaccgcaccgggccaccagctgtttgccagccgcggttggcctaccagatcgattaaatgctctgcgcccgttagcgttttggcctcactgctgccattgctgaacaccttgacggatcctgccgcgaagaccgatgacgctcccacactcaaaagcaacgcgacaatagtttgtttaatcattgttttgccgccttgatgagagtggtttcaccggaaaataatccgcgccgagatactgttccgactggcgaatttg

SEQ ID NO: 11292 - DNA, 773 bp, Arabidopsis thaliana columbia
gggactgtttcggtgccggaaagacgttcgatacgaccgtctttgtaaaccctgacgaacggaggatgctcggagatgatttcagatgaagagtgtgaacaaatgcaacgaagagtggttggagttgatagtcggcgaatgttgcggcctgagacggcgatggtggtcggtgaggagtaagagcgagggagttggcgaaagaagcggaggaagagagagggtgaagcaagtgaagaagaacaagtgattcttcggagcatggttcccggaatattttctacggcgaaagaggttgcacttttttggataaggatttttatgaagatagataaaccgaccgacaagataaaaatctaataagaatttgaatacaaaaaaaaacaaattaatattttacacatatttttttctcatgttgaagaaaataataacacacatttaacaggttcatataactctcacacagtctgaaattcatgtattttatttcttaaaaacaagattacatgatcatgaagaacatttacacaaaaaacattctttcaagtttcaaccaataataaactcgacaaacttcttcaagaatttcaaagccttatcagatttaggattctgcaaatgaaacacatggtcctcaccttcttcctcaaccacctcaacagtaccttcccactcacacttctccagcttcgccgcataagccaatccttgcctaacaaacacatctttcccagctaccgcaaccaaaaccttatcacatcccaacccagaaa

SEQ ID NO: 11293 - DNA, 673 bp, Arabidopsis thaliana
acatgcgtattatcgcagatcgtcaaggtgttgatggcaggacatatagtatgcataccacatcagaggttgcagccttgatccctggagattttcgacatggcatgcctgatagggacattgttatagaaaaaaaatcaaatgggcacctaaagaggattaaccagattcacatttcctatttggctctgcaatatccactaatattttgttatggtgaagatggcttcagacctggaattgagaagtgttttaaatcaaaaagtaagaagaagaataagaagtgtatcagcatgagacaatggtttgcattccgtattcaagagagggaagttgagtgccaaactttattacgttcaaagaggttgttccagcagtttctctgtgatgcttataccactattgaatctaacagattaaactatatcaagtttaatcagtcgaaacttcgttgtgaaaactacacatctgtaaaagaagcagctgcagctggagcaaccactatggaagaagaaggtaacaactactgattcagcttcattcaatggtggtcgtagatatatggtcaaagctactatgatgcatggctatctgtaactttatggttttcagatctttcatccctttactgtaaccaaagtggcacatatacaagatctgcgataaagaggtt

SEQ ID NO: 11294 - DNA, 834 bp, Arabidopsis thaliana
tgctttactgcagctacttcttttacagatgtgtagttttcacaacgaagtttcgactgattaaacttgatatagtttaatctgttagattcaatagtggtataagcatcacagagaaactgctggaacaacctctttgaacgtaatagagtttggcactcaacttccctctcttgaatacggaatgcaaaccattgtctcatgctgatacacttcctattcttcttcttactttttgatttagaacacttctcaattccaggtctgaagccatcttcgccataacaaaatattagtggatattgcagagccaaataggaaatgtgaatctggttaatcctctttaggtgcccatttgattttttttctataacaatgtccctatcaggcatgccatgtcgaaaatctccagggatcaaggctgcaacctctgatgtggtaggcatcctatatgtcctgccatcaacacctttacgatctgcgataatacacatgtgaaatggctcttcatcatttgtttgaatcctctctctggctgtcctaaatcttctaacataagggtttcaacggttaaacatctttataatggcttcaataagattcttatccaaatttggttttcctgattctggcttagcatttttgcccttgctacattagatgaaaaacaacagtaaactatttttaaaacaatataagtgcataacctaaacagacatataaagcatgacagatatgagctatgttacgcgatgacagtagctcagcaatcaactacgttttcagtatcaacaatgtatagttgggaatacgtagtgtaatcccaagagtagg

SEQ ID NO: 11295 - DNA, 1151 bp, Arabidopsis thaliana
agactctagagtgatcttgcaagaacaaataatattaaatgcaaataaaaaatagtcaacggtccaaagtggatcataagccgtccgttcggtcgtctgaacttcatccaacggttaaaagaaatatacctgacgtggccttgggcattgtatattagtagtgagtgtgcccttggaaggttctgtaaaatgttttattcgcctctatcagaagcttgacgaaatctcttctccgtctctctctctctttccctcgtccattccacgatcttcttccaatctcaaatctcccattttctagtgtttcattttgatccttcttccttcctctggagatttctcaaatctcttcaactattttgatttgccgccatgtatcgacgcgccacttccggcgtgcgttctgcctccgcaaggctttcttcttccctctccaggatcgcctctagcgagacagcttcggtttcggctccatctgcgtcgtcgcttcgcaatcagacgaaccgatctaagagtttctcctcggctctccgctcctttcgagtttgctctgcttccacgcggtggagccatggtgggagctggggatcgcctgctagccttcgcgctcaagctaggaattccactccggttatggagaaatttgaacggaaatacgcaaccatgggtatgtctgtttgctttctctgacgttctaagaatgattgctcttaacttgtgtgacaagaatctgtgtttaccgcatatctgcttagatcgatttttcgctttaaaatgatgatctactgattctgatatgttctgattcaaagtaaaactagctagatgaacatttgatttgctcttgcattttggtttatgatttgtagatttagtctactaaatttcttttttgtatattctaaaaggacaagcaaattcatgtgttatgtgtcaattgaattatgattttaatgtttgatgtgaaaaacgcagcttctgagcattcctacaaggatattttgacaagtcttcctaaacctggtggtggagagtatggaaagtactactcgttaccagctttaaacgatccaagaattggtatgttccacagtgcgtctatctgttttgtatgtaatggatatctggtgaagttaatacctttttgtgat

SEQ ID NO: 11296 - DNA, 1299 bp, Arabidopsis thaliana
cccccatcctcggacgaacctctggatccatttccgtgcagttcaaggcgacatgaatggctgcaataacttgcttatctgcgtgacctttgttcagaatctccgggtctaaaatctcactcaacggcttctcttccttgacccagttcctcacaacacgcacgagttcttcgccattgtttttagaggaagcattgggcaaacggccagtcaacaactccattaggacaaccccaaacgaatagacatcgcacttctgagataatttgcaaccagaagaagcccgagcctcaggtgcaaggtaagcaacagtgggagctgtgattcttgtcaccgttgtagcagaggttaagtaggtttggtctaagctttgccttgtggcggatagcgaaccgatgagtttggagtaacctgataccaaacgtgtaagaccgaagcctgagatgcgaggcagtaattcatcatcaagcaggattttggttgatttcaggttgccatgaacgtactttcttgggctgtactcatgtatatacatcaagccacgagctgttccttgtgcaataagtaatctttcaggccaagagagtgaaggcagagtattcgagggtccacctacaaaaaaatcaaaaccctcttctcaaatcaatgatcacaaacaacaaacaaattctggaaaaaaatctcaactctatgctcatatcttaatctgacctctgcttgtttctgtctcattaaacacgaccttaataccaatcttaacctcttaaacgtaaccaacaatattctctcatcaagctaagacaaatagaatctttgcaccaccttctacattgctctatcctaatccaaaactgtcgcaaaaacagaatttacgttgttgttttcgacgagaagaaaaatccaagtttctctggaaccataacagttaccaaacatgtgattttgaaacagaaaagaccaagaagaagacgccaacaaattttctattatcatacaatctaatatagacaaaaaaaaaactctatctatacagattcaccaatcaactggttcaagagcacaaactccaaaacaaacctctcttttttgtcaacaccaagattcataaaacaaaattgagattagtctcataattagtggttgattaatgaagattagtaaattaccatgtaaggcagagtacaagctgccgttgcgtatgtaatcagtgatcaagagcctctcgtcctcagcatagtaataagctcttagccgtacgatatttggatgttggactctacttatagcctccacttcatt

SEQ ID NO: 11297 - DNA, 919 bp, Arabidopsis thaliana
tggccatgctacaactgaacctattgcatcagaaatgtattcgatctctggatttggcctccagaccattgcattaccaatcttagccacttcaacccagactttgcttgcattaggacctaggggtacattatggcaagcatcgttcgggtctgttgaaagtactcttccttcagctaccttatgtccagaattgctgcaatctaaaagaaaacacttctgctttggactttttgtggaactgttgctgcctgaactctacaactcaaagccaataataaaagcaagttccaacatcaatgaaagttccaacatcaaccagcagacaaacaaatgaattaacaaggttacaataacaaacctggactttaggtagtgctgcatctgtagtggtggcagccgtgacgtcaatctttaggactggccatgcgattttctcgttaattgcatcacccattaaacaaatatcagtagttggcctccacaaatgagcattaccattgaacaccttcacaacttgaatactaacagcacttggttctagaggtatattgttaaccttctctttggagttagatgagcacacaacaccttcagcaataacctcatcgtcttcattagtccaatcatatattttgaatcttcgagtttcaccttccttggtttgctaaaatgtaagaagctaatgattagagatatatcatggacccttatacaaaagcactttaagaagcggttggacccttatacaaatgtaagaagctaatgattgggaaacttgaccatggatacatcttcagaagcggctggacccttatacaaaagcactttgtctattggccaaggtattttgcatccacagcttcttcaagatataacacatctgttgtaggcctcacagagaagcttctaagcttag

SEQ ID NO: 11298 - DNA, 582 bp, Arabidopsis thaliana
ttcgattcttcgtagaagcatgaaagaaacgtgtattgaggtctccttcattcatccattgtattcgacatttcaatttccagtacatctcttccttgagataggccaaaagcagttctcttctaagttgacggagttgttcagttgatacaaggaaatctgtgcttgcttcatcaatgatcataaccagttccttaatccgtttaatagagtttgtgttgtttgttttcttccaacttgaaatgtacgatctgcagtttctaatcctttttattacagagcatcgataagccggtgtattattccaagcagcttcaataatcgtttcgacctcagggatgttacacaatcttgagtcaaagtggaacatgcgtgtacctttttctgatgttttccggattttgatgattgtaggccgatgatctggttcaatcacttccaagtattcaactttagaagcagggaagttagctttccattgatctttagccattgctctatcaagccagcattcaatagtgtgagtttccttttccaaccaagtcatattattcgtgtgaatggaagacagagactttgaag

SEQ ID NO: 11299 - DNA, 760 bp, Arabidopsis thaliana
ccctcacagataatgtatttcattggtgcagagatctacagacacgatcactatagtgtgagtctctaacgtagtatataagtgtaaacgagatcaaattctttactctggtgccatgtcaccaaatgtacccattgcaccccgagttgctgaacctccaacttctgtcagttttgttaacccgaaatctggtagcagtaacacgtctacgactcagagcggtgacactggaaaaatgtaaccgattcagtaattatcacttttgattgacaaaagagaaatcgagaatgtacctttgctcggaatttctggtctatcaaaatattggcagatttaatgtccctatggacataaactggaaccgtgtgctcgtggatatattctaaacctctagctgagtctagtgcaatctgcactctcttagtccacggtaatggttctcgtcctagtttcacataaactcttttagtttacaactttctcgaaaaatgattcacttttggaggtctttatattgcgtacctgacccatgtaaatgttgtccaaggttaccattctcaacatattcatacaccaagaaaagtgatccctcaacacaatatccaatcaggcgaacctgcaagacaaaacagattcgttaaaatttggctaagacttgatcttcatctgatctcagatattatcttgagagaccacataaggggtttatcaggttgacatgatgtacacgcgttaagacttttagttccgccaagaactg

SEQ ID NO: 11300 - DNA, 1084 bp, Arabidopsis thaliana
attttttttttttttttttttttttttgaattgtttcattctttcattgacaattacaatctttgttagttacttagtggtatacaaccgtgtttgagcgggtttgtttgtgtcttataggaccaaccttgcagcgagtggacctaggccaaacccacaaggtacataccactatggcaagataaaagtcactcgaacaatcaaacttgctagctctgctggaaatatcaatggcaagcaacgatacgcggtgaatagtgcatcattctacccaacagacacacctttgaaactagcggactacttcaaaattgccggtgtatacaaccctggaagcatacctgatcagcccacacatggagcaatataccctgtcacatctgttatgcaaactgattacaaagcttttgtggagattgttttcgagaattgggaagatattgtccagacctggcacctcgacggttactctttcttcgtggttgggtaagttaaacaatcatatttgcatccacacggtaaaatttggtagcattctctaaaccaagatagagttcttaagaaaatcgaaagttgtgtacattttcaagactattgactgatgatcacttggtaacaattaggatggaacttgggaagtggagtgctgccagtagaaaagtctacaatctaaacgacgcagtctcacggtgcactgttcaggtgagagtcctctaaagccttatatattttgatcacacagttagccataaaagctcagtatgggttataaaaaaggtggatcattggatgaatttgtgcaggtgtatccaagatcatggactgccatatacgtatcactggacaatgtaggaatgtggaacctaagatcagagttatgggaaagacaatacctgggacaacagttttacatgcgtgtttacacaccctccacttccctcagagatgagtacttgatcccgaaaactttatgactccataacttttagaccgtgaggccaaacttggcatgtgatacctctgcgtgaaggaagtgagaggttttgatagacgattgcaatgactttctgaaacacatttcata

SEQ ID NO: 11301 - DNA, 598 bp, Arabidopsis thaliana
caaggttctttcaatgagcacatcgcggctctgcggcggctcggtgtccaaggcgtcgagattaggaaggctgaccagcttctcaccgtttcttctcttatcattcctggcggcgagacaccaccatggccaaactcgccgagtatcataacttggtccgctcctctctctctagaatctaaagttattgtttgcgaggacccacttgaagaaactagttaaaggttccttttttatgtgtgttttgacacgaatctggcgttattcaccaaaattctccagaatttcagtcaaaacgtctcttatacctgaataattcagttagtactgttgaaagtaattagctttgagattgaaaatgaaggaactttgggattagttagccttcaagtacatgaagtaatgttttgtatctgaaacctttaaacattgtggaccaaactactcgttgatcttatggatgatattttctgtctttaatggaagctgtgataagtgtaggaaagggagagctatcatttacttttatctttacaaactccttgtttagatttggttgtcttacagttttagtggtgaggacgaagaatagtgtaaa

SEQ ID NO: 11302 - DNA, 825 bp, Arabidopsis thaliana
aggtaagtggatttgttagttcaatatgttgttgatgtgctggcagttttagatttcgtaccaaattttccactgtttcaatattcttttcttggttaaattgtagcttgtcaagtattgaatccatgagggatgtgatggatctcttgggcgacatgctacaagctgtggatcccagtgaccgtgaggtattgaaatctattatacagctatactgcgggtttgggaatgaaatctattgctttacccatgatttttctgttatgtaggctgtgaaagatgaagtcattgttgacttggttgagcgttgtcgttccaatcagaaaaagctgatgcagatgctaacctccactgggttagtcctttatttttaggatctttgtacttaaatttgttagatgtgtaatgatattgttgatctgagaggttccattgttgtgctaaaaagtcttttgtttatgtggcagggatgatgaacttttaggccgggggctcgatctaaatgacagtcttcaaattctgctagctaagcatgatgcaatagcttctggttctcctctgcctgttcaggcttctggttctcctctgtcagttcaggcttcgaaacctgctgactcgagccccaaatcttctgaagctaaagattctagttccatagctggttccagttccccaataccagccactgtttctacaggaaaaagcccaattgatgaggagtacgaagaggaggaagatgagtttgcacaattagctcgaaggtctgtcttacgagttacaattggattcagaaactgtgcatatcttaactttagtatttgacat

SEQ ID NO: 11303 - DNA, 580 bp, Arabidopsis thaliana
ggttacatcgattagtgcatattgttaattgtttgtagtttatgtgcttattgttaatttttcagttggatcatatatgtgtatttgtagacaaatctgtttttatttcgttattactaatcaacaatatatatgtgacctagaatccataaggaaatatgaaatgtgtttcagaaagtcattgcaatcgtctatcaaaacctctcacttccttcactcagaggaccgggtgtcgtggtgtggtggccagtggccctgccgcagagaagagcgttcttcgggatcaagtactcatctctgagggaagtggagggtgtgtaaacacgcatgtaaaactgttgtcccaggtattgtctttcccataactctgatcttaggttccacattcctacattgtccagtgatacgtatatggcagtccatgatcttggatacacctgcacaaattcatccaatgatccaccttttttataacccatactgagcttttatggctaactgtgtgatcaaaatatataaggctttagaggactctcacctgaacagtgcacagtgagactgcgtcgtttagattgtagac

SEQ ID NO: 11304 - DNA, 845 bp, Arabidopsis thaliana
tgtagtgtaaacagactcttccctctttgtattgttcagattctggaacataagatatgtgatccaatcaacacagtactcgagatatgttctgataaaaaaaatgttggtactaacaatttcagtttggatgggaaggattatccgaataaagatatacctaattctgatcaaaagagagcgaaaataagtctctggagtttagattgagaaactaaatgtcaacaaaccggaaacaaaaaaaaactgtgtcaagtaacaaaaacaaaagaaaagactcaaagagagtagcagcaacgtaagatttgattccaaagtgtctcacaagggaggaatgagtaatgctactccctgttttattcactcatcacaagtccatcaatcaatctatctctttactcttggacctctggctgcttctttccacctgctttcaagtaccaaccaatcgaaccgacaatagcaaccacacctgccacaaccgcatagtttctgttcttgtcttctgacacctttgggcccgactcagctgatgcagatgctgttgcaccagcaacctttgcttcgcttgctgaccctgctgcttgttctccaggaccctagtaagttcataagaagtttcagccacacaagactgtaaattttctctttatctaaacaagctattcgtagtttcaacaactggagttaaaggaattatttacctgtcgagctaacttctgaagcttctcctgctccattttctgcaatgtagaaaaccataaacaaggtacaatataaggacagaagatgacttactcatgaatataaattggtttgaaaagagtaagtattatgctacaggt

SEQ ID NO: 11305 - DNA, 617 bp, Arabidopsis thaliana
gctatcttgactgtacaatcatttgggagtctaacaaaggtattttctaaggacctaaagtttaagtataggtctctattgtgtgtaacatggtgagtggctcctgaatctattacccaacctctaggagacacagccggttcttgagatacagaagaaataagcatgtcataataggcattggagaatagtgacaagaatgtacctgagatctgtgagatcataggtacggagggacttgcagaaatcgaagcagaagatgtagtcggcatgggtgaggcagatgcaatgtgaagcttagtactaagataagaaatcatagtctggatttgatcagtcgagaactcttcataagaatctgtcttctcatttggtgtctcattcaccggctggagctgagtactagcaagattagtagaaccaatggtctgacctttagtccatttagaacccggtggataaccatgcttcttatagcatttgtctactaagtgaccaagcttgttgcagtaagaacacttaggcttcttgtatgaaccttgagccatattgacttgagaatcaataataggagaagcttgaacttgaaaggcagcagtcggatttgatagagtagg

SEQ ID NO: 11306 - DNA, 961 bp, Arabidopsis thaliana
tgacgtcatctggttaatattatgaacatacaattccggtaaaccgatcagttgacttcggcgttgacaaacaaaaaaatgctaaccatagttcaaagaaaaagaattgttacaaaaacgattctacgataatttttataatttataataaataataaatctagacggtaaaaaataataacttaaaatttacgttttttctgacatagaagtctatattttagtacacagattcttttattttatttatgtagaatgatatgtcagatttgtcatctttgttagagtccaaaattggcctcttccaaatttcttatggttctttttcatttttgaccagatgaataataccgtcgtggatttgctggtagcctgctgtggttccttctgagagcgattccattatctgtccctttatatggagctaagttgaataatggaatgagctatactctggggggtgagcactgaacaattaagacagcgtattacatttactttccccaagatatgcgaagagctttcctgaaacattaaccgatcgtataaaacgaatgcctgatagtactcctgtccggcattgttatcacaagtagactacgcttatcacagctttcccatcaagttcgattttttctgaaccgcctaaatcattcgcgatagatgcgctcacctgaagcggtataatggcgttcgttacaggagttgtggttgtttcacctggtttgacaaaggtggaataatagctttgatcgactgcaagcggataagcggtgagcgtttgccatgctcttttttgccctgttatgacggcatctgcacctgctattgagacagctaacgtctggctaccattgctggcactaatgttgttgctatcaattaacacggcataactaccgatatttggattatctgtttgttttccttaagccgaataagcgcgttgtctggctaatat

SEQ ID NO: 11307 - DNA, 363 bp, Arabidopsis thaliana
tctgtgagatcataggtacggagggacttgcagaagtcgaagcagaagatgttatcggcatgggtgagatagatgcagtgtgaagcttagtactaagataagaaatcatagtctggatttgatcagtcgagaactcttcacaagaatctgtcttctcactcggtgtctcattcaccggctggagctgagtacttgcaagattggtagaaccaatagtctgcgctttagtccatttggaaccaggtggataaccatgcttcttatagcatttgtctaccaaatgaccaagcttgttgcagaaagaacacttaggtttcttgtatgaaccttgagccatattaacttgagaatcaataacaggag

SEQ ID NO: 11308 - DNA, 379 bp, Arabidopsis thaliana
cgccagtgtgctctactttatgctttagggtaactagagtactgctagaagaacactactactatctgaccccacaattgaccttttagttgtccatttttctttagggtagatgcttgttatgagcaagaagttggcattctctgtagaatcttacttgatttctcattcagtgcagaaacatgactctttctttcgagaaagttgcattagtttaattggttttcagtttcaccaaccactgcttgaaaatttcagacctcggagttctggcatgaagcagaaattctttcaaagcttcatcatccaaatgttatggcattttacggcgtagtgagagatggaccagggggaactttagctacagtgacagagtaca

SEQ ID NO: 11309 - DNA, 543 bp, Arabidopsis thaliana
gccaaaaacgtaaagtagtcacgtcacacgtctaggtctctcaggaaccatcaccgtggatgatttaaaggatctcccaaatctaaagacgatcaggcttgacaacaacctcctctccggtcctctcccgcatttctttaaactccgtggcctaaaatctctcatgctctctaacaacagcttctccggagagatccgtgacgattttttcaaggacatgtcaaagctcaagcgactatttcttgatcataacaagttcgagggaagtatcccttcctccattacgcagctccctcaactcgaggagcttcacatgcaaagtaataacctcaccggagagatacctccagagtttggcagcatgaagaaccttaaagtcctcgacctctcaaccaacagcctcgatggaatcgtcccgcaaagcattgctgataagaaaaatctcgctgttaatttgacagagaacgaatacttgtgcgggcaggtggtggacgttggatgtgagaatattgagctaaacgatccgcaagaaggacaaccccg

SEQ ID NO: 11310 - DNA, 776 bp, Arabidopsis thaliana
cgaagtataagctcaaatatataagatctgaacatttgtacgcatcctcggatattcatttccactatatatattattatttaatttaatagatcagggatatccttaggttcagtgaaggatacctacaattttttttttaagtccttctaatgaaccccttcattccaattccgctgctctctgacatcattaggcggatcggccgtcagggtttccgggagcttgctcctttcatcgccgctggtaccgtttggctggatattgtttatagtaatgaagttttagtcgatgtttgtctggacaagtttatattcgtctgctccctcgcgaatgttggatctccttgtcgcccattcctacttaggtgtttggctgctcaaaactacaccgcgaaatacgttgaacggttaagacgtttggctcaagaaggcccttccatatcatctctcgatatggtcagggaagccgctcttcatagtaattatgcccgatttgcattcggtatatttctaaaatgttgcggttctcataccgagggtaatatggtactacaaacatttcatcaaagggttcctattttcgaggaggcagaatatatcgtggatcaggtgattacccaaattcgagacatggggactccaggttgcggttactacatgggtttcaggggtgcaatagatatcccagagtgtaggcttcagcattacactggtgtttgtcctttgtgtttctcagttatgtatgtatttgaggtcagaatgctttgttagtta

SEQ ID NO: 11311 - DNA, 1292 bp, Arabidopsis thaliana columbia
taattatcccaagtttcacacatcaatgcaggttttgttttcacaggaacgtcgatgaaatctcggtatcttgtgcacgtacacatgtcggactcaggttttaccgtgaagtagaaaacataaaggggcgttgtttttgttgccgtcaaggtctgacttttagtaaaatcacattaagaagagacgtcggagggaaaaacctccagctacagaacggtgtaatcgtgtaagtgggaatacattgccatgagaacgtctttctcttcagacgctgtatataaagcgcatgttgctgtgtttatgtcgatttttttcaagtaaaattataagtcaaagaattcaattattcactgtattgtctacctttccaagccgaaaagtccaataaagtttgttgttaaaatgaaaaatctttggattgttacatttacatttttcttgaccaactagtgaatagtgaaaaaacatgtttgtattgagtacaaacacgctaatagactaattaaatttccgttgattacaattcaattacatgagacgaagtctaaagctatcgtataattacgtaaatgtaattatgtacgtaacacacaaatgtgaggaaaaaaaatatggaattaaagaatgatgaagatgaagaagaagaagattcgtataagacagctcagttatggcatctgcctgaaccgcgaggaatattagtgcaaccgttccgaccagaaccacggaccggtcctctttgcaacgcctgaaacagaagccggatctcatctacgggatctgggaaaggcctcatggcttcaacttgcgtagcgtccaagaaaacaacgaacataacaactaacataactacgaccaccaattgttttttcatcatgtttagaattttagtttttcgaatgagaaacaaaaacaaaattgagcttttttattggtgaatgtagagttttttttgtttttgttttgtatgtgtaataaattcgataatgactcatatatatagggtttttgagatgtcattgtttgacttgtgctagtttggtctcactatcttatgtttatgtatacacacacatacatgaaatttgactttgactttactacaaaagaattcgttttcaacattttgaaccaaatttgaaggattttgaaatataaaattcacttagacacggtttgtccaagtccacacaggcttttgctaaaaatatacaagacctggccctagcagcctcattctaaaccgaattctggtttcggttcagattggtttcatttggcttcgtagtcag

SEQ ID NO: 11312 - DNA, 545 bp, Arabidopsis thaliana
cattagcgagagattaaaacggagtagtttgttagtttgttataaacaaagcaaaaatgtttaacctccgaacaagatcagcaggaagtccttccatgtcaaatcgccacatgctcttgtacgctgcagagctaagttccattgcgtattttccgggagtgaagcaactttcgatgattcctcctccgttgattaagcttttacgcgcacgagcattgatttcaagcgtgtagcgcatatgaggatgaagtagcttgtaaaccggatgcattgtactcaactgtctgttagtagcaatgatgtaaggctccatggaagcatgagtccttagcctaagatagttgccaaaaaacacaaattatgtactgttgaaaacatcaatggagactacaaagcaaggaagtgacttaatttaccagtggttcacaagttggtgaacccagcatcatttgagcagacatgagctttggctagtttcaaatccagtgagtagtagcgtcatgtccatgagtataacaaacttgttctcggattcggctgtagga

SEQ ID NO: 11313 - DNA, 476 bp, Arabidopsis thaliana
gctggagtatggaggatcaaggcattggaagaatccggcggatggctcgagagaaccaccgtggaagatatggatatcgcggttagagcgcatctcaacggctggaagtttatttaccttaatgatgttgaagtcacttgcgagttgccagagtcttatgaagcttacaagaagcaacaacatcgttggcattccggtcctatgcagctgttccggttatgccttccttcaattatcaaatcaaaggtaaaagtttatttctacaactagtgatagtagttaaacatcattacatatactcattgtttgtttttgtgtttgtagatatcggtttggaagaaggcgaatttgatcttccttttctttcttctaaggaagcttattctaccattttactcattcacactcttttgcattatacttccattgacaatgttcataccgaagccgagcttccgttgtggatcatctgctat

SEQ ID NO: 11314 - DNA, 638 bp, Arabidopsis thaliana
cacttctctcagctcgatcaagtactcttcgtcaggggaatgcgttgagagcgtttcttggaccgccatcactttggttgcttggagctgtgtcggtagagagcctagaaagctgtattgagggtttcgcatgaacatttcgtagtccggatcagtttcttgcggtataagtttcctcaacagggtaggtcggtttgggacataccctccaaacgggtactgtccgaagtttatggctgcgtgttgacccgaggcgatccatatcatgttggttagtatttgggacaagtcttgtgttgtgttgagtttaggccaccaaggctcgtctttcttgtcgtaatgacctttgttcttgatctcatcccaccaagcttgcagctcaaggtcagatgttatggacttggaatcagagtaaaagtgtttaacataagattccactaggtccttgatggctttccagatcaaaagaccgtctgctgcatatggataatcgtcaatcacaagcctcacgccacattcggctgatgaatctcttctgccattccctgtaaatgaaccagagactgcattagcgagagattaaacggagtagtttgttagtttgttataacacagcaaaaatgtttacctccgacaag

SEQ ID NO: 11315 - DNA, 538 bp, Arabidopsis thaliana columbia
tactacagagacaacatgacacgaaaaagcaaacagaacataagcagaaaaatataggaaaacactaacttgaagccacgtccattattagtgagaaggagatagtcaggaacccgtacaactccttcatctgtggagtgcaactcaagacattcctcgaaagggacaagttcctttaaattacttgcaccttcatggaatttcggatcaacttgtattgtccactggaaaatcaaaactatgcttgtttcacataacatacaggagagataacaaaagcttgaatggaaaatagactacacatctggtaggagataaagtttgccaagaaaaattctggctccatgatagggcatccaagacttagtgttccagaaacagatgcatatggcatatcgtttgaagataatgattttttatataaattttaagttagcatgcatttaggcagattactatgcatactgctgtgatatagaacgctccctcagtagactgtctgcaagcagtaccctcccgcagtagatgcctcgtgatg

SEQ ID NO: 11316 - DNA, 614 bp, Arabidopsis thaliana columbia
actgtattcaaaacaataacagtaataacctaatgcagtagaaatttgataattttctatgaacagtggtgtgttttgttccctaataaagttaaggaagaaaattgtaacatttacaaagttcagggttataggtgttatattttgtatttcaattcgtcttcttctttgctccagattgaacttacatgagaatcgccgaactctaatcggatccgggtcgggtatgtaatgtaaaccgggttttttgaagcccccatcttctccgtcgattttaaagatcccggcgatgttttcaagatttgtcctaaaaagttggagacctaaaacccaaaccacatctctcaattcaatcaaaggttttagctttagctctagctcgataaaccctaaacccaaaatccgagtaggggtttggtgggatctagacaacaaaccaccagcctctttcccgccttacgacgccgccgtcaagctccgaaccgccgcgtcgtctttcggaaccgtgaagctaatgatggcgtatggaatcgtcacgcctttagctacgttcctttagaagttcgagaacagaggaaagataggaaattgctaaacaaatttagagacaaagg

SEQ ID NO: 11317 - DNA, 895 bp, Arabidopsis thaliana
tagtctttggaaaacagaacaacatattagaccgtagactgatcccatggctgtcccttgtagacgagaatttgctactgttagtgttgcttgcctaccgcttacaaggctaatggctacagttagacccgaccaatacccgttatttttattatacagtataccaaacagcaccgcaaagccgaagagaaattgagcacttgaatgcaaaaacaaacctttctctggccatccagacacagagaatgtcccaaaactttctggccatggacaacccttcgtttgctggatgaatttcttcctccgtggtccttccatttacggatttactgtcttgtctcaaagataagaaatcacctctgaagagttctacgcagtaccggaagaagcaaaccggtaaagctgcagtagacagagactcagcctcatgatgccaccctagactatcttgggacttgagagtagattctgaccgtggagcaatatgtgtcctgggaccttctaaaagacgagtcagttcgtcgcggctcatgccttgaggaaaggaactgcaagagcccaaagccagctccaatcccctcaacagaaaatctgttgcatgcagtttctctgcaggatccaacttctgcttcctgctcaagaatcttgtatctggtctctcccatgatatacgctcctgttgccaaagaattgattagtcagaaacagataattagtcccacaagacgggtcaaaacaaaagagttacagttatataacagatgatatttcagtgattatgcttaattttgtttagacagttggcttacatggtggattttgatgttcttgagtgtgtttttagctgctgcagacaatgaagcagcccgtgcgatcagaacctgagctgtggtgt

SEQ ID NO: 11318 - DNA, 948 bp, Arabidopsis thaliana
tcagataaaatcaaattcatcccaaccttcataagaggatgatacaaaagctgacaaactcaataactataagaagagtgtcgggagccagtgatatcagaaacttccattctacaaccattacctgcactgctggtactcctgtcttagattctcaagttcagacatcagagcaggtatttgctgcacatcagaacgagatttttgaagttcctgagtcaactgatgcactttagacataagctcctccctagccacaacaagactccgtgcctcagcacgtgcttgttgcatctccaacttaacagcctcagatttctgaagctcagtctccattttagcaactttctcagcaagacccatcatccgttgctctctctcggacttcatcgacccaatttgcgcgtgcaacatctgtatttcatgctgtgctgctgctaactcttgtcttaaactaccatgagttccaccaagtctctgattctctatagcaagtctctgtaattccccgtgttgtgccacaaacttttgctccataacttcaggtggaggtaacatgttgaaggaaggatacacaccttgagcagcagaaggtggtatagcaccgtgattaccgaaagtctccggatgcgctatacagccaccgggacctggaagaggacgcctcatatgatgatgagatggatggattcttcctttgctttccattaaacaaaggcttcttcaaattccttatcaactgagaaaaacataagacagaagattaagagtgacacacattaacacaatctgcagaatcaatgcacctaagtaaaaatattcaaatcaatgtctctcttttttttgtttgccattgaaatcaaacttattcataggcaaacagaacaatcatcaaattaaattagggcagggaaatcaattgatttgaaaattccgaccaaattaggg

SEQ ID NO: 11319 - DNA, 799 bp, Arabidopsis thaliana
caaatcaaacaatctattgttaaagatatttgttagttagatgcattaccatgactcctgagttgaacaagactttgttattgccagcggcagaaagttgaggataggagaaaaggtaatcaatattcttgacgatgatgaagtctgcgtctataaacactagtttgtcgtaatctgtcacttgccacacacgtaacttactgtagttccactcattgtaagaacgcttcttggaaaaaggactacgaattctctccactcgccgtagtttccagccagcaaggcttaggccaatgagagagatgttggttatagagtcatcgtggaggagaatcatgtccttggttgatccagattgccttatgctttgtgctaaggctattgctccgcatacgtatacctccgatgagtgtagtaacgtcacgtaagcgacacgttgggcagtaaatgatgataatgtagttttttcggatgtgagatttctgttcttgtcttgtatccatgcttctccttgacctttaacaacgaataagaaatagttagcgaaacattggaattttttaactatgcattatgtcatcatgcatgcgacaataaataaataaataaatgaagaaaacatattgacctatgaataataaagccaaaattacctagcggacgaatctgacatgaaccaggaggcatgagaagcttctgcttcaacctcgtaagatcaggcctatagacccaatagtccccacgcgcttcacggctcatcacacctaaagatctcatgcataggccacaagatccgatg

SEQ ID NO: 11320 - DNA, 567 bp, Arabidopsis thaliana
ttgcaaaacaagtcagtcacagatccggtagatcagtagtatacataccaacaaggagacggtcaggatctagtccatggttatgagtagcatttgcccgcgcacatgtataacctacattatgagaccaagttgtatgctaagtatcattagatgaggaaatgtatcaaatgcctcgagaggagagtagaccagacactctaaaagtgatttgtttctgaactcgaatctcagagattacccggtacacagtttgtgaagctcgtttgaccgtgacctgcaattgcatcaaagcatcttcaacacgcatgccacggactagtgctgcaaccaagttgaccttcttaggactctgcaataagtaaggtttgggcacattatatagcgcatataacaaatcaagatgtatacatatcatctaaaatgtaaaactgtactaggagttagagagaacacacctgctttatggacttgaggacagcctgaactttctgacgctttgggataatcttctgctcttcttcttttccactaccagcagagctgtagatgacaaaggtgatgatc

SEQ ID NO: 11321 - DNA, 503 bp, Arabidopsis thaliana
tccccgggtaccgagctgactggttagtccgtgtgtcacatgtgtaggtactggaggtggggggcttgagttagttgagattgatggttacgtggtcaaggttcgactcactggaccagctgctggagtcatgactgttcgtgtcgcgttgactcaaaaactgagggaaacaattccttctataggtgcagtccagcttctagagtgacattaacctttttattttgtaacttatatacaaggcctatttttgattcaatatattttatttccaattatataattagtacaactaatacaataaccatttctgttgaagaaaaaggataagaaaacaaaagtatcctatgtatgaaggacattttctctagtgatccttgtttttaggtaacagttataaaatattcatgacttgactacacaaagataatcgaacttaaagagttatttccttaaaccaattattctctaattaaatatgcatttatagcgagttcttggtg

SEQ ID NO: 11322 - DNA, 693 bp, Arabidopsis thaliana
taaaggatctggctgatgccaggctgtctgcgacaagctcggcattgaactgcacaccgttaactttgctgccgagtactgggacaacgtcttcgaactgttccttgccgaatataaagccggtcgcacgccgaatccggatattctgtgcaacaaagagatcaaatttaaagccttcctcgaatttgccgccgaagatttaggtgccgattatatcgctaccggtcattacgtacgtcgggccgatgtcgatggcaagagcccgcctgctgcgtggtctggacagcaataaagaccagagctacttcctttatacgctcagccatgagcagattgcgcaaagcctgttcccggtcggcgaactggaaaaaccgcaggtgcgtaagattgctgaagatcttggtctggtcaccgcgaagaaaaaagactctaccggcatttgcttcattggcgaacgtaaattccgcgagttcctgggccgttatctcccggcgcaaccgggcaaaatcattaccgtcgatggcgatgaaattggtgagcaccaggggctgatgtatcacactctcggtcagcgtaaaggtctgggtatcggtggcaccaaagaaggtaccgaagaaccgtggtatgtggtggacaaagacgtcgaaaacaacattctggttgtcctttagagcacactggcggctagagtcg

SEQ ID NO: 11323 - DNA, 749 bp, Arabidopsis thaliana
tgcctcggtcgagtaatgtatttctcgagaagaatagtgttaacgccaaaagaagcagcagcttcacgttgggcacccaaaaacgagtcagcaaaatccttcccactttgcactatcctcattccctaaaaaacaagagcttactttgcttcgaaaccaatagattttaaaagggtatcaaactttgactattacaaaaagccatctattggaaaaaatcaatgccgtatatcataacataccttccccccacctccatgtgttggcttgattattatagggtatccaatcttttcagcttctgacttcatatgatcaatatcttgctcatggccatgatatccaggcacgagaggaactccagcagctcccataattctcttggatgcacttcataaatacacatgagggacatgtcctcagaaactattcaagagagaataaaataacaacttgtgcaaagaagaagcaagtcgtaataggaggcctgtaatggtaccttttatcacccatgtctctaatagcagatgctgtaggtccaatgaatgttagacccgaatcctcacagagttgggcaaagtcagaactttcgtgcaagaacccatagccagggtgtattgcctagttatataattcaaagaagacatcagctacaagaacacgattattcttttcgggggatcaaactcatacctgtgcaccagtccgagtcgctgcctccatgatagtcaaccgctgaggtaactaag

SEQ ID NO: 11324 - DNA, 657 bp, Arabidopsis thaliana
tcactgcctcctcccttcccaccttgcaacttgagaacagcgcttacacgatatgcatgtcttttgagttctccaaagaaggttggttggattcatttaccattagactggttataatcagttttgtttctcttcatagagattcaaactcaattattttcatgtttattttcttgcagtctgctttagttgcgttggctgctcatgcatctgatcctaccgaagcagaacgattaaaacaccttgcttcacctgctggaaaggttgtggctgaaccttttgttggtttctactcttcattttccatttctttaaaatggaatctgacaatgtatattttgtgtcctttcaacaacaggatgaatattcaaagtgggtagtagagagtcaaagaagtctacttgaggtgatggccgagtttccttcagccaagccaccacttggtgtcttcttcgctggagttgctccaaggttgcagcctaggttctattcgatatcatcatcgcccaagtgagtaccttcattgtcttggtctttttgtcttcaagttgttcgcttgagacttatattgtgtttttagtgtattgagcattgtcccgtttacttgtataggattgctgaaactagaattcacgtcacatgtgcactggtttatga

SEQ ID NO: 11325 - DNA, 1158 bp, Arabidopsis thaliana
tctcagtattctctgattgtgtggtaaaggatagatgtcgtactctacaaaatggaaagtgaagttttaagtgtttgttaaagacctttctattgatatatatttataatatccgattctcttcctcttttactggatttgaaacaacactgttgaccagtaaacgattttgatactttattaacaacttgaagcctattccttaattacatcttttcttgcagtttgcctctagacaagaccaacacattggtcccaaaaatgtcgtatgaacgaacttaaaagaatcatgtactgttgatagaaattgatgcttttattcttgtgcatatagtctccagtctggtcctatgaccatcatttcttctgttcttagtgttatatcggctctatgtaatctgaacatctcaattgctgtaggggtcagcctcgcgttcccgttcatgtagagaatctggaggttcatgcaaccgcatcgtagagcaagcaacccttggtcacataagttcctacaacggttcacatggagtttcttcaagttacggcaccacttccctacggcttcccatcccgaaatcttaacttcatgacaaagagccaagttccactcttggagcaatggacaaccttttgctatagcttcaatggattcatcaccaaccgttctgcacatcctaaggttcaagattctaagttttgatgcaattccagatccaataggtaccaacccatctttgcgaatgtagcaacttacacctgaaatgtttagaaactcaatcccacctccgctaatgatccccgttataccgttcggctcaagctgacaagagtcagcatccacatagcctagagttggagaacagccactaaagccaacaccggtaatgctcttgcagtttgagattttcactgactcaagctgcaagcatgcttgtgacaacgcttttatcccaaaatcagataccagcgggcagtacgagagattcacgcattttagagacaaggaagccctggccaacgtttctaacccaatgtcactgatattgcagcggtaaagactaaccacacttagattgggacaaaagctagcaatagtggagatcccatcatcagaaatcccaaagcaacaatctaagtaggtgtgagccgggatgagtc

SEQ ID NO: 11326 - DNA, 596 bp, Arabidopsis thaliana
accacggaggttgttgcttttattggcaacgttgtagagatctctcctaggttgcaccagattgtacccacgcggtatctagttttggatcgatctcaattgcacgtagattaaacatgtcgaggacgacgaaatcaacggttgataaataagacattccatcgtagtcatgtcctccactacggatacggagctggaggccaagttttttggcgcagttgattgtagcttggatatgagtgaagtgagccgcggctacgatcgctaccggtttacgtgtagtaccgttgaagtaacggagattgcggacgtagttgttgagaatggtgaggaagttagggttttgttgcgtgtatgtgaagttttggattgggacggaaggtttgaaaacggttacacattgtgtgaaactgtctttgagttttggtggtgctgcgaatgatgttggaattagaaggagaaaaactgtgaagattagggtttgagttgttgaagatttcatttttctttccttggagaagataatggttttagtgttttgagagattggtgagggattaggataatttatatagtgtattatagatagattgaca

SEQ ID NO: 11327 - DNA, 480 bp, Arabidopsis thaliana
tccaaggtgctgttttaacagatcacgtccaatacaaatacccttccagccatgggaagcatttcctggtgctttggagtcaagaaagggagtggtcttgcagtatttccctaacaaaatcctggcaagaagacaggtgggtttttgaaggatacgccaacttatcttagcatggaggccatcattaaagcaggttatgtctctgaaacccaaacctcctactccttttggctgagttaatttttgccaagagatccaacacatcttgtgtttttctgcagatgagtcccaccaaaaccgagtcaatgcagactgaatccgtttactcggtgagcctggaattttaaaacatgacatcgtgtatgttggcatcgcagcaagcacggatttcaacatagtcgctttccccgcggtggacaagaacttagaggaccagctcagggatctttgtcttattctgtcaatgattaggttgaacat

SEQ ID NO: 11328 - DNA, 949 bp, Arabidopsis thaliana columbia
ttatcggtaattctcatttttgaactgttttgacaggatgttggcaggggcaccccctcagttgtgtcttctatcctcaaggtgtttgggttttgtttcctactaatattttaattatctcctaattgctataactatctaattcttactttttattcaattgactcgttccgggaccgggatcagatgaggtatatccccgaggtatatcccctaattgtatatctgatataatattggttacatgtttactttaatatgcttaatcttttaggattttaccaccacccctccctccttcaaaagaggctaagatcttaacccatgcatatctcgtcaactgtaattttttttttgtaacctaaatatgatttgccaccttttattaataatgccagttagtagcaggatgatatgaatgctaacaacgctgatggaatttgtgggagaagaagtaagcgtctccgtactctatctaccaagctagatggtcgcttcgcgtatggtaagaaaaccaagattttagtgggtcatccatcccttgttgtcaataaaggcaacgaccttgtcgacacagaagaacgatttcaaaactccatgaagaaacttaaggcgataaggtattctttatcccatttgtttgttgttagcacataaaatattgttatttttgcaattggtaatcttttatcgacgtattggtttgcaataggtcaattagcatttgtgggggtgttgctttgaccaataaagaaattttggatttgactgatcggaagaagaatctaacaagcaaggtacgttctgtcattatatattagaatacttaaagatttaacatattgttttgtaatatgttgggtgtttctctttcctttatcacccaggtaatggatgctctcatcaagtttagtcggcatttgttaagaaccgatgatcccgatggtca

SEQ ID NO: 11329 - DNA, 531 bp, Arabidopsis thaliana
taatcattgaagggtaaagagattgaaaatccaacacaataacaggatcatcgtaaaaggcagattctggttccatcacaagaggtacacattccatagctggctgagaggcaacctacatgatcacatgatttagttaggagaatactaatgagtaagaagggcgtgaaaagattatgaaagctatcatgaagacaaaacaaggcatgaccagtccattgaataaggccagacgactggttataatccaagaaacgttaaaagtaaatcacttggaagtagcagataaaacgaacctgttggtttcctggagaaatagcaagataattttgtgtatgtgctaatctcagaagcatggattccactctgtactgtgaacctcgggagagaactgagaaaaagtctataccaaaaacacgagcaagttctgacgtacgatttatctgcaaacaatgatttagtgggatcaacaacttgcagataattcactatataaatcaagttctaaatgttacataccatgtcaagttg

SEQ ID NO: 11330 - DNA, 768 bp, Arabidopsis thaliana
ttatatactaatctgcctaaattatataacatgatttgtagtttagaatatttccaaataccaaaacgaacatcaaacgtgcacactgacgcaaagaatgatagtttcgttaacgagtggcgacattacaacgagtctttctttttaaaacatttagcagctgagactatttcttgaaagtctcagcttgcagaggaagaaaactatcgaatgggccaaaaacatggcgttgacacaagagggaaaggcgcagaattttgtggttgttgggagattctcactgaatttatcaatggttcttcggcatctttcgatgacttgccagacgattgcttagctatcataagctcttttacaagtactccacgggacgcgttccttgctgctttggtttcgaaaagctttggcttgcagttcaattccgatagcgtatgggagaagtttctaccaccgccggattatgtatctctgcttccaaaatcgcgagttttctcttcaaagaaggaactctatttcgctctttgcgatccgtttccaaaccacaatggcaaaatggtatattttatatatccttatacagtaattggaatttatgtatggattctgttagagaattatggcaacagggatttgaataaacttatttaatgatggagcaattttggtgtaattgtactaagtctatttcattctactaaaactagttgtattgggtactaatgtcttagattaatggtaatgggatcttgactgcttaaaatgtatgat

SEQ ID NO: 11331 - DNA, 611 bp, Arabidopsis thaliana columbia
gatcgatttcatggaggaaactcaccagaaatctcatcgtttcctctgtattattcgaggtcagcaacacaattgattgtgaaatttgaatgtttgagcttagtagattgcgatgatgtggtaaatttgttacctttttagataattgctgtgggttatgcgatcctgacaaccagaacggaagatttggattggagaatgaggagtttccggatcttgccaatgtttatcttacctgctgtttctgctcttgcttattcctcaatcgtcagcttctcaaagatgtgtgagtcttgtgtttatatgctcatttcatgttaagatgttggtgtgttctcgtagcttctctgtttctaattctgtgtaaaaatggttgtatagttgaccgcagagatcaaaagaccttggaaaagcttcgagctgaaaggttggcgaaaatcaatgaacttatagaaaggaccaattattataccacacaacaacttattcaggtgagattactagtcttgagaacacagagaatttgtggtaatccgtttatgcaagtacatgttcttccacggttacacttatagttctggatagtgagtgctatgtctcgaagattgttg

SEQ ID NO: 11332 - DNA, 939 bp, Arabidopsis thaliana
tagcaaacatcatttctctccttgcagacctgtggagggagaaggagatgaatcattggtaagttctaatctttcttatattctcagggggtgtcactgttctaagctacaagaatataaaattctgatgttggaataagaattttttaggaaatgaaagagaacacaagttaatttttttttttcttgtccaatatcgttcaggttttctctatggaggcgttcgagcatctgcgttttcttgttcagtttggtgataagggatctgatgtatctccattgagccaagctactcctttttttgcaaattctgatccggatatgcccgctgttccagtccccgcttcccaagtgcatgactggcttctgcaaaacatagcttccgctttagaaagcattactgagagaatttctggaaaagagaacggaccttctaacgatcaagatgatgcgatgtcagatgtttgtgctgctccgaacaaggttgcacctagtactagaggcccgtgtttaatcgagggagtctccaagacttcacttgttaagcaagcctccgatctaaggggtagatctgtgaaggtctgactgttccttgttccgtttttcttccagtcatggaatctctgtgcaagcatgtcaactccttgttttgtgtatttttcaggttgtcaattgccatgattctgtaatttatcttttagcaccattgcgatatgcaactgtgcacggatgttctgatactactatagttttgggagctgttggcaaggtatggaaacaatgcttcttccttctttatcttttctgaagatagtcaaagcaacatttaacaagttataatatctgccaacttttattaaaagatgtatcaaacataattccgtatttatttctgcaggcaataaaagttgagcactgtgaaagagttcatgtgattgt

SEQ ID NO: 11333 - DNA, 627 bp, Arabidopsis thaliana
tgccagatatgaagtttggaaactgagttttaagaggcaaaaaaaaccaagctttcaaaaggcattcttacttcatttctctagttacacctggtcttggagctgctgcgcaaatttttcgtttcaatagacgattgatcagagatgatttcccaacattagggtatccaattattccagctctaacctgcatcatttgaaatgaacttaaaatttaaatcatatatgttgcatcagagaataatggatcatgagacactttacttactgatctagggagaagtcctttttctcgccgtttcccatttacgtcacctgctaaacttttggctaaccgacctagcttcatagctccctgtaaccatctctcagattaaacatatagaaagaaaaaaaccaatcccaaagcaaagtttaaacttgaagaaaccataccatcccaagtttgccattagtgaaaatgacctttattccttgctttgcaaagtatctcgcccaatcatttcgatcatcgttcgagatcatatcttctctatttaataccaatatccgtttcctattcccaagccacgcatccatctacaaaatacacatacataaccccaaaagtaggtgcaacattattga

SEQ ID NO: 11334 - DNA, 1418 bp, Arabidopsis thaliana
tgcagaagctggaacagtgaagcaaaattatgtaaatatcttgttgatgctcttgcgccttcgccaagcttgtgatcaccctcttctcgtgaatggtgaatacagttttacctgggaatcttctgttggattagctaagaagcagattcagtcagacgcttcattggcaatttgtggtatctgcaatgtaagattcttttgtctcgtaaattattatacaacatgtttttttttttccctgatgaacgtgagagggcagttctaaaacattaaaaaagtcaagacatggaattgaaagcatcagtggatattaacaatcatattaagcaatggtttttactctattatgcagatccttgagttatctcatttcatatcacctttcgttgtcaaaccatcatatagttttcttgacttgtagttcttaatctatatcccttctttacacacaggatgcacctgaagatgctgttgcttcagtttgcggtcatgttttctgtaaacagtgcatttatgaacgccttactggtgatagtaatcactgtccctttgcaaactgcaatgtcagactcaccatctcaatcgttatcttccaaaacgagattggacgatgctatgcctgacatgcaggagcgtgctacttcgaatagccttagcccttgttctgatgaagatcttccatatggttcatctaaaatcaaggctgctctagagatcttacaatcactgcccaaagcacatgatttgacagattcaaatcagatctctgaaaacagagaatactccggtctttctataactcctgtgaagaatgagggtatgagcgttgatgttccgattaaggtagctggagaaaaagccattgttttttcccaatggacaaagatgctaaacctacttgaagcttctcttgtaagttcacatattcagtatagaaggctcgatggaacaatgtcagttgctgctagggataaagcagtgcaggatttcaacactctccctgaggtacatagccgttaattgaatttgaaggacttgggttgactcgctttctatgatagcaacacatgatgataagatattttttggctctttttctactttttaggttactgtaatgataatgtctctcaaggctgctagtctcggactgaacatggtggcagcttgtcatgttctgatgctggacttatggtggaacccaacaaccgaggatcaagcaatcgatagagcacatcgtataggacagacacgaccagtaacagtagttcgcttcacagtaaaagatacagtcgaagatcggatattagcccttcaggtctgtgaactggttgatttggttctcttcaatttctctataagctttaagccatttcatttttgatctctaaacacgttttgtcgatgcagcaaaagaa

SEQ ID NO: 11335 - DNA, 638 bp, Arabidopsis thaliana
tgaagataacgatcagctcctaaaccaatcaacttcgtcctcgccgcataacttccacctgataaaatcgccgtcacaaccatcaccggaagctctttattattcatcctctcattcctcggatccaacatttgcaccaatcgaatcacactcttctcatctctcatcaactccttccgatttgatctaacggtcaacaacgacttcgccgcctccgtcgccgcttcttgtaaccccgccggtttcggcgattccattaaccgaatcaacgagcttaaacaatcagcgacggctcgtttgttaccgtcgctgattgttaaattcgataaaagagaagttgagatctgttgaaggattacgtttccgtgttttatcaattcacctaatcggattatgaaccttgttgatgaagataaaaccctagaaactgtttccatggcagagatctcagagagagcaagcaaacagtgttcgatcgtatcgggatttgatgattcttgaactaaatgaatcagaatctgtaatcctcctctttctctaacaatcaaatctctgtaatactcaccggaagatgagatcaaggagatgaaattcgcggttttctcttgtaccgatgatgaaccggagattaagagttg

SEQ ID NO: 11336 - DNA, 456 bp, Arabidopsis thaliana
tgcagtatgacagtgggcattgattattatcgcgagtaagacattcgcaaatgcactgattacagaaaacgtgaccacagagtgaaacaacagcatctttaggtgcaacctataaatgaagaagggacacaataagaaactcatggtgaacataagagagtttgacatccaaatgcgagagataacaactcaaagatccaaagcagagccttggagtttgaaggattattcacgagtagagagtcttacattgcagataccacaaattgccagtgaagcttctaagcgatgcagaagaaaggttagcttctcatatggaagcttcttaaccatttcagctgaggatgaccatgacaaactggatactagaagagggtggccacaagcttgacgaagacgcagcagcatcaacaaaatatttacataattttgcttcaccgttccagcttctgcata

SEQ ID NO: 11337 - DNA, 1289 bp, Arabidopsis thaliana
aataaataataatagaaaaagactattgaagaaaatatggaaaaataaacaataaataaaatacctacttaccgtgggtcccactacggtactactgccgccttctccgaccgtaatcagccgtcacctgccggtttagttacaataacaatttagtatttatttgaattctttctctcatcgaagtctaaggaagatggagcgaggagctttagtgggttcttcttctacttctagctactatgttccttaccactttcgccaatcaaagtcgaatttttcgtcattcaaaccaaaaaataagctaaaccctactcaattccggtttaactgttcatggtttaagccggttagttctataacggcggcgaaatgcaatatgtttgactacgcggtgactgcagccggcgatgtggaggctgagcatccagttgacgacaaacagtttgtgcgttggttccgtgaagcatggccttatctttgggctcaccgtggctgcacattcgtcgttattatctccggcgagatcatcgccggctcttcttgtgatgccattttgaaggtaccgtctttcttcaccgtattatatactttgatttatgagaaaaaagcacgcaaggtgttcgattgtttgcttgcctcaactaaagttgttactattcttattttgctttgttatatgatcttttctttgcaatgtgcttgagttttcagttctcgtatttgagtagaaggtgaagtgatttgatatatgtgcaggacatagcgtttcttcatcatctaggaataaggtttgttttagttcctggaactcaggagcaaatcgaccagcttctggctgagagaggtcagaatattataagctttgtcacgatgttagattctagactataaaccttgctagcgtcaagtaaatggtttggttagctacgagtctaatgctgtgtgagttgcaggacgcgaggctacgtatgtgggacgttacagagtaacggatgcagcatctttgcaggctgctaaagaagctgcaggagcaatatcagtgatgcttgaggccaaattatctcctggaccttctatttgcaatatccgtagacatggtgatcgtagtcgtttacatgatataggtgttagggttgatccggtaacttctttgcagcaaaagtgagatttccactttttttattgttcatacgccttgagtcttattaatgtcgttcataatgaccgatgattatcttgggtcttgttgtggcagagaagaggtgttgttgatggtgttgattttg

SEQ ID NO: 11338 - DNA, 854 bp, Arabidopsis thaliana
aaagggttgaatattgatatccaatccaacaaaatcgctcaacaaggatcaacgactgttgtgttaaacaatcatggtttttcggggaatgcggtaaatgtgcctgagatgcctgtccataactcctatggtgctcctcctcaaggtgctcagcagattcctgttagccagatgagtgtgaatccaaatgttatgatgaacaaaagccctacgcagtcatttgttgtggacaatggaaacaccatgctttttgttggagagttacactggtggacgacggatgcagagattgagagtgttctttctcagtatggaagagtcaaagagatcaagtttttcgatgagagagttagtggcaagtctaaagggtattgtcaggttgaattctatgattcagctgctgcagccgcttgcaaagaaggaatgaatggtttcattttcaatggtaaagcatgtgttgtagcctttgcctctcctgaaacactgaagcagatgggagctaatttcacagggaggaaccaaggacaaaaccaaattcaaaatagaaggcctctgaatgaaggaatgggaagaggtaacaacaacaacaacaacatgaatacacaaaatggagatggtggaagaaattacggtagagggggatttgcgcgtggtggccaaggaatgggcatccgtggaggtgcttggggtggtgcaatgagaggtagaggggtcacaacatggctagtggttctggtgctggaccgtatgggcctggactagcgggctctgcatttggtggtatgatgcaccacagggtatgatgggagctggtgggtttgatctacgttcatgggtcggggtgctggttatgg

SEQ ID NO: 11339 - DNA, 729 bp, Arabidopsis thaliana
tctagagggtacgagctctcaatagtattagagagacttggcttagtgcagctggaaaaggaaatacatcagatgtgaaagaactaattcctgaatttttctacatgcctgaattcttagaaaacagatttaaccttgatttgggtgaaaagcagtcaggggataaggtagcaagttgttctaatggtgcttatgttccttttacttcgctgtttccctttcatgagaaagttccttgtataatgtcaggttggtgatgtaattttacctccttgggctagagggagtgttcgtgaattcatccgcaagcacagagaagctttggagtctgattatgtttcagagaatctgcatcattggatagatctcatctttgggcacaagcagagaggaaaggtacattacatgttctccttttggtagtcaatagaaaaatctaactatcatgtcttagagatgttgcttcttaaaatatcgaatcatgaggctgtttattttcaggctgcagaaaatgctgttaatgttttctaccattacacgtatgaggggaatgtggatgtagatgctgttacggatcctgccatgaaagcatccatactagcacagatcaatcattttggacaaacgccgaagcaactattccagaaacctcatgttaaaagaaggacagacagaaaagtcctccgcaccctctgaaacactcgatgcatcttgttcccgcaatatacg

SEQ ID NO: 11340 - DNA, 617 bp, Arabidopsis thaliana
gggtaccgagcatcgaatcccttatccctaactcctccctcgccaccaccgccatgcgctgtaacacctctctcgagagcaataccccttgcgcctcctgcactcagagcctctccgcgtttcagccctatctctccggtccatccctcggtaatgtctccgactgtgcttcttttccctctatctacgccgctgctttcgccaattccttgggccccaccgacaaaggcaccgccaaatgcttgtttcagctcgatttggcttctcccactagctccggtgctaacaaagtcaaagttctagtttcttctttctctgttttgctcgtcgcctctgttctggttatcaccgcttggttctggtactgccggaggaagaaaagcaagcttctcaagcctcgggatactagtttagaagctggcacgcagtctagacttgattccatgagcgagagcaccactcttgtcaaattcagcttcgacgagatcaagaaagccaccaacaatttctcacgccacaacatcattggccggggaggttacgggaacgtcttcaagggcgccctgccgacggcacccaggttgccttcaagaggttcaagaactattctgctggag

SEQ ID NO: 11341 - DNA, 576 bp, Arabidopsis thaliana
ttttagttccacaaagtgctaagatctcaccaaacaatcagaatagcgttaaaggaactgcagaccttaatgtaaaagtagtcatcacaccatttcttaaaccaagggtagaacgacggatcaaatttatcgcaggcttgcttttaaacctacacaaagaaagatatttcaatcagcatctccataatcacaaagcttcaaactttcagaacaatggatcaggtttaacgaccgaatgaaagtgcttgacgtcttcttcaaagatgtaagcaggtgtgaagtcagtcccaccaccgaaccaccattgcctcggagctccaggaacatctacaagtgatgaaatcaaatgcttcatccaaccaaaaaattggaactttacacttctcaaagaggattaaggtcttaccctttggagcatcggtctcgaaatagcggtaattgaaatgcagagtcggagcaaaagggttctgaggatgcaaaacctagaatgtaggatcaagctcaatcaaagaactcagagaccatatcaacagcaatgtcgactgatagagagagagagagagaagtcaccgagct

SEQ ID NO: 11342 - DNA, 603 bp, Arabidopsis thaliana
tggattttctactgatggatttgctacaacacttaccatgaggaaattgcatcttatttgggttactgcaagaatgcacattgagatttacaagtatccagcttggtaaggctttgagtggtttgaggattttctggtttggagttgaaagttttaagctttcttgttttggttataggagtgatgtggttgagattgagacttggtgtcagagtgaaggaaggattggaactagacgtgattggattttaaaggattgtgctactggtgaagttattggacgtgctacaaggttttgactttttcatcttgtcataccaaactatctgaagtggttgtgtattggtagttttgacattagaagctacagaaactggcatatgtgtgcttgtttagttatatagatttattcgtattcttgaacagttgttgtgtgacaaatgtatcagcaagtgggtgatgatgaccaagacacaaggcggcttcaaggggtacagacgaattcgggacgagtacttggttttctgtccccagagcatagtgaagaatcatggttcttaaaatagtttttttgagccacttaacagttcgtgctgtattttg

SEQ ID NO: 11343 - DNA, 647 bp, Arabidopsis thaliana
caaacctttcaccgacctcctaggagatctactcggcggcggaatctttaattctgacggcgagttatggagctcacagcgtaaactcgcgagccacgagtttacaatgcgttctcttagggaattcactttcgaaatcctccgtgaagaagtccaaaaccgcctcattccggtgctttcctccgccgtggactgtggagagacggttgattttcaggaggttttgaagcgctttgctttcgatgttgtatgcaaagtgtcgttgggttgggatccggattgtttggatttgacccgacccgttccagaacttgttaaggcttttgatgtagcggcggagatcagcgctcgccgcgccacggagccggtttacgccgtgtggaaagtaaagcgtttcttgaacgtagggagcgagaagaggttgagagaagccatcaagaccgtacacttgtctgtgtctgagatcatccgggccaaaaagaaaagcctcgatatcggtggtgacgtgtcggacaagcaggacctgctgtcgaggttcacagccgctggccacggggaagaagccgctgaggatagtgtaatcagctttattatggcgggaagggatcaacgtcggcagcgatgacgttgcttgttttggttgttga

SEQ ID NO: 11344 - DNA, 1296 bp, Arabidopsis thaliana
gcttttgggaagtatactatgacccatttgaagtccccatcgaagcgcggtttgtgcgggagacttcccgatttctttagcaatcatttcaataaccggactctttaaaacatcggccttcacccacgttgttccaggagatcccaatggcgaatatccctgccacaatcaacattcacgaagtgtatataaatatgacattcggactcattaaatgatttggaaatgtttagtgttttaaaacttactgagaggtggatccctttggacttgcaaaactcatgtagcttatgttgttgccatgaaggatgacattccacctggtttacagcgggaggaacacgagcagcctccacaagatctgagagtttctttgtagagaaattacttacgccaatggctcttgccttgcctgaatcaaccagtgcttccattgctttccatgtgctcggaatatcgataggcataatgttctcaggcttaaagtcaacagtacctttcttcaaccgaacaggccagtgcatcttgaaaaaaatatcaaatgaaacaaatcaaagtataagcaagcatatgtatagtttcaaatccagagatccggacaattcaggctagatattgaagaaaggaacggatcttgaaaactgttagaacttattaaaaaatcagcatttgttcaaagaagtcgtgcttacgagatacaaatcaacataatcaagctgcagatcctgaagagttctgttcaatgcgtcctgtacatccggagggtcaagatcagtcaacctgtgcttgcataatttgtagattttaataggttaagaggcttaagcaaacgagggaaactgaaaatgcataaaaatgatagagatgcagaaacttcatgaacaaaataccagatttttgatgtgatgaacagcttctcacgcttcactacgccatcatcaaacaacttcttcagaactttcccaatctgcaggttaaaaaaagctttcaatttctccatcaagaaaaacaaaaagccacatttcaaatgaacttgtaaacagtctataacaaataactccattaatcctacataacttaaagctagtttaagaaaaagatacacaagacaatgtgtgcaattgtcattcctaaatataaattggttaaccttagtaagaattacataaaacagccaatcgagtaagaacgatcatactatatactgttctatataaaggcaaatgaagtaacgagccgtcaaaagatgaactatatgaagcgaactatggaagatacagattcggatcggtgaat

SEQ ID NO: 11345 - DNA, 1244 bp, Arabidopsis thaliana
caaatgttaagtcatttgtttgtcttgtattaaacatcttcataaattatctttgagcaggtatgtacccaacgatcatggaaacggccttatggtgtgggtttgctggtaggtggattggacgagtcaggagctcacctctactacaactgccctagcggaaactactttgaatatcaagcattcgctatcgggtctcgttcacaagctgcgaaaacctatctggagcgcaaattcgagagcttccaagaatcatcaaaagaagatctgataaaagatgctattatggccataagggaaactttgcaaggggaaacactgaagagctcgctctgcactgtttctgttctaggagtcgatgaaccattccatttcttggaccaggaaagcattcaaaaggtgattgatacgtttgagaaggttcctgaggaagaggaagatgctggtgagggtgaggccgaacccgaagctgctcctggtgctgctggaactggtgaacaaggtggttcaggtgatcaagatgttgcaccaatggaaatttgagcaagagggaatgagttcaaagttggattttctaaccaattttcttgtgtgtagctctttgatatgttccaacttccaagtacaattgtggtttttattcggctttgtctatttaacagcttggaacaaggagttattgagtgccactagcttatgtgtagtcctacttaagtcaaatctgtcacatgataataataatcggcgaatcgcaacctagagagtgtatcaaacagacaccattttgaatgagagaaacagcgagagaaagaatgtcagattaatccaactttggttctctttctgcaaattgttcctcgaagaaatgacttcataatgcaaccatacattattgagcaaggatgataaatctcctgcttgctcggaagaaaagttaaaaccaaaataatatctctcttgaccttccagagaatcaatcctgtcttgaaatgatttcaacacacaaacacaacctgagattggaattagaagtactgagtagacggaaccttggcgacgggtttaccacctggtaagacattgtcgggaagaatcaactccggtggagtttcacgggtaatcccaagcattgaatcgtaatcctcgtccttgcgtgcatacttcttcctaagcgctctctcaacctcgatctgctcaaatgactttgaattctctgaggcgtgaatctgtgcgagattgatgta

SEQ ID NO: 11346 - DNA, 990 bp, Arabidopsis thaliana
caacaaaagattaaaggtctactgagagaaacacaagagaagcaaataaaagatttgggatcaaactgaaaccttgttgagtatcggagaaacgaagttattcagcagccatgtcgtcctcgtcatcatcgtcttcttcctcaaagcttaggtcaaggtcagcaagcaactcttcaattggaacagatggtgcaccttctccatctgtcattgaagcagtctcagaagcttgataatccttgtccctgtacaaagatatgttgaaccttagctcagggttttcttcaagatccctcaaaaactcttcgtattctttgtctgtcttctctggatcaaccctgcctcttgaatcatccatttccattggaagcgacttgagtttccagttacgggatttcttctgcttcctctctctctgctcctcgtaacatttcttgatcagaattgcttcaggaagcccattcttcacactcagacggtatttctccatttcattgtcgttcacattagctccgtagatgtcataacccaaagcttgatccccaggtttcagaatgtgtccaagatgagtttggacataaaacatcttaccaatgtctgattcacgggcaatctggacataggaaagagcgtacttttgcccaccaacagtcgcttcaccaacaggtggctcaacatcaaacacaaagtacttgacaagttgtctactggtgagcgcagatcggaacccagacctccagtactgtctcgcatccaagaaggcacaccttagagttctcggatcaagtagagtgatattatcagagacttttgtgcaaaccacaagtggaccaaggttccccaagccgctagcaactttagaaggcaagcaaacaagatcctcacggcaaacaggacagatcttaacagagtaagtgtacttatagttgtacaaactgcttttcacatcatgagacaccagctgttggtcctgacgggattcaatgggga

SEQ ID NO: 11347 - DNA, 1125 bp, Arabidopsis thaliana
tctataacatataagccccaaacattttaaaatattcgtatattcctctttcaaattggaaagtttcaatattgaccccaaaagtgaatgattatgcaaaatctttaattttgtcttgagccgcctgttatgtagcatcatcgctctcactcttctctgtggttgtttcgtcttccacactatcacttccatagccacaaaagcttcacataaatcctaattaaaccctaaaaatactgttaaagacaaacagaaaactacaaaatacatcttttgtatatttggaagcttttggttttatggaatcggagaagcctgggattgtttcaattctcgctgcagcaacggtcgattcggagaaacctcgcgtttcaatttctgcggtgagagcgattgcggcggcaagagctgattcgtttcttctcacgcgtactctctctggttcgttttcatctgctggttctgttccaattcgtgcacctgttacaattgatgaggatgatgatgatactggtactgtaactgatgaacataactcagcaagtagtgaagctagtagttatagtaatggacttgattttgagactgatgaagatgagactgtgttagaggatgtggttttggatggggttagggtagataggctactaggggaagagttaggtggagatggaagtgaattttcaggtgggagtgggatttatagaccatttgcaggtgatgttgacgaggaaacgtcggtgaattactcgtctttggaggaagatggtgagaacagtgatgaggtttgcgagagtgaagttagtggagatgaaagaggtagtatgaaagcaaaagtagtcattcctcgggctgttttgtctttggatgatgatgagtttgatgaaattttgggtagtgatgatgaagaggctgtgctgttgggtgtaactaaggctccaggtgatgaagaagctgaagttgaagatagagggtcgcagtttggagataagggagtggttgatgaaccagagtgttcggattcttttataggtgatgttgattctgaagaggtgagaatgaactattcagataaattagatgatggtttgatgtcctttgggaatattgaagaatcaagtctcg

SEQ ID NO: 11348 - DNA, 1022 bp, Arabidopsis thaliana
catataactcaaatgatttctacatacgctcagttttaagtcagcttaaaacaggagcaattcttcagggcttgatctcaagttttaatgtcatccaatatatgttattgcttatcttactaatgtttcatcaattgctcatcttgctagtgttccatcaagcttgggtttgacgtggtttaaacaatttctgcaatagcaataaagagcatagaatcatcgaccattctagtaaacagagaactatataagcttgatcaatcacaggcttacctttcttagagcatcaatcgaccgcactttctcatctctcttttcacaaaagcactctccacaccagctggagaaatccttgtgatgagttttgagctctctaaatacagaactgcaaggaacaacacgaaagacaagcttaataagaaaccaaataaaaatggaaagtcaattgcaatgtaaaaaaagatgcatggcagtctagaggcaagttttagatgctatttaccttctgcaccatagaagcatattgacccgatgcccgcatgttgtggctctggcaccatggcggtggcggccacggtgaagcacagcttgtccaggtatatgacaataatcatatgtttcctgctttcgcagaaaaaaaagagttgtttatattagctatcagccatatacagaatgttagaagacaagaaagcaacagaaaagagtggcatacatctgcctttgttgctgtgttcacatgtttttcacaccgtgtgcctctgaaaaatagctcccctcccacaaattgattacccaaacaaacattcagcgttacttctgaatcatccacatgaaagcctgaaaatttatataacatctgataattttcagccagaataacgtgagtattggaatatatctgcatttaggacaactagtcaggtcatgggaaattatacaggatatgtcaaagggtctcacctaaatcaacatccctatctttcccatattcaacaacaaaaccatggtgagagtcagag

SEQ ID NO: 11349 - DNA, 866 bp, Arabidopsis thaliana
ctgcatgagcagagaacgatatatagtgcacttgcatgttgagcggacgagtaagaccattcataagagtcacctcctttggttcattaattatcgtcttggccagtgtaccttccaccatataacctggtatgatacaagcattcttcttatctgaacaccagctgtcaaagagttgccttgagagaccgctttgaagacctccaggagtagccattaccacagatggaccgacatcattaaaatcatcgatgctgtttaatggagaaatgtgcttgaacacaaacggattagaatttgcaaactggttgcggattctgtcgttcatagataatatgtaggtttggtaaaccgccatacactttttggcgagtggtgatgcatagtagattgggatattgtgtagatctgggtggttcgcccagtattcatcaagaatcaagagaagttcctgagcacggcccagtgcaaaagccgggatcagcacacgtccaccctgagcaaccgttgaatggattacatcagtgaagcgtttctcacgaatatgacgagattgatgaagctggacaccagaagtggattcaatgatgcatatgtcaggggagaattgaggaagctcagctgctctcagatgtcggtctatctcacgggaatagtcgcctgtatagaggattcggacaccagctatatccaccataaacatggctgcacccaaaacatggcctgccgtgtaacaccagaactttatgccattcacttcaactgtttgatggaagtcaattacctatagaggaaatcaaatataaaccttaactcaacaatcacagttttgaagcagatttaatttcttttgaacttcatccaaa

SEQ ID NO: 11350 - DNA, 900 bp, Arabidopsis thaliana
  unsure (1)..(900): unsure at all n locations
gacgcatttatattttttaacaatcttttctgaaaatttgaaaagacaacattttgcatacaccaaacatatgtacatatgttgtgttcttgttggactcgatggtttatcaaccccaggtccaataggacaacacgaaattatcatacaaaccacaatgattgattgtccccaaacccttatttctgttaccaactccaccatattgtcacaacttttcccctgttatcaaaacttccaaatcaatgttctatgaattttagtttaaatttttaccaattgtttattgatttatacgaattcaatcaaatgtaaaacaccaaacagaatggatcagtaaatataaaactttgttatcttctccaaaatttacattttcatgtgtgtatagactatagtatggttacgatgaagttgatgatgttggtgaccaaggagtcatatccatgggataactcccaagcacccgcaagaacgatgtaaactcctgaacctcggcaagcgcgttctgagcacgcgcctccgccatcgaggcctcgaagtcaacataaaacatgtactcaaaatgcttcgccgtcccgacattggcatcatccacgaccctgatcggacggttgtgattcggcctcgattcgatcttcgtcaagctaatgtctctgaaggcgaaagcagagagcaccttgaaaagcacgctggttcctttctcgtgcgcaaagacaatgctagtcttgaacggtctatctgttctaggtatgattggctcacgcgccagcatcacgaagcgcgtcacgttactcacgtcgtcctgaatcccatcttccaaaatctccaaccccgtatatctcggcggcgcgtgcactcgcgatagacnctgtgtcgcggaggttgttagaggcgatg

SEQ ID NO: 11351 - DNA, 1276 bp, Arabidopsis thaliana
ttcaacttgtataagatcctctgttctctctcacaataaccccttgttatgtttgatttccctcattagcaaatttggtgtctctctgcccattaaaagaaaaatggctttgaatttagtattcagtaatcaatagtcttgacacttgagcaaagctaggcgcttggatcatatggaatgatacagatattctcagtgttccgtcttttgaccactagccagcgccttggcccctcacatgttgaaacctgcttagtctgcgacagctgcctcttaggcgggcatgaaagtgttgtttattacgtcatcgactagatcccaccatcggaattctgaccgaaacatgttcctgagaacgttatacaaagtactagtagtctagtactatatgatgacaatccctgccgatttctcacactccctcagcataatcataatctctttcagtgtttatggtcatgttttatgaccatgaaaacacaatccccgccgatttctcaaacatgttttcacctaactaattctcaaacagacccttaagagcaaggataaaggaataatagtgttttttttttttgtaattagaaaacatgtttgtgaatcttgaagttaaataaataaactaagactcctaaaatctctcctactgtatgtataattgttacaacataatatcaaaatacgcatacatatatacaagttgaaagctaaagagctagtgagaattgtctgagacccaacctcccgaaaccattccctcgtcgacaggcttcaggccaccacaggatctggctaccgattcaaacagcttctcaatctcaggcgcacatctgatgaaggcttgtttccagaagctatatcttgggttctttattagctcaatgaatgtgattagaagtccccatggatgtggcctgttcacaattagccgttccaacagcactctagttatttgctcctgtatgatctcctgtttcattcatcccaagaaaaagaaaaaaaaaatcagatttccatgctcactaatttttccacacaactcttgacaagcaaagcaaactcacctgatcagattcgaagaatagatagagcatgatgaaagaaaagtaatgagtgtggttgttggggtatcgaagctgattggcgattgcattaaggaacagataccgcccttccgtatcaagttccatacttaaatacttgaacatctgcaaggccacaacattttgagcctgtgtctcaccggcctgaagctgctgaatagcctgttatcgca

SEQ ID NO: 11352 - DNA, 1994 bp, Arabidopsis thaliana
ccacggagcgcggaacctactgttataaggtgatgccattcgggctgaaaaatgttgatgccacatatcatcgtctagtgaacacaatgttcaaggatctcctcggtaaaacaatggaggtttacatcatggacatgtttgtgaagtcagccgtctctacttcgcatctcgagcatcttcaggaatgtttaacttttttgaatgagttcggaatgaagctaaacactttgaagtgcaccttcgctgtcccttcgggagagtttctcaggtacattatcaccgagcatggaatcgaagcaaacccaatgcagataaatgtgttcatgtcgatgactttgcctcgcagtataagagaagttcagcgtctaacaggtcgagtttccgcactgaacaagttcatatccctatctattgacaagtgcctacctttctacacattactgcggaaatcgaaagcggggtttgtttgggttgaacactgtgaggaggcattaagcagctgaaaagctatctgtccaaaccaccaattcttgccaagcccgagtttggtgaacagctctttctatatatttctgtcttggaaagcgtagtgactggcgttctagtgcgagttgaacggagtgacaagcgtccaatcttttacgttagcaagtcattctccgacgcagaaaccagatatccaatgatggaaaagctagctctagttgttgtaacgtcagctctgaagctgaggccatattttcagtcgcacccgatcatcgtcttgacatcgttgccacttcggaccatcctccacagtccaactcagtccggaagatcagcaaactgggcaatcaagttaagtgaatttgacctagagtttcacgcgcgaacaagcttaaaatctcaacttctcgtagatttcctgatcgagctgcccttggctactcccgaacctgacattccggaccaacctaggattcttcatttggatggagcttcttctaaacaagggtccaatgtcatagtttgcttgaagtcttatactagagaaattcttgaacaatcattttggctcgctttcaaaggctaaaacaacgaagctaaatacgagtcacttttggtcggactttgcctcgccatcacggtaggagttcgtaatctgcaagctcattgtgattcactgcttgttgccaatcagtatttcggggactacaaagcgaaggatattcgcatggaagcatacccggattgagccctggaactgacaaagaaatttgaaaagttcgagctatctagagttcctcgtgtagagaattctgctgtcaatgcactagctgccttagcttcaacttccgacgtaaaaatgaccaggatgattcttgttgaaacaattagccaaccgagcgtacgtctgaaaacggtgagtttcgtcaccactcaggccatgcgcagacggctcgaagctcaaatggatgattctggaccttagcagtttgacaaaaatggggcgattcccgacataacgtagcttgaggcgaaccaagagagtccaaattgtctaattccaaatagccacgaagtccctgatgctggtcaaccacctcatgactggggggggggggcagactagagagagcctattcggaattacattctctctggagtaattcccgccgataaatgggaagctgaaaagttaaaagccactagtgcgcgtttatgtgtagcaaacgacgttttttacaaacgattaatttcggctccggatgttgtttgcatctttgtggagcatacccgtactatgatgaaagaaatccacgacggtacgtgcggaaatcactcaaagtaaaaaaaatatggttatttttggtaaacaatgattgcagactaggaagcatacgcacttaaatgtgagcagccctgaggcatgcaccattcatcttgcagcccgctgaacttcttagtttggtgccgcaccttacggtttatgaagtggccatggacatcacgga

SEQ ID NO: 11353 - DNA, 505 bp, Arabidopsis thaliana
tgcatctccttcttcttagcatccacgagcagagcaaggtgtgcacatttacttttaaattcttccagttctttttctaagctcttcacctgttttatcatccaatgtataccggtgttagagtccatgtaatacatagatgttttgtactgcggaatcaaacttaccgtctgttctgtttcattctctttctttatatattcctcgcacctgttgaagaataatatttgattcagatccccacagagatatgatatactgatacgtatttttctcttcttataaatatacctcatgaagagttgtaagttctcttggcgtatctcacccgctgacttgccatcgaggttgtttccagtatcctgccaagattttttcactttagatcgacttgtgaataaaactattatcatccactgaattcacttacggcagctgtaggttgtgggttgagctgcacgggttgaaagttacttcttaaaccagtggaatttctcaaatgtgg

SEQ ID NO: 11354 - DNA, 523 bp, Arabidopsis thaliana
gataagtcgaaaaggacagtaatacctgatcaaccgcctactgtcaatacatacaatccttcgcctttgccttctgatagaatcagtcatggtggtcctataatacgtgaaatcaatcttagtaacgccacttcaagccgaacagctgctgttgccgcgccacatttgagaaattacacaggtttaagaaataacttccaacccgtgcagctcaacccacaaccacctgcagctggcgtaagtgaattcagtcaatgatatagttttattcacaagtttgatctaaagtcgatgattttttttttccgcaggatactggaaacaacctcgttggcaagttagcggctgagatacgcgaagagaacttacaactcttcatgaggtatatttacaacaagagaaaaacacatttcagtatcatatctctcttggggatctgaattaaatattattcttcaacaggtgcgaggaatatgtaaagaaagagaatgaagtagaacagacggtaagtttgatccgcagt

SEQ ID NO: 11355 - DNA, 579 bp, Arabidopsis thaliana
tgtcttagtagacttgcatgttcttgtaacttctatttgtttcagtttgttgatgactgctttgattttgtaggtcaaaatgggagtatactcgagagcggttgcgttttcggtctttgtgtcgtttctgctgtttttcactgcttattctaagagaaatgatggaacattcagagttggcctgaaaaaactgaagttggatcctaacaaccgactcgcaacacgctttggttccaagcaagaagaggccttgagatcttctttgcgttcgtacaacaacaatcttggtggtgattctggagatgctgatattgtcccgctcaagaattacttggatgctcagtactatggtgagattgctattggtactccaccgcagaagttcactgtcatttttgataccggaagctctaacctttgggtgccatcaggaaaatgttttttctcggtaagctttacaccatttgttagtttttagtttaagagataaaacttattgttttgttcccgttgttatctagctgtcttgttacttcatgctaagtacaagtcctcgcgatcaagcacatataagaagag

SEQ ID NO: 11356 - DNA, 551 bp, Arabidopsis thaliana
tgccacaaaacaagctgcttcaacctctcttctctccaaaaggtggaggactctatttgctctcagtcataatcttgactttgacgatcccatctccgggcgtcccgaagatatccgaagtaatatccgaagtagaggatgacattgaccacttgatatgtaaggccatgctacacagtctttctgagcttcacctacagataatatctacatcgtggcttagtttcccatcccaagtattcaccagcacaacactggttaagctgtcattggggaaaacccaacacatctatgagttttctcctgatacatctctcccagtactaaaggttctcctccttgattctatctggttttggaaatatccattagcaaatgtatttttcgctgcttgccctgcacttgaggacttaaccatacgttacaataattttagaggaagttcatacgttatatccagcaaaagcattaagaaactctcagttatcaatagcagtagttgttatgatggtcatcatagcgttattaccttgataccccaatgttgcgac

SEQ ID NO: 11357 - DNA, 838 bp, Arabidopsis thaliana columbia
tatcatgctattttaaacaaatacatataaactttataactaaagctaatgctattttctgacacaagatcattctctcaattcttttccatttcatagttagtttgtaatattaccctaaaagaaaaaagaaaagggcaaaaaccctaaaaattcaataaaacggtaatagcaatcaactccttaatctcttaatgatttataaaacgtaccgaaacaaaacttaattattataactagcccctatagttattttaaataaatatctgtctaataaatttgaccaaacccttaagatctaattttctctgtttgatttgtcctctcaacaatggcggcttcatcatcttcgtcttcctccgacgtctcctctgattcttcagactctcatcgtcgccgtaagatcgccgtcatcatcgtagaaacgatcgagacagagactcgctcaaagtacggaaaaagagccgatgcacctcgaaaccacgtcgtcgactacgttagatgggcgagcctcgttggacagcatggatccgcctaggctgtcccgagtgtgagcgaggtgtgagtgtcgcccatgggcatcgacaccttgcggctaggaactggaacgagacgggtagcaaagatttcgagtagcacttcatactaccgtgggttttttaaaccttcctagttttgttgatgttattccgagaattagcaaaccgtaacgaagatgttcttggcaaccatcttttgatgggagtccggctgttcgaaagccggccaagggtgatgaacgaaatgtgaacccttgtctcgcctaggttggatgggcgtgcttcgttggaaagcatgg

SEQ ID NO: 11358 - DNA, 511 bp, Arabidopsis thaliana
tcggactaggacattgctcttagcatatatattttgtaaatgttttaactattgaaaagagcggttacaagctctaagaatattttatggctactaattcaaaattgtacaaaatgtagatatccggatgatgtctatgatcgtatatggggttcatactttgagccggagtggaagaagatttccactacacttggagtgaacagttctagtggatttctgcctccactaaaggcactcatgactgccgcctctcctgccaatgctagtgcaccattggctattcccggagtactagatttcccaagtgataaactatacttgttcctccacttctctgagattcaagtcttaaaggccaacgaaactagagagttcgaaattttttggaataaaaagcttgtttacaatgcttatagtcctgtatatctacagaccaagactatacgcaacccatctccagttacttgtgaaagaggagaatgcatactagagatgatcaaactgagag

SEQ ID NO: 11359 - DNA, 605 bp, Arabidopsis thaliana
atctgacttgaatctgcttgcctgtgtggaatcgttgggactgaatgacgatcgccaattattgagaaggtctgttctattgattatcacaaatccttcaacgtaatcaaaagttttctccttcgaaatcagatattcttggtcccttgaaaatgcagaaaagtcagagtagagtaccctgatccatttaacctattaaaagttatttgactgtgtcaggaaagtggttcttagaatcatagcgtatattgtttgaactttgttcaagatagaactttaccatatgcggtgctggttcaagagagatccgtgcccgggtgattatgccaaactgtccaagcccgccaagaacactgaagaaaagttcagaattccgcttctcagaacaggttacgacttctcctttccctgattaaatattggaaatatattgcttatcagttgtttgtttttataacttttttcttggtgcaagttacaattgtgtgttgcatatttcacatttgtgcctatgcactcttgttttatagtcaaaaattatttaaagtcgtcagtgtttttgctcatgaagagatggatattctttacaggtgcatatttttttg

SEQ ID NO: 11360 - DNA, 637 bp, Arabidopsis thaliana
tagaggacaacggtctaatgggtctactgctgctcagaggttgataatgaagttgggaaggtagtctctaactgcatcaaaggatacttcactgaacctcaagctaacatctcacaggcacctaagaagattgttgacactcggtttcacatgtttgcgaaaattgattagatttctgtttttgatttgtagaagtaggtttgcggtgttaattgcttttattttttttatcacagcaacaatataactgggacaattcaattaacgaattggttaagaggcaatttacaagtaaggcaggaatccgcttgtgtgatattgttagcaagtggaaaaatatgtggaaggaaataggtgataaagcaatgcctatgtggatgaatccaacggtatggaagagcctcaaagttttttggcttgatccacagtctagaaataagagtggtaagtgttcaaaatctcacaacactagtgtggccggtcatggtctgagtagaaacaccttagatcaaaagacttatgctaaacgtgcattagaaagtttaagtactttatgcttttcacttgttttctcattttccgagtttcatgatgatgattagtatgttaactttcatgttaggctgagaagaatgga

SEQ ID NO: 11361 - DNA, 1280 bp, Arabidopsis thaliana
ccagtgtgctctaaaggttgctccggaattttaaccctgtctccatcctcactcatataaatagtcgagaaaccctaaatttctgccaaaacctcacagccacacaaagaagagaagaaatggcttgcaccgtagatttccggtgccttgacgaaggattcggcggcaaaacctacaaacgcaaacgcgaatctcaagaacaagccgccgccgaagcaatcgccgatgaagcttccatggacatcgatggtgctcctcctgccgcgaaacgtagcgccgtcgcttcctctgaaaatccagacaaacctattgctctagctgtcgagagacaacctacgacggtgtaatcgccgggaaagtctccggacggaactggaaacagccgcgaactcatagatcttcagggaggtttgtgaagaacaggaaaccagatctggaggagatgaagaggcaaagggagattaagaaagcgtataaggagagggtgaatgagctgaaggaagagattaggagtaataaggttgagaagaggaagaagaaggaagagagagagaagcggaagaaggagaatgttttgagaactggtactaagttgcagaagattacaaatcccaagactttgaagaaaatttctatgtctaagaagcagaggaagcagcttaagaaaattcctgacgagatgttgagtggtggtagcaagaagagtatcacgaattagtggttttttgttccttctctttaaaggcaagtgttttcagttttttgtatttcctcatgaggtttattcgatgttgtttagttaacaatctgcagctaagaactaaatgttatgaaagtttaatagtgagaaactgtgttttgcttcaacagataagaacccatcttttgtttgcagtttcaatttcactccattgagaaattggattttgattatcattgtgtaattgacttgaatctgtcgcacattagttatatgtagtgtgtccattgctatatctggctctgcttcttgataaggatcttggtgtttgactttgattaatggtttcatttcgatagctatgttctgatatgttctcaataaagtgacaaccatataaagggttgatcccatgagtttgttctccgttcctcttgtttgaaatgcggtgattttagctgttcttaggagtatttcaattgtagtcctatcctgtgaaagttctttgtaatgtcttgaattgtgattatgattgcgttgaatctatcacgccttaggtatatgtagttgttcattgcta

SEQ ID NO: 11362 - DNA, 685 bp, Arabidopsis thaliana
tctacttacttcatcacaactaccctcaagatagaggctcatggcttctcgcaatgcaaacaggaactcctgagagagacagacagagacagcagaagaagatgcaagtaacagacattagaaagttttggaggttgataaacgaacgatggcgggaaactcacaaacatgcagccttatttacatgaaactggatctcttcagaagactcctccaatcatggaatgaatttcatcaatactccataggtccatagggtttgcaccattgtcctgagtcgttacagcatcttcgttgaggaaatccagtgaagcgtcccattcagtgttgttgtaaggtgtctcgaaatccatagacttgagcttcttagctggattggcttcctcaaagaacagagctgagttgttgttgttgataaccgcagaagagatgtcgggagttatcggagcttgatcgctccaaccaaactccgaacaatcgaaagaattactaccctggtcagagctgcaatactgatacgcattacatccagcatcaacggagtttgtcatcccaaactggttgctgttgttgttgctcacttggtgtgtccctccatgatacacatattttcaaaggagatgttcgagttctgaaccaaagctggacttgggttagggttaggtttagcactggtttctgaaga

SEQ ID NO: 11363 - DNA, 798 bp, Arabidopsis thaliana
gcttggagttcacagtcctctcctcattcgacaacaagagcctgtcctcagataactgaaccggtgcaacgcatcccatctctttcaccacataacactcctattcaagagacatttcagaattctactcacactccttctccacctgaaggtcaagctcaatatcaaatgggtttggacttacaaaactagaccctaaacgtcctccaagaacacattggtaactcctttaattgtataatgtgtatttttcaattcaatgacatcattaagttactaaagtctgttgtaggtttgaggttgataatgaagttgggaaggtggtctctaactacatcaaatgatacttcactgaacctcacgctaacatctcacaggcacctaagaagattgttgacacttggtttcacatttttgcggtaattgattagatttctgtttttgatttgtagaagtaggtttgcggtattaattacttttatttccttgacacaacaacaatataattgggacaactcaattaacgaattggttaagaggcaatttacaattaaggcaggaatccgcttgtgtgatattgttcgcaagtggaaaagtaagtagaaggaaacaggtgataaagcaatgcgtatgtggatgaatcctgaggtatggaagggcctcaaagttttttggcttgatccatagtctgaaaataaagtggtaagtgtcaaaatctcgcacactagtgtggccggtcatggtccgagtagcacacctcaggtcaaaagacatacgctaaacgtgcattagaaagtg

SEQ ID NO: 11364 - DNA, 814 bp, Arabidopsis thaliana
caacagagctaactatcaccacacctcctattgtagccgattatgattggttttcacctgtcttgaatgacagatcgatcgatcactaaggagttgactctagatcgatcgatccgataatccttgtttcagaaactgcgacaccaaatactcatgattcgatagatccgacttctacttcttctgatgaaaacaatactccacccgaaccagttactcctcaggcagaacagcctcattctccgtcttctatttcttctccccatatcgttcacaataaaggttcagttcatagtcgacatttaaatgaggaccatgattcttcttctccgggacttcctgagctgttagggaaaggtcaccgtcccaagcatcctccggtttaccttaaagactacgttgctcataaagtacactcttctcctcacacttcttctcccggtctctccgattcaaatgtctcgccaacggtctctggtaaaaccctatctcagattatttaactcattctggtttttcagcaaatcacatagcatttatggcggccattcttgatagtaatgaacaaaaccattttaaagatgatgttctcatcaaagaatggtgtgatgcaatgcaaaaagagatagaggctcttgaagcaaaccacacgtgggatgttacagacttaccacacggcaagaaagcgataagtagcaaatgggtatacaagttaaagttcaattcggacggtacgctagaacgtcacaaagctcgtcttgtggtcatgggcaatcaccagaaggagggcatcgatttcaaagaaacctttgca

SEQ ID NO: 11365 - DNA, 621 bp, Arabidopsis thaliana columbia
tactctgcttaaggctttgtctggaaatttggaaaacaatcttaaggttttagatattttctcttttggatgctttttgctgcagatgtgtgaatcatgtctcctttttttctctctcttttattttccacagtgttaagggggaaatctcctacaatggacatggactgaacgaggttgttcctcagaaaacatcggcatatataagtcaacatgatctgcacattgcagagatgactacaagggagacaattgacttctcagctcgttgtcaaggtgtcggtagccgaacaggtaggtgtcttcataaaccaatggtctatctgaagcatttttttaaactatttttgtgacaaaaatatctctctgctgaaacagatattatgatggaggtcagtaaaagagaaaaggatggtggaatcattcctgacccagaaatagatgcttacatgaaggtatgcactcctgaagcttacgttgaaaactgatctttgaactatgtcaattagttataacgttttgtaatctcattgtgcaggcaatatcagtcaaaggacttaaaaggagtctgcaaacagacgtcattttgaaggtatagttctttctctggtacatttcaga

SEQ ID NO: 11366 - DNA, 581 bp, Arabidopsis thaliana columbia
ccatctctctaaacaagacttggcgtcacggttcaaaggtttgttcatacgctcagacacaagatgccattctctcggaccgaactgtctaacgtaagcacgtaacaatgcatcttcttcaccactccaacgttgtctctctttcatctcctactcctcctgacatcacttcttcccatctcaccatccttcttcatctgtaccaaattcaaaatcaacccgtttcataaatctctccaattcaaaactctaaaagatcgaaacaaatctacaagatctgtcgaattttcgaattagaaattacaaagtctgaaaaatttccgtttcaagaaatgaaaatgacaaaaactttgacaatgtttgaagcaaaacttggaataatttgttattatcacactatacaacctatattctggaaaccaaacaggggaaattaatgctgaccccaaaacactattaagcaaagacttattaagaagataagagagttaaaattattactataaaaccaaataaaaatgcttaccaaatgatattgacaagataaataacccaaactcaagaggacttccacacacaga

SEQ ID NO: 11367 - DNA, 1356 bp, Arabidopsis thaliana
gagatcataccttgaatagcaaggagaccttcccaccggtcaaaagggtgttcctttcgtcgctgggaagtaagtacactttactgaatctctagagaagcaaagattcatggagttagacagatgactgggtaaacttacaggaccaaagtcgcagcctgtgctaaacacttcgttggagatggaggtacattgagagggatgaacgcgaacaacacggttattaattcaaatggattgctggggattcacatgccagcttatcacgatgcggtaaacaagggcgttgcaacagttatggtatcctactcgtccataaacgggttgaaaatgcatgctaataagaaacttatcacgggtttcctcaagaacaaactcaagttcagggtaactataatcatagaaaattccagcttaagcaaagcatctagaagcagccatttcagtattgacatgagacagattttccatctctctgcagggcattgtcatctccgactatctacgtgttgctcagctcaacacacctctcggtgctaatcatccacactctgtgtatgctgctaccactgcgggactcgatatggtcagtctcaaaaatggttctcaatttcacagatatagaccgtgattcacatttcccaatgcagttcatgggctcatcaaacttgaccaaattcatcgacgagctaacgagtcaggtgaagcgaaaattcatcctgatgagcagaatcgacgatgctgtaaagagaatcttaagagtcaaattcacaatggggctctttgagaatcgcattgctgatcatagcttggccaagaagctcggtagtaaggtctgtaagataaaaaaacagttttaagatagatcccaacttaacattgaacaaactcaacaggaacacagggaactggcaagggaagcagtgaggaaatctctcgtgttgttgaagaatggtgaaaacgcagataagccgttgcttcctctgccaaagaaagccaataagatccttgtcgcaggaacacatgctgataacttgggataccaatgtggtggctggacaatcacatggcaaggccttaatggcaacaatctcaccattggtacacacacctttcctcactctattccaatgaatcatcatcatatagaagaacattagggtttctcagaacaagtgacatactctaagattcattttcataccactttttgtgtgttgtgatttcaatatgcaacactaatgaagaacatatatttaccagtctgaaattgaatgttgcaggaacaacgatcctcgccgcagtgaagaagacggtggatcgaagacgcaagttatctacaatcaaaacccgaca

SEQ ID NO: 11368 - DNA, 411 bp, Arabidopsis thaliana columbia
gagaaggcttgaagaaaggagcatggaccaccgaggaggacaagaaactcatctcttacatccacgaccacggcgagggaggctggcgcgacattccccaaaaagcaggtttatacaaatctatacatacactcatttatgtacttgttgtagaaaattgttctgataaacatattgtgtctgattagggttgaaacggtgtggaaagagttgtagactgcgatggaccaactaccttaaacctgagatcaaaagaggcgagtttagttcagaggaagagcagattatcatcatgcttcatgcttctcgtggcaacaagtacgttactatgtttctatgtgtgtgcgtggacactcgaatgtgaaatgaaattcatgaaaaagttttcatataatatttattatgtagaca

SEQ ID NO: 11369 - DNA, 495 bp, Arabidopsis thaliana columbia
ggtaacgagctcctgatgtgtttgcgagtatagctgcttttgttggttcagataaaggggaagtgggtctcaacagcgtcttgggtggtgcagtgtttgtgacttgtgttgttgttgggattgtttcactttgtgttgcggataaagaagttaagattgataagaaatgtttcatcagagacttgagtttcttccttttcacattggtggctttgatggtgattttgatggttggtaaggtgactgtgggtattgccattgcgtttgtctcgatctatgtgttttatgcttctctcgtggctgcgaatgagattttgaggaaacattccaggaggttgaagcgggattctattacgcctttgctcccaatgcaaggaagtgtgttctcctccccaagtgttgaagaggatattccgatgtacagcccgttgatggagcttgacaccggtgaaggtccacctcggctacatgattctctaccacagtggatgtggg

SEQ ID NO: 11370 - DNA, 418 bp, Arabidopsis thaliana columbia
agctagagtgatggaagtaaactaagccgtgaaaaatgtacaatctgcagcgtgatttaactgagtcaactgtcttgagaaacatgggtggagcgtgaggacactctctgctcgcttacaagagtgcgatacagggaatcgggaagcttcaggggattaattaccggtaggccgaagaaatgtgtccacttgtcacaaactaagaatgtgcctgatataggttaatgaagctcggttaacagaagatttgggtgataattgggaagtccttgctgaaccaatacaaactgtaaatttctcgagtttctaatcttctacatcaatcaagatatttgatgtagcgctaagccacagaagtattatggtagcacataagggtgatgaggagatacggtgtccctgagccgtatgagaagct

SEQ ID NO: 11371 - DNA, 881 bp, Arabidopsis thaliana
cataaggtgaatcaccacgggacggccagagaccacaaccaccacacatttcactgatccgcacacgtttcctattatgctcggaccaggatcacttatggtcaggttcgtgggtccccaaacatttcagcataagtggctccccgactaccacaatggcatagtcaaatttacccgacttcacaaagttcgcatcggggttttggctgtagacgacttgtgtggtaggagccactgtattcttcacagccgctaggattgttgtacctgtgtgtaattaaacaaaagtcaagattaaacatccgaattttgtaaggcaatgttctgtattagctcgcacactatggatggccaaaacctagcgattgctgtggttgcaaccaagacaaagaggttaaagagaactttatgagtaaacataccaacggtatggtcgttgccattaaggccttgccaggtgatggtccagccaccacattgatatcccaagttatcagcatgtgctcccgcgacaaggatcttccctgatttcttaggcagaggaagcagaggtttagcacctgtcttaccattcttgagccagcaccagagacttccccacggcttcacgagctagttccctatgttcctgttaaagtgttctattcagtttcattctgatgatttgctaacgattggtatgatggctaaacaaaagataaacatagcagaccttgctaccaagctggttggcaaagctgagatcagccagtggttcctcaaagagtcccattgtgaatttgacccttaagattctcttcagggcgtcatcgatcctgctaatcggaataagctttttctgtatctgactgctgatttcgtctatgaactcagtgtagttg

SEQ ID NO: 11372 - DNA, 1059 bp, Arabidopsis thaliana
gtaacgtccgccagtgtgctctaaagtggacccgctggatatcttaatccgctaccgtaaagtgcgccgtcatcgtgattttgacttgcgcaagtttgttgaaaaccacttctggctgccggagtctactccagcgagtatgtatcggacccgcaaaattccctgaaagagcatatcgaccagctgtggccggtgctaacccgcgaaccacaggatcacattccgtggtcttctctgctggcgctgccgcagtcatatattgtcccgggcggccgttttagcgaaacctactattgggattcctatttcaccatgctggggctggcggaaagtggtcgggaagatttgctgaaatgcatggccgataacttcgcctggatgatcgaaaactacggtcacatccccaacggcaaccgcacctattatttgagccgctcgcaaccaccggtttttgcgctgatggtggagttgtttgaagaagatggtgtacgcggtgcgcgccgctatctcgaccaccttaaaatggaatatgccttctggatggacggtgcagaatcgttaatccctaatcaggcctatcgccatgttgtgcggatgccggacggatcgctgctcaaccgttactgggacgatcgcgacacgccgcgtgacgaatcctggcttgaggacgttgaaaccgcgaaacattctggtcgcccgcccaacgaggtgtaccgcgatttacgcgcgggggcggcctccggttgggattactcttcccgttggctgcgtgatactggtcgtctggcgagcattcgtaccacccagttcatccccatcgatctgaatgccttcctgtttaaactggagagcgccatcgccaacatctcggcgctgaaaggcgagaaagagacagaagcactgttccgccagaaagccagtgcccgtcgcgatgcggtaaaccgttacctctgggatgatgaaaacggcatctaccgcgattacgactggcgacgcgaacaactggcgctgttttccgctgcccattgtgcactctatgtcggtatggcgaccatgaac

SEQ ID NO: 11373 - DNA, 557 bp, Arabidopsis thaliana columbia
gcctgctttgttatacattgtcccagccgtaattgggttcttggcttctcactgcatttggaacggtgacatcaaaccggtttgttttctagtccttctagatttcgatgtatctattgttgtaaacgcaattatgcaacccaaacagaagaaccttcctgttaccttctgtttgcttatcgtgtttttggttgtagattaagatgtaaaggattagtgagcttatggtcttcttcttcttctttgttttgttgctgttgcagttgttggcgtttgatgaatcaaagacagaggaagcaacgactgatgaatcaaagactagtgaggaggttaataaagctcatgatgaatgaggaaaaatcgagaaagaagggcagaggagaaatatatacgccataatgtgtcttaatatatggaacaagaaggaaaacaattttgtttccaaatgatcatcaatcagtcccttctaaccccttttttgtttttttagatttcaaactttcttttggccaagacttgtgtaagttactataagttacaacaaattttctttgact

SEQ ID NO: 11374 - DNA, 626 bp, Arabidopsis thaliana
atgaaggatcctacccttctcaaaaaaatcaggagtaaagcaggcagccaatgcgcttgtaaaagtcacatagttcactgattttccggaacttatcattgaacaaagaagtcctaacgcatctaagctcctcccatcgttgacaaaagaagccatcaaggagttccatgagatcaaatctttagtgggcatttgtttgaacactaaatttgcctctactgatcttccagcgcctgcatacattctcaaaagagtattgcacacacaaacaaccgaatcaaaccccattttaaccactaaaccatgaattcctctaccccatttttggtgatctacatgacccaaaactgataacagagtagacacagtggtggagttcacttcatcatgaaaacgacgcatcaaactgaaaatcctaaatgattcctcgatatgaccattttgtgcatatgccgcagcaatcgaattccatgaaattgtgtcacgttcagacatttgatcaaaaatataatttgcatagtctacatttcccatactacctaacatggatatgagcgaattctccactgccagcttactctccagtcccgatttgacaacctgtccgataatttgacgaccaaaga

SEQ ID NO: 11375 - DNA, 1089 bp, Arabidopsis thaliana
ctgggtctaggccttcagaaaaggaagaaaccttgtcccccctgatagcaatggtgctcctccgcaattgacattacagtttccaagaaaagaagggtttcttgtaagaagaagataattgtacagaattctcttgagttcaaccagtcaggcaagactccaggtaatatagctgggaaaactacgtgtctctctactgctactggacatgacgtgaaaacattattttcggaggactttgctgctacagattatatgaagttgctagagttggataacttggaagaagaaaattattaccagatggctagagaatcgcttctgtcccctgatcttcctcaggtagattttttgggttgtgagatcatgaatgaggacaaaaatcctgctagggctattgacttggctgccagtaatagcatgtatttacgtgagaccatactttctagtgaatctcctagtctcaacactcagaatatctcagtgacagttgaaatgccacccatgttgaaaccgttgcatgggcatcttcttaaacactttattgtgttttcaaatattgaagaccagaacagtatcatcataataattcatgctactaacaattgtctacagcgttgcccgtcagttactaaagaacagtgggcagtgccagcgattttgtcttctttgaaaatggaagaaaaccttttggcccagtaagatattctgctttctgatgcttcttcagtgtatagtggtgatatagatttcctttttcaactcaatcagtaaactagtgtctaggcgctaacaaatacccttttttcttttcagggaaagggcctgtgtgttcctctccttgttgctgcataacttctccatggttcacacaacaaaaactgggaatactctgaatgttgattctttctcctgcttggattctttctcaaagcatatacgtggtggtatgccccaaaataatttttcttttctttttctttttcttctcaaaactaatattttatctgcttttgattttatgttttaatttattgaacttgtaattttctggtctagttatggctgatactgaagctggagttatgc

SEQ ID NO: 11376 - DNA, 1121 bp, Arabidopsis thaliana columbia
ttgggttgtgtgccatgtgtgaatggatcctttatagtatatagtatactaaatactgctatgtagtgaaaataaacatggtgattgtttggctttaaacaaggtttcttgtaaataaatacatgacttcacatatgtaaaagttacaaatatgatatgattatgcgtgtttgaaaaaaaggttaaatctagagtcaaaaccgaccacaccaaatcatgagaatgtgataactaaactaaactattctcatgtcttcaaaagggaaagttgtcttctttagtatttggccccaaagacaacaactttggggaaatttcaaattggaaacgttttgttgggttaaaagaaaaattaaaggctacaactttattttattctccccactagttttgtgtccgagacagagagagagagagagagagagagagagagagagagataaagggtcgataaggtctttttccgtttccttgacctctctgggatttggatttcgatttggatttcgatttcctcatctcatcgatttgcttctcaatctctccaattcgattctcctctggaaatttcaatcctttttatattttccttggtgatttctaagataattaagatcgagaaaaggagaattttgagagagaaagcatccatccatcgatggccgctatgagcgacaaggaagctatggtggatccctattttggtcgaggctcttcagaaccctcgtcatcgtctcaccagtaagtcaattctcttgcaagtcctttaattccatgtttatttttatgatttgatctgattatggttatgtagtcgtcttctatagagttcgttattgacttgttgaattcttggtttctcgaattttgtgacttgtttagggttttggtctatttctttatgaattagggtttggctttcgtacttgatgattagatccatggctattgtttcagctgaattgagaagactcttatgttcagtttgtttaatatgttctgtatcatggtcaatggatgttaatgttccttatctctgttttttttcttggtatgctagttttgcgtatggagcttgatatacagaagttctttcaaagtccagagcagcgacaatatga

SEQ ID NO: 11377 - DNA, 630 bp, Arabidopsis thaliana
tgacagacaaccgaagtaccaccagactgagaacctgaagaactgtttgttgaagatatctgctgatggaaaccacgaccacgagtactaaatgagtttctgcctctgttagatttgcctttgccacgattgtaagcattgaagtaaccagaagcattagagtcatctgaagtggtgatgttgaaggcgacatgaggtgaaactgctgtctcttcaagataaccctgaagtcgatcgtcatagcctgtaagcttaggaataacatcctctagactaggaccaggcagagcatccatggagttttcaatagtggttttgataggctcatactctcgccctaacccattcaaagcagcaaaaatcttcatcttttctgttacaggacttcctacagaggctagttggtcacaaatagtcttaaggtccttaagatattcatccatagatttatcacgtttgctaacattttggaggcgtctttgcagctcaaataacctagaggaggaaaccctattaaagtggtttgctacagagatccatacctcatgagaagtgttgcagttgaccacaacactgagaatatcttctaagagagaaccaaggagccaggatttgacaactcgatctgtc

SEQ ID NO: 11378 - DNA, 517 bp, Arabidopsis thaliana
aatagccccctcaagcttgagtttcaaagatgttaagaactccaagcttgctattgttagttctaaagagcaccggataaagaggtttagtaaacatgtctgcaagctgattatctgatcgaacaaacatagtcttgagaatcccagcttcaatacattctcttaccttgtgacaatcacgctctagtgtttagttcgctcgtgaaacacaaaattgctagcaatgtgcaagactgcttcattatcacagtataagtaagccgatgctttgaaaggaagagctgtcaagagataaccaacccatttgagttccttagtagcaacagccattgcccgatactcagcttcagcagtactcattgaaacaacatcatgtttctttgatctccaagataccaatgaagaacctataaaaatggcaaaaccagtcacacttcttctactatctggacaagtcctccatcagcatatgaaaatcctccaaatcataatttgtatctgtccataaaacaacttt

SEQ ID NO: 11379 - DNA, 316 bp, Arabidopsis thaliana columbia
ggcttataccacgactcaacttggaatccctcgacaagagattttatttgccaccatttcgtggtgcagcagtcattctatttatgaccccattgtgtggacatctgtccgatcgggttggtcaacgcaacatgtttatgtttggcttatgcgtgttggcagtatttagctatccattctttagtatgctcaataccaaagaccctgtactggtgtggactgcgattgtattggcaattggtgtggtgtcccgattatgtatgcgccgcaagcacaattattcgcgcgtcagttccctgctgagattcgttatagc

SEQ ID NO: 11380 - DNA, 630 bp, Arabidopsis thaliana columbia
taaaacacttaataaaaccaagaaaccacaccatagctagaaacttcctcatctaaatcagagctaaaacacatgtgattaaaagtgtgagataatctttctagatgaagaaagttacccaatagctgttggaatcaacgacgcctggaaaaccagtgactgattgctgaccactgccggatccatacggcacatcgtgagaatgtaatcgaaatttagttttctcgtgcatcaacttgatcgcacttccataagtaatctgtcaatatcacagcaacgagaagatgatcaaacctaattcgaatttcaatacaaatcccccaaatctatgggaaattgaaacaaatcgacattcaccgaaaatcataagcaatgaaatcgaaaacgaacctcgacaccttctttaccagaagcagcggcggaggcagacgtgtaaccggaatcaggatcgagacttaggtaaaggaagatagcgagacagaagaatcctaaagccatcacgaatagcagaccgataaaccagttctgctgccaaaatgggtattccggctcggtttcttcgccggcagagctcgaacaggtgaggaagacggaggaggagatgatgaagatgatgatgatgatgataat

SEQ ID NO: 11381 - DNA, 761 bp, Arabidopsis thaliana
caagaagaaggagccttggtcttagtgtagtaccgaatgccgaaagccaagcctaagattagaagtggaacaaggaactgaaggagcttaataacaaaatccgagctcttatcctgagtagccacggctttcgtcgacgtaggaggcacaaacttagctttaaccggcacagtagctgtgtcaatatcacccacatagtactcatctagcatggctttcgcagtcgaactatgtcccacatcctcgaaatcatcggtcgcatctttccctgaataccaacaacacattcttgttaacataaacatgaactaacaaacagagaaagtgatctctatatgttacctgtagaagtcaagataacctcatcaccaccaggatgatcatccaagaactttgtcacatcataaacctatatataaccatcaaaatgaaacacacaaaaaatgtaaactttgtcatataagtccctaattccacacaatcagagacctagattaagtgggttatcaaaagttcatacatcagaacatacatgaactacatgaaccttactagctttaactacagatacaagatcacacagagacatcttaagcagcaccaactatcacattcaattataaagacgtaagtttttagcaatttctctgtgatttagacttagaaaagtaacattaatctagcaaatcagatcagatctatcccaaacttgttactacataactctagatttataaatccaagtcaacacaactcaagaa
